United States Patent Application Publication US 2008/0050393 A1 - sequence listing, part 2

SEQ ID NO: 2745 - DNA, 749 bp, Homo sapiens
  misc_feature (1)...(749): n = a,t,c or g
gtcgtaatatcatctgattctttagctgataaaaattatacagaagatctttcaaaattacagactctgtggtggaaaaaactgttgcctgaactttgtcagagaataaaatgtggtggagagaagtatcaactctacctgtcatcattaaaagaaacattgtcaattgttgctgtggaactagaactgaaggatttcatgaatgttctcccagaagatggtactgcaacatttttcttgccatatcttctctattgcagtcgaaagaaaccattgacttaaaggtatcatttgaaaaataccataatggcatttgagactgaatttctaaaaattgaatgccaaagtacaagtagaggagttttttattttatatannnnnnnnnnnnnnnnnnnnnnnnnnnnnnnnnnnnnnnnnnatgatacaaatgctttcaggctgcttaccttaccgtgtagtggtaactattcacttcttaatttatgacctcaatcaatttaattgtctagaatgtaaaaagtctttaagacataagaattcctcaaagaagccatacattttttaaggtggggattgacttttattccaaggaacaacatcagttcactgttgttggagacatgacaatcattttcatcccaagaacactttaaggaaacattttacaagtatgcttgaaagaatgtcactaactggtccagaattttatcttcttgatttttccagatttctctatgtttttgagaag

SEQ ID NO: 2746 - DNA, 2014 bp, Homo sapiens
atgtaagtgctctgcgatgttcatgaccgtgcagtccgaagtgtccacaaacgctaaggcaccgttcatactcctcaggcccgccaacaccacgaactgtccttgggggctccagaagatggtgttcgcctgctgcttgtcgaacatcttgatgagttcaatcttcccgttgtttttgacgtggtagaaagacacagatatccgcggagcctctccgtgcagcacagcaaacttacttccatttggttcccaggcaaaggctatgatggtttctttcatctcgaccacatccacaggtacctgtttctccctcattcggaaaatttcaaaatttgtgacaacaccctggggtgcctttcggaagtcctatctactttcacacacaagtagtctccgttcttctgccaatggagcttgcagtccaccacattgaacaggttcctcactcggatctcttgcctggtagggagctgcatcagggttaccctggctggaatatctttgtcttcaggcacccagaaggcgattatgttaccaccaggagaccaagaaaagtcttttatcccagagatcttcaaactcttcttgtccaaaagacccatagaaggagtttcatagatgctaagcgtatccagggtcattctggcaaagaatttgccatcatggctccacttaaaaataggccaatgggctgagctctcacagtgaaaacccctcttcttgtgccccgtaaggatgtcccagatgattatggcctgagggtcatcctgcgtgtccatcagggggctaaaggtcaccaggtacctttcacaaggtgagaagtcaataagctgaaccccttggtggctgaatctctgaatttgcttgaatttctctcccccccatagagcaatgcctctttgatgaaaggtagccaggtaggtgcccttaggagaccaacgcacatacgtctctgtccatctcgctctttcttcaattgagacagggtcttttacgtcattccagaatatggaagtgcggtctccactctcaaaaatcacactgtactgatctctgcattctgcctcttcaagccagtaacgtaagttccccaggtctttgaaaggctgtttctctggaatatcccactcgtcactgatcgtcatatacttgtcaaaatccgtaaagaggttgacccggaatgtgtgctgcttgtcaagcttgtagccgtcggcgttcttcacagcatccacagcgtgggcaggggacgcgtactccaggaaaatatacccttttgtcttcccatcctcttcaggataaaaatcatttgtgattttcccaaacttggaaaagatcttgtggatgacatttttgagtttctcaagtcggtcgggtcccacctgagggacattgtccactacaatcaccgaatcgattccatctgcttcctggggccgatctttgagtacatctcccagtaattcttcctcgctcacgtcgtccacgaagtcctcggggtcgctgaaggagggctcgtccgcgtcgccgttctccagcgcccggggttcggcctcggccgctctgccctcgtttcctcccgcgtcctcggacaccgcctgggcccggctgtcggagcctgcgtcccgagcctgctctcctggggcctcgccctgtgccgggacagggggctcagcatgcgacccgggcagctcctcggcggccggcggcgagggcgactcggacgggccggaggccgcctctgcctcggccgccggctcggtcctcacctcgggctccggcccggcctccgcgatccccacctcctcactggaggcctcggtccccgcggcctccggagcgccgggccccgcgggccgcagcagcccctcggctggcggcggctcggcggccggctgctgctggccgggctcggcgcgctcctcggccgcctcgggcaccgccacgttctccgcgtcctgcatgggcccaacgctgcctactcgcagggctccgcggccgccggccttcggtagca

SEQ ID NO: 2747 - DNA, 816 bp, Homo sapiens
tggtgcaaatgggtgacttagtgcattgattcagatttttaaaatttcttgatgtggtttgtaataatcaaatattgacaagaaccttaggtctcgaaagacttttataggtctagatgacgtttgccttaggggtaaagtaaaagaacaattggcaccttaagtttctatacccaaggttatctgtgaaatgagatctcctgatatttgattgctttctcagtatggagtcatatgttgataacagtactgaagatgcataagaaatgcccaagtcactcagaggacaactacccatattccagactctgagctgtttcctttttaaaaatcatatagacaattagctgtttgaagtgagtattaaatatttcagaagtgtgaatttcatgtatttgagctcctctagttgctgtcggtttttcttctgctgccaacctgtgactcacaaatgactaggatctcttgttctttaattttagggtcttgttccaggactcaaatcagtaacttggtgattacaaggtgctgaatgtgttggtaaccatatcgcaatacacctcaaggaaaaggttcagatttttatttttaaaatattttcatttttttcttgaattttatatccgtttgttcactcgtacatgcctagcctacagaaggggatatatattatgaaatggtcatttttctgaagagaatattttgcttgaaatgcaaaggactgaaagagatttgtaggttgttgattttgttacttcatactggaacttttaaaaagatttcatcaaataaagttttgttttctacttttaaaaa

SEQ ID NO: 2748 - DNA, 1272 bp, Homo sapiens
tttaacctttcataacagatattcaatacctttattatcaggagaaagaatgatcaatctataacattcccaaaagtacaactctaaaaatgtcagttttgttcatataggactccaaactttaatgatatacccatcatacagccaggaagcagaacaatccctcaagaaaaaaagcacaaatgccaagatgctctccaaccacaatttttttaaatctatgaaacaatttccttacaaattaagtagtttttatagtagtgacatttgtcattgatgtgatctgtttaatatgactgtagtaagaaggaagttgggcctgttactgttttcagaaattgaaaagagtaccatcattaagataaggaagagaaagatttgtatccatctttttgggacatgtaaggtgagagtgaagtgtcacagttggagaatttgtggatattgctggaagaattggaaatgctctctagtaagcgggtaattcctcttccccgaacgctgctgttttggccagaaatttttgccctagatgggtagtcaccaatgggtgtgtttgatctttgttcctcattagaagagttgaaatgagagaatcctgaactcccaacccttagcttctggtaacgccctgcatccaatacaaccattttgggtgtcacactattgctggcctcataatcttgtagtggtacatgagcctctgtgagctggattccaaagagagtggccagagaattactgatgcagtacgcaatcttcttgcaaacagctaaagcacagaagagaatatcattttcttcatgccacttgcaccttgtgttgctagaataatcccacatggccacatctaggaggcttcgaatccaagtcttagagggctccttgagaaatttttgttggtagatccccactacaaggtcctctacagtgagaagttgtagatcttgcctgatttctgatgcctttgccatatgcttcaaacaccagttgactctggttctatcatcagacttgcagtagataggtggccagttccctgggttgggatgaataaatctataaaggttttgtaacacagttgcttggttatgcccacgttcaaaatttgaaataggaatcttgtgactagaatcacttgcagcctgacaatgaaatcaaaatcctcgtggaatttcaccaggatttataaaactgtggaaatctgccataataccttcttggagagaatacttaacacagccaatttcacagggaggagcgctgttcaca

SEQ ID NO: 2749 - DNA, 795 bp, Homo sapiens
ccaagatgtcggaccacagggagaggctgaggaactcggcctgcgccgtgtctgaaggctgcaccctgctatctcaggctttaagggagaggtcttcgcccaggactttaccgccagtgaattccaattctgtgaattagcaccccacccccataccccttcttccacccccagactaaaggaagatacttactctctgcccctctccatttataccaaagaaatcataggtgaaaccccctaccctccccaacgttaaatgctcgagaggaatcttccacaaggcagggccatgcacgcaacctgcacacgcacttggagggcccaggtgtctctccaccagcccccatgcagtagggactggaagatatgtcatctgctggttgtgttatcactcccaccccctaccccagcccgtcttccggaatttctcaactaaatttcattattgggcaggaaggaggtcatgggttcatttcatttttgttttttgtgtttttaattaaaagaaaggttacctcagttttcactccttagacatggatgtagctacctttttttgtatgtcttttttttttttaagcaatcgtgttgaattaggagtatacttggtgtggaaagagtatgaatttgccatgtgatttgcaaatggggggaagctactgtgagcgtgtgtttttttaatttacactatagagtgatttttttttcccccaacgtcaagtttttaccttgcatgtactggagtatttatttcatctattaaaatgttatgtttctcaaaaaaaaaaaaaa

SEQ ID NO: 2750 - DNA, 1057 bp, Homo sapiens
  misc_feature (1)...(1057): n = a,t,c or g
ggagccagagtctagtggagacagagatagaaaccctgaaataggatccaggcaatataaacctacacgctgtaaccaagtcagagtgaggctgatgtgataacaaaagtctgaatacaaggtgggagacaattattctgactgaaagggaggcaagagttctgccataggcttgatgctgtgtgcccctggcttcctaactcatttgcaaatggaaaatactattccattgtaggaaccttctttttccatttgtctggggaaggagaaagaatggctgggctgaatgaatttatcccttggtcctcttccaacaaagctcagctatgaaagataaatccagctctccccacgccctctcgagtggagctggggagaaatcaaaagcccctctgccaataatgagaccaaagtttgcaagggcaggacgagcccgtgctaacagagaaagtgttgtttcctcaatttggttttagactgtcttgtcctatgggggagaaaagatctgcccttgggagaggtgccaactttatagatctattaataaaagaactggcaggcttacagttcttgccaatgaggaaacttgaatgagagaagccaggctcaaccttggccaacagactggagcccatcaccctaacttcaccccgcttctccttacccaaccatcaaaggctaggcagcacccacccagcagcttccacctggctgaagcctgcacctgcttcagaccaagggttagatggaaatttggcatgggaagagagggctcacctgtgggcaggatagactctatccaagaaggagaactgaaaaatgaaaacctatgagacaaggggtgatcctgaaggcaggcaggagaaagggctggagggagaggcactggggaatttttcctggtgaatactgaagttactagatgttttgtcttgcaaaacttcaagggaaaactcttcaaactctaatgtttgtctattctgtgttccaaactgttccttttgaaacggacccaccttttcagttaaagaaacttgcattggcctgnccatnctgg

SEQ ID NO: 2751 - DNA, 1292 bp, Homo sapiens
ctcatttcccacttcaatgcaatactgaaaactggctaaaaataccaaatcaatatactgctaatggtactttgaagagtatgcaaaactggaaggccagggaggaggcaaataatatgtctttccgatggtgtctcccaagtgttgggtgctttgggtttttataagttgtgaaaaggaagatgcacatttcttcattctccatggtgtgcatggaaatgtgtttgagtgtggatgtaaaagaaatcgagtaataaagaattagctggcttgtgaaatagtgcagtgttggatgcttcaagaggtataatcctattttattagcacaaacttgctagctaattagagtttatctttttagaaaggacaccgtataggttcgtaaaaaatatttacaggaagcaaaatagatctattactactttaccgactttaccccctttctttaatttgtataatttttgtactatatatcgatgtgtaaatgtttagagtcttcattatgaaaatatcaataaatatttcattagtttacatttaactctggtataaaatgaaacttttaaaaataagtgaaatgggatgatttcccagtgggaagtatgtcaacagtcttaagatcattgccagatttcataaaatatttaagtatttgaaaaagaaacaaaatgtcttcatactttagggaaacgaatacactgtataccttctgtacaaatgtttgtgttttcattgttacactttggggttttacttttgcaatgtgacccatgttgggcatttttatataatcaacaactaaatcttttgccaaatgcatgcttgccttttattttctaatatatgataataacgagcaaaactggttagattttccatgaaatggttctgaaaggtaagaggaaaacagactttggaggttgtttagttttgaatttctgacagagataaagtagtttaaaatctctcgtacactgataactcaagcttttcattttctcatacagttgtacagatttaactgggaccatcagttttaaactgttgtcaagctaactaataatcatctgctttaagacgcaagattctgaattaaactttatataggtatagatacatctgttgtttctttgtatttcaggaaaggtgatagtagttttatttgatactgataaatattgaattgattttttagttattttttatcattttttcaatggagtagtataggactgtgctttgtcctttttatgaatgaaaaaattagtataaagtaataaatgtcttatgtt

SEQ ID NO: 2752 - DNA, 3632 bp, Homo sapiens
ttttttttttttgcgactttccaacattttattcttatattggtacagctattttttacaacgcggtaatgcagtttagacacagccaaaccctgtctccggagtagttatcacacaagcatgacgcagaatgggatgagacaaacattcccaaagagagtttagttagtaacaacttcaagtccctgtgtctgcctacacttcaaaaagggatggtgcacgctcgcccatcattgaaaacttccgtgaaaaaaggcaccgtgaggacacgttgtacgggtatatacaaactgaaaactagaacaaaattacacatttttccttctgcagatttttgggttctttgggttttttttaatacacactttgtaaattgtaaaccttcacttgcaaaaaaatacaaatacactgaggcattttagacaaaatattttcttacttatacagatgcaatacttaaaatattctcttaagtgctctttctcaataaagattctcagatccgtgtctgcctgcagatacaaaatcgagcctttaacgcagttttatatttttaatatatctttgttaggtttatatatatttattttatatatatatatatttatatatttacaactctgccatatattccttcacctttggttaaaaaaattaaagccctctctttgacaacatactgaagtcttgtcttttaaaagaatgcacatttacatacaaaagaaacatctgttcccacaaaacatatacattcctcattttgcagactaaagtcaagtcagaacttttgcatactcccctgctttgacatataaaatgattttgctttttgctgacatggttcaccttacacataggagaagaagcaatatgattttcttaatgttttatggcagtgggggagggggagctgctgcggctcccagtcccccaggccccgacccccaccacccccaacccccagctatgatttgcactagtggatgaaagaggcactacatcatgggatgaacattgtaaagtgttaacagtatcctttgggtagattctgagaaggggctggagacgaaagcatcaacactccatgcttcagcaggctttggggagctccggaggcaggtcagtggctgacacgcggtattgcaccttggtgttggtgatggcgccatgcttctggcgcaagtgaagtcgcagctggcttttgtgacggaaatgcaggttacacttctcacaatggtaaggtttctctcctgtgtggattcgcaggtggctcttcagagtctgaaggtgccggaaacgggtgccacagatttcacagggatagggcttctcaccagtgtggataagcacatgggcacggaggtgggccacctgtacaaatctggctccgcaggtttcgcatttgtagggcttctctccagagtgaattcgagtgtgggttttcaggttggctggccggttgaactgggccccacagatgttgcaacgatagggtttctcaccggtatggacggtcttgtggctggcgaggttgcccttgtagcggaaggaggcctggcagcggtcacacttgtagggtttgtcactgtgggtctgcagcgtgtgcctcttgagtgaggcctcctcagagaagcggcagtcacactcattgcagaagaaggccccgttctcacagctagaatctgagtactcagactgggtctctcccatctcctcagcgaacgtggggcccagcggtgtggaggcacatctctgccatgctgtggggactgagagccgcaggacgtgcacttcggggggtgcatgtagagtggtgagtggctctcgctgctgctgcggggagagcccgtcatggacctgttaacgatgttattgagccggctggcttgtgggatggtggagtcctccccgctggcactcagcttggttggggactggaggtcaaggttctcaggctccatgggtggctggcaggcaggtggggccgtgtaggctcgtggggaaaggcggcccagctcagcctgctcaggcccccctggtttggcattctggttgaggctgttgagcacgatgaacttgtatttcttccagttgcaggctttggggtcagtggggctcttggctggaggggagccagaagcctggaggatgcaggcattcttactgctgcaggcctctgtgggcgagttgggctggcagtcagatttctgggggctctgtggactaaccagacccttccggttcaggggtgcattggggggctcgaaatgcagggcaatctcatcttccgaggagggtctctcttcttctttgctggccttgtcacaagggaagtagggggcatttcgggctgagggggcagcaggtttgaggccctcagccacactgtagtgcatatcacttcgtgcctcttctgggattgtttccttgggtgaatagatattgctgtggcacacattgggggacacctccaaagtcggccggctgtactcaccagggactggcctggcactatcacatgggagtgcccgctccttggggaaggggttggccacaggcatccggacatcccgaaactcctcatcggagaagaggaggctgctgacagggaggtggctgtacatggaataagaggctggcggtgtggacaggccactgtacaggctgggggcaaaggctctgctctcacacccaggggcgctcctcagtggcaggttgttctccaccacctcacgaccccgataggccatgatgtcttggggcatcagcatccggctgttgaggaactcttcacgaggaggcttgatggcagaaaccatctctgcttcactggccttaataaacttccggcaagtgtccacaacatgctccatctgcaggtacatagccgtggccatcacagccatgatgttgccctcccgcaaattgagccgagatgtgtacatgaagtccaggaggatgcagaatccctcagggttgatctcaggatctagattgatcacactaaggttgcatttcaactggtctgtaaagatgctatagaacaggccactgcaggccatgaggaccgttttatgggctctaaactgctcacggctcacaacaatgacaacatcagtcaagatgtctcgactccggagacgattaaggttgagaagaacatcactggcatggcgggtgaactggatacagctgtcagccggcgaggccattttgtcttcaccaatgccttgcttcacagtccaaaattttgctcaaaaccaaatgagcactctaaaatgagaggtttccttgagtctgtaaccaaacactctgacatttctctgtggtcccaagtgccagtcactcaatcccatcggctccaaggttagtgtgtgcatgtgagtgagtggggactggagggaaggaagtggggaagggagaagacagaaaaagacaaaagaacctatctcctcctctccccagcccaactcgagataggcaaagagagatagactaactcggtctttaccaaacttcaaggattttctcctttgcaaaagaaagctgaagacacatgggagtgggaggtttacttaaaaactttcctctcttccttcatggaagggatcctcaaacacttctggaatacc

SEQ ID NO: 2753 - DNA, 1022 bp, Homo sapiens
tttttttttactgggaaggctagttgtaaacataaacattctcactgaactactggccccccaaaacctaacctatctcacaatcaataatcatcttttgactataaaatcataaaaacttgtactctgtggctcttttgtctcgatgatttttcagagaaaaaaattagctgtgttaagtagtttcactgatttatccatcttgaatagctgccagttctggaacttcatacatcctcagaacgtcttcatagagcaaataattatgtaggcttctgggaagtggcagctgactaatataactgtcagaccgtaggacggttctgattttagactggaccgaaatttcccaaacgacaaaagaggggtccagggatggaacagtggcaatatgttgctgtagaatcccaagcgtttgaggcacgagcagagagcatcctttcaacagctggtgcaagtgtcttccaattagtaaactccaaagtgaagataagggtgtcaatgctgactgagtcaatccaagaattgcacagtagaatcagtgggtcaaatccagcaaccagaagatgtggcaaccactccttatattttggcttgtgctttaattgcatgatttacaaattcatatatatggttccatggtcccaatgagcaacctttcctcaaaaagtagcgaaatatcgaaaacttctcgtacttcaggcagtatgccaaatgaagttcatttatctgggctccatatttcaaaagaatgttcacaattccaaagaactcacagctccacctccttttggaaagccatgcacacaggagaactgaatccaaaaacaaggcacgcctgggcgtctgggctgtagaccattccggagtaatatttctaggcaatccttcatgtcccccaaacactgctgagtaaacagggacttactttgtttagcccagtgtcacaggcccggttagtaagtggtattaacaagtccaagatttttgtatggcccatttgtgcagctgcatgaataggt

SEQ ID NO: 2754 - DNA, 670 bp, Homo sapiens
  misc_feature (1)...(670): n = a,t,c or g
gttgagtttatctgaaaacctagaatcaatagaaagaaagtattcaagttaagataaaggattgtggagaccaaggttcttattatgtagatgaagcctctgggtagcaggcttcagacagaatagactgtaaatgtttcttatcagacttaaaaaggtgccagactcttaattctctcctggatcaggaaaaagacctggaaagggaacagcattctctacagaatgtagattttccctagaagagacagctttgcagggccatttcaaaatatgtcaaagaaatatattttggggtaaaatactttgatttctttcagggcctgctatctgtcatgtgatgctataccagagtcaggttgaaatttggtgtcttattgctacaaagaatctgttttgtcagtcttgggatctctgttttaatgttaatgctggtcagctgtgcctggaattccatagggagaagggcattaattgaggcaagttcgaccccacatttcccatttatgggctttgaactagttttttcaggtttaactttgggaatgcccttngcccaagaggcagggagtcccatttcagtttgggtnggggggcttagnatttattttttcggtttataccntgctttactgatgtttggcccacggngcaatttcatttcattttt

SEQ ID NO: 2755 - DNA, 719 bp, Homo sapiens
ggcatcaccttgtaactgttctgtcttgttctctcccagcaatttattttaaaacaagggctagcttcaagcatgactgttaatggctcctctgtgacaaaacacaagttggaccaaggagaaagccctttggagaaactggaccctagttcagtttagatctcaaatataggctgaaatctcttaccaaagtgcgttccagataaaaatgagacttagaagacagactggtctaatatgctcactggtcatcacattcagcttattcttacgtgccagtgaggccctaaggtctcagtgcatagcatacctgccactctggatgttttcctgggcttcatatctgtatggcaaggagggagctgtccttcagcagacaaagtcaagcagctttaagtacaaggcagcttgaaacctctctgatgaaagtgaaaaatgtgggtagcttatactttcaaactaatgccagtgactagagagaggtttcattcatgatgtgtatttccaatttggtcttcaattcaagagatgcttcataaaacacttatagccttaaaccattcaagggctaattaaaaaaatagttatgaaatcttagccacaaaaaataaatcaggtaaacattttaacctgtcgttaagtgttgtaacttcaaaaaacccaaaatggcttatttttaatgtgatttttctaaaaccattgaaaatttaatatttccc

SEQ ID NO: 2756 - DNA, 255 bp, Homo sapiens
caaatgactggatctttaactcctacctttctctcctctcttcctgtaatgttgttactgaaggcaggaagggagactccttggctaaagagcagagcaagagcctcaaagtggtctttgtgagccaccctggactactggttcagtagagggttgagtcaagcaatatttgaggacgggatataaacagtatttcttaaagttgtcaccaatttttcccccgatgaggccattccagacccaaattagtcataa

SEQ ID NO: 2757 - DNA, 1412 bp, Homo sapiens
tcctacttcttgctgcctcacggttgctgttgagacccaggagtctctgaaggcttccgcggctttggggccggttgtgagatgcctgtacccctgtctccactgtcactggagatgagaacatttctgatagtgaaatagaacagtatttgcgtacccctcaggaagttagggactttcagagagcccaggctgctagacaggctgccacgagtgtccctaaccctccctgatggatatccactgggagcacttcatcctgttctgacagcttgataacattcctgttataaccaaggatggaagtgtacaccagtccgtaggtattgcttttcttgtttgaaggaaccaagaggggctctgccattagttggaccctgggtcctggagtaaagtcaggagtgcagggatgactataggtaggagagattcccatcccttggtgtgggagagcaagttgcctatgtccatgttctgtgagatggctttcctcatagatggatgggaaaatgtcaggctctttgctgctggtttgaattggacacactgctgcggctcctcctgcaggcctgagggggcttcccctctgcttgtggagtggttggcattcccagcagtatcaaccctcagaggagcgggaactggggaattctggccctacgtgcattcacaggcaatgatgggtttgtgtgtatggtgtcatgagatcctctacctcataacaaaaggacagtgggtagactaaggcagtagctcaaagggctttgcaaaattttaatatattaaaacaagaggcatctgctagaaaacattctattgtataaaacccgagttcttaaaaacatgttttctttggcactttcattccctccctctcatctctgctttgctggtgaggctgatggcccccagtgaggccgcatggacagtaggcggggtgggagtacttggggagggtgcacctgggatgtggaagaataatacaaagcttttttttttcttctaatatgtctgtgcagcaagcataaataacaggacccattccaaggagtgtgtgtgggttttccccctcccctgtgtcctctgtcaccttggtgatgaggccagagtgatgtgaagactgggagggaaccctaggtcagaccttggtttcctgttgttcttcccaagacccagggttccctcggtttccatttggtcctgtagtgaaatgctggtggttggttttaggttggggaaaagacgggtgctggtgtttaaaaggagtaaaggcataggcccctcatgacctgcagggaccccagccactgcctctgggcttggcttgagctcctgggagtcgggaagctggtttgacattttgtaggtttctctctactgtggagctggagatcaaatgattgggatggttc

SEQ ID NO: 2758 - DNA, 740 bp, Homo sapiens
  misc_feature (1)...(740): n = a,t,c or g
gcgaaaaatggcggggtctcctgagttggtggtccttgaccctccatgggacaaggagctcgcggctggcacagagagccaggccttggtctccgccactccccgagaagactttcgggtgcgctgcacctcgaagcgggctgtgaccgaaatgctacaactgtgcggccgcttcgtgcaaaagctcggggacgctctgccggaggagattcgggagccccgctctgcgagatgcgcagtggacttttgaatcagctgtgcaagagaatatcagcattaatgggcaagcatggcaggaagcttcagataattgttttatggattctgacatcaaagtacttgaagatcagtttgatgaaatcatagtagatatagccacaaaacgtaagcagtatcccagaaagatcctggaatgtgtcatcaaaaccataaaagcaaaacaagaaattctgaagcagtaccaccctgttgtacatccactggacctaaaatatgaccctgatccagttctcaacgggaatgctttcaacttttccccattcaacatgatgttggctgtggatttgtcatatatggtttttattacttcgagcccctcatatggaaaatttgaaatgcagaggggaaacagtagcaaaggagatcagtgaagccatgaagtccttgcctgcattaattgaacaaggagannnnttttcccaagttctcaggatgcagcctgttatccacctccagaggat

SEQ ID NO: 2759 - DNA, 492 bp, Homo sapiens
ggattcatacagagaccggtacaatagaagacgagggcggagtcgcagttatagcaggagtcgaagtcgaagttggagtaaagagaggcttcgtgagagggacagagatagaagcaggactagaagcagaagcagaacacgaagcagggaaagggatctggtaaaacctaaatatgacctggatagaacagatccattagaaaataattatactccagtctcttcggtacctagtatttcatctgggccactaccctgtacctactttgagcagcactattacagtaattgctcctactcatcatggaaacaacactaccgaaagttggtctgaatttcatgaagaccaagtggaccataactcttaccgtaagaccacccatgccaaagaaacggtgtagagactatgatgaaaagggtttttgtatgagaggagacatgtgtccttttgatcatggaagtgatccagtagttgtagaagatgtgaatctt

SEQ ID NO: 2760 - DNA, 361 bp, Homo sapiens
ccagactggactgcagtggcgcgattacaggcctgaacaccatgtccagccaactttattactattaagcaggttcaaaataagtcagtaactttccctgcaagaaaccttaataaaatgagaggagcttcgatcatgttgtatcctatagggctcagtcttaatgatttgatgcaattactgtcagagggtttctgattattttggaagataaaaataaattttaaacctaaattgccaaattaaaggcatcatcttgtgaaaaattccataaaattgaatatgaacaggaatgatatcacacaaaagggaaataacactaactcaggggttctcacttggtgggtggtacttaaaaaga

SEQ ID NO: 2761 - DNA, 1147 bp, Homo sapiens
catcctgctcgttcccggcatgccgaacatacatggacctaccagggctcattcaccacgccgccctgcgaggaattgcattgtgtggctgctgctgaaggagcccatgaccgtgagctctgaccagatggccaagctgcggagcttcctctccagtgctggagaacgaagcccccagtgcctctttgtgaagcaacttggcgacctccacagcctaatcaataacagggtggtgagagcttccttcaaatgaggctgctggatcttgccctcttcaggaaaggaaacctaccattggagagcttggttccttgcctccttctggtgctccttactccaagtctatttcatttttccacactgagcaatgaatgtgagagatgtggtcaccaagatctaagttacttgttgaaagaaagttactttcgacaagatctaatatgaaagcatagatttcacatttgatctctgtaataatcatctttcctataaaagtagcatttttggtaaagttccaaaggaggaagaaacagagatgggacgagtaaggatattttaaatgtggctagctatgggccaccagtttttctgttatctaaaatttcacacaacttcattgtttttatttttatattatgagttgtccatcttaaagaaatatgagtaattctacatgtagtagaggtgtatgaagatcatataacaattaaacataagccagaaattaaaatgactatagacagcaagaattgagctaataatatgttttaactcttaacaccagcaagaagtcagtcatttattgaagttttagctactaagattacttggttttgattaccagtgaaaagaaaacacaatacaatcaggagttttcaaatttttgattcagtatttgaatttcttcttcataaatgtagttgaatttatcctagtatttttctttacctgaagtagggccatttatttttaatttcactacatttttctttgcatgattattaaaataaaaactgcctctgttgtgtttctcactggaggctggaatgaatgatcactagaacacaaaagagtgaatgatgacacttgaagtcaaagcagttgtactgatcaccagaaccaataaagacataaatggaaaacgttg

SEQ ID NO: 2762 - DNA, 1531 bp, Homo sapiens
  misc_feature (1)...(1531): n = a,t,c or g
tccgcggcgaaggtgaagagttgtcccagctcggcccgcgggggagccccgggagccgcacgtgtcctgggtcatgaaacttaatccacagcaagctcccttatatggtgattgtgttgttacagtgctgcttgctgaagaggacaaagctgaagatgatgtagtgttttacttggtatttttgggttccaccctccgtcactgtacaagtactcggaaggtcagttctgatacattggagaccattgctcctggtcatgattgttgtgaaacagtgaaggtgcagctctgtgcttccaaagagggccttcccgtgtttgtggtggctgaagaagactttcatttcgtccaggatgaagcgtatgatgcagctcaattcctagcaaccagtgctggaaatcagcaggctttgaactttacccgttttcttgaccagtcaggacccccatctggggatgtgaattcccttgataagaagttggtgctggcattcagcacctgaagctgccacgagtgaatgtattggacagatcagagtttcatatctgcccgcgagagacattatcattttgctgtgcgctggactgctgaggttgacgtggttcctgttgcagaagccaggtgcgtcgcggagctctcagtatccacaaccaggaaggggcgacgcctgtgagcttggccttggagcgaggctatcacaagctgcaccagcttctaaccgaggagaatgctggagaaccagactcctggagcagtttatcctatgaaataccgtatggagactgttctgtgaggcatcatcgagagttggacatctatacattaacctctgagtctgattcacatcatgaacacccatttcctggagacggttgcactggaccaatttttaaacttatgaacatccaacagcaactaatgaaaacaaacctcaagcagatggacagtcttatgcccttaatgatgacagcacaggatccttccagtgccccagagacagatggccagtttcttccctgtgcaccggagcccacggaccctcagcgactttcttcttctgaagagactgagagcactcagtgctgcccagggagccctgttgcacagactgaaagtccctgtgatttgtcaagcatagttgaggaggagaatacagaccgttcctgctgagtcttcacttgcatttagtaatgaagaaacctccactgaaaaaacagcagaaacggaaacttcacgaagttgtgaggagagtgctgatgctccagtagatcagaattctgtggtgattccagctgccatttgttctacaactggagacgataaactttgtgcagactctgcatgtcaacagaacacagtgacttctagtggcgatttggttgcaaaactgtgtgataacatagttagcaagtccgaaagcaccacagcaaggcaacccagctcacaagatccacccgatgcctcccactgtgaagacncacaggctcatacagtcacctctgaccctgtaagggatacccaggaacgtgcg

SEQ ID NO: 2763 - DNA, 464 bp, Homo sapiens
  misc_feature (1)...(464): n = a,t,c or g
ggcacgagaagaaatgttcaaaacctgttttaaaaaattaagctgtagaaaggcctgttgtaatacaaatatcacattaaacaagagtaaaactcactgaaaggtacttgtgtgataagtgttgaaaagttgggtttttgtggggtttttctggggaggctggaggcagggtcacactctgtnnnnnnnnnggantgcactggcntgatctntgctcactgcaacctatgtctnccaggcttacnnaanccnaccncttgnncctcnntatnntctnngactatanncacnnncnncnannctcngctaaangcnatnntccnngcctagaactnggntacccatgntacnnaggntnactttnnacttctggacgatctatgatccatntggctcagctgnccaatatctgggnttaccatnctttgnnccaacctactntcgtttnnnnttttntnaaacta

SEQ ID NO: 2764 - DNA, 1987 bp, Homo sapiens
agggccagctaaaggagctgtttattcctcaagtcatgctccccgatctccttcctctaccactctgtcaccaggagtttaattacaggcttgaggagaagaaaggaagaaaagatatcttgatgctttgaaaactgtgttggcagtgtggcatgactgtttaaagtagataaaaccttgtcattttaccccatccctgcatgactgtgaagctgggcgaggaaggaggaagaagggcaagttcagatgcaggctgggtggctgggacaggttggctaagggactactctggagggctcttctgcctggcattgcccacttcggcccagccacgtctttgcagcgaccagagtccctgcaaaggtgtggctggctgtggtcagggtgctactagcaccatcagcgcactcccgccattggctcagctcctctctgccagtccaactaagagtgctttgtcctgggtgggacataggggctgagagagatggggggagacataacacccaggaatgaaaatacagatttaagagaaggaaccagtaaagtaggagacagatgtgaaggaaatggaaatgaggcaagaggacattggaagagagaagtttgctgtcccaggagccaggtctggagcatcagtgtgagggagttcaggtaggctgggcctgtgcctctaggtagggacaagggaggctgggtagccagggctggtgcttaaaacccctgaggccatgagctcattggctgcctttgtagcatcctgtcttcttctgtgctgcctggtttgatctcatctcacctggattcaaagggtaaggtgggcatgggtcttgggcctgacacccaccaaggatgacctgtggactgccatcggatgctgaacagggagatgaaaggaggtcctcttaccatacccctctgccaaccccccagtaggccactgtttcttgactttgttttccagaatattccagaaatccaaaggggctgttgctgaacagtctgcaggaccagtgacagcacctacctgtttgttcccaaggcatacaaaggaggcctcaacgctcatgcttctctaatcaagccctaccaagacagacagaaagacagacagaaaaaaggaaggggtagaggagaaggttgaagctgtggagctagactctgcttcacttcctgaagcttcaacttcatgtcgaagattcactgggacccaattcctgcattgttaatatttgtgaggaaaagtgaaacaagtgatctggttttagcccagatgatgaaagtggatatggcacattttcacacacgtgagataattacagcttgccccacaacactgggtgttggagaaagggagagatagtcataagtggaagaaaaagccaagcatagtgagtgggaaagagagtgagagcctgtgcaggctgctgacgagccccaggcagcccacaagtttctcgtggggagatggagggcagagcccagggtaggggacagagctgctggggcctttccttgcctgggaatctgtcccaggaagagcttccccactcccatcccccaaattggaaaaaccgtacattcaagcctgtttggccctgaaattcttaagaatctggttaagaattaactcactaatgtcaaaagtcaaaacctcctaggggttgtcctgggagtcaggttcacgggtacagaagatgaatctcagatgtcactcaacctgagccgtcattctctgtggcagggctgcccctggggtttctcttactcaatccctggagtgtaagcatttggattgtgtcacagattacctttttaccttttctttctttttttttctttttttcaatatcagtgcccacaccttactgagtattgagttttagacgtttcgcttgatgtgcttgaccaagagacttcttttgtatccttttcttgtcctatgatgtaaataaaagcctcgatttataaaaaaaaaaaaaaaaaa

SEQ ID NO: 2765 - DNA, 581 bp, Homo sapiens
  misc_feature (1)...(581): n = a,t,c or g
gtgcctatatttttctagccaattcatataccttgagtatcactcaagggcaaaattatttctaacaaatcatttactaattagcaaatgcttaagtgtagatttagaaagctaaagctatacagtggctgccatctatagtttggacttgtgattaactacattgaaatgctaactctgtaccctagagtatgaattcctgattagagtccttcaggtgctaactaatttatgtatttcatgtttgataatattattacttgagctttgtgggagagcagtcttttcctcccctgagatatagctagaagttacctcctttgtgaagccttcctaggatactccaaggcagacacggtccttcctttctcccttgcccagcactttgaggttgactctgtgggagcactgatccctctgtgttataaattgtctatttacacgtcagctaccacctttaacacangaggttcctcaacaggcagggacangttccnttttttgatccccgtgttngggaacagtgnccagtacnagtaggggggtttattaaaattgnttccnaaggnaatgggggnttg

SEQ ID NO: 2766 - DNA, 808 bp, Homo sapiens
gtagaatacttaaacttttaaagaacattaatacacaaaattcaggaagttcccttaaaaggactttatttttttctgaactttcccatgacgaatgtctgactgcaaagttcttttctataacatggatttcttcaacaggaaagattcagtacatgacagtagttttcaaatacagtcttccatcttgtattgtcctttcagcatctgttctgccgccactgcggtcagcctctatctctggggtcagagagtcatttaagaccctgagactatctgttgaagctgcctgttttagcgtctgttctgcttgttcacgccgtttcgtctcaaactcaagtgcttcctgcaattttctctttgccttcttctccttctttagcctcttttgaactatggctctattcttttgttccatagccaactgcttctcaagtgtttcccttagttctctttcccttaaaaaaatccatcttcagctcagttttttccagttggacctgtttctcttgagctctggcattatctatggcaactttcaacagcccctgtatgttagtcagaagagtctcgatggaagacagtccatcaggaaacagaaaaggagatggaaaacctggaggcagtggttgtccatgcccagttagagagagtttgtcaaggctgtctcttgcggttggtgtagaaagcggggtctcatctttttcaatatgcatcctttttgactcatgtcccatgtcatgaccggccaaatctccctctttgggcccaggaagtacatttggtgataagcccatcagcatctggc

SEQ ID NO: 2767 - DNA, 372 bp, Homo sapiens
ggattacttcattagctatggtattgagcatgcccagtgtgttccaccatcggagttctcagagcccagcttcatcacagagtcctatcagacgctccatcccatcagctcggaagagctcctctccctcaagtatgagaatgactacccctcggtcattctccgagaccctctccagacagacaccttgcagaatgactactttgctatcaaacaagaagtcgtcaccccagacaacatgtgcatggggaggaccagtcgtggtaaactcgggggccaggactcttttgaaagcatagagagctacgatagttgtgatcgcctcacccagtcctggagcagccagtcatctttcaacagcctgcagcgtgt

SEQ ID NO: 2768 - DNA, 1355 bp, Homo sapiens
atcaaaaaaaaaaaaaaaataggtgaaaattccttataaatccaggattggctctgagagaactggctaagattcaggaagaaacaaaaaattcagaatcctacaaggttttgatgacaattagggccaaaattttaggaggagatgtaggatgcaggagaaaattaaagtgttttctttatatcagaggaggaaatagtagaggtcagtgaaggtctggggtagggaaacattcagactgtccattgcatggctgtggagtgagactgcccttagcctgggtcagccttcctgggccataaattggggcatccgtgatgctaggtaactgtgggaacaaaatgacagcttagagcagccatgggtgatgtttggtggtaaaaaacctacaggcgtttggggtcccatgattgttccagaccatgactcttcctggttgtgggtttgttacagagcaggagaagcagaggttatgacagttatgcagactttccccctcctttttctcttttctcttccccttgcttttccactgtttcttcctgctgccacctgggccttgaattcctgggctgtgaagacatgtagcagctgcagggtttaccacacgtgggagggcagcccagtactgtccctctgccttccccactttgagaatatggcagcccctttcattcctggcttggggtaggggagaccattgaagtagaagcctcaaagcagacttttccctttactgtgtgtactccaggacgaagaaggaagatcatgcttgatacttagattggttttcccaggggaagagggcggagcagagcaaagtcactgtgaaccctgggccaggccctggcctgggccagcctcctgagagcgtctcgtgttgcagacccttgcccacttcacccacctgcaccttctccccctctcacagtgtcactgctgctaatggtcaaagtcaaatgtgtggccacatgggatgggccaggtcctctcaggctactttctggatgtcattttttaaaatatggaaacatggcaggtgccttcccaaagaggcttggactggtatatccaacgagaaacaaataagctaaagaaagtttaaactcaagaagaaagatgttgacagtctatgtaacagctggaaagtttataggcacccaccgtttgggacaacccagatgattatgaacatgtgatatctactatttaaaagaaatgttctcaccttgggttgattgtggtataccatgtgttatgaaaattgttgagctgaagctttgaatcgatttagttgagtctgactcacttgctttggttcctgtgtattttactacccctcttgtcagtgacct

SEQ ID NO: 2769 - DNA, 278 bp, Homo sapiens
gagccactgtgcctgtctgtactggcttcttaaaacaaaacaaatcaaaataaagcaaacaggtatgagtaaagtgataaagctatttcctttgtgagacttgtataaccagtttttatttgcgtatatatttactgtgtatagcttttcattgtatagtttttattaaaataggattctgggcatgttaaaataaataggacatatactgaggaaacccccatacatctactggaaaacagtttcaaaaagacccatggcttaatgggtgcaaatgg

SEQ ID NO: 2770 - DNA, 527 bp, Homo sapiens
  misc_feature (1)...(527): n = a,t,c or g
ggggacaacaaattcctcccctgtttagttgagggggcccgaataattgtcaagaataatctaaatgaaggaatcttaagtggaagcggtgcacataggatattcattctccctatgggcagatactcaggtatctccagcaagatccatagttatacagctcactttgttttagaacagtggtcataatctactaatacctctgttcctatttgaggcccaattgaggatttccccaaagattcctgataaggattaaggtgtatccttttcagagactgtctccctatctctccacctctggaaggacttgcaggaaaggatttctgtttttgagtactcccaaacacaccttcatgcaattacttgtggcgtgtggattacttgttaaccaaaaatggcatctgttcctacccagccacatacaaaccatagtcaaagggagggcagcgtgaatagttgggagttctttgaatgttgctgtctgaagatcattaagaaggtgacatcgtttctccantgttttt

SEQ ID NO: 2771 - DNA, 360 bp, Homo sapiens
  misc_feature (1)...(360): n = a,t,c or g
ggcacgagcacatttctttggtcaggaaatatttgtactggtagtatagtttgctgcatgtgggtttcagttgtaatatctaaaatattcccacagattgaaaacacatttatattctcccttgttaaagttaacttccagtaggaggaatgcataacattttatatagtgggaaatataatgaggaaaatggttctttgagcaaaaaaagaaacttagagaaaaaaaacctagtttgatgttttcaaaattatttagtcaatggacctctaatacacacagcagaagagagganagctgatgtgnggnggnntagnnnccctgctncanganctaccatttaccccgncnggacagact

SEQ ID NO: 2772 - DNA, 662 bp, Homo sapiens
gacatttgaatttcacgtatcttcattttcatttttatattttatttactattttgctccacaatttgagtcaaacatgtgatgagagttctaacttgatatgtttacttcagtcccaaacatagtcatctttggtcttttctcagatttggcctaaaactcgtagtttcattgatttttttttttaactaggcattcttctatgttctaggtcttcaagaaacctccatacccaagaaaaaatagaaagcaaccatgttctactatggtgccaaaaatagttgaacatcgacatcaaaaagattctttctgtctgcttattcacatattctggtttgaattaaaagtgatgaaattatcctaaatacagttggccctctgtatccatgggttccacatccacaaattcaaccaactgtgggatgggaaaagacttgaaaaagatgagagaaaataacaatatgacaataaaacataatacaaataaaaacaatacagtataacaacgattacatagcatttacattatattagggattgcacaagagaaggtatgtaggttatatgcaaatactggcaccattttacataagggacttgagaagccctgattttggtaaccacaggggtcctggaaccaatccctcacagacacagacggc

SEQ ID NO: 2773 - DNA, 1900 bp, Homo sapiens
ccgcttcggggaggaggacgctgaggaggcgccgagccgcgcagcgctgcgggggaggcgcccgcgccgacgcggggcccatggccaggaccaccagccagctgtatgacgccgtgcccatccagtccagcgtggtgttatgttcctgcccatccccatcaatggtgaggacccagactgagtccagcacgccccctggcattcctggtggcagcaggcagggccccgccatggacggcactgcagccgagcctcggcccggcgccggctccctgcagcatgcccagcctccgccgcagcctcggaagaagcggcctgaggacttcaagtttgggaaaatccttggggaaggctctttttccacggttgtcctggctcgagaactggcaacctccagagaatatgcgattaaaattctggagaagcgacatatcataaaagagaacaaggtcccctatgtaaccagagagcgggatgtcatgtcgcgcctggatcaccccttctttgttaagctttacttcacatttcaggacgacgagaagctgtatttcggccttagttatgccaaaaatggagaactacttaaatatattcgcaaaatcggttcattcgatgagacctgtacccgattttacacggctgagattgtgtctgctttagagtacttgcacggcaaggggcatcattcacagggaccttaaaccggaaaacattttgttaaatgaagatatgcacatccagatcacagattttggaacagcaaaagtcttatccccagagagcaaacaagccagggccaactcattcgtgggaacagcgcagtacgtttctccagagctgctcacggagaagtccgcctgtaagagttcagacctttgggctcttggatgcataatataccagcttgtggcaggactcccaccattccgagctggaaacgagtatcttatatttcagaagatcattaagttggaatatgactttccagaaaaattcttccctaaggcaagagacctcgtggagaaacttttggttttagatgccacaaagcggttaggctgtgaggaaatggaaggatacggacctcttaaagcacacccgttcttcgagtccgtcacgtgggagaacctgcaccagcagacgcctccgaagctcaccgcttacctgccggctatgtcggaagacgacgaggactgctatggcaattatgacaatctcctgagccagtttggctgcatgcaggtgtcttcgtcctcctcctcacactccctgtcagcctccgacacgggcctgccccagaggtcaggcagcaacatagagcagtacattcacgatctggactcgaactcctttgaactggacttacagttttccgaagatgagaagaggttgttgttggagaagccaggctggcgggaaacccttggcaccagtttgtagaaaataatttaatactaaagatgggcccagtggataagcggaagggtttatttgcaagacgacgacagctgttgctcacagaaggaccacatttatattatgtggatcctgtcaacaaagttctgaaaggtgaaattccttggtcacaagaacttcgaccagaggccaagaattttaaaactttctttgtccacacgcctaacaggacgtattatctgatggaccccagcgggaacgcacacaagtggtgcaggaagatccaggaggtttggaggcagcgataccagagccacccggacgccgctgtgcagtgacgtcgtgcggccgggctgcccttcgctgccaggacacctgccccaagtcgcttggccgccatccgggacgcttccagaccacctgccagccatcacaaggggaacgcagaggcggaaaccttgcagcatttttatttaaataaata

SEQ ID NO: 2774 - DNA, 898 bp, Homo sapiens
  misc_feature (1)...(898): n = a,t,c or g
aaagccaggaactttatacgggttccagagggactctctggcagattttgttgattactcattaaacagtcggaaacatgtatagacattatttatcttataaagcttacccacagcaaaacagacacaaaaatgaggtaaatactatgggcaagattacagcttcttggaaaaactaaatgtcaaaatatatttttggtaagcttttccttctaagcatgctttaaaaagctgaaaatagtaagtgctggaaggccacaaaacttaacatgtgtcttcccatccacggaagccatggcattatgctgcactgtaaaatatgcaacgcttcccaagaggcagctcaaacaccagcgtggccatctttgccacagcagagacaangngttcnctttcacctntttgaaangtgatatttgntncaaggacannnnnntttttttttttgtctacattactcatgcagtaacactttatacatccttccaacagccaaggaggctatgacaggtagcttctataccttcccattaagccacaataataaactattgttaaccctgtatagaaatgaatgaaattatctttctaagaagtctatacctacagttctctgagctaatcaatggaaaagatgatcaattctgactaacaaagagtatattgattccattttccttcctactcctcttcattcaaataatcatatataggcacttaaagctggaaaaatgtggcacccttctttaaatatccaatcagaatgccagtagaaacttctttcttctgatataagagtgccactgaatatattgctaagcttgaagcagaggctaaacggtctggtgggaatagttttcaggagagaggtgaacatcttctcattagtttgtgattg

SEQ ID NO: 2775 - DNA, 882 bp, Homo sapiens
ttttttttttttttggcgtcagatctgtaagtttatttgctcaatgtacgacagctacataatgactcacattcatgatattccatcactgaggaaactgctaaagatggtccgtgtgtgaaataattccttagagaaacacggagctggaaaaataatcactgattagaccttaaaaatagttcactgcataacatgacaaaaagcacaaaggctcattcagagaacatatttgttgttctccaacactgtaatagttataatttcaccatgacaaacaccagacattaagattaagctaacactggtgtttcttttgctcccccccttttaaaaacaaaatatataactgcatgtcactatagcaacatccaaaacagatcaatttgttacaatcactatttggtagagcaaactttacccccaaaaggaaaaattaaattaaaaaaaaaaaacctttaaaaaatttgaagacttaattttttttgtcataggaatacataacacctacagtataagttaatcaatttcaagctactgtatagaaatacaacactagcatgcacaatattgtatcaatagagtaatggaggagtaatcatttcactggagagacagtatcataggcaagtgcatttctttaaaaataaagaaaagaaaaaccattcaagctgcttaaatatcaagtctcccattccctctccgttttcagccctcaggtgtgatttttatcttgcattattctaaaaagcagccagagccaaagctgaaatttaaaggaaaaataggttttgtaattccagtaaatcatttccaaatgctacaaggaaaaacgcaacactgctcactggacatgaagataaattagggaaagccccacct

SEQ ID NO: 2776 - DNA, 951 bp, Homo sapiens
gcagatgagacgcctacccccaggaccacccaaactgttccttggctgaggctgtcatagcccaaaggtcaccgtgtccttggagccaaggccccagtgggaggaatgagaaccgcttttgtttggaggggcagtcacgaggcgcatgaggcagccgcccagccctcaccgccctccgtctgtctgtccgtctgtctggcccaggcctacatgaacttttactacaaaagcactgagggctggagcattggcaacgtgctcctgggacttcaccgggggcagctttcagccttcctggcagatgttcctccagtcctacaacaacgaccagtggacgctgatcttcggagacccaaccaagtttggactcggggtcttctccatcgtcttcgacgtcgtcttcttcatccagcacttctgtttgtacagaaagagaccggggtatgaccagctgaactagcacccagggacccagtgtacccagcctctggcctcgtgccctgctggggaaggcctcacccagcgaaggccggagaagcggttgggccctggcacacagggctggctcagtgtgcggacagaggagaccactctgctcctggggccagaggccattcaatagccctgccttcgtccgggcccctcctgggcctccccggccaggcacgtggcaccgtcgccttgacaccgccatctcttttctttaaggcttcaggcagcgcgcacaggctctggcagccgtctcaggcaggactgggcaccaagcttgcagccgaaggccttgccccaaactaccagcgtttctgcaagcagcttgaagggctgaccttgcagccgggtgagccaaggactttgctgccaccgctgcattcccagagatcaagcatcccggtgccgtggccagtgaactcagaggtgctggtgggacgggctaggactttggggttaggc

SEQ ID NO: 2777 - DNA, 424 bp, Homo sapiens
ggcacgagggctcctccatctttgcaaagaaggttgatttgcaggaattgagttattttaatcccagtttaattagcctaaaaacccgggctctggttttcagttgattatcttggctgtcacgatcctggataattgtattgcatggtaatttaagagtggaactcataaatatccttatgaagaacaaaaggtggagaaactaaccatgacctatgttctcacatcccacttgaggtccctcgcttgtggtcacgtgactgtgtgggcatcacataatttctctgagccttgatttttcatcagttatatggatagggtaccaccttccatgttgatcacagagggtggtggtgaggctcaaccaagtgcacacaaaataccttgttagccataaagagatcctgagatgtaaaagataccc

SEQ ID NO: 2778 - DNA, 300 bp, Homo sapiens
gtaaatggccacgctgtattgacagagcaggtagatgaaactcaagagaaaaggtgtggataaatgaaactagcccatgatgaacctgttttctccgtgaccacaatattaaccaggatgaatggcggtggcagtgggcctgcatcacaggttgcagcagatgttctcaatatttctattaaaatttccttatttccatatgcaagaggagccccagagctgcatccttatggtagctaccatgccgtgatgtaagctgcccattcactgggggagctttggcaattagaattggcttag

SEQ ID NO: 2779 - DNA, 649 bp, Homo sapiens
gataggaagttactagaacctaactgatgttgaccttagaggtaagattattcaggtatattagtggacctccagtccaatggtatagcaaattccagggatctcaggtgcatgcaattttactttctaaagtaaacacttagaaaatagattataacccagacgttttggattatactgagacaaatatgtaaataagttttagcaagtctgaacatgtaccagcgagatcttcaggttaactaagaaaagcccagaaacttcattatttactgtgctttgtatggcataactggtaacaaggcagtaaaatgatacatatttgaactggaccatagtaattaaatgatttatcaatatcatttgcaagataattgtcaggttgagttaatagtaagtggcagcttcccagaaatttgggttattttggcctaagctgtgccctgggattacctcttcatcttccttgacttttaagttcaaatttggaggttatgtgaagtgattgaaataaatctttcaggctgaggaagtcggtaatttcaagaatatagtgaaaacaaggttgtaatctaaacatgagaagcttaagtttaggaaatggttagaatataaattgctaaagccatcatgattttggccacagatg

SEQ ID NO: 2780 - DNA, 793 bp, Homo sapiens
ggatggactttgcaactaatcaagtttgggatttactgtcttctgaccaaccacagtgactgagatggggctgggaccagaagcccagtgggagtgaacagccgagggaaccagagtctggctgagcttgtggccagatatttaaactgggtccagccacacctgcaaaaccagggcaaggcagtaccgggaaactggctggagttgctgcggtttggggaagttgcacaccctttcatagatacctcccttaaccctcagtgcagattctgagaaaactccaaggcttctctgcctaacctagtataacccctgttccctactacatacatattaacttttccattcccccagtaattgacccaaagtccctgcctctagctgtgcccattgtgcaatgatcagaatcccttgtttcaatagtattttgacttctttaagaatactctgtatttggaagctgaaacctcacttggatcccattgttgggaacccaagtacggagccttacatagcccggaggagtttcaggagcaatgcccactttcccttccatccctccctctgggtactgggctcttcccatagtccattttccccttttatctcccattaatttctgtcttcctctctcaccttttccatgtctctaggcatcctccaggggttttaaaatcatctttaacccaacttatctgtgaagtaatggcaaaagaacatctccaaattaagtactccttttcttcaaaggagtttcatgggatgtacagctagtataaaataaaaatatggg

SEQ ID NO: 2781 - DNA, 504 bp, Homo sapiens
ttttttttttttccaaaacaattaagctatttttatttaacatgtaatagtcataaagcaactccatatatttagttttctgatatcctaatgtatttccacaaaccttttaagtctacaattttatatagttttccatcagggaggcaagatatatataatttctttttatatttaactaaaggttttaagagggcttagtctctaaatcagtaacaattagtcataacaccatacaaacacatttaaatattcaggaaagaggttgttaagattattgcttagtcttataaaatggtgaattttaaccaaattgatacctctgtaatcttatttatgtttcctataacatcatactggcttggcaagtaatgtaagttttgacataatttaaaaattcaagtagttgtaaacaaattctaatttgttaaacaattcatatattcccctttagttactatactacctcagaattaatccccccttaaaaaaggtaatcatccc

SEQ ID NO: 2782 - DNA, 431 bp, Homo sapiens
  misc_feature (1)...(431): n = a,t,c or g
ggcacgagggcaccggctgcattgttttcgggatcgaggggtgagggcgctatggcacccggctgcaaaactgagttacgcagcagggatgcaattcttttggcagccttgttgctttctggaaaatttgtttctttgcctttttcagctgctagaggccacccacattacttagcttacagccctgtttatcttcaaaaccaacaacatgtaactctttgactcttcttccttagtcacacctccctctgacagcagctaaaaaaggttttctgattttagggactaatgattagattggcccctcctggctatcaaggtagcagggattacactccaaggtangaggagtagtgtagagcagagtatctgctatctatatatatataacttttttttgnaagaaagttgccagccaggcgtggtggctc

SEQ ID NO: 2783 - DNA, 250 bp, Homo sapiens
tatgcttcaagatgtgggcaggtcagtgtcctgttcatgggagaaaatggcttaacagtctgattttctcaaatgattattgaagagttgttatcgtttttattataaaacacttctgacctgtcaattcaagagctgtttctaggatctttctctccggcaaggggttgttgcactagatttcccagagttccaagttctagttgtgccttttaatgaccctttaatattttaggacataattttttcc

SEQ ID NO: 2784 - DNA, 431 bp, Homo sapiens
gacacaggggctgagtgccccagtagagggtcagatagttctgcaaggaagccagggtagcccaaagcagaggcaatgaacctggagaccaagtagcagaggagctgaaagagagtttgacttgtacctagatttgaaaccagagtaagctaacaagaagacagaatgattcctaggttcagggctggcaaaatgcaaagtgaaattgatcgagtcatgtaagattttgtgtccaaactccactgggctgtggataattttaccctcaaggtcctccacactgtagtatggacacccaggtgtgtcccatagaggacataacaaaaatgtatcttaactgggaaaaaaagattaacaaaaagaatcgaagatgtgcctcagctgcatgaatatagaaggagaaagatccctctatgtcattccctgggtga

SEQ ID NO: 2785 - DNA, 835 bp, Homo sapiens
cacacatcacttgtaaatgtgaactgtgatactatgaagaggtggaaggctgaagaattcaaaatgttcgccccagaaaatattgtctgctttggtcttgctggttgtacgagcaaagagggtatcatcaaggcacagttcgcagaaatatttctttttaggggcaaggtccttggcttcaatgatccataaacgaagaacattttcagctcagcctgcaattgtccttattaggttgaactgtcctgcgaaggttttccatccacttgtctctctcagaagcagaattacagctgaagcatttacttccacttaagtaggtaacctcaaagcagaagtcttgtccaaggatgctactatgaagtgggtttcactgatacaggttcccctctaccaagatccagacattccactgtgctgcatgggctcagcaaggattcatgggaacgtgactcttttagtttaggcagcccacgagacctgtcatctgtactgcgaagggatggaagccgaaagctcgtgtttctgtcaagctttgactggcttttggtcctcttgatggagcctttcaggcgcttgctgaagaatcctggtactttgaagggtgaggtatttgcagtgtccatggagttgggtttctctgatgtactggtccctgagatactccgtctacgaggggacctttctgctggtacctctggggtctgcatcgtgtgaagtttctgggtgtgctaacatgatctttccggcacgccagtcagaaactcaaaacactttgtatactgtactcgcctgtgctcgctttcctgctctctccctttttgctctcatttcg

SEQ ID NO: 2786 - DNA, 1077 bp, Homo sapiens
ttttttttttacattttagatttattttattatttttaatgaactatgtttaacattttacaaatcttcaggttgttacagttttcagcagtaaatatagtagtaacagcaataaatacaccgaaatatgagatttctctgaaagaatacaaaaaatagaaacacctggaaacaagaaggcaaaatgtcaattctagatctgaaatagaaattaatacagctgaattcctttacaatgctcgtacatgggaaaatgagaaactcatgcgccttataaatgaatgtgtgactttgagcttcacctttttaggaagttttgagggacatcatttgacccacagatctctaaaaccctataatacgtattgataccagaggattcaaacacatagtggtctgaaaatgattgccaaagcaaagaagtgctttcattcctcaacatttgtaatctctgtggtatattatgtattataaaagggcataatccctatagaactgaaagggcataatccctatacaactgcataaagtcataaaaattgatttataaagtctcaagatcataatatgtattcaaaaatacatacagctgtgctttagtaaatgaatccatcagttagtcaagagatagttttgcctttaatatatatccaaagtatatacaaaggatcgacaaatgttaacaatttgtgaccaaaatcatctaggtttatatttgaaaaaaccttggttttcaatttaaaaatttaagaaagttgtgaatattgtttattatcacttgggttaagaaaaagtagatggtttcagctttttaacaggaaatttgtgaactactcacaaatgagaagtcacactcttttgatcattagaaaagataaattgcctataattaccaattgagaacagcatgtgcagtgtaaaaaataataaggttttattctgaaagcaaacaagtagttctagaaaagcccttgggatacatcatctcatttcccttacacaaaaatgaataaaataagtggcatacctgaatggtatacccttataccaatatgtgtatttcattaccaagctgag

SEQ ID NO: 2787 - DNA, 457 bp, Homo sapiens
gctctgccttctgtgcagacatggctgtgcagaacttcgtgggagatgcctgtcgcggagccacctgggtcgcccttcacaacggagggggcgtgggctggggtgaggtgatcaacgggggattcggcctcgtgctggacggtaccccggaggccgaggggagagccaggctgatgctcagctgggatgtctccaatggtgtggcccggcgctgctggtcagggaaccagaaggcctatgagatcatctgcagaccatgcaggagaacagcaccttggtggttgacactgcctcacaaggtggaggacgagcgggtgctccagcaggccctgcagctctgagggagccaggagtcgcggcccctgcctcccttcctccctggcgatcctcacctgcccagccatggcacacacccttcctgcacacccgcactacctgcacttctcgcacatcctcc

SEQ ID NO: 2788 - DNA, 1175 bp, Homo sapiens
atggctgcggccggtttgggccttctttgtaggagagtttcatccgccctgaaatcttcccgatcgttaataactcctcaggtccctgcctgcacagggagcagcatggacctgtcagcaactaaggaacaaaagtaatgaagatttacacaaactttggtatgtcttactgaaagaaagaaacatgcttctaaccctagagcaggaggccaagcggcagagattgccaatgccaagtccagagcggttagataaggtagtagattccatggatgcattagataaagttgtccaggaaagagaagatgccctaaggcttcttcagactggtcaagaaagagctagacctggtgcttggagaagagacatctttggaagaatcatctggcacaagttcaagcagtgggttataccttggcacctaaataaaagatacaataggaaacgattctttgccttgccttatgtggaccattttctcagactggaacgtgagaaacgagcccgcatcaaagcacggaaggaaaatttagagagaaagaaagcaaaaattcttttaaaaaagtttccacatcttgctgaagcccaaaagtcaagtcttgtctaagatgtctgaactattaaatttaccattttgtttttcttgaatagtctgtgtacaggagtaaatatgttaagtggtttataaagaaattctgtttttagtcaagtgactttactaatcagttgttctaagtgtgaatatggcatgctaattagctaatttggtagaagctaatttgcttctaaaaatcaggtataaagttcagatgagattcccactttataaattctgacatttaagcaggctttaaatgtcacctgctaccttagagtgtgaaggtgatggtaactgccacagcaaaggcaataccgtagtttttgaatttgaataatagttttacctctgttgttaataggctatgaagaggatgtgggtattgctgttaataaacggaggactttgattcaaaataatgagaaatacatttagtccttaaagtagtaatcacagtgcacaacagtccaaaatatatttctggaatggctaatttttatttaattctgtaagcctaaggtaaaaagcataggcagtaacttttactagtcaataaaaagcagttctaccaaaaaaa

SEQ ID NO: 2789 - DNA, 698 bp, Homo sapiens
  misc_feature (1)...(698): n = a,t,c or g
ggaaaataagggtctgagagtcatacaagctgggaaaagggagaggccagcctgggacccaggctcaggtagggaaggggaattggggcctgacaatatttgaacccctaatgttcgtactgatctcattggatcttccaggcaaccatgtaaggtcaatctcattatcctcactttatagcattaactgaggctcagagggatgaaatgactattcaaagacacaaacccaagacactcaggaaggtacaaaaatgtccatgcgctcctgaaatcatctgcaaaaatgttttatgtttgtacttgtatcccatttccccagggtaaggagcttaaaactttcaaaggattctcccaaggggtcagtgattctcaaagattaagagccactaatttaaaccaaggctattctgattccaaagcctgttctctgaggccccctgtgccagactctggttaagagaacgttctttaaagtcaaactcatataaaacccagatcgtactagctgtgagaccttatttcctcatctataaaatagggattcnnnnnnnnnnnnnnnnnnnnnnnnnnnnnnnnnnnnnnnnnnnnnnnnnnnnnnnnnnnnnnnnnnnnnnnnnnnnaggagggctgcagtgagctgtgaattnccactgcactccagcctgggtgntanaacganaccccgccnctttaaa

SEQ ID NO: 2790 - DNA, 523 bp, Homo sapiens
  misc_feature (1)...(523): n = a,t,c or g
tttgnnnatttgaanaccgctatgacnnnnnnnnnnnnnnnnnnnnnnnnnnnnnnnnnnnnnnnnnnnnnnnnnnnnnnnnnnggcacgagcaatggagtgggcacagtgggcagggatgggatcaggaggcagatggggaagaagccttgtgacttagaccctagctggcttttctatatctgtcctgcagtgtgtgacacagaatgggcttggggcagccacaaggctggaggcagctccatgtagaatggggaccttttctgattgcgttgggccattggtgacttcttctgggtttcaattaaagtcagaaaattgagggtgaggacagacaaatgaggtacgtgccacttctggcctctgtcccctgtggcattgttagttttcatgagtgggccagcctcttcggatatttgtgatttttaacctgattttgagttacctgaagccaggtcagtattatttattcagatattcagcagataattattgggtatctgccgtatgccaggcactgtct

SEQ ID NO: 2791 - DNA, 920 bp, Homo sapiens
  misc_feature (1)...(920): n = a,t,c or g
atttgtcaaaaatacgtttcccattttaaaaatatgtataattggttgcatagacatatgtcactttttgcagtgtcttcatcttgatcatagttttagacatcaactatgtctcactttccaactgccatagaaatttggtacatttgcaaattctggtggaatctagtgagctgaatgtattggtagatcaaatgatccaaaggacttgggtgttatccttcagtctgtgttgaaccattcagatattgggaatggtccttacacaagggaagtcttttgagaatatttgttctcttattttttgtttgtttgttgctggcaaaaaaaaaagtaactttaaaaactcagaaaagccactgaactgtattttgtgaccttatgattagttttatctttcaactgatttttattgttacttttactcaatatcaacngtacttcaatagatatttattagttatgttcaatctaatgacttaaaacagttgaaaaggaggaaaatcaactccagtccacacatacagtcatgttacattaagatgtcatgttgtatgtcacacagtttctagattgatttctcttgtgtataagttataacatcaaaaatgccaaagggtatataaaataagctacaataatattcaacagaacttaacctggaccttatgttgtaataatttattcatattagctgtagtcttctgtatttatattttcagtatttattatgaatgacatggaaattcgtgtatttattgtggctttttattgcagtgtgtatatatatataacaaataagcatttttaagtcttatccttaagtttcttttattagtggcacttgtattatgctgtactttttattacatattgtacaatatcttgtccatttgtttgcagcagagtaaaaccggttt

SEQ ID NO: 2792 - DNA, 466 bp, Homo sapiens
caatgcggtccagggaagctaaaatattgggcacccctgcctaggggaacttgtttcgtctacttggttagttgtcctaattgcattttacctgcagtccaaaggttattttagatgatagaactgcaagaaccccaaacccaaagaaagaatcgttgaagtggttgggagaggaggtcatttctgagatacatttccaggagaaatacaagtttgagagaaggagctggtagttactgtgtgcaagtgtttttctttgatggggaaggagtagttggcaaagggacaggaatctgtgtgtacatttcctgctcctgtttccttaaccaccatcctcagggcatctctggcaccttggggtcgggtaagtgctctctactgccctcgttttagctgcctttatctcgtctatatggcactttctgcgtgaaaagacatttgctttacagggatgaaactggacttg

SEQ ID NO: 2793 - DNA, 264 bp, Homo sapiens
caaaacaatctaacacaatatggcatatacatatatgtagaaattcaattaaattttgtatactgaccatgcattgagcaaccttgctaaattaacttagtaattctaatagtttgtggattcttctcattttctgtatccccaatcatcctcaagacataatgatggttttcttcttgccaacttttatacctttatttcattttctttataacagattcctttatgcaagtgcagtaggatgtattagctattatacacagg

SEQ ID NO: 2794 - DNA, 513 bp, Homo sapiens
  misc_feature (1)...(513): n = a,t,c or g
gcggcacgagcggcacgagggctggaatctctcagcctcacctgccagacaacaccccctccttcctcaccctgtctcctgcattctcctgaaaccttcatccacacaatgcctcccaacctcactggctactaccgctttgtctcgcagaagaacatggagaactacctgcaagccctaaacatcagcttggctgtgcggaagatcgcgctgctgctgaagccggacaaggagatcgaacaccagggcaaccacatgacgaccatagtaacctgggaggaggagcacctggtgtgtgtgcagaaaggggaggtccccaaccggggctggagacactggctggagggagagatgctgtatctggaactgactgcaagggatgcagtgtgcgagcaggtcttcaggaaggtcagatagccggagaggagccaagatcccttcagacagcaccagctacagacgctcttggtgtgcccccttnaagcccaaattgtgccaggtcaantgtccttt

SEQ ID NO: 2795 - DNA, 1075 bp, Homo sapiens
cccatgaggaggatgtgaccgggactgagtcaggagccctctggaagcatggagactgtggtgattgttgccataggtgtgctggccaccatcgttctggcttcgtttgcagccttggtgctggtttgcaggcagcgctactgccgggccgcgagacctgctgcagcgctatgattctaagcccattgtgggacctcattggtgccatggagacccagtctgagccctctgagttagaactggacgatgtcgttatcaccaacccccacattgaggccattctggagaatgaagactggatcgaagatgcctcgggtctcatgtcccactgcattgccatcttgaagatttgtcacactctgacagagaagcttgttgccatgacaatgggctctggggccaagatgaagacttcagccagtgtcagcgacatcattgtggtggccaagcggatcagccccagggtggatgatgttgtgaagtcgatgtaccctccgttggaccccaaactcctggacgcacggacgactgccctgctcctgtctgtcagtcacctggtgctggtgacaaggaatgcctgccatctgacgggaggcctggactggattgaccagtctctgtcggctgctgaggagcatttggaagtccttcgagaagcagccctagcttctgagccagataaaggcctcccaagccctgaaggcttcctgcaggagcagtctgcaatttagtgcctacaggccaacagctagccatgaaggcccctgccgccatccctggatggctcagcttagccttctactttttcctatagagttagttgttctccatggctggagagttcagctgtgtgtgcatagtaaagcaggagatccccgtcagtttatgcctcttttgcagttgcaaactgtggctggtgagtggcagtctaatactacagttaggggagatgccattcactctctgcaagaggagtattgaaaactggtggaactgtcagctttatttagctcacctagtgttttcaagaaaattgagccaccgaccaacaaaaaaaaaaaaaaaaaaaaaaaac

SEQ ID NO: 2796 - DNA, 1307 bp, Homo sapiens
aaaagtcatttaggagtgaccctgtgtcattgctaagttgacagacttacaaataaacatgggcaaggtgatcaccttgtctccttttacaagacagacctcactcggtaaaaatatacactgacgtattatgtgcacatcaacctcaataataaaacatacacgcgccatcacagtcctacacataatttatggtattcagaacatcactttataaactgttgccaaattaccacttaaacactaatatccaaatacagaatttagaaaattattttaaattttaactctaccatccccccgagctctcggctatgaatttagtctgggaagagggctccgtaataggccactgaggtcctctgtcccaccacatcatcctcccccgaaaactagctgcccgactgctctaccagacttgggctagaatttggcttcacggtggcaatgggaccacctgggccctacagtgtggcaaaatcaacttgcccacaaaccccatcccaggtgctgggatgctaacacactgaagctgaaagaccacacttggttttgccacagatcaagctgcatctgactagacagcctgttctctaccctatttcctgcagaagtctttttctttgtaatgcaacaagtgctacacagctcagatccaacgggacacggggaaagaggctgtagtgcacctagccctgctgagggagacccttgccttgccaaagcactttgctcacaaaggcagtttcaaagagtatagcccgaactcattcctggtaaaacaaaaggaaaacatttttgataaatgtacccaaaagtctcaaaagggctacgctggtcttctgaacggaaaccaaatgaggtctccccaggctcatgtcatgagtctcagggaaggtgtgtcctagaccgtggccttgggcctgcccaggccgaggctgccgtcactgcagatcctgcaggttgatagtgcttcctgggaactgggtggctccggtccagcagggcctccagatgaggggagcacctcctggaggacgtagacgggcaggtccacagtgaggaaggggaggaaggtggctggccgcgggccgagggcaggacaccttcgccggaggggtcatcctgggaaggcaacacagaaaggcctgtcacatgtctgtgagagtgcagcaaaggtcctcgtctcacctgagaagtctcctccagctgcaatgcgtggcagaaccagcccaccccctgtattccaagtgaggcccgaggacccagcaggaattgtttatgggggctgggtactacctgttccc

SEQ ID NO: 2797 - DNA, 819 bp, Homo sapiens
ggcaacatcagactcttcttgtggaaggccaagagcggaagctgcttgtcctgcagctgatggctgttctgtgcgagagaatgtctgagcagatattcacaaacgtcactcaggttggtggactttgtagcagcaacattgcagagagcctgtgcaagcctggcccatcaggcagagagcaccgtggaatcacagacgctgagcatgtccatggggctggtggctgtcatgctaggaggagctgttcagttgaagtcaagtgattttgctgttctgaagcagttgttgcctctgttggagaaggtatccaacacataccctgatccggtcatccaagaactcgctgttgatctccgcatcaccatctctacccatggagcctttgccactgaggccgtcagcatggctgcccaaagtacactgaacagaaaagatctggaagggaaaatagaagagcagcaacaaaccagtcatgaaagacccactgatgtagctcatagccaccttgaacaacaggcagagccatgagacagccccccagacaggcctgcagtcaaatgctccaatcattcctcaaggagtcaatgagcccagcactactacaagtcagaaatctggaagcgtaaccacagaacagctccaagaggttcttttgtcagcttatgaccctcaaattccaacacgggctgttgccctgcgtactctttcccactggatagagcagagagaagcaaaagcccttgagatgcaagagaaagcttcttaagatattcttgggaaaacttggaacatgaatgacacttttgtatatctatctgc

SEQ ID NO: 2798 - DNA, 910 bp, Homo sapiens
tttttgtctatttttaaccaaataagaataacactcaagactatgttctccatcccaacacatcacttaccacttgcactattcttaataggcctaaaatagtgagcatatataatcaaaataatacttcatacaacatatacttccatgcactcttcatgtaatcacatatgtgcatagatacacaatcgtattacataaaacacccttgaaaatatatgactttgaataaaataaagctaccatgttaatacatcattttttgtttcttcctaattaacaaaagggctctataatgattaggagagctgtaaggccattctttagtcattccaagtgtatatttgtatcacaccagttacttgtgttcattgacaccaaatattttcaagctttttgtgagaaagagattcttgccttgaggctctgcagtggcaaatggtaggggcaatagcgctcccttttcacctgaaatgccttcagctcaggccttgggagtgaggtgtgggagtagccaccagcctcccactgactaggcatgttaggaattagacaaggatggagagactggttttttccagccttggtttggaagcttgtctcaaaaaccattacaaaatcttaaccttcaaatacattctaaatcactttaatttagaagataggtgagcaacttgagtgatcccaaaccaaactaacagtgctggtttgtccgacacccaaagcccacttcacacatttataaggacagagatttggtaactcatttgggtattttgtcagttttaacccttaatatacaggtatcccagctttgggcacatgtatgtccattcactttcaggaaggggtgtcagtactttctttctgtgtggtgaaaacataagccatggtgaactgataatttttg

SEQ ID NO: 2799 - DNA, 1116 bp, Homo sapiens
gcgccctgtgagggacaagcgtttgccgtagcggttgaaaagaattggggtgcagtagttcgctccccagaagggaccccccagaaaatccggcagctgatagatgaggggattgccccggaagagggaggcgtggacgcgaaggacacgtctgccacatcccagtcagttaatggatcaccccaagcggaacaaccttcattggaatctacaagcaaagaagccttctttagcagagtggaaacattttcttctttgaaatgggcaggtaagccctttgagctgtctccactcgtctgtgcaaaatatggctgggtcacagtggaatgtgatatgctcaagtgctctagctgtcaagcttttctctgtgccagtttacaaccagcttttgactttgacagatataagcaacgatgtgctgagctgaagaaagccttgtgtactgcccatgagaagttctgtttctggccagacagcccatccccagaccgatttgggatgttgcccctggatgagcctgctattcttgttagtgaattcctagatcgttttcaaagcctttgtcacttggacctccagcttccttccctaaggccggaggacttgaaaactatgtgcttgacagaagacaagatcagtcttctcctacacttgcttgaagatgaacttgatcaccgaactgatgagagaaaaactacaatcaaattaggctcagacatccaagtccacgtcactgcctgtattctctctgtgtgtgggctgggcgtgtaggctgaaaagagccctggtcccattgtctctcgaactcggagctgggactcttccagtcctgttgaccgtcctgagccagaggtcggtagccccaccaccagaactcgcccagtgacccgaagcatgggaacaggagacacccctggcctggaggtaccatctagccctctgcggaaagccaagcgaggctcgcctctgctcctccagcagttcggacacatcttcccgaagcttctttgatcccacctctcagcatagagactggtgcccttgggtgaatatcacacttggcaaagaaagcagggagaatggtggaactgaaccagatgccagcgccccagcaga

SEQ ID NO: 2800 - DNA, 462 bp, Homo sapiens
  misc_feature (1)...(462): n = a,t,c or g
ctganactctgnnnnnnnnnnnnnnnnnnnnnnnnnnnnnnnnnnnnnnnnnnnnnnnnnnnnnnnnnnnnnnnnnggcacgagcagccgctgtcccggcagtctccagccgtcccgcccgcttgtggccaactggctccagtcactccccgaaatgccagtcgacttcactgggtactggaagatgttggtcaacgagaatttcgaggagtacctgcgcgccctcgacgtcaatgtggccttgcgcaaaatcgccaacttgctgaagccagacaaagagatcgtgcaggacggtgaccatatgatcatccgcacgctgagcacttttaggaactacatcatggacttccaggttgggaaggagtttgaggaggatctgacaggcatagatgaccgcaagtgcatgacaacagtgagctgggacggagacaagctccagtgtgtgcagaagggtgagaagga

SEQ ID NO: 2801 - DNA, 1402 bp, Homo sapiens
agaagatctggagtttgtctatgaaacggtgcagaatatttacagtgcaaagaaagagaacatagatgagtaaagtctagagaggacattgcacctttgctgctgctgctatcttccaagagaacgggactccggaagaagacgtctccacggagccctcgggacctgctgcaccaggaaagccactccaccagtagtgctggttgcctcctactaagtttaaataccgtgtgctcttccccagctgcaaagacaatgttgctctccgcctacactagtgaattaatctgaaaggcactgtgtcagtggcatggcttgtatgcttgtcctgtggtgacagtttgtgacattctgtcttcatgaggtctcacaagtcgacgctcctgtaaatcattctttgtattcactccattcccctgtctgtctgcatttgtctcagaacatttcccttggctggacagatggggttatgcatttgcaataatttccttctgatttctctgtggaacgtgttcggtcccgagtgaggactgtgtgtctttttaccctgaagttagttgcatattcagaggtaaagttgtgtgctatcttggcagcatcttagagatggagacattaacaagctaatggtaattagaatcatttgaatttatttttttctaatatgtgaaacacagatttcaagtgttttatcttttttttttaaatttaaatgggaatataacacagttttcccttccatattcctctcttgagtttatgcacatctctataaatcattagttttctattttattacataaaattcttttagaaaatgcaaatagtgaactttgtgaatggatttttccatactcatctacaattcctccattttaaatgactacttttattttttaatttaaaaaatctacttcagtatcatgagtaggtcttacatcagtgatgggttctttttgtagtgagacatacaaatctgatgttaatgtttgctcttagaagtcatactccatggtcttcaaagaccaaaaaatgaggttttgcttttgtaatcaggaaaaaaaaaaattaatgaaccttaaaaaaaaaaaaaaaggttttgaagggaaaaaaagtggtttcacacctcttgttattccttagagtcacttcaaggcctgtttgaatgtggcaggttagaaagagagagaatgtctttcatttgaagagtgttggacttgtgtgaaaggagatgtgcgtgttggaatctgcttttccaagccgccagggtcctgacggcagcaggacgaagcctgttgtggcgtcttctgggaaagcctgaccgtgtgttcggacggcactggctcctttacgaagttctcagtaactgagcccagagtaactgcacgccttttgtgcagct

SEQ ID NO: 2802 - DNA, 459 bp, Homo sapiens
ttttttttaccagtaaaatagttttatttgattttaaaatagtcatcaatgtgaaaatttctcaaagcttaagagtaacagtctagagccaaggttgggagtgggggccaggcctcacacagagcccagcttgaggcccctgagccccaccctcctttccagagggagggaggagacagctgagggggccctgaatcagtcctctccctcgtccccaaggccagctgtgccaggcccctggagggcaacagctcatgcggaggactggggggggaagcaaacaggtaggaaacggaaatgaggttaacaattacaccatcacccccaaaaaaaaacaaaataacaaaacttgtgactatgaaaggatggaagatgaatactgataaactcctcagctccccagaaaagcccagtctgggctagggttgggctgattggaggaaaggtcttgagacccaa

SEQ ID NO: 2803 - DNA, 1388 bp, Homo sapiens
tttttgacgctcacacttagtttttattagccacagtttcccacagttttctacctcctaggaaatacacagctcaccaagggcacccagtcaccattctgtcctgcttgcatggctgacactgttgctcaccgagggtgagcagatctgcaaagtcacccagggcctggtttcctcaggtacagagaaccccaaagaaagaagagccagaacttagagcccctttcttctccatatgggataggacacccaagacaaatgacccatgcatcatgaaacagaggcagggccctaagctgcccaagaggcctgggcacttggagttcctgccaacagccaggccactgaaccattgcctgtccaccctcccacagtggctaatccctggcctagttgtaaatgtcttttcagcgctgcacacttaatgcagtcggatgccttctgattactggtctctgagaccttcagctgctgaggtgcaagaatcaagcatgggcatgaaaggcaaagggctaccacagcagcatcgttctgcctccaccctgggctacgcgacccagcccagcaggctgtgacctaggagagctgctccagcctggggcatgaggggccctagagcaggatgccggggctaggagtggactgccctgctgatggtcgtttttctgtgaagaagcttttcaacagtagcacctgactgaagctgaccacgaacagggcaaatcgtctcgccaacagaccagtaaagagactcggctattaaggtcttccggctcgggccccggtcctgggcctcccgcagccggtaatgcgtctgggagtcaatcaccgttttcagagcctcatggatggtcacgcaggcggactccatctgggtgagagctgtgaccctgttccccatgtctgggagaatgggaggctcatcgcccacttgaaagtcaaagtagacggtcttgtgagagaaggtggaaaactcattactgaagcaaaactgataaacgcccttgacttcagcccggtacgtgaagctgtcgtactgcttcttcgtttctctgtagatggtgttcccctgggggtcctctacatagcagtcaacatcgtagtggcctccagtgatgacctggtaatccagggagaacttcacgccctgctccacctcctcgtggaagcactgcttggcgttgtccggcagctcgaaggtgagctcggccccgcagggctgctcggcccggcgcaggagcagcagcagaagcagcacggaggcggagcgcgggacagtgctgcccatgatgctctcggtcccgtctcgagggccgcggctcggcgctgcgcccccggcgggctggggcgacgactaccgaccgggtcctaggaggatgtaaggggat

SEQ ID NO: 2804 - DNA, 888 bp, Homo sapiens
ggaggatccttgaagtaccttctccaactccatgatactctaaaaactgttcatcttcataataggagtggagcctaatccttggtctcctcacctcctggtttcccggaatgtctttctcattaacatatgagttctcagggcctgtatgtgcaaaggaaacctgaaccattgaggttcagactaggttgttgacaggatacaatgctgtgaagatgtcagtactggtaagttctaaaattcatcaggataaacaaatatgcatcaattgctgagaaagttttaaataagactaacatggtttgcttggcctgataccaagacatacagtaaagctccagtacttaaaaccatgtggggatgccagagtagataaatggatcagaataaagagtcagaatatgtgacaaaagtgttaggccaaattattgaaattagtggggaaaagacaaacattggcatgtgtttagaaaaaaatgtcagatgccttctctctcaccatttgtaaacattacttccaaatgtatccaagagctatctataaaaaaccttgccaatactagggaagaacagaatctggaaccctagggtgggaagcaagacatgaagcagagaaactccaaaaacctagctgcctcttgaaagcagaagcttccaagaggaacaggcagtctcaatgcctctgtgcataagggtccctacagtgcaggggctgccttccctctttgctccactccctgacttgatggaagcttggaagcaggcatggggccagcatgagctgttccaggagggcacatgtgtctgaggcacatgttcttacatgttaatgcacatgtgcaaatgtatctacatgctttacatgatgctgtagaaatattttctctt

SEQ ID NO: 2805 - DNA, 560 bp, Homo sapiens
tggatacgaagcaggcgggcttcagagtgggttggaaaaatggaggtgccgcgcctggatcatgccctcaacagccccaccagcccctgtgaggaggtgatcaaaaacctcagcctggaggccattcagctgtgcgaccgggacgggaacaaatcacaagacagtggcatagcagagatggaagaacttcctgtaccacataacatcaaaataagcaatataacgtgtgactcattcaagatttcatgggaaatggattcaaaatcaaaggatcgcattacacactattttattgacctcaacaagaaagagaacaagaactccaataaatttaaacacaaggatgttcccacaaaattggtggcaaaagctgttcccttgcctatgactgtccgtggacactggtttttaagcccaagaactgaatatacagtagccagtgcagactgcctcaaaacaagttgatggtgattatgttgtgtctgaatggagtgaaattatagaattctgcaccgcagactattcaaaagttcatctaacacaattgttggagaaggctg

SEQ ID NO: 2806 - DNA, 682 bp, Homo sapiens
gatcccacccgcaggaccccaaaacccaatgatcctgcagcagcccttgcagcgaggcccccagggagggcccacgcgccatcccgcgggccgccttgggggtgacttggggcctggacgccagctcccctctccgaggagctgtgcccatgagcaccaagcggcgcctggaggaggagcaggagcctctgcgcaagcagtttctgtctgaggagaacatggccacccacttctctcaactcagcctgcacaatgaccacccctactgcagcccccccatgaccttctccccagccctgcccccactcaggagcccttgctctgagctgcttctctggcgctatcctggcaagcctcatccctgaggccctccgtctgctgaggctgggggacacccccagtcccccctaccctgcaaccccagctggggacataatggagctctgagtgctggtggacagtgcccctcccaccttccttcttccccacaacagaagagaccagcgactcccgcaaagggacaaggttcctccctctcctgcagagtaggcatctgggcaccaagaccttccctcaacagaggacactgagcccaacggagttctgggatgggaggggtgggagcatgggaagggaggcatcccacccccaagaagaactgaataaagattgctgagcaaag

SEQ ID NO: 2807 - DNA, 430 bp, Homo sapiens
gtttatttaattcctcattcagcaaacgtgccttaagatgtcagtgacatgccagatgctcataaggtccctgccttcttagaaccgatgtttgttctagttggggaaacaaatggtgcacaagtcaacaaataagagaagcaccaattgcactgagtgttgtgaaggcaataagccagtgagccgagagaggccacttttgttttttatagggtggtcattagtgaagcaggaagtgcctggtacatggcagctctagtcagagtcatttccactgagcttcctactgggctgtctgtgaacttcaagcagaaggcttcattcctggtcaaccacagcccccgcagccccgtgtggctccagggagttagctgccatgctgggatgttgtttgaacgtggctgcacgatcttacaggaagatggtaaac

SEQ ID NO: 2808 - DNA, 407 bp, Homo sapiens
gaagagtccaacggccagaagacgcatctggaggctccagtcccagtgggacctcaaagtccgatgccaaccgggcaagcagcgggggtggcggaggaggcctcatggaggaaatgaacaaactgctggccaagaggagaaaagcagcctcccagtcagacaagccagccgagaagaaggaagatgaaagccaaatggaagatcctagtacctccccctctccggggacccgagcagccagccagccacctaactcctcagaggctggccggaagccctgggagcggagcaactcggtggagaagcctgtgtcctcgattctgtccaggatgaagcctgctgggagcgtgaatgacatggccctggatgccttcgacttggaccggatgaagcaggagatcctagag

SEQ ID NO: 2809 - DNA, 1819 bp, Homo sapiens
ggcacccgaggaacacgattctccgaccgaagcgtcccagccgattgtggaagaggaggaaactaaaacatttaaagacctgggtgtgacagatgtgttgtgtgaagcttgtgaccagttgggatggacaaaacccaccaagattcagattgaagctattcctttggccttacaaggtcgtgatatcattgggcttgcagaaactggctctggaaagacaggcgcctttgctttgcccattctaaacgcactgctggagaccccgcagcgtttgtttgccctagttcttaccccgactcgggagctggcctttcagatctcagagcagtttgaagccctggggtcctctattggagtgcagagtgctgtgattgtaggtggaattgattcaatgtctcaatctttggcccttgcaaaaaaaccacatataataatagcaactcctggtcgactgattgaccacttggaaaatacgaaaggtttcaacttgagagctctcaaatacttggtcatggatgaagccgaccgaatactgaatatggattttgagacagaggttgacaagatcctcaaagtgattcctcgagatcggaaaacattcctcttctctgccaccatgaccaagaaggttcaaaaacttcagcgagcagctctgaagaatcctgtgaaatgtgccgtttcctctaaataccagacagttgaaaaattacagcaatattatatttttattccctctaaattcaaggatacctacctgggtttatattctaaatgaattgggctgggaaactcctttatggatattctggcaggcacctgtaataatacccagagaacaggctttgctactgcgaaatcttggcttcactgccatccccctccatggacaaatgagtcagagtaagcgcctagggatcccttaataagtttaaggccaaggcccgttccattcttctagcaactgacgttgccagccgaggtttggacatacctcatgtagatgtggttgtcaactttgacattcctacccattccaaggattacatccatcgagtaggtcgaacagctagagctggggcgctccggaaaggctattacttttgtcacacagtatgatgtggaactcttccagcgcatagaacacttaattgggaagaaactaccaggttttccaacacaggatgatgaggttatgatgctgacagaacgcgtcgctgaagcccaaaggtttgcccgaatggagttaagggagcatggagaaaagaagaaacgctcgcgagaggatgctggagataatgatgacacagagggtgctattggtgtcaggaacaaggtggctggaggaaaaatgaagaagcggaaaggccgttaatcacttttatgaaggctcgagttctgctgttctgtaaaagagaattggagaatgaaacctgctccaacagagatcatgagactgaaattggtcagaattgtgtccagaatgtgctcagctaattcagtattcttccccattctgggttggagtttactgcagagtaattcttacagtgctgatgtcaagactgttactgttcttcgactttgattccttgctcatgacatgagtagggtgtgctcttctgtcacttcacacagaccttttgccttttttagctgcaagtcaaggactaggttgatgatgcccatgacctgtaattgtaaagaagcttggacatctgcaaatgatatttaaaccatcttggcttgtgctttattcaaactaatgtgaaacaataaatttaaatattatttttaaaagaaaaaaaaaaaaaaaaaaaaa

SEQ ID NO: 2810 - DNA, 1335 bp, Homo sapiens
tttttttttttttttgcggacagtaaaccgtttattactgtgtggacacagacaccgtggtgcatgacagacagtttcaacaccatgagcgctggggacggagctgtgcctggacagctctgcggtgtgtggtggcgccacgcttgggccggctgtcaccgccagctgaggcgctaacagcgtcacctgggagaaaacctggaaaccgtctaatgaagcaggtgacttaggggcgtctctagaaacccaaagaaatgtaccttaaataagcaaatataaaacacaaaaaagacgagcagacctggtgttccgtgtcaggcagaatctaaaaaaacccaggagttgcacttggtttcctcactgtcatgtgtgatcacaggtcaggacgtttcacagcagcgcgcccaggctcctgtgcgtgctctggtgcactggagtctggggctggctgggcttctggctgtcctctgtcgccgggatgggctcgacgaatcagcgcagccgcggcctggccccttacgtggtgctgatcccactcagctcctgcctgatggcgtcgatgatctcctccttcaccttgtggagctctctcaccacctcctctaggatctcctgcttcatccggtccaagtcgaaggcatccagggccatgtcattcacgctcccagcaggcttcatcctagagtgaggctgcgactgaagggggctcttagcttcggggctctttgccacagacggggttctggacagaatcgaggacacaggcttctccaccgagttgctccgctcccagggcttccggccagcctctgaggagttaggtggctggctggctgctcgggtccccggagagggggaggtactaggatcttccatttggctttcatcttccttcttctcggctggcttgtctgactgggaggctgcttttctcctcttggccagcagtttgttcatttcctccatgaggcctcctccgccacccccgctgcttgcccggttggcatcggactttgaggtcccactgggactggagcctccagatgcgtcttctggccgttggactcttctcagcttggcccccagctatggcagcggccagtcctgacatggagctctcgtcgtggctggacccctgggctcctccggctggcagtgggggtggggaaggtggggtagcccccagtgggtggaggtgggactgggggtggggggggcggtggaggcccactacatgaaaaatatggaacgcttcacgaatttgcgtgtcatccttgcgcaggggccatgctaatcttctctgtatcgttcccaattttagtatatgtgctgccg

SEQ ID NO: 2811 - DNA, 519 bp, Homo sapiens
  misc_feature (1)...(519): n = a,t,c or g
gttgaccacagctnnnnnnnnnnnnnnnnnnnnnnnnnnnnnnnnnnnnnnnnnnnnnnnnnnnnnnnnnnnnnnnggcacgagtattattatggacttttaaagacacctnnnnnnnnnnnnnnnnnnnnnnnnnnnnngtggatgaactttttttttttaaaaaggctgaacatttgagggtttcacgtcctaaatacataacgggggaattctagaaagacattttctatgagggtttactttgcatttataccccttcctccctcccctgtcgttggaatttaaacttacctaagcatagagaaatgtttcctttctggtttaagattttatttaggtatgggaacttgtgaaagtgttggaaatatagagtggaaagctttttgttttttttngtggttttttttttgggccttnaaaacngttaaaaaaaagtnttgggggctgacanaaaangattancagtcntgggaggggncangantntaggnnacaaaagcgggggcatannttttt

SEQ ID NO: 2812 - DNA, 423 bp, Homo sapiens
tttttttttttcgttttttttcccacgtatattttttgttgttttttgttttttttctgtaaaatgtcccggttcttccataacttataaacatgatttataccgaggagatgggaaagtggacggggcagggtggactgaccggggatggggaagctcctctcgctgccccctcggggcgggcccaggccctttggaggatggggacgccaggacactcctccctgaggttgtctggccgcctctgcccctggtgctcagaatcctgcgtgcccctcaattccggaatccctcccgggaccccaggcccactgggaatgctgcccctgctactcagaatcccgaagcgccattcagttccagaatcccctcctcagctgctggggtggcggggtccctcctttccaatgtcccccccgaccc

SEQ ID NO: 2813 - DNA, 393 bp, Homo sapiens
gctggggggtgagccacgtggtagctccttagggctccttcttagcgagtctcccagcagatctgccagagcagcaggtcggcagcaggagcccaggtccagcgttgcaggggtggggaaaaccatttcctggctggagaaggctgctgctgggctgggtgggcaagtcctgacacattagcgatcagccaactgttttattaccaggtctcccatggagaaaacacttcgtaaatcgaggagctgttacaaaagtcgaatgggcagcatcattagtgcccggctttctgggaaatgtggatttcctgacagttttctcaccttctcatcttatagatttcctgttcagcctggatcatagccatgacagcctccccgttccctgtcctctct

SEQ ID NO: 2814 - DNA, 391 bp, Homo sapiens
gaatttggaggatggttagctgttaccttggtacagatataaatgaatttttctctataaagagatcttaataatggactttggacttataaacacaggagaataaggagacttataaacccagtgaattccttgtgcaagattcctggcatagcttctgctcaagtacttctgtgctgaagcacgatgcctatagcagcccattcagttagtagagagaatctgttagaattcatattgggataaaatcctattccccgaaacatccatttgtctggatttttcttctaagcaatacggtatgattccagttaccttgtctatagattgagaagccttgcttcttatgatggtttccagagaaaccatttatggttgtgggctcgctcct

SEQ ID NO: 2815 - DNA, 417 bp, Homo sapiens
  misc_feature (1)...(417): n = a,t,c or g
gaatttgggcattctgcttttctctactaatcttgaagtgctcagggatttgtgtatttgtgtctttctaacttctaataaactcactccgactgacctgtgtcttggtgtctgtctgcttggtagaacttctcactctttatccatgaaacgccgcatggcacaagctgctaggggtcatggggtgacagttcatctcaccaaggagttccttccaagaagaaatgctgctgtatgcacatcttcttcactctgnttattaatacctgaatcaattaannatgaaanctgggcactnttaccttcctacaaagntgtctgagggattttaagtatttggataaaannggcnntttatttaattttcccaacccccttgnaggtaacatttaaatgaaacctgnccnngnaaaataa

SEQ ID NO: 2816 - DNA, 690 bp, Homo sapiens
aaataactaaaaatcctcagacaaccttgtagggaggtgagagtgcccagctctcatcttaattgattcaggtattaataagtgaaatacttggcagtatctgaacatgaaaataaaaaacacagagtgaagaagatgtgcatacagcagcatttcttcttggaaggaactccttggtgagatgaactgtcaccccatgacccctagcagctgtgccatgcggcgtttcatggataaagagtgagaagttctaccaagcagacagacaccaagacacaggtcagtcggagtgagtttattagaagttagaaagacacaaatacacaaatcactgagcacttcaagattagtagagaaaagcagaatgcccaaatttcacacacagactacacagcaaatgctactggggcatatcctagggagacccggagtccgagcggggcccccagggctctaagtaccacggagcacgtgcggcacatgccttgctctaaggcttagttacgtcaacaggtcaccgtcatgccattgcaacaacaccttgtgtgacacttaactacctgttaccaaagtgaacagctaatcgctcttaatttttaaactcgtgtattacacagtaaatggggtttttatttaattacagtttatattactaagtacatatctggggcaaaagctacatgtatacag

SEQ ID NO: 2817 - DNA, 459 bp, Homo sapiens
gcagaagcagctaagctaaaggagaaatatgaaaaggtacagtgtcatcttttttaaagccgtggataagactaggtataggtaataactgtagaaaacctgggaaatttagttaatcttgtattaatggttgtcagctatgttttgaaaaggcctaatgaaaattgtacacttcaacacaaggtaattgaaaccttccttttgactgaaaccagtgtttgtagcactagtatattcctgcagacagacttgtagttacttgtagttattgtatagtctgtatagtctgttatttttttttttaagcagagagtcaaagaaattgttttatgtagatatatataaaatgtgaaggtacaggagggactatggcactgtgtgtgatgtaaaagggtattggtagtgaaagtactgatactgctgtatcgcaacccttgtcattttacgtcattaacttgg

SEQ ID NO: 2818 - DNA, 267 bp, Homo sapiens
  misc_feature (1)...(267): n = a,t,c or g
cagccttagaggtgggggttcatcaggagcacttcgaggaggaggaggaggaggccggggtggaggggtgggctctggcggcctctgtcaagccctccgctcctatgcgctctgcactcggtgcaccgcccgcacctgccgcggggacctcgccttccattcggtggtacatggcatcgaagacctgatgatccagcacaacttgtcccgccaggccctacagcccctcntgcgcccggggccccggccnttcaagnaccnggcttc

SEQ ID NO: 2819 - DNA, 467 bp, Homo sapiens
  misc_feature (1)...(467): n = a,t,c or g
gtgtgnntnnnntttganacttgaatgnctgantacgaatntaatacnnnnnnnnnnnnnnnnnnnnnnnnnnnnnnnnnnnnnnnnnggcacgagcatttataataaacttatcaagatatgaagttaatttctttgctgtcattcgaaagacaaactgatagggtcagcaaactaccttaaacatgttctcattaaaacaaaaattaaaaacacagctcctannnnnnnnnnnnnnnnnnnnnnnnnnnnnnnnnnnnnnnnnnnnnnnnnnnnnnnnnnnnnnnnnnnnnnnnnnnnnnnnnnnnnnnnnnnnnnnnnnnnnnnnnnnnnnnnnatctgaaaaacaaacaaacaaacaaaccaaaaccctagcaaagcacattttctatagaagctactcagtggcataattaaaacaaatggtagtatcttgaaaaaattaagacatttagtgtgaaccacat

SEQ ID NO: 2820 - DNA, 3196 bp, Homo sapiens
  misc_feature (1)...(3196): n = a,t,c or g
accaagaaacaagcaaactttaatttccgagtacacaattatgaaactatgccagtagcgacctgcatgtttgtctcatctctttagccacttaagttctcaaaacactgccaaagctttccttctctattaaactcccttaagcattactcatactattattcaagtttaagatgtggcaaatctccccaagtgtatatggctggttctcttcttataaatgaatccataagacagtgtcccctaattcatctctattttctctaacctgcttgattttctaaaattggaaaaaagtaattccggtatactaaaaccagagcccaggtttctcaacatcttcagttaaatgacttttaattccccaatcaaggtataacacacaaatgttatctgcgctttacagtatagaactctgagtggctggtgtcttttggttagtgtaaccattacacagcagtatctgcttgtcaccccggtcttctttagcctcaaaaaatattcagaatttgttatgcacatgggagatttcttacagcagcacactcacttacaaaaagaccaaaaaaattttattgctttacaacaagccagcaacaaacacaactgaatagttataaacatgacacttctaaatcctcaaatggaattccaagaccagagtgtgcttctccactttaatagcatttgttaaaactgaaatccacaacttctggcaagtacttcaatattctcaagcagaatcaatacttaaagaggttaaaagaaaaaactattatcaaacgtattgtctgtgggatgatctaatttaaaagcctttcatgcttgatcctggcagtgctattactgcacattttaagtgaccatcatggggcacttttaagaacctaacttcacaaaaagagctgtcacaagaaaattgttctaaaatcccaatgcacagtaactcatgcctcatttcaactgctttcctcatgatgaaaaaatgtagtcagcctttaacttggcctgataaaagctgtgaaaggtatgccaaatgggccccctggtaccaaccagggagccccaaattggttgatcaggcaagaaaaggtgacacttttagatacttcatattattctggaaagcactttcctttcagtgggtgcaaaataactacggattaagtcaccattttaatcatctcaattcaatagcaagagtttcctggcacatactcttagtactacctgaaaattggggcgtgtggggaagaccaccaacagtatttacatgacttgccccaaactgtacatttaaaacatgactgttgggatagtcaccaacaacctgaaatttcttactctaaaacacattaccaaatcccactgatttattttgtgtgtgctttcgnnnnnnnnnnnnnnnnnnnnnnnnnnnnnnnnnnnnnnnnnnnnnnnnnnnnnnnnnnnnnnnnnnnnnnnnnnnnnnnnnnnnnnnnnnnnnnnnnnnnnnnnnnnnnnnnnnnnnnnnnnnnnnnnnnnnnnnngacttatttataattcactattttatctttcttccagacaaagcaaagcatttttctctaacaacataaatagtcaggattttgcttattaacttacgtgggtggctttatactcccagaacaaatgatctagctgactactaggaaaaaggtttcatagtttaggaatatatcacatcacgtgttagttccaaatgtacatgaagacaatttttaattgctgcaatagccgnaatattaaggcaacatcagaaagcagaggtgttttaaaacactaagccctactccctgcctggtggaaaacaaaatgatgttactaaatcccttaatacaaaaactttccaaaataatctgttgagcttgacttcgcagtttaatcttttacagtttgatggcagtgagagagaacctgcagctataattcccttggcaaaagaattcaacatctgatttactcacaatgcttaaaataaggaagggaaaatatagaataagttttccttgcttggcaaccatctttttaattatctatatttatactgtatccaggctatgcctgggtgtggatggctaactcgcatatagaaaatatcaagcatcacatctggaagaatcacaaacgagacaatgaacttctcaatcagtacatcaacagtcaaggtaagcaagagaaggactttaccaagaaactaacatttacactttctgacggaactgaaatacactgaattacaggcatattcactgaaacaacaaaaaaattctgtccatgtaaaggctatattttttacccccaaaaaagtgtttcaattctgatactcacaccacaactggttaagaaaataaagcgcagtgtttagcaactgagcatcctaactaccgtaagaggcactctggggttcaccccttcctgggnaaccgctgaggtcagcaagggccaggagcaaggagagcctcctatttttcaacacaagctgctgccgtctccttattaaaagccccggatggagagatcatagacccacttcctctactttctttcacgtcatatttcaatcccgtcgtagcgctttcctcagggagtcatttttccaggttgagaaggcgaaaaccggaatccagctcattgatgaaggtggagatgtggaggggtcgggagtagtctccagcagtcacgctgttgacagacagcctcgacagttcactggcaagaattagaactcctgagagataatcttctacatccagatgaaatcctttctcccgatctggctcaatgccaagaatttctgtaactgcttctcgagtcactagtgtttctgtttccaaatacacaacaaatgctgccaagaagaccaagcgctgcaacacaaacctccagtgctcatgaaatctgtaatactgttcagcaggaaatttggtcttcaaagatgttagatgtgtttttactgtaccaaaatgttctcgagctttcaaacacctctttggaatgtcctgaaacccagcaccctgatggaccccttgcagtagagttaaaatctctcgagctgtttgttctaaactctgtacaacttttctgatttcctctcggatgtcctgctcggcagccaaaaagccctgcagctccacgaagatctcgctcacagacatggcgccggctgcacaac

SEQ ID NO: 2821 - DNA, 187 bp, Homo sapiens
gactttgaggaaatagaccaaaatggtgtcagaggttgtgtgagggagataagaatatggagatattctttccctttctctcattttcacgtttttttctaatgtgattatgttacttttattgtaagaaaaccttcccttctccccttcttttttcctctccactaagagtctcctcttcttttct

SEQ ID NO: 2822 - DNA, 402 bp, Homo sapiens
gctccttcccccaggagactcagaattcagagactgccttgaaaccatgcagactcttggtcccacctcctggccagggcaacacaaagtcgtgggataaagagggagcatgccccacctccagtgacccatctgggtgtcccttcagctgcccagtctgacacagaagcccaggagaagagccactgaggcagaggagctaatggagggatttctgagtcttgagaaaggctgcccagtttggaggtaaaatgaggtgaaatgaggttctctgagtccaagtaagcaaggaatatgaatattgggggttcccaggcactttagcgctgaaccaggttctcgaacaggctttcagcccagtctcccattcatcctgaatggagagagactccatttcagggc

SEQ ID NO: 2823 - DNA, 456 bp, Homo sapiens
  misc_feature (1)...(456): n = a,t,c or g
gcaagtacagaggtttgctgtctttgcaaagctaccttgagagcattgtaacttagcaggtgattgagttgtctactaagtggtgctctttatgtctcagataatgctgccagatttatctttctgaatcatagatgtgatcacatcggagtctgctcaaagccttggccgcatacagggtatggtctaaacactgctgacattcagagcttgctgttccggtgccaatactcctttctagacatttctgcccttctcttcaccccttcatgggcctcacctcccccatcaggctcttcactgtctcccgggcatacccatcaacatttaatgtacatctgtagtgagggtgaggaggcactttacaccctgtggattcagggcaggntctgggttttgagttctggcctnttcccttttcctgggtaggggtggacctnggggnagggaactttc

SEQ ID NO: 2824 - DNA, 650 bp, Homo sapiens
taaaggatacagatgaacagccagatgaagcagcatgaagggctaggtctggaaagattccaagtgcaagagcttctgtcccagtgaaactgggtgtgcagtgccctcccagcttgtggacgcatttactggaagctcctcaaatcttgttgttcaagagtttttaggcagcttgatctccagcaccttccccacccagagatcagtgggtagagctaaaagttccaaccctctaatcctcaaatgacctggtctttccgggaactagccccatcctaagaatatctagggccccacattaagtaacctcattagcataaactcaggagttatcgaatcaaaggggctcattatgactaatgagatattcctaccactcaggaagttctaaaggtttggggaactctatgacaagaactgagacaaagaccaggtatccatatttcatattaaaccacaatggtagatattaattgtattttagcctggctcatctggccaatctgcctgcaagaaggcagcaaggcagctcctagctacagtttcagcagctacacctcacagcccttacaccattaaatgctccccatttgttgtgcttttgttgagcacgtgactaaacctcctgtttcctaaaaatggcttaagac

SEQ ID NO: 2825 - DNA, 372 bp, Homo sapiens
ggaaaactcaaatgttcatcaaaggagaattgcttcaacaattttatgttgtaatccatgtgatagaatactgatatattttttaaaaaagaggttagctccacagaagtgacaggaaactgtccacaatgtgtcctgaggccaaaacaagttgcagaacagtatgtaaacagtttgtaacatttttgtaactacataggtaaaaatacttttggctttacttctttgtctgcttagactcccagattctctgatgataccactctggtgcttgtcctaatgggaaagtttcctgaaatcctgcgatgagtttgacagtttcaaaattccttcaaacatacagtgaatgacagacaaaaaaaaaaaaaaaaa

SEQ ID NO: 2826 - DNA, 1028 bp, Homo sapiens
  misc_feature (1)...(1028): n = a,t,c or g
ccccggcagacaggtagaagtcgtggtttgtgcgcggccaggcgctgggngcctccgctgccgggagcaatcagaccttccagctgcctctcatgtacttgtctgttgggggcttgtgttgatcaggagtgaattcacagtctaccatgaattggaaggtcctaactgggaccacctactccccttggagggtccggatggagtttcccctctgcggctgcctctcactcatcctccaccactttgccgacaaggaaggaaggacaatcgggaggagggagtcttgcttggcgaccatctggacaatatctcgcccatggcaagctggatccctgtggattactttgagctaaagacatttcataaaatgggcatgaaggattccttcaaatgaagacgtggacaaaatgattggtcaggtcctttgctctactgttgaatggagaaggatttttttttttccctcacacaggggttttcttggagctcaagtttggatgaccccagacagtaggataatcccatcatgggtaaaggtaatagggaaatatgtggtctccaaacagcctctcccagaggccaggatcagcaggtttgagtggataattggcttgtggtcattttcccaaaggatttttcttttaggtaagtggaaactgtttttcaaatcaaatttggatgccaactatgtggaacagaagtgtggctgctctggtggaagtggcaatggtagtcctagagtctccctgtcagccacaccctttgtctccccctacccaagggaccctgtggcctggaaccgcagtgtgaaatgctatatagtgcaatgaagtcaattcgaagacaagagttctttgtctttctcatctaatttttagttatggatatgagacgcttgttcagaagtatggaaaagtatatataatatgttatcttttagatgtgggtgtaaatatgcttatgtatgcaatatgcttatattttaacgcataaacaacatgaataaagcaaacactctagacttctcc

SEQ ID NO: 2827 - DNA, 898 bp, Homo sapiens
gcatgaactgaagcttctgtcagaatgccaatacaagcagttgagtgtttcgttgctgtgttataacttcctgagggaagctctggaagtggcagtagctggaactgaattgtttagagactctgggacaatgtggcagctgaagctgcaggtgctgatcgagtcaaagagccctgacatagccatgctttttgaagaagcctttgtgcacctgaaaccccaggtttgtctgccattgtggatttcctgggcagagtggagtgaaggtgccaaaagccaagaagacactgaggcagtctttaagaaagctctcttagctgtcataggtgccgactcagtaaccctgaagaataagtacctggattgggcttatcgaagtggtggctacaaaaaggccagagctgtgtttaaaagtttacaggagagccgaccattttcagttgactttttcaggaaaatgattcagtttgaaaaggagcaagaatcctgcaatatggcgaacataagagaatattatgagagagctttgagagagtttggatccgcagattctgatctttggatggattatatgaaagaagaattgaaccacccccttggtagacctgagaactgtggacagatctactggcgagcgatgaaaatgttgcagggagagtcagcagaggcatttgtagctaaacatgctatgcatcagactggccatttatgaagatgaagaatacagtcagctttgtgaaatagtattgcaagcaacgcccgtgggcaaatttgtattgagtccatctgtaatttgctcagtgatggcagacaagatggctgtctggttttgagacacactttaattttatgttaacttgttaaatctttttaaaaattaaaaaatttttatgattga

SEQ ID NO: 2828 - DNA, 485 bp, Homo sapiens
gcagcatcgtgctgcccctggcccggggctccccaaaggcactggccctggagtacgcactgtgcctcacaggcgacggcttggcccacctgcaggccaccgacccccagcagctgctccgcctcatcccccatgtgcaggtgttcgcccgtgtggctcccaagcagaaggagtttgtcatcaccagcctgaaggagctgggctacgtgaccctcatgtgtggggatggcaccaacgacgtgggcgccctgaagcatgctgacgtgggtgtggcgctcttggccaatgcccctgagcgggttgtcgagcggcgacggcggccccgggacagcccaaccctgagcaacagtggcatcagagccacctccaggacagccaagcagcggtcggggctccctccctccgaggagcagccaacctcccagagggaccgcctgagccaggtgctgcgagacctcgaggacgagagtacgcccattgtgaaa

SEQ ID NO: 2829 - DNA, 821 bp, Homo sapiens
gcaccggacccctggttctccacatacgattctacttgtcaaattgcccaagaaattgctgagaaaattcaacaacgaaatcaatatgaacgaaaaggtgaaaaggcaccaaagcttaccgtgacaatcagagctttgttgcagaacctgaaggaaaagatcgcccttttgaaggacttattgctaagagctgtgtcaacacatcagataacacagcttgaaggggaccgaagacagaacctcttggatgatcttgtaactcgagagagactacttctggcatcctttaagaatgagggtgccgaaccagatctaatcaggtccagcctgatgagtgaagaggctaagcgaggagcacccaacccttggctctttgaggagccagaggagaccagaggcttgggttttgatgaaatccggcaacagcagcagaaaattatccaagaacaggatgcaggccttgatgccctttcctctatcataagtcgccaaaaacaaatggggcaggaaattgggaatgaattggatgaacaaaatgagataattgacgaccttgccaacctagtggagaacacagatgaaaaacttcgcaatgaaaccaggcgggtaaacatggtggacagaaagtcagcctcttgtgggatgatcatggtgattttactgctgcttgtggctatcgtggttgttgcagtctggccgaccaactgatggcagtaaagagaccaccagcagtgacacctggcaatgacagatgcaagcccaacacccttttggtacgcaaaacctgctctcaataaattcccccaaagctctgaaaaaaa

SEQ ID NO: 2830 - DNA, 567 bp, Homo sapiens
  misc_feature (1)...(567): n = a,t,c or g
ggagttctcaaaaaatatatctgtcatgctgggaagatgtcagacctacacaagtgagtacaagagtgcagtgggtaacttggcactgagagttgaacgtgcccaacgggagattgactacatacaataccttcgagaggctgacgagtgcatcgaatcagaggacaagacactggcagaaatgttgctccaagaagctgaagaagagaaaaagatccggactctgctgaatgcaagtaagaaaactgcatcttttcctagcccttctagggactattatgctcagaaacacacagactcagagcagtcagggagcatcatagagtaatgagagtaagaattggaggtgtgcttttgtgtgcattgctganagagaaagctatacagagaacaggtgtccaaagagaaatccattctcgcaaagccattctttctttcacacacagtgcctaaagcctccatagatggtgaangctatagtgccaaagtcagcncaaagagactacctctganaaacttggttggggggaaatggtggnccnaaattttncgggaantacnnttggt

SEQ ID NO: 2831 - DNA, 459 bp, Homo sapiens
cattgagaaaacgccagtaagtgacagagaaaggactcaaacccacgtcatctgactccaagcaccgggctcctctgctctgtgacaggaaccttcctgtttataggaggcatgatccatggttgctctagttgagtgtcacctgaaccccaaaactattgtgtaaaagaaagttgcttttctgttaactgaggtgttttctgtggaatattttcatcttattgtgtactttcacatttagccacttttagcctggaagtaaactttgttgccgcattttaatcctggagttctgtcgctacctcacccctcacttagacagtctgtttctaggaattcagtaatgaaaggaagtgccttttttaccagtcttgtttttgtatttcagatgaattttttgggcacggtgtgctctgaaacagctgcagacactgggccactgcttacattggccagagc

SEQ ID NO: 2832 - DNA, 524 bp, Homo sapiens
  misc_feature (1)...(524): n = a,t,c or g
ctgtgacagcaagacaggtaatgcaaatacggatttcatctgggtgggtccagataacagactgctagagccggataaagagatggaaaacttttacgtgtttcacaatggaagtctggttatagaaagccctcgttttgaggatgctggagtgtactcttgtatcgcaatgaataagcaacgcctgttaaatgaaactgtggacgtcacaataaatgtgagcaatttcactgtaagcagatcccatgctcatgaggcatttaacacagcttttaccactcttgctgcttgcgtggccagtatcgttttggtacttttgtacctctatctgactccatgcccctgcaagtgtaaaaccaagagacagaaaaatatgctacaccaaagcaatgcccattcatcgattctcaatcctgggccccgctagtgatgcctccgctgatgaacggaagnaagtgcaaggtaaaanaatgggggtttttggaaccccnaaaggtactgcannaagggaaaaagggaaatcc

SEQ ID NO: 2833 - DNA, 756 bp, Homo sapiens
  misc_feature (1)...(756): n = a,t,c or g
catgcgcgcanagccatctccactccaaagttagacaaaatgccaggaatgttcttctctgctaacccaaaggaattgaaaggaaccactcattcacttctagacgacaaaatgcaaaaaaggaggccaaagacttttggaatggatatgaaagcatacctgagatctatgatcccacatctggaatctggaatgaaatcttccaagtccaaggatgtactttctgctgctgaagtaatgcaatggtctcaatctctggaaaaacttcttgccaaccaaactggtcaaaatgtctttggaagtttcctaaagtctgaattcagtgaggagaatattgagttctggctggcttgtgaagactataagaaaacagagtctgatcttttgccctgtaaagcagaagagatatataaagcatttgtgcattcagatgctgctaaacaaatcaatattgacttccgcactcgagaatctacagccaagaagattaaagcaccaacccccacgtgttttgatggaggcacaaaaagtcatatatactcttatggaaaaggactcttatcccaggttcctcaaatcagatatttacttaaatcttctaaatgacctgcaggctaatagcctaaagtgactggtccctggctgaagggaattaacagatagtatcaagccgcagaaggaatgtgccagtatgntccctggggtgaacagcttggcctttttgtgggntgcctngacaagccnaggaagaaccaa

SEQ ID NO: 2834 - DNA, 641 bp, Homo sapiens
ttttttttttttcacagcggtttcaggctttattaacaaacggtgtaaaaaaccagacggatctggaggaagggacagggctgcccgtctcagctctcaaccttcccagagaggggccaggcctggcagccctgtgcgtcgcgcctcctaagcagtcaaccttgtcccctccaaggacaggcatctgacccaatccaggtcccagggaggcggagtcgcaaaccctaactctggggtgtattctgctcggccctcctctccccctccccagatagctctcccagcctggggcacggacagcacagactttgcagacatcacccggggaggtttctcagtgcagacaggagctgaggtaggggttggagaggctgacctcgagaggcccccgagggccaggaaggaaaaggagtcattccactctgagaagctcaaacacaacagacttcacactgctgacgggtggacagaggccaggctcctcccctcggcaggcctctgtttctgggcccagggtggttgaggactcactgagggagagcaggtaaaagaacccgcagacagtaggcgatcatccaggtgctggcgcccctccctcctcccctgccctggctgtcagtctgtagcttcacaggtctttg

SEQ ID NO: 2835 - DNA, 765 bp, Homo sapiens
tccttgcagctgggttgcacagcagtactgcccaaatgagatgcccctgcccgggctggtgccaacattcagaccacatggaaggaaaagtgttctgtttattggtctggcttggtctcctgtgcgtctctcagaatgctgctctgcccttgtgggctcaggggtcgcagtggtggtcacactggggcctgcctctgctgcccacctggaagtggcctcagtcagtcttcctgaaccctgtcagcctaaacttctggaagagggggatgaagccttggaggacgctgtggatacggtacactagtccgaagtagatgccaacggtttccaggggaggcgaaggtgagcaggccgaccccaagagacatgaaccagtctgcgtaatagtgataacacaccagcaaggccccgatggcaaagcacaggaggacgaaatggaaaaactcatctccatagagttgaagctcatccttcaaaacgtcaggctccccatgcccaggacctgaggaggaggaggatgaagaagatgaggaggatgaggaggaagaggaggaggaggaagaagacttgtttctctcatattgttcttgggaaaagagtccagccttcccatcttgcttgtggaaatctgtctctccatagtctacatcttctgtttctctgtggacttgactgttgtcctgaggctgggaggaggatgctgaagtctccatggcttttcctgtggtccttcagcttgtctgggcagcaaggggagctctgtgc

SEQ ID NO: 2836 - DNA, 675 bp, Homo sapiens
gcccagacactggagtcatagacaggaaacagccactggacaccctgaagagctaccgcctgtgtgatccttctgagagggaattgtacaagttgtctccactttttgggatctattattcagtggaaaaaattggaagcctgagagttggcgaccctgtgtatcggatggtgtagtgatgagtgatggatccactagggtgatatggtaaagggtcagctttgctttctgaatacgctgtctttgaagccattgctgcattttcttgtgttaattttttttatgttatgctgctttaattcttgagagaatgaacagttttatattctgatctttggagttggaaaatgcccttaatttctgttccctgcagtaatttgtgtactcctacctcagccttctccacccctatttcccatttaatggtaaaatgctgatggaagaggcctcagcagaaagacaggtatatgttcacagctcattacagaatatcattaaggaatagggaaatgaaggtgattgattctcagagttatgtacattctcagagttatgtatttattttttctgtctcagatagaagggaaaatgtttaaattattcaacatcagcttgggaaatgtttaaattgaatgtcttttatcaaatgtatttttaaagtataattgaagtttg

SEQ ID NO: 2837 - DNA, 1429 bp, Homo sapiens
  misc_feature (1)...(1429): n = a,t,c or g
ctccatcagcctctgtggggtgtctcagggtgggcagtgggggtggggctgggacgctgtttgtnctcagcggggacagccagggttgatctggccccgagggttttggatgtttttaggatgacataaaaagcaagtgttttccccatttcctcttatgaaacaccgtctgagcccaaggtacacattgggcggcctgcaggaacctgctccaggtggacacacgggccagcagccgcgaaccttgaagctggggtgaccgcaggagaccctgtaaggcctgtgagcggagccctcgaccccgtgacaccctggccagacaccctgcttggactggggtggcctctgctacccaggggtctggcacgggggagggctggggctttctctgcctggtacacacggaaaggcggctgtgcggacgcagggtcaccgtgctccgggttttctgacagtcggtgtttcctgggcctttggagtggctgcgaggcctgaacgccttgtggatccgctgtgtccagcccggctgagcatcgccagggctagctcatgctgctcttgtcagcctctggttctcctcgagtccttggggacgtggcagatgccagcgaccatcagacaacgtggaggccctcatggcgaatggctgagggggccgggctgaggctgtgcacatgcagtctgcacgccactcttgggctctgctggcggagatccccttccttctgggtgcagactgcacctccggatgcagttttgatgtccatcttccaggagagagacggtctcgggtccagggagtggagggggctgcccctgccgtgcaggtcctggccgatggcgccttaccctgctgccctgggcttttggcctgaagcaaattcctgagtggggggtactggggcctgccgcatcctgtcctgtccactgcccacccccgtgtgctggctccctcacttctggctgcagtgggagccgccagtctgacccttgtcaccgcacgctctgcccccaccccgttgcaagaggtcacaccatgtcagcagccttgcactgaccgcaggccggcccccaggcctcagagttctggatgcttccgtgcggctccaacaggcatcgtcttcccttccgcaggtggaggggccgcttcccgcaggcatctgagctctgtgccggggccgtggccatgggaagatgttccacgctgcctcctcctcgagttttcctcggaaacactcttgaatgtctgagtgagggtcctgcttagctctttggcctgtgagatgctttgaaaatttttatttttttaagatgaagcaagatgtctgtagcggtaattgcctcacattaaactgtcgccgactgcaggcgcagtgactgctgaatgtaccctgtgtggcgacttggaatcaataaaccatttgtggat

SEQ ID NO: 2838 - DNA, 193 bp, Homo sapiens
ttccacttggaacccaagtttggaaattttgctacttcttgttaagctaggccttttattcttgaagttgctagttctcatacaaactcattttatgcattagacacacagtcactattgttatggagaacatagttgtatcagaagaggtatagctttgggtgtggatgtgcgtgtgtcaggggaaagatat

SEQ ID NO: 2839 - DNA, 1980 bp, Homo sapiens
ttacaatcttagagtggtaggcaatgttttacactattgaccttatatagggaagggagggggtgcctgtggggttttaaagaattttcctttgcagaggcatttcatccttcatgaagccattcaggattttgaattgcatatgagtgcttggctcttccttctgttctaacttcacagagaatgcagttgtcttgacttcaggtctgtctgttctgttggcaagtaaatgcagtactgttctgatcccgctgctattagaatgcattgtgaaacgactggagtatgattaaaagttgtgttccccaatgcttgggagtagtgattgttgaaggaaaaaatccagctgagtgataaaggctgagtgttgaggaaatttctgcagttttaagcagtcgtatttgtgattgaagctgagtacattttgctggtgtatttttaggtaaaatgctttttgttcatttctggtggtgggaggggactgaagcctttagtcttttccagatgcaaccttaaaatcagtgacaagaaacattccaaacaagcaacagtcttcaagaaattaaactggcaagtggaaatgtttaaacagttcagtgatctttagtgcattgtttatgtgtgggtttctctctcccctcccttggtcttaattcttacatgcaggaacactcagcagacacacgtatgcgaagggccagagaagccagacccagtaagaaaaaatagcctatttactttaaataaaccaaacattccattttaaatgtggggattgggaaccactagttctttcagatggtattcttcagactatagaaggagcttccagttgaattcaccagtggacaaaatgaggaaaacaggtgaacaagctttttctgtatttacatacaaagtcagatcagttatgggacaatagtattgaatagatttcagctttatgctggagtaactggcatgtgagcaaactgtgttggcgtgggggtggaggggtgaggtgggcgctaagcctttttttaagatttttcaggtacccctcactaaaggcaccgaaggcttaaagtaggacaaccatggagccttcctgtggcaggagagacaacaaagcgctattatcctaaggtcaagagaagtgtcagcctcacctgatttttattagtaatgaggacttgcctcaactccctctttctggagtgaagcatccgaaggaatgcttgaagtacccctgggcttctcttaacatttaagcaagctgtttttatagcagctcttaataataaagcccaaatctcaagcggtgcttgaaggggagggaaagggggaaagcgggcaaccacttttccctagcttttccagaagcctgttaaaagcaaggtctccccacaagcaacttctctgccacatcgccaccccgtgccttttgatctagcacagacccttcacccctcacctcgatgcagccagtagcttggatccttgtgggcatgatccataatcggtttcaaggtaacgatggtgtcgaggtctttggtgggttgaactatgttagaaaaggccattaatttgcctgcaaattgttaacagaagggtattaaaaccacagctaagtagctctattataatacttatccagtgactaaaaccaacttaaaccagtaagtggagaaataacatgttcaagaactgtaatgctgggtgggaacatgtaacttgtagactggagaagataggcatttgagtggctgagagggcttttgggtgggaatgcaaaaattctctgctaagactttttcaggtgaacataacagacttggccaagctagcatcttagcggaagctgatctccaatgctcttcagtagggtcatgaaggtttttcttttcctgagaaaacaacacgtattgttttctcaggttttgctttttggcctttttctagcttaaaaaaaaaaaaaaaaaaaagatcctttaattaagc

SEQ ID NO: 2840 - DNA, 429 bp, Homo sapiens
ggggctgcagcataaaacgtttttcttacgtggattgttgtaaccatcctgcgggatctctaacagccttgtcacatcagctttgtccgatcctcctaggagaggatgtactcatcattcccttagctcagcccagttgtacccttgagatctccacatactgcaacatcaaagctaatttttcccccttcttaccacatgaccaaactaaaagacacctgcatgattccccaggtttaaagcaaagaaacccttggtccctgggtggaaaacttggaaaggtaccatcagtcaaggccaagtagcttttcttacatgaggagctgcactggcaggtgagccccgagttggtttgggaggttggcacctggagctctgggtgggatgtgcagccatgtccagggacttagagacagacagggcagctcc

SEQ ID NO: 2841 - DNA, 236 bp, Homo sapiens
aacatgagccactgtgcctggcccggcaactgttactagactgtagagagggaggtgggcaagggctggtgacactagacaggtgcagtaggtctggaccatgggtggccttgcgctacacattacagagctcaggctttttttctccaggtgagagggctggtgccacttgaggcattcaagcagaggttttgagatcttccttggtgacagtgttaggagccagacaggttagg

SEQ ID NO: 2842 - DNA, 490 bp, Homo sapiens
ctaacaaaaaaagatctccgtgtccatttaaaaatggtggatagtttccatcgaacaagtttacaatatggaattatgtgcttaaagaggttgaattatgacagaaaagaactagaaagaagacgggaagcaagccaacatgaaataaaagacgtgttggtgtggagcaatgaccgagttattcgctggatacaagcaattggacttcgagaatatgcaaataatatacttgagagcggtgtgcatggctcacttatagccctggatgaaaactttgactacagcagcttagctttattattacagattccaacacagaacacccagggcaaggcagattcttgaaagagaatacaataacctcttggccctggggaactgaaaggcgactgggatgaaagtgatgacaaggaacttcagacgtgggatcaacctgggagaagggcagtttcctcctcgtgaagtacatgggaattcagcctgatgcctg

SEQ ID NO: 2843 - DNA, 652 bp, Homo sapiens
ttttattattaaaatgatcttacaatgtcaacatcaatgttaataaaaatatataataggctgaattcatcaatgatagaataagttgtaattcacttggaggttccatctttcaaagtaagcctttcatagataaatgaaaatcctttattttgtagaattttaaagattgttaaaggctgggtcaaggcaaagccacctctattagaaggggaaagaaaagcaagatgaaacaaaatatgttatcatacatatcgcgtgtgctatgagcatctttctactcctgccagattgaaaattctaggtttcaacattcttcaggatttaacaagtcaaaataaaagcagaattcaaatctagacagatgtaaaagacttcagtttcaaattgaagttgatatttttcctcttcatagtatttggactttaaaataaaaaaaaattaaatcttactctctactaaggtatttatgtattgagattatgggttcttttcatattgaattttaagagatgctgctttgctgtctgcttttaaagggtcatgtcaccaaccctgtactgattcattgtacataaatgctgttgctcctaaaagcctaaaaatgcagacagcaaagcagcatctcttttcatattgaattttaagagat

SEQ ID NO: 2844 - DNA, 1364 bp, Homo sapiens
ggagtcaaaactctttattgtcctgcccagggagcccttcccaaaggaatccacagagcatggggggcaaggcgggcggcacagggccttggtgacaacgtgaagggggagctggagttaggtgggggacagccccttcagctccctgatggcactggctgtgctggcaggccacccaggggagccatcaccagcatgaggtccacacctggggctggggctgagtgctgtctacactgctctgtctggaggatgccagatgggcacacatgtcccccagggcagctgccggcaggagtctgacaaagggacccagccagcccctctggaccattctagaggccagtggtgaaggtcctgaagcaacttggcttatagagacacgttatgtgtacccggtgcaccccatgctgggaccagctctggtccaggggccaccttgacaggtgagcccaaatgtcctcctctccccatactgggcactgggctgaggcaggaccccagcaggttgtggcgggagcagctctacagagggaagccaaagcctttcaacagaagaacaaaggggcttccagggccggagtcacaggcctggggaggaggggacagggtgcttctgagaggcagggagacaacaaacccccacttcatgctggtcctcagtccttccatcctgccagccccgacccccggtccacaacagcaggcccaaccctgccttttggggtgaggagaaaaaaatctggaaccaaaagggatggcggctgtttcctcgggaccctggtgggtgtggggccaccgagcagccatcaccggaggttaaagaccaggctgacggtgaggatgatgcccaggagaaggatgaagggcagccaggtcttcacgaaggccccaacgctgacgtacttcccgtagagcaggcagaagaagcagagcgtcaccatattccagttggtgctgttgttgtagcgcatcagattcagggccaatgccacgtgcgagtggcagttgtcacagcagagattgtgcatgcggtgcttgtactcctcagaggcgtcgtgcacagccgtgtcccatgcgttgggcccgctagcatagacctgagcagggtccaacttccagtacttggcaggctttccaaaggccatgttgtcctctgagacaaagtaggggcccgcgaagtcccgaatgactcctgtggatgtgcagatgcccatgtggccgatgatggggaaaaaccacgtgagcaccgggatgggcgtccacaccacgcagtaggggaagcgactccgttccacatccatggcgacgccgccggagccttgatattgcttcatgtccgtctcggccgcgaattcttccag

SEQ ID NO: 2845 - DNA, 406 bp, Homo sapiens
  misc_feature (1)...(406): n = a,t,c or g
ggggaaatcatctaggggtcccccttatttggggcaccttcaagttccctgctcattgcaggaccttaggcaagtaaaaggagacttagactgattttctaatgacccgaaataggtatacagaaactttccaaaatttaactcaggtatttaacctcacacgggaggatgttatgttgctgctaactcaagccctcactgcagctaaaacaggcagctctgcaagcagaagagaattttggagataagcaatatgtctcctacagtacgccaaaagggaaaagaaaaaatagggaaggcaaagaaatagaggaaacactattcccaataggaagagaggcaatacttnttgaaaaccctaactggaattcctttctatgggggttttccttntttngcgggttaa

SEQ ID NO: 2846 - DNA, 816 bp, Homo sapiens
ttttttttttttttttgaatatagccaagtattccatttattaacaaaataagtcttaccaagggagagctctgttcgtcccaaacaggccccgcagcccccgcgctgccgcatcagaccagaaccaaggaggagtggggagaagaccccagtcgctggggggtccactctgggggctctgccgggcccaggcctaggagagggcgggggctgctgtgatccgagagctccctgacgccccaaccttccccgaaacgcagcttaacgagctcgtgacatccgctgaacatcgcccaccggtctgctttggagggatctagcgagagtcacctaccccacccctactgccaggggaaggggtcgttgcccccacgagggagagaaaaacaaggactataatgcacttcgcaaaatgtaaggggccgcttcacgccagcggggccttctgggactttgaattcaaccaggtgagcgctccaggtgccccgacaggcgcactgtagccactgggtgttaggggcgggagtctggaaggtgacggtagacgccacttgggcccttctgggggcgagcctactggtggggtcagggctctccgtgctcagagcaaggtagaggagcaaggccctacttttggggggcagggtccagaccaaggaccctatgcgcggagggtggcgggggaggagtcccggagcagtgtaccaggtcaatagagctccagggcccctgccacccaggtggccccctccacccccaaaatgagttacaaaaaaaacctcctctctgttacttgtacaacaaaggaaaaaacaa

SEQ ID NO: 2847 - DNA, 1124 bp, Homo sapiens
gggttcaaatttccccttggggccccattcggggaatgtaatgaactatcacagttgaaatccgccggaagaatcaattaggctctctgagtacaaatatacagaaaggaatgatttaaaataggtatgatttacaatcacattacattgtattaagcactcaaaacaggcatattaattaaaaagccagctaaaaggcatttgaacatatataacaaatcttacagtccacaaagttcatgtataacggtaattttaagtacttcatttcaacacagaagaaatgaacaggtgagggatgcctctcaaaatattaatttatgtctatgacaaaaactaaaagagctttacattgaaaatggattacactactgatagaaccatgtagtggacagggcaaccacattaaaacaaaaccaacagtgccgagcaactaacacagtactggcctttccaatcctctttcttccctggtaccacccacactgtccccaaattacctcttcattacccaaatcaaagaatctttctgttttcccaatcctcaaaaggaatgaagaaaaaccaaagagcaaactcaaaagatgatttttaccataaacctcaaatgtggcttaacaagtacaaagaaacccaacattcatacatagtgctccattccatggaaggaatagacacatcaaacattatccaacaggggtttctttatggattttgtacattggttgaacaagaattactgtatctgagaaggcacatatctgtgatttaaggcttaaacggtattgttacatatggaagtcaataaaagctgtctatgtattcacttctatcaaaatggaactgacccaaaaactagttttctaagtacagatttctactccagaaaccattaagaatttccattcccacgtccacctgtcaaaaaaaaaaattctcttaagcaggttttgttatgaaccaaaagaaattgcaaatgtaactgtccaatgactttgggtgaagcaaattcataagcttaaaagcctcacagaaatgacagtgtgatttctgtgtctttaaaaaaaagtctaaataaaattacagtggtacagattcatttttaaaaaggtatttgccacaac

SEQ ID NO: 2848 - DNA, 778 bp, Homo sapiens
  misc_feature (1)...(778): n = a,t,c or g
gctggcacttggcataattttatctcctctaaatcatcacagccaccctccatgatagcaatttctattctcaattaagtgaaaaggaaaccgaagtttaggagtggtaagtgacttacccaaaatcgtatagggaggaaatgcagacccaggatttgaactcgagtcttctttccttccaaactcatcccctcaacctgtttatttccttttctctatgaccatgtctgaagaaatctgccttggggttgtctcatattggactcactctcttggtctgtcagtgagctgaacttctcatccaatcaaatccaagcttatttcccaagtaatatctctagtgtattctatttgtaatgatcacacaggcaagggccacacatatcactggcatcctacagtacaattaatcaagtcaaattagattcctggatctcatattctgactgaatgctaatggtagtagatgtaaaatgactccagtgcaaggcaaggagggaggggactggatgtagggctgaatggcgaatcagtaagccttgctgcagacctgggttaacattagcagataggttttgagaacctgctcatgggctaggccctacttcacacattctaggtgctaaggtttcaatctcagctttgccattgactacttttgtgagtttggacaaggtatttaatttctgtgccgcgttttcttcagttgtaccaacagtaccttactaataccgatagtaccttactaatgagtacttgaggattaatnaggcaacaa

SEQ ID NO: 2849 - DNA, 469 bp, Homo sapiens
gaagaagacatggaaattgctgaaggatgtttcaggcatattaagaaaatctttacgcagcttgaggaattcagagcctctgaattgcttcgaagtggactggacagatctaaataccttttagtgaaagaagccaaaattattgctatgacctgtactcatgctgccttaaaacgacatgacttggtcaagctaggtttcaagtatgacaacattttgatggaagaggctgctcagattctggagatagaaacttttatccctcttcttctacagaatcctcaggatggatttagccgactaaaacgatggattatgattggcgatcatcaccagttacctccagttattaagaacatggcctttcaaaagtactcaaacatggagcagtctctcttcactcgctttgttcgcgttggagttccgactgttgaccttgatgctcaagggagagccagagcaagcttgt

SEQ ID NO: 2850 - DNA, 1015 bp, Homo sapiens
  misc_feature (1)...(1015): n = a,t,c or g
tttttttttaatttcactccttcatgactgtcacatggacaaaatgaaactaaacttaaatcataactaaaaaaaccaccaactatatttttgaagatttttctaattcttgccactcaaaggacaacattttccacaccggtttgtatgttatccttttggtcattgtcttctgaaccaatgaaatgttgattctccaagggatttgagttttcgtggcacacgtcacctattttctcctgctgacttgggcttttgaataagtgtttcttttggtgcattccaagggcagcagctgttttgcaaattttggggcactggaagcaggcatagcccttcccattatgctcccgaatatgcctctgctcgtgattccttttggtggagagatacaaaaatctctgaaagcagaactgacagtggtaacgcttttctccagtatggattctttcatggattttgagggtctcattcaaggtgaatgccttgttgcaatactgacagacgaactccttcaagcccaggtggatgcgttcatgtttctgtaagtttccttgcaccgaaaagcaccgtccgcaggtcttgcactggtatggcttctccccggtgtgacatctcatgtgcattttgagtgtggaagggctctggaactgcttggcgcagagctcgcaggcatatggccgagaagtaagatgtcggtggggccttccttggtttccagcccccactgctttgtctccatcacagagttcacactgcagcttgggcatctctttagtttcttcttcctcaaagggtttatcctgaggagccttccccacggcgcaatccagttctgctgggtatttacatttatggctcgggctcctgtttccgtgctccttcctccagttgactttcctcatttttttcaactgtctctcgtgccnnnnnnnnnnnnnnnnnnnnnnnnnnnnnnnnnnnnnnnnnnnnnnnnnnnnnnnnnnnnnnnaagggtttcananacganatncaa

SEQ ID NO: 2851 - DNA, 1223 bp, Homo sapiens
ttttttttttttttttgagggctgggaaattgtaaatttccttttttcagtatgctttaataattctctttcaaattacaaagtgcacgttttaaagaaagcccaatgatgaagatgttgactcgctaagcagtgtgcccacaccactcctgcctgtggccctcattctgcctgctgtgcctttgaaggattcagctcaggaggctgggatcagcttcccttcgcagaaggagccataccaggttggaagtggggagttccacttcaacaaagccctgggccactgagggcggggagctgcagggagggcgggaggctttccgtacagcacgcacagctggctgcctcttttctttgagtacacttgggctgaggcaatgagcaagcacaactgcttcgcctgcagtgcccctctcgtggcagacttgcctctagagatagcagccaggcaaagccctgcatgccagcgctgctgacaaatcacttttgaggctcagagctgaacaaaaaagtatgagaatgagtcacattgtgcatttacatgtatgtcctaggagagggttatgtccatcacttgaggcaggaccagtggtctgggggtagggcagctgggcatctaagaagccggaagcaaggctaacgtccatcataagtagttaccatccacagactgaacccccatgcccaggccgtggagcacagctccaacgtggcttttcaaagaggtactccaagatctggggccaccgcagtctctgcctctttgtttttgtttttagcaaagtctctcagcagggcccatgacttcattttcaaatatttctggggctggtttagcttctgtggcccagtagtaaatatcccagtcattactaggctcgttaatcaggcggtcatagaggttcagctgcttttctgtcatgtgctgcagatgttctttagcaaaaagactaagaagaatgcagttttccaacattcccctctttctgctctcatagagcaggcgggctcttttggtttctatggattcatcagttctctcctgccatggaggcaaagggatttcaatcatgtccttttgggaatctgttgggctgtcacctctgtagaagcgtctgaatgatgtcacactgagcaaaggagacaataggctgtgccttgacagagcaagcatcagcgacgaagtcgagaacactgtagacaccgccattttccccacctgc

SEQ ID NO: 2852 - DNA, 458 bp, Homo sapiens
aaatcttctttttcaggttcaaagtcaagtgttttctgaagcaaactgtgccaatttgatcagcactcttattacaaacttgataagccagtatcagaacctacagtctgatttctccaaccgagttgaaatttccaaagcaagtgcttctttaaatggggtaagaactatgcagaggcggcggcacacacttttaaactgtccttcagttaactgtgtggccttcatatgattttactctcgtaactttaacttactgattcaaactcttaagccatgtgcgacaaaaaaacaagttttaaatacacgtttactatgccttgtatgtacacagcacactctatcaccttggaagctacaagctggtatcattaaatgctgaaaggtaataaagggaacatcttagtggtcttatctctagttgggtatattttcccacgcgtccgcccacgcgtccg

SEQ ID NO: 2853 - DNA, 715 bp, Homo sapiens
aatttcccttgggttggaggggaagtgatttcataaattaattagaaagccatctttagcatattgcttatgtctggatccatgtttctgaggaaaaagacattctcaggtgatgtatttttttcatgcattagtatgcatttttaaaaaataatgcatgtttctttaataattaattttcatcttctataagatgccatgtgaagaagttgtggaaatgtagaataaaaagctaaagctgccaaatttctgttgaactcttaaaaacagctcatgtttgtttgtcctctcgggttgtggcctagcctatttgcaatgtaatgaagctgcagggttcttgtatagctaaagcgttcaatgcatttcacgtgctgtggtggatgtgggtgctgtagacaggcttcttctcttcctgctctcaaaatacctcggcttgacatttgggacagatcctgtccattgtttaagctgaggcaaaaaaccacacaaaagttgtgtaagagatgagataacaaaggagcgagagaaatctcatgtgaatttccaagttttaattcgttctccatgaaggattttcatttcagtgaaagtcgcagcagaagagggaactttctggagtttttgagaatgccaaaccacatttttatcacacttctttggaaatcaatgcctttgcatagaaaatcaaattcagggaccacaaagaattttcagg

SEQ ID NO: 2854 - DNA, 504 bp, Homo sapiens
  misc_feature (1)...(504): n = a,t,c or g
gatctaaatcatcctttgacaaatgaactggcaagattaagtctcagtccagttaaatgttttgttggagaatttcaattttgtcactttgatttatgtcaaggtataattttggcttgtcactcttttttagaaattttaatacgtgatgactacatggaaaggtaaaacacctttggaataaaacctaaagctattaaacgattccattgtaaataatatggtgtcttctgtgtgttggtcttagcaaatttttttaggtaaataacttttgcctatctagtcatgggtgtgcttttaccgctatattaggttatttaattctcatagctggtaatgttaaaaatgagattaacttggatcccagagggataaaggaaagattacaagtcccccaactcctgccagtagagaaaggattggaacctagcattttcattaattgtatgattttggaaccatactctactcgggtacctggggcttccaattttccncaaggac

SEQ ID NO: 2855 - DNA, 874 bp, Homo sapiens
  misc_feature (1)...(874): n = a,t,c or g
atggtccattcgagaaattttattggttaaatgatgcccagatggggtcacatcctcagaacttctcagcctggtagcacaagtggatgcttgaagaaactcagtcttggaactcagacagcaatggagacgggatgtgagtgggaccagcaaggggctaaggtccattatgagggtgaggaagggcttctggaagtaacaaacatcccaggtccctgactggggagaatgaagacactgaccaagagatgtgaagccactcagggctgtgcagggtctgaggatctcactggggacggcctcccagcggccagctatcagcacgagttggagggaaagagccatggtgggggtcagtcacgtggctcccaggaatggtctccccgacttaggaagcaccttggtgcaccttttctccttgcatcctcacaaccacccagtcaggccactcaagtcttacagcaggtgacactcccaaggtcccagctaggaggactttgagaattcaagcattctcaggtctggattagagacaggaatctgtctccacttccttacatggctagacacagagcccgggaggananggaaaattggaggccccttcttcccatgagccattttctctgcatcccctgcccataagccttcactggcctctgatcaccctcatggttgactgcagctgctcctctcagtgccctcatgccctccactgtgctcagcgcacggaaagagtgaatactcagttcttcctgagggaactgaggcacagagaagtggagggcatagaactgccaagtggcagggccatggataggaactaggcagcctgccttggcaacctgtgtttttaaatgttgcttatgttcat

SEQ ID NO: 2856 - DNA, 865 bp, Homo sapiens
acaacatcagtttgcttgcctgggctctctggggtcaggaaaggtgctgacttccatggaatggggcagcagggcctgctgtatttggtttgttagtactagagttgtttcccaatcaccctactcactgatcatttagtgccaattcaacattttatgtcttttttttttagtggatcccagtttgtgagctaggacctgtggaaatacaagtatcttcctttttaactttattgttttagccatcccaagtgttagactgcaagactaactacatattccccagtggaggttggaagtggaggggactgcttcattaggtctgaagggggccaaggaatgtgttgcagcagttttcgcagatgatactgacgagaggccaggtttgggaatcactgccctgccttggatggcaaattaagcaataaattacacctatttattcctcagttgggatactttcagttgaaccattctgagtagatttaagagaacaaaggacagcagaaataccttaaaagatattattggctgtcttatttttcagatatttgtatttaataaataccttagtagtagtcagaacctctttgagatgtttttagaaagaccactgatttgttttttaaaataatttttttggttccttagagtagagaagaaaagtaggggtgcaatatgtcaggtgtggggccagttatccatttattaaatgcaatttcaagtgtcttaaaaacaataattgccttattgcattttaatatttaataaagtagattaaataaagatttgtattataacagttattcttttatccattgccaaagcaacccttttttgcctattaaaatctggctaaactgtt

SEQ ID NO: 2857 - DNA, 440 bp, Homo sapiens
tttttgctgtgaagagctcctttattggggtgatggaatcggttccaaagagctggtttactgctgtgaagggatcgcagctttgaatttcaagctctggttctcagtcctcgggcacctgtgcgtgaatcgctgccgcaaggctgggccaagttaaggccccacgcactttggcatccgggccagggatggtctccagaccccacagggtgaagcggctgaagttggcagtggctccaatgaagcggtcgaagtcccgctccagcggctcctcctcttggtcgtcagtcccggaatcccgcaaggggtctggcttccccatcgacaccttcttctcttctgtcaccatcacgtatcccacgaggccaggcggcaccgccacctcctctccccgtagacagcggccccgaaacgacacttcgagtccctcggggccctgg

SEQ ID NO: 2858 - DNA, 441 bp, Homo sapiens
gaagaaaactctaacatttatgttgttaaatggtctttccatccttaaatccatgaaatttcatcttctcttactgccatgaagtgagttcgttgaatctattaaatcttagtgactctcatttcagcatccttgtttactctcacaggacattgtcttcactagaagtattatccatcttcaatgaatttggcctgtacactgtctccctgtgacaatctatatcattgaaagacagtacgcaaactccaactctgaggcctgcagctgtgggccggagctctgtatgtattattcaggcaaaagttggtgtgttgtctgtaggtgaggtttaaagggaaccctacatgaacaaaaacagtatcagaatcattgtaccttctgagtttagagtggtaggaaatatagcctaactggagtctagtataaactttcaatggt

SEQ ID NO: 2859 - DNA, 362 bp, Homo sapiens
ggtgagtgaaccatcttcagggcggaccctgtagccctatgtgttgcttgaatcttttagaagaaaaatatattcatgtcataaaaattaatatttgagtaatgttaaaagtagaaaaactttttcatgtgtataatttctcactgaacttaatgtaaaatgggatgtattcatagtaggacatgcctttctagaaaggtgattgtctcattctgttttctgttgcctataacagaatacctggaactggataatttatagagaaagcaatttattccttgcagttatagagactaagtccacagtcaaggggcctcatctggtgagggccttcttgctgatggggactctctacagagtcc

SEQ ID NO: 2860 - DNA, 325 bp, Homo sapiens
gtggtgaagctgtgttggatcatcccagagaagctccgagacagggcaagtgaacaccagaccacaaaggacagctacagtgtcaccatctgtggaaactaggcttttcccccatgcacgccttttcctgattcttcctctgcatagagacatttggctactttttccatcatggtggttagaacaagaaaatttgggcggaaaatgggagttctcaggagccaagatttgggcctgggaaaggaaggatgaagaggagcagtttggagcggggcatgaggttagactctcaaggccaggtgggcttgctgagggcagtgatcct

SEQ ID NO: 2861 - DNA, 428 bp, Homo sapiens
tttgagaacaactgatcctgtgtttaccccaagcccggcggggacacgctcacagatgtcaccacagccctgcccttcatgcccagccccatgggacacccggtggtctttcccaaacctcccccaaaacacacctggagccagagccttctgccgccagccctgcccctgaattggaagcagccctgtgctcgatgggaggggctcccaggccggcagcccttgccacctccctctgccaagcctgctgctgcagaacggtttttgctgaggtgcccctgcccagccctgtccagccttgtccacacacacatctcacgcccctgggtctcacagcctcacaccttgtccttccacccctgcctgcccccacccagcctgcttctttgtccagcattgatccttctgtttcaacaactcctccactg

SEQ ID NO: 2862 - DNA, 792 bp, Homo sapiens
gatgcctaaagctgtggaccgcgtgggctcgcctccctgggactaggtttcagcggccgctgcgatgaccaaaataaaggcagatcccgacgggcccgaggctcaggcggaggcgtgttccggggagcgcacctaccaggagctgctggtcaaccagaaccccatcgcgcagcccctggcttctcgccgcctcacgcggaagctctacaaatgcatcaagaaagcggtgaagcagaagcagattcggcgcggggtgaaagaggttcagaaatttgtcaacaaaggagaaaaagggatcatggttttggcaggagacacactgcccattgaggtatactgccatctcccagtcatgtgtgaggaccgaaatttgccctatgtctatatcccctctaagacggacctgggtgcagccgcaggctccaagcgccccacctgtgtgataatggtcaagcccccatgaaggagtaccagggaggctttacgatgagtgcctggaggaggtgcagtccctgcccctacccctatgaggggctccggtagcacctgggcacctgccgctggaagctattgggctggcagcaggacgactggctgtcctcctgcccacccacactgacggcatcttcccagttccccaaggcacgccttcttcccaggcagctctaacagccctttcatgaaggtaatgctagtcttctgtccatcagtgccatttcctgtagaactaaaggctgttccaagaatgtggggtggggaaagtaaatgctaagactaaaaaaaaaaaaaaaa

SEQ ID NO: 2863 - DNA, 4116 bp, Homo sapiens
  misc_feature (1)...(4116): n = a,t,c or g
gctgaggaagtgggacctccccttttgggtcggtagttcagcgccggcgccggtgtgcgagccgcggcagagtgaggcaggcaacccgaggtgcggacgacctgcggaggctgagccccgctttctcccagggtttcttatcagccagccgccgctgtccccgggggagtaggaggctcctgacaggccgcgnctgtctgtgtgtccttctgagtgtcagaggaacggccagaccccgcgggccggagcagaacgcggccagggcagaaagcggcggcaggagaatcaggcagggggccggaagaccgcagaccgagacccgaggcggaggcggacctcgagccggccatgtcggttggtggggttggacgtgggctcgcagagctgctacatcgcggtagcccgggcccgggggcatcgagaccatcgccaatgagttcagcgaccggtgcaccccgtcagtcatatcatttggatcaaaaaatagaacaatcggagttgcagccaaaaatcagcaaatcactcatgcaaacaatacggtgtctaacttcaaaagatttcatggcccgagcattcaatgaccccttcattcaaaaggagaaggaaaacttgagttacgatttggttccattgaaaaatggtggagttggaataaaggtaatgtacatgggtgaagaacatctatttagtgtggagcagataacagccatgttgttgactaagctgaaggaaactgctgaaaacagcctcaagaaaccagtaacagattgtgttatttcagtcccctccttctttacagatgctgagaggcgatctgtgttagatgctgcacagattgttggcctaaactgtttaagacttatgaatgacatgacagctgttgctttgaattacggaatttataagcaggatctcccaagcctggatgagaaacctcggatagtggtttttgttgatatgggacattcagcttttcaagtgtctgcttgtgcttttaacaagggaaaattgaaggtactgggaacagcttttgatcctttcttaggaggaaaaaacttcgatgaaaagttagtggaacatttttgtgcagaatttaaaactaagtacaagttggatgcaaaatccaaaatacgagcactcctacgtctgtatcaggaatgtgaaaaactgaaaaagctaatgagctctaacagcacagaccttccactgaatatcgaatgctttatgaatgataaagatgtttccggaaagatgaacaggtcacaatttgaagaactctgtgctgaacttctgcaaaagatagaagtacccctttattcactgttggaacaaactcatctcaaagtagaagatgtgagtgcagttgagattgttggaggcgctacacgaattccagctgtgaaggaaagaattgccaaattctttggaaaagatattagcacaacactcaatgcagatgaagcagtagccagaggatgtgcattacagtgtgcaatactttccccggcatttaaagttagagaattttccgtcacagatgcagttccttttccaatatctctgatctggaaccatgattcagaagatactgaaggtgttcatgaagtctttagtcgaaaccatgctgctcctttctccaaagttctcacctttctgagaagggggccttttgagctagaagctttctattctgatccccaaggagttccatatccagaagcaaaaataggccgctttgtagttcagaatgtttctgcacagaaagatggagaaaaatctagagtaaaagtcaaagtgcgagtcaacacccatgggcattttcaccatctcctagggcatctatggtggagaaagtcccaactgaggagaatgaaatgtcttctgaagctgacatggagtgtctgaatcagagaccaccagaaaacccagacactgataaaaatgtccagcaagacaacagtgaagctggaacacagccccaggtacaaactgatgctcaacaaacctcacagtctcccccttcacctgaacttacctcagaagaaaacaaaatcccagatgctgacaaagcaaatgaaaaaaaagttgaccagcctccagaagctaaaaagcccaaaataaaggtggtgaatgttgagctgcctattgaagccaacttggtctggcagttagggaaagaccttcttaacatgtatattgagacagagggtaagatgataatgcaagataaattggaaaaagaaaggaatgatgctaaaaatgcagttgaggaatatgtgtatgagttcagagacaagctgtgtggaccatatgaaaaatttatatgtgagcaggatcatcaaaattttttgagactcctcacagaaactgaagactggctgtatgaagaaggagaggaccaagctaaacaagcatatgttgacaagttggaagaattaatgaaaattggcactccagttaaagttcggtttcaggaagctgaagaacggccaaaaatgtttgaagaactaggacagaggctgcagcattatgccaagatagcagctgacttcagaaataaggatgagaaatacaaccatattgatgagtctgaaatgaaaaaagtggagaagtctgttaatgaagtgatggaatggatgaataatgtcatgaatgctcaggctaaaaagagtcttgatcaggatccagttgtacgtgctcaggaaattaaaacaaaaatcaaggaattgaacaacacatgtgaacccgttgtaacacaaccgaaaccaaaaattgaatcacccaaactggaaagaactccaaatggcccaaatattgataaaaaggaagaagatttagaagacaaaaacaattttggtgctgaacctccacatcagaatggtgaatgttaccctaatgagaaaaattctgttaatatggacttggactagataaccttaaattggcctattccttcaattaataaaatatttttgccatagtatgtgactctacataacatactgaaactatttatattttcttttttaaggatatttagaaattttgtgtattatatggaaaaagaaaaaagcttaagtctgtagtctttatgatcctaaaagggaaaattgccttggtaactttcagattcctgtggaattgtgaattcatactaagctttctgtgcagtctcaccatttgcatcactgaggatgaaactgacttttgtcttttggagaaaaaaaactgtactgcttgttcaagagggctgtgattaaaatctttaagcatttgttcctgccaaggtagttttcttgcattttgctctccattcagcatgtgtgtgggtgtggatgtttataaacaagactaagtctgacttcataagggctttctaaaaccatttctgtccaagagaaaatgactttttgctttgatattaaaaattcaatgagtaaaacaaaagctagtcaaatgtgttagcagcatgcagaacaaaaactttaaactttctctctcactatacagtatattgtcatgtgaaagtgtggaatggaagaaatgtcgatcctgttgtaactgattgtgaacacttttatgagctttaaaataaagttcatcttatggtgtcatttctaaactgttgattttgtcactaatttaaaaaatgagatgagggagaatatgaattattctagcagaaatgaagttagtgtccagtttttcttttttactgcttatgttctctcttttctaagtgaaaatgtttttctcctgacagaaaaatagcatatgtttattacattaaagcattttaaaaatactataaagtgaataaaacttaaaatcttgccacccagaagaaaacattgttaacacttcgttatacatccttggagccttttacccctaatgatgggggtatatttgtgtgagtgtctatgttatagtgctgtaggctgtttttaaaaactctgtgccagggaaattagtaaatacagtcaagtgttgtaactgcataaatgtagtgagttcattataaagacatacttaaaaataccaatcttgctattggtagatttaggtgtttctcatttttgctgttctaaataatgctgcaatgaatctatctgg

SEQ ID NO: 2864 - DNA, 1275 bp, Homo sapiens
ttcagaatagatcctaatattttattgagggcctatgtgctaaaaactatgcatatctatatattggccaattatctttaataatttaccttttgaaattgcatgtttatcatatatccttaagtggacacatacagtgccatgttgatgtgcctctcagttttattgaaaagctgccccacagcccatgtctcttgttctctgcaatgcctcaagggagtgagctctcaaccacagatagctgtggcttctcagaagcagctcattgccaagggccaggctgagaggggacctgcattgctgtggtggttgcctagcccagatgagcatttacctaccaccttcccacttggctagctgtcctttggatatgtgctgttaactggggaaggcatctaactagtagcctgctactccatagtatggctcaatagatgacacatcattttgacattatcaataggagaaaagaaaactaacccttcttctgattgtttggagccatagttgtctcagatgttctaattctctttgtatgcttggaaacagcatagatatgttgctgtggttttcagaattttctcttttaatcacaagaagccttttaaaaaatgacttacacatattctcaatgtacagtaaaacagacagaagtgagcttatctgtttgatgctgtggcagggtcccagtcactgggcatatcctccttctccttaaccagctcctcagcagcccctgagtcacctgcacaaggtgcttgggaactgctggttatgagcattcctggttttcttcagccaaataacaggtaatcactgtcaattggatttggtcttcattattttatattctgattttatcagaattattctattttaaaattgttttaaaatttaaaaacatttaattcatgatcatgttcatcagtagatgctattattcataagaactgtgattccagcaaactagggtaattggtgcctttttacagttttgaataaaagcatttacaatttctaaattatcagttttcacagtttcagcactcaacctcatcatacgctgatttaatattgttttacattaaaatagtccttttccctgttgtgccaccattcatttaagtgctggtttggtccttaaaatgcatttaaagaaaaattacccatattgactttcacacttcatataatcagatctattacaaatatatatcggagtgacggtgcccaggatagatgtaatatttcttacagatgctggcacagaggaaa

SEQ ID NO: 2865 - DNA, 844 bp, Homo sapiens
gctaagaagatcagtatctgtagatatgcctaggcctttaaataactcacaaatgaataatccagttggacttcctcagcatttttcaccacagagcttgccagttcagcagcacaacatactgggccaagcatatattgaactgagacatagggctcctgacggaaggcaacggctgcctttcagtgctccacctggcagcgttgtagaggcatcttctaatctgagacatggaaacttcattccccggccagactttccgggccctagacacacagaccccatgcgacgacctccccagggtctacctaatcagctacctgtgcacccagatttgggaacaagtgccaccatctcaacaagagcaaggtcattctgtccattcatcttctatggtcatgaggactctgaaccatccactaggtggtgaattttcagaagctcctttgtcaacatctgtaccgtctgaaacaacgtctgataatttacagataaccacccaaccttctgatggtctagaggaaaaacttgattctgatgacccttctgtgaaggaactggatgttaaagaccttgagggggttgaagtcaaagacttagatgatgaagatcttgaaaacttaaatttagatacagaggatggcaaggtagttgaattggatactttagataatttggaaactaatgatcccaacctggatgacctcttaaggtcaggagagtttgatatcattgcatatacagatccagaacttgacatgggagataagaaaagcatgtttaatgaggaactagaccttccaattgatgataagttagataatcagtgtgtatctgttgaacc

SEQ ID NO: 2866 - DNA, 1819 bp, Homo sapiens
gcggcggcagcagtggcccgcacatctggatggaagcgagctttgtccagaccaccatggctctggggctgtcctccaagaaagcgtcctctcgcaacgtggctgtggagcgtaagaacctgatcaccgtgtgcaggttctctgtgaaaacgctgctggagaagtacacagcggagcccatcgatgactcatcggaggagtttgtcaattttgcagccattttagagcagatcctcagccaccgcttcaaagcctgtgccccagcaggtccagtgagctggttcagctcagacgggcagcggggcttttgggactatatccggctggcctgcagcaaagtgcccaacaactgtgtgagcagcatcgagaacatggagaacatcagcacagcccgggccaagggccgggcatggatccgggtggcactgatggagaagcgcatgtcagaatacatcaccacggctctgcgtgacacccggaccaccagacggttctatgactctggagccatcatgctgcgggatgaagccaccatcctcaccggaatgctgatcggactgagcgccatcgacttcagcttctgtctaaagggggaagtcctggacgggaagacccccgtgggtcatcgattacacgccctacctaaagttcacgcagagctacgactacctgacggacgaggaggagcggcacagcgccgagtagcagcacgagcgaggacaactcgcccgagcacccgtacctcccgctcgtcaccgatgaggacagctggtacagcaagtggcacaagatgggagcagaagttccgcatcgtctacgcgcagaagggctacctggaggagctggtgcgtctgcgcgagtcgcagctgaaggacctggaggccggagaaccggcggcttcagctgcagctggaggaggcggcggcgcagaaccagcgcgagaaacgggagctggaaggcgtgatcctggagctgcaggagcagctgacaggtctgatccccagtgaccacgcccctctggcccagggttccaaggagctcactacacccctggtcaatcaatggccctcactgggaacgcttaatggggccgagggcgccagcaactccaagctctaccggagacacagcttcatgagcacggagccgctgtcagctgaagccagtctgagctcggactcccagcgcctgggagagggcacgcgggacgaggagccctggggtcccatcgggaaggaccccacgccctccatgctgggcctctgcggctccctggcctccattcccagctgcaagtccctggcgagcttcaaatccaacgagtgcctggtgagcgacagtcccgagggcagcccagcactgagccccagctgaggaacagcatgggcagtgccagccccacctggccaggggccatggacacctgccacctttcttcaacaagagtcccccaatccaggctacccttccagagaacgctacccacccagccagggttctctcggggaagatctcgtctgctcaccttagctttctgccttggcagcacgggctgcggaagaaagcacgctgggccaggaggcaggggtgcccaagccacagggagcccctggggaagcctgctccattcttctggtgaccttggcgctccttcactcatctcccctgccccctcaggaactggtggcccagcttccacacccccacctcccagtctctagcctctccatctgtctgtgtatggcctggagtcactccttcctcagcccccagggcaagagagctcaaataaaaaccagaggactgaaaaaaaaaaaaa

SEQ ID NO: 2867 - DNA, 374 bp, Homo sapiens
gatggcctcaatcttgcgaagccctcaggctctccagctcactctagccctgatcaagcctgacgcagtcgcccatccactgattctggaggctgttcatcagcagattctaagcaacaagttcctgattgtacgaatgagagaactactgtggagaaaggaagattgccagaggttttaccgagagcatgaagggcgttttttctatcagaggctggtggagttcatggccagcgggccaatccgagcctacatccttgcccacaaggatgccatccagctctggaggacgctcatgggacccaccagagtgttccgagcacgccatgtggccccagattctatccgtgggagtttcggcctcactgacaccc

SEQ ID NO: 2868 - DNA, 1188 bp, Homo sapiens
  misc_feature (1)...(1188): n = a,t,c or g
ttttttttttttttccacagagtgaagtttattcccaacaaagttcccctcccccctccccagcccgggacagggacggacaggctgggctgaagatggggttccagtggctgaggggcctctgagaaacaaggaagggccctgggaccccaggccaagccatgtccgggctcccccagcctggctgagtccacggcgcctccctgcccagccctcgggagagggtagagggcgctggctcctgggtagttccaaagtggagtgtgaaaatagagagatatatatatttatatgcagtgggcagtccagcgtggcantgcacacctctgtctggaagttcaccatccggtggttactgtgggcctcccccagctgcctgccccggtgcaaaagtcaagccgttctcggggcttggggggcagcgaagccccagtgtccatagatttgaaggtgctccagctctgatggcgccgatgttgggacaagctggggcgctccccagggctgggcttatccttggccgtggactggctgcggtagcggtcgaaagtgtggaacttctggttgagctcgtggtagagttctgaatgccgtttccgggtgtgcatcaccttctcaaagtccaggtctgaataccgtaatttctttcgctccagggagcccatcttcatggtagagccgggcacggtgcgaggcatggtccggctgcgctcccctggctcgggcacttggcgggcgctgggtgtcggcggtggcggttggaaggtcattccatagggattctggagagatccataggcagggcccagccccaggcccgagtggtccacggacaggaagctggggtagccttcagtgtgggccactgtcttggcagctcgccggggggtcccctccggccgggccctgggggcatcctcaccacctccacccccaacgcccaggctgcaggctcaaagtccgccggggcagcaccatgtagtctccctcagagcctggctcagtgggccgcagccatgtgaggtccagctgccgcaggccaccctccccacacatgtaaacagggttggcctcctgtgggggcggaggctcccccagccctggtgaggctgccatgggcaccaggatattcccaggcagtggtgagaagctgaggctgccctcagggcccacgaggcaggacttggg

SEQ ID NO: 2869 - DNA, 2628 bp, Homo sapiens
gataaaaatccctggtttttcccccaatcggcttaggttttttgttgttgttgttttttaactgagtagatcattctgacccagaactactttcatgaggtaagatctttgggaaaatctgaatagcgttaaccattagattcaaatctcaaatggtttcttttcaagtctagttgttttagagtatagtgagaaataccttgacacaattttaagagtaaactatatgggtcagcatatccttgaacaaaaagtagactttgtaaaagtattcatttaaattctaacactcgtggcaccaaaagaattggaaaattgtaaacccatgtaatggaaaattggctatctttttgaccccacatgtgcccctcaaaaatgtttttggtttgggtcaacacaaggcaagatacattctttaaaatactcccagatgtgtccatacattcatcctttactcagtgcatatgtgagggttgttgctggaagacaggaggctcatctttcctttccttggtgcattgagatcagtatcaacagcagatgaaatagaatccagcaaagagttgacaatgtttcctgccggccaactctagaatctttttaagcaggtcagccagtatttgcaacttccacaggatgaattgcttgccaagtttctggcactcttgtctggttggaagagtacatccaaagggtacttagtgatcctttgctaagaagttttttgctgtttccgggttacagatttggccatatatttctaaacagccccttgagactgtgtctccattccacctgcctgagaagtgggagcaattcaacctgttccaggctcttgggtagtagcatagccttataagtagagagctcttcagcaagactgagccttagctgttccatctctttgttcttctgttgctggagttgcaccccatttcttaactgcctctggcgttcttccatttcctccagctgttcctgcatgagatggccaagaacatttctaatgagccaaacaataaaaactcacattgtccactcttacttataaaacactttttgattcattgtttaatcttgatagcagtattgaggctggtatttatatgataggttatgaaacaggttcaaagaagttgtgtcttggaaaaaaagtgacaatgcttttgaaaatgatgacgaaaaaggcatcttgtctgttaaccacagcttgctttaatagaatcctggggagggtgattgggactttttagtattacaaccttagtgtcattgaggaggattttggtctagttagtgggctgagtttcatatacctctccctccatgtgcaggtttgttaagataattggtagtttttaataatataaaatacttaagttgaaatacaaaagtgtggcaacaattattaaatattggctagaattctaggagagttacacaactagtggaagtccatgtttagaaaataaatggcttgtttaaggaaaagtttttgtgtccaaagctccttaaagtcagagagatttctacctggtacttaacatcatatggaaattgatgctttagtgagggtgttggctatcctattgtcaatttcctgcatccttttttcttctttatttttgtatagagacaaggtctcgctatgttgcccagggtggtcttgttcctggggctcaagcagtcctcccgcctcgggtctcccaaagtgccgggattacaggtgtggaggccactgtgcccagcttatccttttttcattacacaaaaagactgaatttggttagttctaagttggaagataaagatggtatgcacaggaggcccttggggagccctcagataactttctcattcttccaaaatcaggctgggatgcattctgtaaattttccctgcctaggatgtatacctgaggaataaggtaaggaagatgtcagcaagtcagcctctggtttacctgctagctgggcatggatccttaaggaagcaggagggagttgggaagagaggaaggggtgaagttggtatcttttaaagcgagagtgattttacctcagattttgaagaatactaaggaatccagttgttggggtacatgctattattagaaggatctagataatttgtcctctgagtcatacttgacattgtacctgtggcacatcaatccgcactgtttgatactctggctgaatctcagctttcaccaacattggtcaaaggaccttttttagtgcccagccatgcctaagagtgtgtcatctgaagagggaagcatctgcatactgctgtcctgattgctcagtcctcactacctaccagacccgttggtaaggtacaaaagtacatgcttggaaaagcagtctgcaccaccagtgataagctgtgacagagtggaacagcctcaatgaaatgaaggaaggattgctacagtggcattaaggatggtctcttaatcctgtgttaaccactagattaactttacaatcaactcaaaatccttcaaaggctttccactttctttagtggcattcagaccccctctagtttgacccctacctccaacttgaacctctgttactcttccgtatgaacattttcctctagccctggactactagt

SEQ ID NO: 2870 - DNA, 498 bp, Homo sapiens
cttaaagaaaattagattacatactgtttcaattcttcaactgtaaaattagtaagatctggaacatcttgatcttcattttgatcttcctcctcttcagggggaggctgagcagttacttcacttacttgtgttgtagctgaatcagtttgggacaatttgagaattcctgtttttagcaattttgaaaacaattcatttacatccacctgactgagatgattatcaggatatgccttagggagggctcctgaaggattctgaacaaatccaggattttgtggatgaactggtaaaaactgttgtccttgaccaaaagctactggctgagcaacaccactcagaacctgttgagatgcctgaatatttcctactgtcattggagcaggtatattgccaaagtttccaaattgagaactctgaagatttttttcatcaaaatagtgtccagaagctctgttaagtggattagagaaactctggtttccagggccatgt

SEQ ID NO: 2871 - DNA, 1306 bp, Homo sapiens
tacatatcatggcctggttaacttttatttcttttgatgaaaatttttcctttgatagtacttgtattattgtgccattattttcttatgctccaaatgtaccaaagatcttgaacagagtggatgttcacaactgagtagaattttcctttcctgtgggcatgctgtgttcagacctgacagatctttgatagaggtcagcttattaaagggcaatattgttcttgtttagctacatcactgtggtgaatatagatggaattaaggaagtaaatgcaggccagggggttgtgatgagaggataggggagataatatcagcatcaaattctttgggtatctctctaagaattaaataatcttttctagcttaatattttaattctaattcaaacaactctgaggttttggtttcattagtaatagttgaggaataatatactagcaaagaatggcctaatgtttgtcataactgttaatggatgaaattttttaaagatacaaccatgataaccattataaatgatctatgatcaaaatctaaagtgatgaattatttgtaggaatgtcttcctaatggggaagaattgcataggagcattatgcaaatctacacaagcttttataaatgttgctgctgggtagctccacagtgtttcataaggccatcctgtttcccccaactcccccatttttggtttgtttctttttaaatatttgttgagtacttacgtgtttatctaacagttcacttccatttttctagtctggattttttgagtatttaggaaagagagctattaaaaactctggggatttctcaatgtgactaactctaatttttctaattataactgcctttaattaacataatattaacttttgctgaggtttatgagattttctcaccccacatcgctcccctttttttaaaaaggactgttttgctagtgtgataatgaataggtaagatatgagataattgcaacattgtctagttctagtatggtaactattcttgaaatggtattgaaaaataccgttaattcaaattgacagagattgataaaaagaaactgatttacctaagtttactttttaattgcataatagagcattttttgttttgagttccctcattcttattaccagaaagagcttgcaaatagttttactttcttggcactggaagggtagttctggaaagctactttgttgagagtctcattcttccctggagttaatagagtgattcacaatctttggggttttctcctcatcaaaagcatttcttaagtgcctatcta

SEQ ID NO: 2872 - DNA, 914 bp, Homo sapiens
tgcattcaaaacaagtgttatttattataaaatcagtggcttctgattagaagactttttttttttaaaccaaataggctcaagaagctggctggaggttgaattggctgacgaacatcttcttcctccaccagcagtttgtgggacacatcacgtttctgccaagtgctacagctgaagcccatattcatagaagcaccctgacagcccttctccagcaacttccagaaaacagaacctgagcactcaaagctgcatcagcccatgtggccttgctcccagagaagcatctgccagtttgggcatggaggaacagaaagtgggcagggaattctccttggctccttagaaggcagtgggagcccagggaagcgttcggccccagtgcagcctaattgggagggagggatgggtagaggctggctgggcttctccttcctcaccctcatgtaaggtgactgcccctctggctccttcagagctcttcccttccaagttcctactgagaaataagaaggcacaaaggaaaatcagccacctcctggaggtcactgtgggccacctgctttgctaagagccaagcacagacccctgcattctccctgcaggagagcccacccggctcagaagaaagcaattccgcctgtggggaggagaggaagggaggggaggggagtacacatggtgaggtggaagcagcgagcagagcttctccatccctcctctccttccctgccagaaatgcaattaagcaagtggcccagactcagccgcacagacagcgcttcctgctgggggaagtcaaaagggctgtagcagtgggaaagggaggtcatcgggccccagatctaattaaccaacctgccttgcttttgacgttgctgcatttcctctattaacattaatgatggttg

SEQ ID NO: 2873 - DNA, 350 bp, Homo sapiens
gctggagcacatggccttgccttgacctcttagattgttactaacctatataaacccttcaataattggtaaaaattaattttttaagctcatttacatatttttaccaaagacaggtccgacaattttgtaacctgcttttctacttacacgtttgtgtcattaaatatttttctctaatattatttaaatgctgtatggtgtactataatatagatttaccattatttatttaatactgaagttaatatatagtcatgatctaagctccatcctaattttgtaccatatctcatttagtcctcacaatcatgctatgcagtggatattattattattacacccaactt

SEQ ID NO: 2874 - DNA, 683 bp, Homo sapiens
gttaattttagaaatactttcagggtcatcattaagctttagcgtggctttgttactgccctgttaagtagttttgttggttagtatggacagtacagcaaacccattatgattcctttacagtgagaaaaatatgaaatagtccagaaagaataagatattaagtaacctttgcctgaaggttctgtgaactccttaagcgtttgaatgtaaatacttctccccaccccgaataagcgtattcttctgggaaaaggcaatgaaaaaagaaatgaactttcttctcagaccttgaaaagtttttagtgcatagtataatttttttcatatgatagactgagctttatgcacacaggtggactgggtggttatggatcaggagacagtgaagatgagaggagtgacagaggatctgagtcatctgacactgatgatgaagaattacggcatcgaatccggcaaaaacaggaagctttttggagaaaagaaaaagaacagcagctattacatgataaacagatggaagaagaaaagcagcaaacagaaagggttacaaaagagatgaatgaatttatccataaagagcaaaatagtttatcactactagaagcaagagaagcagacggtgatgtggttaatgaaaagaagagaactccaaatgaaaccacatcagttttagaacc

SEQ ID NO: 2875 - DNA, 238 bp, Homo sapiens
ggcgtggggcttgctgtgtcacactgtgggacccaaaggttgaaatggaaacatcctgtacacggaatggaaatgtgagattctttctttggcagcctcctatcaaaaaaccgatttctttatagctacctgtcataatatacctctttcataatacacttatacaccttaaataataatacacttatacgcctttatagctacctgtcataatacacttcatataccttaaaacttt

SEQ ID NO: 2876 - DNA, 4841 bp, Homo sapiens
  misc_feature (1)...(4841): n = a,t,c or g
ggacgactaaccagagacaagaaatttcaaaggtacctggcacgagttaccgacattgaagctacagacaccaataaccccaatgtgaactatgggatcgtggtggactgtggtagcagtgggtctcgagtatttgtttactgctggccaaggcataatggcaatccacatgatctgttggatatcaggcaaatgagggataaaaaccgaaagccagtggtcatgaagataaaaccgggcatttcagaatttgctacctctccagagaaagtcagtgattacatttctccacttttgaactttgctgcagagcatgtgccacgggcaaaacacaaagagacacctctctacattctctgcacggctggaatgagaatcctccccgaaagccagcagaaagctattctggaagaccttctgaccgatatccccgtgcactttgactttctgttttctgactctcatgcagaagtaatttctgggaaacaagaaggtgtgtatgcttggattggcattaattttgtccttggacgatttgagcatattgaagatgatgatgaggccgttgtggaagttaacattcctggaagtgaaagcagcgaagccattgtccgtaaaaggacagcgggcattctcgacatgggcggcgtgtcgactcagatagcgtacgaagtccccaaaactgaagaagtagctaaaaacttgttagctgaatttaacttgggatgtgatgttcaccaaactgagcatgtgtatcgagtctatgtggccacgtttcttgggtttggtggcaatgctgctcgacagagatacgaagacagaatatttgccaacaccattcaaaagaacaggctcctgggtaaacagactggtctgactcctgatatgccgtacttggacccctgcctacccctagacattaaagatgaaatccagcaaaatggacaaaccatatacctacgagggactggagactttgacctgtgtcgagagactatccagcctttcatgaataaaacaaacgagacccagacttccctcaatggggtctaccagcccccaattcacttccagaacagtgaattctatggcttctccgaattctactactgcaccgaggatgtgttacgaatggggggagactacaatgctgctaaatttactaaagctgcaaaggattattgtgcaacaaagtggtccattttgcgggaacgctttgaccgaggactgtacgcctctcatgctgacctccacaggcttaagtatcagtgcttcaaatcggcctggatgtttgaggtgtttcataggggcttttcgtttcctgtcaactataaaagcttaaagactgccttgcaagtttacgacaaggaggttcagtggacccttggagccatcctctacaggacccgctttctaccattaagagacatccagcaggaggccttccgagccagtcacacccactggcggggcgtttcctttgtctacaaccactacctgttctctggctgcttcctggtggtgctgctggccatcctgctgtacctgctgcggctgcggcgcatccacaggcgcactccccggagcagctcggccgccgccctctggatggaggagggccttcccgcccagaatgccccagggaccttgtgatccagctcacagctccacgaagactcaaaaggaaaagccatttttgcctcagggtttctcctctttattttcctgtggttttgttttttctttcccttttttgttcctccaaacaaaaacaaaannnnnnnnnnnnnnnnnnnnnnnnnnnnnnnnnnnnnnnnnnnnnnnnnnnnnnnnnnnnnnnnnnnnnnnnnnnnnnnnnnnnnnnnnnnnnnnnnnnnnnnnnnnnnnnnnnnnnnnnnnnnnnnnnnnnnnnnnnnnnnnnnnnnnnnnnnnnnnnnnnnnnnnnnnnnnnnnnnnnnnnnnnnnnnnnnnnnnnnnnnnnnnnnnnnnnnnnnnnnnnnnnnnnnnnnnnnnnnnnnnnnnnnnnnnnnnnnnnnnnnnnnnnnnnnnnnnnnnnnnnnnnnnnnnnnnnnnnnnnnngcattgtttataagccctgctgtctagaagtattgcgtttagccattttgagtacagcattaaattgaggagtggggaagagggaaattcacttgatttttgctgcacaggatatttgccaaaaataaatgagatttctggggtttctctaaggaatgttaaatttaaacacatgcactttgatactggagggaggtggaaagatgcattctgtcagtggagaggggactgaatagtgatgctttcatagaaccataaaacttactgcctgaaatgataatcctcttttttctctatcttgaaagctctaacctgaagagggtgatttttttttttatttattgttcaggtctgttactgtatatgttttctttgcaaatttaaattttttaaaccatttatatccaaaacagagaaacatgggcaccaggagataaccatttataaaagtgatagtgaactatcgactacagctttgtgtgagtgtgtgaaaaatcccaagaaaccagcgtgaggggaggcaatgctggttctttaaaaacacacacttcagaatttactggtacattttatttagaaaaatcctcgttactgttatcttttcctgaccgcaggtaattacgctccttattccatatttcagtggcattagaacactgtggttttgaaagaattggaaattcctagtttcaccagtttcggttttattggaactagagcacatgcccacttcttgctcagtattcctcagtgtttctgcttaatcgtgcctcagtttcttccagcttccaattggtgtttcccccaccccccttaattaaaagtcatctcagcttttaatcgtactgggagaccccatgcacagcctgccgagtcctcttcctaaccgcattgactgaggctgttgctggcagcaccactgtaaatccagaagggaagagtctgcatccaatacaggaaataaattcacattttgaaggaaaaaattcgacaatttaagccaaaatctaaaaaggacaattggattggcatatgtgagattggtgttttttcacctatttatttagttgagaagtttggggaattctcgtacagtttttttaggtggagtttgttttgtgtgagtgtctgtgtgtgctgttccctaactccagaacagttaaattcctgtagttggtagcagattagtacccagaagtggggttgttgctataacagataactgaggatattataaaagtggctttggaactaggtactgggcagaggctgggagagtttggagaaacaggagagaaaaggcctgtattgccatgaactgagcattaggggcagttctgctgagggatcagaagagaagaccaagggaattctgtcccagttgtggctcaaactgcctcaggtgcagcttaacctgcgtctctggaaggtaaaatgcatctgatccttgaggcaagagctgtgggggcatggctccctcacctggatttcaaagcgtgttaccagcagcctggggacccaggctctgcctctggatttacctgcatcgtatttgcgcttcgtggtcaaagttgttaagaaaggggtgagcttctggctacctaataagttggtcttggccacctgcctgcgacacttcctggaggagccatggattattggtggaggctgcagggagctggcgatggagccactggtgtcagcagcagagagggaagaaaggaaaggaaggggccacaaatggttgaagtgggcaggtgggcacccagggagttaggggaccccgccttccagctctgggcatagaagagttagtcacatacctgaggatcctgaaacaagggctgagaaaacctcattgctccagctgagaggtagtagtggatttgccatttttaaacagttgcctaagaaaaaacgttgaagaatatgcagcagacactatatgtggcctgtaaagcctagaatatttactaaaatatttacagaaaaagtttgctggtccttgtgagaacaatgcagttcaaaaaaggatacagacagaagcatcctcttaaatcaggaatgtagtttccatttgtgggcacgaaaagatggacaagagaagtaaccaaacttcaatcttaaaatatttgttgcaccagaatttcacttcggatttttccgtctagattatttttcaagatgagttttgaaacaaaccaagaaacctgcccctcacccaaaattgttttaaaaaagagaccactcaagggagttcattatgccgtatggagatgtctgcagtcgcagcaaatcacattccagagaaggtctcgcgtaggtgaagacagccaggtgctttctctaagagatacagggtgggtgagagacaagccagggaggatcttaattcaggagaggatttcataccaagagctgaccaagaaggcagtaaattctgtgtacttgtagcagaagaaattggactaggaacttgcccaaagctttatcaaagaaaagcattgtgttcaatcttgggtagaaacatgccagcaataggtgcttatgttccatagccatatcatgggcttctcacttttaaaccctcttccaggggatgttctcagacatttcacattcctctggggacattacagtggagagaacacatggagctgtaccagtgctttttgcccatgttcatcctagctccggttttggcagtgcttctgacctgggcggggtaggacgcttctgggtgcttaggccagtacaagggg

SEQ ID NO: 2877 - DNA, 359 bp, Homo sapiens
cgctgctgattccctgcgatggggaagacctcctttttcctaggtgaagtgggcaatgcagccaagatgatgctgatcgtgaacatggtccaagggagcttcatggccactattgccgaggggctgaccctggcccaggtgacaggccagtcccagcagacactcttggacatcctcaatcagggacagttggccagcatcttcctggaccagaagtgccaaaatatcctgcaagaaaactttaagcctgatttctacctgaaatacattcagaaggatctccgcttagccattgcgctgggtgatgcggtcaaccatccgactcccatggcagctgcagcaaatgaggtgtacaaaag

SEQ ID NO: 2878 - DNA, 913 bp, Homo sapiens
  misc_feature (1)...(913): n = a,t,c or g
ctcaaatggcggtgtgaagagagttcgcctgagccagatcccaggtttcactgaagaaacttcttagagattcattgcacttctgagatttaatgtttacaacttggagttgtcgaccttcttataagatacattttggaagtcaaaatgaaagttttctgtgaagttttagaagagttatacaagaaggtacttcttggagccacacttgaaaatgacagccatgattacatcttttatctcaacccagcagtttcagatcaagattgttctacagccacctccttagaatgggcaaacacctgtggtatccagggcaggcatcagcccatctctgttggtgtggctcccattgctgtagcacctgtgtgtttgaagaccaactctcagatgagcggttccagagaagtaatgctccttcagttaacagtgatcaaagtgatgacaacccggatattgtctgtcaaaaccgagttccatgcaaaggagcagtacagagatgtaattaaaattctcttagaatcagccaaagtcgattctaaattaatctgcatgttccaaaattcagataaattgttatctcacatggctgcacagtgccttgcattgcttctatatttccaattgagagaaaagataaccttaagtaattcctggattgctttttgccagaaaaatctttctgaatactctgagagtaataaagcaatatactgcctctggactcttacagcaataataaaagaaatctttaaagattcatgttcacaggaaaacaggaaattctaaaggcagttcctggacttcatttcgacaccctttttggaggtgtttttacaattcccttattctctcaggccttttggaaaactgccgggatacttctaaaatagtaaacatcctgangngtttc

SEQ ID NO: 2879 - DNA, 1151 bp, Homo sapiens
tacagttaaagaaaaaggtgtttatttaggccatcaactaggatcataataaataacgtaatatactaatgtaataacagatcttctcatgcatttatcgtgtttataaatatagaagaaagctggcttacagggctgttgggacaaatttggaaaagtgtatttggcaattacacagtaaaagttaacagtgttgactatcagattctcttttctgtcagtttttagaatacatcccctatacatctgtgaataaatggtaatggtctcttagagtttctactttttgtgaacatgccagagttaagtaaattgtcaaaggatccaggttgacaatgtgttatttgtcaatatttctaatgaaaaacagatcttagaaaaatgaactcttctgcatttcattgtagaggctgatatattacaagccggaatcattcaaacaataaaaaaagggcctccatgaaattaaaccccaaaagtagtttatcaatagtaactgtgatacttaatatacaaatgctgtagtattgcgtttgtaatttggtaagtaaatgaccaagtatctgaatgcaaaagtgatgaactttgatgaaagcttaattttgctagtaaatttcacacgaaggggtaaaataggataatctttaacataaagctttaggacaaataatttaaacatatcataaacactgaaaatgtgtttttaattgttatttacagttaatcagtgataccagtgtttagcttaatccagccaattgccagtcttgactccttctttcaacatctgttattaagatcttccttataaatacttagacaaattaatttagtgaaggagagcgatctgtggtccagagtaactcaatgtatggccatttggtttgcagacagcgtttaataggagtgtcatctgtctgtagcatgggatcttcaaaacccatcacaactgcagtcccttctacgtacatgaccttttcattataatttgactgcttcaatccattgtagtggtagacagtaaaagattctggaccactggagccctgatcaggaaaaaattcttgaagaaatgggcccaataatatgattcctaatccttctggatctaatttattcctcatgagatttatatattcaggatctgaaac

SEQ ID NO: 2880 - DNA, 475 bp, Homo sapiens
tgagcatttttctggagaaaggaccatagcttttattagattctcaaaggttcagaatggggaatgtgttaaacaaaccgaaaacctgtttcagctttaaaatcctccaaaactttaaagacttttcttttttctgagaaaggctggtaaatcactgagtcatcattcagaacatacagcctcgaagggcagagctcacacccatatatgacgttaagagctcaacaaatgtttgttgagtgactgagtgaccccaggggcagactccagatcatcagacactgatacagagagcgatgctatctcctcaactctccctcttctcctaaaagctgagtctatatagggatgacaggctcaggctgagcactggttgggatgcattcgaatgacttcagcaagatcctgctttcctcagcccccgctctgttttatttattgtttaatatttccaatgatccaaatcaaagtgaat

SEQ ID NO: 2881 - DNA, 1323 bp, Homo sapiens
ttttttttgcagagagcaaatcccatttattggaatttcactgacaacaaattgagaggaaggcttccccctcccctgaaacatgccatcctctctgccctcagggtacagcacagggataagacccccactccgcatgtccccagagggcagcactccaggggggtgggggggaggggaggggtgctctacgccaggctggggagctgggacaggagggaagacgtgcaccctcacctcttggctcaatccctctccccgggacctggtgctgcccccagtccctggggtgggctggcagacagggctcatgcaacaatgagtagacaggaggtggcacggaaacgtggccttgggtgcccttggcgggggcgggaggactaaaggggccatgctgtggccacagcgggtccaaatggaagtatctgcagtgtacatacaggagggttggagagaggcatccttttccctaggctgtgccctggggacaagagagaggggaagtacagctggcactgccgtgccaggggcagggtccaggccagccgtgccacctgagcgggcacagcgagctggagctcggctactccttggcgcggccaatgatggtgaggatgtacaggaagatgttgatgatgtctgtgtacaggttcagcgcagcaaacacatactcttctgggctcagggacagctgcttgttccccagcagcagctgggtgtccactgcgaggaagcaggtgaagagcagagccgcccagtgaggcgtacacgatctccaggatgcggttccggatgaagatgcagagaatggcgaagatgaagagcaccaccatgctcacccaggagcacgcccatgcatgaggtgaagtcgtagcgggtctgcatggagaagatgacgacggtgaagcagacggctgtggtgatgcccacggccatgatgactgcctcggtgttgtagaagctggcgatcatccccaccatgtacgacaggctggcggtcaggaccgacagtgcaacaaggttccaggggtgctttcgccggaagtccccacaacagctgaggacgatgagagagatgaagaagacagcataggagacatagtaggtccagacattctcccggacaaggcccttcacctccgcaacaaaagtgaacacagacaccgtggacagggtcaccgacagctgcaaggttagcactaggaacaccttgcggatgaaggcctgtcggatgctcttgtcatcccagttggtggcagggaagtcctggttgtcatagtaggatgggggaccctcctcctggtagtttccatgctgggtcga

SEQ ID NO: 2882 - DNA, 455 bp, Homo sapiens
  misc_feature (1)...(455): n = a,t,c or g
accnnttttnatgaccnnnnnnnnnnnnnnnnnnnnnnnnnnnnnnnnnnnnnnnnnnnnnnnnnnnnnggcacgagnnnnnnnnnnnnnnnnnnnnnnnnnnnnnnnnnnnnnnnnnnnnnnnnnnnnnnnnnntattaatctccctgtacatctctatcagagcttttgggtgacccaggtgcatcgtcattgagtagtaatattttgaaaggatcttttnnnnnnnnnnnnnnnnnnnnnnnnnnnnnnnnnnnnnnnnnnnnnnnnnnnnnnnnnnnnnnnnnnnnnnnnnnnntttctattcatagagnnnnnnnnnnnnnnnnnnnnnnnnnnnnnnnnnnnnnnnnnnnnnnnnnnnnnnnngaacattggctttctcttaaaatcattgtctgcattagtccctacaagagaatcagctgccttttaagctttgaancaggcattga

SEQ ID NO: 2883 - DNA, 575 bp, Homo sapiens
gagcatataaagaatctggctcctttgagtcatctccaactttgtcaccttaagcattctttttttttcttctccccttttcttttgaaaaatgctagaggcaaagaagaagattgaacaacagggaggcttcacctttgaaaacaaaggagtcctctccgcatttaattttgggactgtgcccagcaacaactgaaggaaagaacatcagctgaccaaatgtcatcgctgcattttatttcacaagaggagtgtgaggggtcaaggggatgaaatgaggggctgcttttaggggcccctccctgctgtgcccagtttaccatctgggcattagggcagcacttttatcctactctttccccctttgacctttgtcaccctgaaatttatattttaaacagctactgtaagtatgaaatgaaagaaaaacaatcattggacggaaaaggacaaaccatatgttccaaaggctgaatgcccaaggttgttttagaggattggatagacttgcacgtctcaggtttttgccatgcagaatcaatggatttatgcggataacagtgccttctgttgta

SEQ ID NO: 2884 - DNA, 3371 bp, Homo sapiens
gcgacacggcaggttcccgcccggaagaagcgaccaaagcgcctgaggaccggcaacatggtgcggtcggggaataaggcagctgttgtgctgtgtatggacgtgggctttaccatgagtaactccattcctggtatagaatccccatttgaacaagcaaagaaggtgataaccatgtttgtacagcgacaggtgtttgctgagaacaaggatgagattgctttagtcctgtttggtacagatggcactgacaatcccctttctggtggggatcagtatcagaacatcacagtgcacagacatctgatgctaccagattttgatttgctggaggacattgaaagcaaaatccaaccaggttctcaacaggctgacttcctggatgcactaatcgtgagcatggatgtgattcaacatgaaacaataggaaagaagtttgagaagaggcatattgaaatattcactgacctcagcagccgattcagcaaaagtcagctggatattataattcatagcttgaagaatgtgacatctcccatgcaattcattcattgccatttcacacataggcaaggaagatggaagtggggacagaggagatggcccctttcgcttaggtggccatgggccttcctttccactaaaaggaattaccgaacagcaaaaagaaggtcttgagatagtgaaaatggtgatgatatctttagaaggtgaagatgggttggatgaaatttattcattcagtgagagtctgagaaaactgtgcgtcttcaagaaaattgagaggcattccattcactggccctgccgactgaccattggctccaatttgtctataaggattgcagcctataaatcgattctacaggagagagttaaaaagacttggacagttgtggatgcaaaaaccctaaaaaaagaagatatacaaaaagaaacagtttattgcttaaatgatgatgatgaaactgaagttttaaaagaggatattattcaagggttccgctatgggaaggtggatatagttcccttctctaaagtggggatgagggaaccaatgaaatataaatccggaggggaagtgcttctcctgttttgggaattttgtaaatcctccccaggttcagagaagatccttcatgggaaatcaagttctaaaggtctttgcagcaagagatgatgaggcagctgcagttgcactttcctccctgattcatgctttggatgacttagacatggtggccatagttcgatatgcttatgacaaaagagctaatcctcaagtcgggcgtgggcttttcctcatatcaagcataactatgagtgtttagtgtatgtggcagctgcctttcatggaagacttgcggcaatacatgttttcatccttgaaaaacagtaagaaatatgctcccaccgaggcacagttgaatgctgttgatgctttgattgactccatgagcttgggcaaagaaagatgagaagacagacacccttgaagacttgtttccaaccaccaaaatcccaaatcctcgatttcagagattatttcagtgtctgctgcacagagctttacatccccggggagcctctacccccaattcagcagcatatttggaatatgctgaatcctcccgctgaggtgacaaccgaaaagtcagattcctctctctaaaataaagaccctttttcctctgattgaagccaagaaaaaggatcaagtgactgctcaggaaattttccaagacaaccatgaagatggacctacagctaaaaaattaaagactgagcaaggggggagccccacttcagcgtctccagtctggctgaaggcagtgtcacctctgttggaagtgtgaatcctgctgaaaacttccgtgttctagtgaaacagaagaaggccagctttgaggaagcgagtaaccagctcataaatcacatcgaacagtttttggatactaatgaaacaccgtattttatgaagagcatagactgcatccgagccttccgggaaggaagccattaagttttcagaagagcagcgcctttaacaacttcctgaaagcccttcaagagaaagtggaaattaaacaattaaatcatttctgggaaattgttgtccaggatggaattactctgatcaccaaagaggaagcctctggaagttctgtcacagctgaggaagccaaaaagtttctgggcccccaaagacaaaccaagtggagacacagcagctgtatttgaagaaggtggtgatgtggacgatttattggacatgatataggtcgtggatgtatggggaatctaagagagctgccatcgctgtgatgctgggagttctaacaaaacaagttggatgcggccattcaaggggagccaaattctcaagaaattcccagcaggttacctgggaggcggatcatctaattctctgtggaatgaatacacacatatatattacaagggataatttagaccccatacaagtttataaagagtcattgttattttctggttggtgtattattttttctgtggtcttactgatctttgtatattacatacatgctttgaagtttctggaaagtagatcttttcttgacctagtatatcagtgacagttgcagcccttgtgatgtgattagtgtctcatgtggaaccatggcatggttattgatgagtttcttaaccctttccagagtcctcctttgcctgatcctccaacagctgtcacaacttgtgttgagcaagcagtagcatttgcttcctcccaacaagcagctgggttaggaaaaccatgggtaaggacggactcacttctctttttagttgaggccttctagttaccacattactctgcctctgtatataggtggttttctttaagtggggtgggaaggggagcacaatttcccttcatactccttttaagcagtgagttatggtggtggtctcatgaagaaaagaccttttggcccaatctctgccatatcagtgaacctttagaaactaaaaaactgagaaatttactacagtagttagaattatatcacttcactgttctctacttgcaagcctcaaagagagaaagtttcgttatattaaaacacttaggtaacttttcggtctttcccatttctacctaagtcagctttcatctttgtggatggtgtctcctttactaaataagaaaataacaaagcccttattctctttttttcttgtcctcattcttgccttgagttccagttcctctttggtgtacagacttcttggtacccagtcacctctgtcttcagcaccctcataagtcgtcactaatacacagttttgtacatgtaacattaaaggcataaatgactcaaaaaaaaaaa

SEQ ID NO: 2885 - DNA, 813 bp, Homo sapiens
ccagccatcaatagaaagaagacgttctcggtgctgaacttctatatcaccaccaaaaagtaaaactggaaaaggagttattagggtagtttctctcaaatacactctggcataccttatcttctcctggtataagagccatccatgagtttgcaaatctcgatttactgaggatgggtgtaacttgtgctttgccttgggccgtctccacaatgcaagccaatttttctgtaacatccactgactttgtatagattatcttccccacattgtcatacagtccagccaccagtacagctttaagaagggcaatttcttggaatgagagggtctgtgaggctctgtttccttcccagctggtagaagttgtggaagatgaaaatcctgctgccttaaccaactttattaactcctgctttacatcctctagggttaacagtgatgttctattaagaaagttcctccggcagtatgtgatttcagaacgataacctccttcttgtcgtgctttcttccatcctagatatgcattgtagatcgtcaggtggtctgaatccgccatggccaaagctgattttgcaagatctgcttcatcttttcgaccaattggtgtggtaaaaggagacttctctgtcataactgcagctagtgttgccactgggtcaaggcagccaaatatggcaccaaaaataagcatcttgccaatcttgacattcacaggtaaagctgcaaggtgttggcccaacggagtcagtttaggctcatttaattcacaagctccaatttttcggagcaaaccctcgctgccgaatc

SEQ ID NO: 2886 - DNA, 979 bp, Homo sapiens
aggaggaatttgaaacaggatatttaagagtgtggatatttttaaaatgcaataaacatctcagtatttgaagggttttcttaaagtatgtcaaatgactacaatccatagtgaaactgtaaacagtaatggacgccaaattataggtagctgattttgctggagagtttaattaccttgtgcagtcaaagagcgcttccagaaggaatctcttaaaacataatgagaggtttggtaatgtgatattttaagcttattctttttcttaaaagagagaggtgacgaaggaaggcaggaatgaagaaagccctccgtggcctccggtggaatgcacggggcacagcccgcgactctgcaggcagcttcccccccatgccagggctctgcgccgtcatgtgagacttaaaaaaaaagttgaatgacttcgtgatactttggacttctaaattaaatttatcaggcataaattatgtagaattagaggctttgaaaataatactggtaggttgctcaaaggttttgaaagagaaatcgctaggtaggttactatctggctaatccatttcttatccttgacaatttaattcatatttgggaaacttttagggaaatgaaaaataaaagtcactgagtctgggtgacattttttaagaataatataaattcagtttcaaactcttctcacattaaaattttgctgtgaactcttactaaaatgagttttaggttctgtaagtggaaaaatgtgcttttattttatgggccatttttaccacaactaatcttgccttggattactaagcatctcctgcgatcccacagaggactgtggtggccacaggagctgaaagcagaagagtgggatttgatgccaggcagtggagtggcctcagccccagattgtacctcctgccctgtaggaggggagggggcaaagccttctgacttcacctttgtttgacctatgtatggaacttac

SEQ ID NO: 2887 - DNA, 507 bp, Homo sapiens
  misc_feature (1)...(507): n = a,t,c or g
caatttctctgggttcccaaagaatgacatttgaacacagtattttgaaacagctctagttttcaaattatatctttaatatatagtaatgtaacatattcagtattaatgtataaaaagcactctaattatataattcagtttttgtaaaggtatttgcataaaatttaatatgtcttaaactaattttggtaaattacttcttttttttctttttaataaaaactgttactcattaactttgcttataatgctttttatagcccagcacagaatttaaagccataccaccaaaagtacctgtgtgtgttaatatgtttttcttgtagcatagattgactatttgcaatagtattagtatttaccatttttccaaattagcaactaccagacctcacgtgttgcagtgataacacaatgcattggattcagttttgtgaaaanggattctgnggccatccangggatgttcagggatgancacctgatgaaaggcccaaaaggatt

SEQ ID NO: 2888 - DNA, 2352 bp, Homo sapiens
ttttttttttttagcatgcaattttttattgttttctaaatctatttgtacacttaatatgctagtattaatttcacaaacagtataaagaatgtactccaatgatattacgcggcaactactcacctgaaaaagaaaacattgtctctgaaataattcctaattatacaattttgcaaataagcactataaatgttaaaatgttaagacttcagtgtataatgtcaataacatcctgcctttttaaaattgcttaaaacatttgttaaagatcatgcaaaataaacactgtattaaaatgctagattacactcaaacatcaaggcaatgaaacacaaaagagcaactatttagcacaatgactggcccagtaaataacttaatcagcatattaataaaaacccactgagtgataaacatcgaaaatgtaacactgaatctagataatagcgcatctgcgatctcaccatctaccgtcctaactgtgacttggggtaaaccaccagaattcattctacataaatgagctatgttaaaacgataacaatatttcattgcatgatgacagggtacatttctagtccacacagtacttcaatgtgaccattctcttaactcggctaataattaatggaaagtacacttttacagtcacagcacttatatagatatatatatatattttacccttgctttgttacatgtttccaaatttttttttaaaaagtatttcctttcttatgatccttccccagaactaacatgctgacttaggaacagatgaagtagataaagtctatcctagtatagagagcaatgatttagttttacctaattaaatatttccttgtcatttatcaattgtcactgacctttttgatgtaattatttcctcattcactcatctataaatatttattagtacctattattacccatgtctccctgattttccagaaaaagaattcatgtttttttttcttctcattgctaagctcacttagaaaagttgggcaccatttaaaagagttggagaacagaccagggtggcttcttgggcacagctggatggtgctggaagccaggcctgggatttggagagaagagtttccgacatataaacccacggaggtcaccagccctccccgcatctactctcctaacagctcaggacagccccgtcacactactgccagccctggtgactcactttgttggcaatttttaaagccctcttcattatgtacttcctactcttcagaacctctgtgataagcaatacccctgccatacagaacgctggatctcggtttactcagcctctccctgtagcgtcacaggctgtgcactcacctaggtgagcccctaagagcagggtttgcttctgcttcacctaacgccacgtcttccctcaaatgtgtggtcaccaaatgtttgcaaaaagggtctctagctttttttctttttggcacattaagccctttaaaatacttctgacctatctttatactcagatctcacctcgtctcaaaaagttttatggggtaatgcgccaatgaaaggtacagtagtattagtgagttctgaagcttctaattacaaagaccacagaggctggctggtgagccatgcttctcatgctcccttctgtcacactgcagatgtctcttttacctcggcctcatcatcggttagttatctgtcagcaaaatgtagaaaggtgatgggcgtggatggagtcaaaatccaggacaattctgtcataagggtacagtaacactcttctcctttgcttgtttttctcaaagaatgctttctctttcttctccaaagcctgtgctctcagaagaggctgctgcatggagctccggaggatctttggagagccttgtgtaacttgaacgttggcttcgcttatgtgtcatgctttttagattctcattctgaatagtggttgggttgggactggaactaggcctcaaaatgacttgagaagtctccctaattccctccatctcatcgaaattttgattggctctgttggctggagcactattgttgttcagagtcacggtgctgggagttcggttcaggttgtaggctttctggcatgcaggccagttttcttcagggctgctggctatcaagctgcattcggaagggcttttcttgtcttctgaacaaatggacatccgagctataattggatcttgcaggccactcaggctatgtgggattccaccgctttccgctgtgactgtcatcttccagctctatgagatttgccttttcaagctgggagtcatccgccacttcattgtgcagagagtgattgggagaactttcactgga

SEQ ID NO: 2889 - DNA, 322 bp, Homo sapiens
cttggaggtagtctcatcattcaaatgttttgttgtgtacctaaaaaaagaaaagaaaaaagatcaattttaggaacttaaaaaataatcagcatcgggttctctaattatgacaggatggagaattggtctcagcaaaactcacaaaattatggcttctcattgtagctttaaccctgttcaggttctgcacagcctgtcatcctcaccccctttctaactgaatagccagtagctatttagcagctatttaacttagttacaactacactgctgaaatgattggttgacctctcaagtaaacaattagctgtaacttctc

SEQ ID NO: 2890 - DNA, 624 bp, Homo sapiens
gccattcttgaggaaatatagagatgacatgttttcaccccaactatctggtgctattgaatgactaattcagtccctaaagttctgtgaaaacacaaaagtctaatgatttgagtgagtaaaaggtaatggtgcatttgaacaagtaaatgctgtcgtggtcagcaagatccgtgatttgaacatgtgatgactggaaaaaggtttgggttatttggaactctggctaaaacttctttcgggtgacatgtgatcgtttaaatggcattaagtgaataaagcacacagacagtgctactcttgaccactattttaccatttctttgcaaacagtgttcacattttcatattttttccctaactaaaccaccaaagaaagaaattttgtatgtatatacagtgtgtgtgtatacaaaatcatgatatagtagaatgcaactactttctttttctaccaaacgaaaggttttatttgctgtgaaataaaccagaagtttaaaaaaccctgtagtgattaagcatacttaaccactccttatttgtagattcactttcaaccttaaaaattaataccagtttgcataaaccaatatctgaaaagaacaggaaatgttaatggcaagc

SEQ ID NO: 2891 - DNA, 515 bp, Homo sapiens
  misc_feature (1)...(515): n = a,t,c or g
gtgaggctggggcaagcctcgtaaggactggaccacgggtgggcaggagaccggtggagaacccgccctgttgttggggctggggagggccgcgcaccgagactaaattctccttccggccagatccgctcaccaggccctggcgacctgagcatctacgacaactggatccggtacttcaaccgcagcagcccggtgtacggcctggtccccagagcaagacttcagccaggatctaccccacctaccacacagcctttgacacctttgactatgtggacaagtttttggacccgggtgaggagggagacaaggggcatcctgagaccaggacaggagaggctgaagactgagccctggccttgtcaccttgccgcaggcttcagcagccatcangctgtggcccggacaacgggggaatgtgantctccggctcagtgacangcttcttcctgcccctcaaagtcagtgactacagtgagacatccgcagctttctgcagnaagccaaccaag

SEQ ID NO: 2892 - DNA, 458 bp, Homo sapiens
  misc_feature (1)...(458): n = a,t,c or g
tttganacccttttgaanancgnnnnnnnnnnnnnnnnnnnnnnnnnnnnnnnnnnnnnnnnnnnnnnnnnnnnnnnnnnnnnnnnnnggcacgannnnnnnnnnnnnnnnnnnnnnnnnnnnnnnnnnnnnnnnnnnnnnnnnnnnnnnnnnnnnnnnnnnnnnnnnnnnnnngggtaagaagatctcaaaaaaagaaagtgtcatcatctactagattggaaatatcagatattcttgagtctttcttctccctcatatacagttagtcatccagttcttcaaaatctcgttgaaatgtggcttcccctccagccagtctactgcctatcagtacttacctgtctgtgcattagcccccaccgacctctatcccaccagcatctccctgtggcgctgtgcagtctcgctgttggtcaccttcctcatcagaacaagcctgagtgtgccacactcct

SEQ ID NO: 2893 - DNA, 1435 bp, Homo sapiens
caagctaacccctcagttatctcgaactcatgcaacatgaattctcatcgattatcttgttttatcaataaggaaagaaatgggatcttgttatgcaggagtaatccgttccaatgtgatgttctgatgtctgaggagcacgtctgcctttcagaacagatcctgcactctgctagtgcatttctccagcactccacggggcttttacccaacaatgcagcttcacacacagacaccacattggtatatggcacaagctggcctaacatgcagggaaaggatggtctctacccacacagccagacagtgctttctactttattaaacatcaaagcccaaatagatgttccctgtagaggaggacttaaggacactaggagaggagaaagggacacctgggaagagaatcacaccacagagaccaatcttcacaaaaagggtccaatattgatttctagggaggagcagggcatggtcagctcaaatttggtgataacgtcaggatgaaggaccccaagcttcccgacgctttgacccctggcaaagatctctgcacatcgcccggggaagaaagcaggcccttctgatgctttgatcacatatccccccttgtcttcaccaggaggcacatcgagcaactgcataattctgtccagcagcccatgaatgatctcaaaccccaggattcttgttgtaataaacagcacagagatgtctgtagttttttgcacctacatctgtattagaatcttttattacaatgtcagagatttcaaacagtttcagtggaaggggcatcttacgatttgctgctatggtcttcaggaggccaggaagaagggtagtgcgtgccacctgaaattcagctgttttaggattacttatgtggactgcctttgttgcagagatatccacacctagtttatcagcaatatcttcttgggagcacagggcaaaggtaagtgcttcagtgaagccagcggctgcccatgtcatgtcggagaagttcagtgagcttattaagaggaaattgattagctatggtgtaagttttcgggagagtcatctgaatgttgttatatccataagcaatagctgcatcttctacaatatcacatgcatggataatgtcagctctggttggagggatttcaatctcaatctgattcccatcacctatgacttctgattttaaatacatcctggtcagaagtttggcaagattttctggagtttctctgattccaacttttttgttaattaggtcagctctcaccatctcctttcggtaagctaattctggaaaggtatgtgattttccattaggaaaaaccacttcagcagcttcgaccgtaaattgattctcacaatattcactgaacatggtgacaataatatcaagaactatttttgccttagtaaagtcagttcccgt

SEQ ID NO: 2894 - DNA, 748 bp, Homo sapiens
aaaaaaaaaaaaaaggtggcaggagaggctttggggaggatcagccagcagacatgagcactgctggcccgtgtggcagagctgtggactttcttctcggctccctcaaccctggctcaggcacagaaggtgttttgctacgtttttttgattattacacccctccacgtattatgtgactcttacaccagttcacccttcccagaacgtatccaaaccttgagaatgcaggagctctgtgagctccaccgtcagcaccattcagctgcatcccttgtgcacagaactgtttgccagcgttgggtgggacacccgtggcggctgctccctcagacctcccttctgtggactgacctctcacctccgcctgttgttcctgcaccacatcagataagcatgtgaaggagggccaactggcagctgcgggacccttggcttgtcccccactgacaagtcccacctgctgggtgaggacgagactgtttccatctcaggcatgtatcccaccaagtgcctccctcacagccatgcccagaagcctcacacctcgtcaccaccaccaccccccaccccatcctgaggcactgcctggcagataaccctggttggccacagaagctattaatacacgacagcatgtggggaaggacttatggtgggccaggtggacctcatcctgcttcttcctccctctggtttaaagagatatataaactaatttcacataaaaaaaaaaaaaaaaaaaaaa

SEQ ID NO: 2895 - DNA, 1316 bp, Homo sapiens
ttttttccaggtgaaacaagtaaatcattggctttattctgggtcctggaagctccactgtgagtctgaaaaaaagacacaacaggggcggcagccctgggggctggtgcagaaaatagtccctggctcctctggccctgggagcctaaagggcagtgaggagaaggcttagcaagaggcctggagcaggggaagtcaggtccctcaggaacccctcctcccccagaggaaggaggaagagggctggagagtctgctggagagtctgctcagttcctcagcaactgcactgcaggagggtgcaggccatgggttactccttgcccttctcaggggcagtgggctcccagagccactttggtaagtccccaggggctcagtcccaggggtccagccgtgactcccctaagggcccctcgccctccaagtccagctcctcaaaagaggagccgctggcacctgactcgctgtagctgtgctcgctgcgggtgtcaccgtcatcccagccacggctgctcgccccaggtgacagtgtggcagctgaagtctcccggctgccagggctcacttccaagcttacagaactcgtgtcactcattgtgtcagctcctgtgccatccacctgggtgtcaatggcctccacaagcccccgcccatttccactctgtctccttcatctcaggcacatagaagtctccctgccgtgccagtgggcacatgaaatggatctggtcttcctggtagatctccagccgaggataggcacacacgttccgctccttgatgtaggtgtccaaggcaggatggacacggcgggtagccagccagatggacagaatggtggtgtaggggaaggtggctgtcaccacatggctgggtgccgggaaggagaacaccttgaagccaaatttctggtagaggtcgatgagctcaggggagggcgattcctcaccttcactcaggatgctgcccacggcacatcggcacttatcagggggcaccatgtgggggttgtcatagtagacagcgatggagcggagcttgggagagatgctgcagctctcagtgaaaagccgcccagtctcaccatagagccccatgtggaacttgtaggccacagtgacgttgcggatggggggtgacccagcactcacttccaccccagccagtagccctgagtacccggcaaaggccagcagcgtcagcagcagtaagagagtcaggcccccaatcaggcccagtagtagcaggtccgacatggctctggatccccaacactgcacctcaaggcagctacagcagccgcccgctgcggac

SEQ ID NO: 2896 - DNA, 1247 bp, Homo sapiens
acgaggatccggtgttccaacccagggggaaaaatgcggcctttgactgaagaggagacccgtgtcatgtttgagaagatagcgaaatacattggggagaatcttcaactgctggtggaccggcccgatggcacctactgtttccgtctgcacaacgaccgggtgtactatgtgagtgagaagattatgaagctggccgccaatatttccggggacaagctggtgtcgctggggacctgctttggaaaattcactaaaacccacaagtttcggttgcacgtcacagctctggattaccttgcaccttatgccaagtataaagtttggataaagcctggtgcagagcagtccttcctgtatgggaaccatgtgttgaaatctggtctgggtcgaatcactgaaaatacttctcagtaccagggcgtggtggtgtactccatggcagacatccctttgggttttggggtggcagccaaatctacacaagactgcagaaaagtagaccccatggcgattgtggtatttcatcaagcagacattggggaatatgtgcggcatgaagagacgttgacttaaaacgaagccattccaaggacagacggctgtatggaaaggccgagctttgtttcctgtgtttgtgtggactccaccatcatgttgaattttgtcaacactctggcctcttcagggacttcttatttactgtactctctatcactgacaaatgcaggctggattcttattatatacagagatggctcaaaaatggggtttcagatctttgtgacgaaatagaatactgtttcatatttgaatcagagggcttcttgttctgagaaataggttcaaaatcattggaaccaggaacaagaatagcttattgttatctgtgataacactgttttctaaacacaaggattttcttttttattaatatgcaacatagacattgccataacagaataataaaccacatgtggggttttaaaaatgaaatttggctaataggagcaattcagctatttttctatacagtaattggtgtgtggtatagaagaaaaacgggttcaaaccccacttctgccacctaccagctatatggccttgaatgagtcattcagctttaataaggttcattttcttctgtttaaaaagacacaaaacttgaaaatcagctttggccatctacctgagaattagaaagtctgatttttggaattagaaatcatgattgtaggctgggcaca

SEQ ID NO: 2897 - DNA, 1305 bp, Homo sapiens
ttttttttttaagttatgaaatttatttatattttaccttttaaaagccagaacataacaaatctcactttctggaaagtcatcttattagaaatacaagaagtgcacttaatacaaggaagtaagtttctcggtgccaccagtgaggtggacatacactcacatcagtccctcaaacgaaggtttcgccagatttccctccagacttctgagatgatctgaattcaggaaggtctgagtgaacttcttccagaaattacagtgaacaagctgaccttaacttttgggtcctcccgagaaatactaatgaaaaaactatttttttccagtgggccctgtgtttgctggcttctcggcatctgcagctcttcaccggcaggcgcggagccccacagcagcagtgtacaagcgcgaggtagcacttgcagccccatcagagacatatgacatcaaaaaaccaacctaaacccatatgccttttggtcaatcagaggttctgctcctacagattaggctgacagctcttggacttatatttattaatatttgtgaaatatgaactccaaggttcttgagctgttcctaaagcaagtttccagcaacagcttttattaacaactgttcatcttgcgatgtgctgtgccttatgaacgatgtctcgtcagaacagaccaggggtggtactgggtttccctatagcttctctctgcatctacaaagcaggttttcaaacacattttacatgtcgaaaccagtgtcataaggaaaacatttgtgacagaaaaacaatgctcagtttaatctaagttaccaagcagaaggtaaaagaactagtatccgctgagtccccaaacctctttcttctaattcatctgaggattttttgtgcttctagaacaagaatgtaggcaggctcccaaatggagaggtaaacatgaccgcgttgtttgaaactacttcattaatttgtaaatcagaaccaaaaagctctggccctcccacttctcttagctgaccctcctccccacttacggataaacagactttaacttccctaacccagaaacacttccaccaaaaatgtatggttataccttatcctaaaaaggcaccatgcaggcatttaagactgaaccagtgaactctaaatatgtagtagtagaaaatatcactaatcaaaacttccagcatcagatggtacaaaaccccaagaggactggtgacatgtaccccgggatggcaaccccagcttctggcaaccccacagcccagcgggagcttcagctctggtcaggtgcacggctg

SEQ ID NO: 2898 - DNA, 352 bp, Homo sapiens
tttttttttttaactcttcccccttttattttttatttattatactcattttttgttggaatcctacccgcccccctccgccccgcccacggcccctttaaaattgacagccaagatttgctggcaaacattctttttgtccttggatgctacaattccaggttctgccttttatctcccaagctcagaagtttcctggggccaatttttgcagctcaaaattgtccgtgcgattttgttcttcaccgctttgaaacaggaacaccttgccctgttgctttgccactccccattttctttggggatgactgcctccaggaatactcattttatattagtcaaaggggtgaaa

SEQ ID NO: 2899 - DNA, 503 bp, Homo sapiens
  misc_feature (1)...(503): n = a,t,c or g
gacacccatttattcttccttttcttcctgcttaatattctcagttgtaattcttgttgttacaaacactttgaaattttaaattaaatttagctagaagtctttaagttccaactaatggctaatgtttgtagtaggtgcctttcagtagaatttgagggtggtgggaaaacctggcatttgaagcttccaacattctgagactgaggaggaataatcaagattaacagagtagaaccctcttaaataataccattgggacttgtaattgggcagttaactgaaaaagtcggttatagctgggactaataaaatgttaagacttaagcattttactttctttaaaacgtaaaactgcatttattcaccaatccttaggtgtaaagctgccangatcttttcttcgagtttagattgttgaatggtgttctcagagctctcacaaaantcanacccttgatgcatgaggtngatttccnatttgngtccttggnnaancnaaa

SEQ ID NO: 2900 - DNA, 275 bp, Homo sapiens
ggaaggctcacacctaccaccagccccgtgtgcaggaagatgaaccgctctggcctcctgcccttaccccggtgcccagagaccaggctccaagcaacagccctgtccttagcactctattcccaaaccagtgcctggactggaccaacctcaaacgagagccggagctggagcaggaccagaacttggccaggatggccccggcaccagagggccccattgttgctgtcccgaccccaggatggggactttccactgtccgacttacccccatt

SEQ ID NO: 2901 - DNA, 571 bp, Homo sapiens
  misc_feature (1)...(571): n = a,t,c or g
ccatcaagtcctctgacaaactccgccagatcctggagattgtcctggcctttggcaactacatgaacagtagcaagcgtggggcagcctatggcttccggctccagagcctggatgcgctgttggagatgaagtcgactgatcgcaagcagacgctgctgcactacctggtgaaggtcattgctgaggaagtacccgcaactcacaggcttccacagcgacctgcacttcctggacaaggcgggctcagtgtccctggacagtgtcctggcggacgtgcgctccctgcagcgaggcctagagttgacacagagagagtttgtgcggcaggatgactgcatggtgctcaaggagttcctgagggccaactcgcccaccatggacaagctgctggcagacagcaagacggcttcaggaggcctttgagtctgtggtggagtacttcggagagaaccccaagaccacatgccccaggcctgttcttcttccctctttagccgcttcattaaggcctacaagaaagctgagcaggaggtgggaacagttgaaaaaagnaagccgctncccagga

SEQ ID NO: 2902 - DNA, 458 bp, Homo sapiens
aaacttgactgcaacaaatggcccagagatctttttgaagtgtagagtctgactcagcaggtgtgggtggagctgagaggccagcaagatcccaggtggggccgaggctgctcatcctcctaccacattttgagtagcaaggagctaccaagagcagccgacggggtttcattctcgtctactggaagcaaccttaatagacaactgaaaaacaaaacaaaacaactgagatacctgtttctgccagaaaacccaggccattcactggtcagctgttccaaaaccagagttaagctactgcagctgttcccgcgtgcctgcctgcattccagtaaataatcccacgtggcaagtcagctcacctggttactgccaaagcatgttcccagctggtgtgactcagaggcacaccagaatttctttattataatttggcgatggggtcttgctttgccacg

SEQ ID NO: 2903 - DNA, 1593 bp, Homo sapiens
tttcacactgtcacaatttattgaaattttataaaaactcaggccaagtggaagaataaggtacaactcaagagtacaaagacaactccgtttccgttcagtacttttctcctcagcactggtggtaagaaagccccttgctctctagtagccaggcagcatggacttacagtcttaaaatgaggctttatgtatttcaggctggaggcaggttgccttttctcctgaggaatctcagggcagggtaaaagttacttaccactcagtacctctgtgccagaagaaaagctcaatttattcaatccttagaaaagttactatcgtcccctggtcagacactaaggtgtcttgataaggtccagagacaaccacatagtcctttattctaattcgtagtgaaaaggctgcagggcatatggtgctcctacgatgggcctgaccctttcctaagcacatctcatttccacatcctttgccttctctttcccccaacatttccagccagcatagaacccaatttctgggaaattgagaggagaaacagtattatgaacacagactcctttcaaattggaacaggagccaaaccaaataaataagagaattgtgtagggaagtggggtagaagggaggtcagggagcaatcccttgcctcaagtctggtgcacctcatggaacatcagttcacgggggatggctgtttctggaccaaacttggtggctgcccgacgctcaaaggcagcaacattctgtttgacaacctcatcaaaaaacatggtggcccagctgggagtgcagcagagaacgaaattcaaaggaaatcgaaaagtccacagtgcaggttcgaggataggcaggaataccagggctgaatcgccaaatagtctctaagtggttgaagagcttgccatcagtacaaacagccttgaccatgtgaggtttgaccatggaaactgcagaggtgtaacgttccatgacaggtggaaagccaacctccagctgggctttcaaatgacccttacggctggataccaccagagacttcttacaccagggcacaaactcacgatactcctggacgttggacaccacctcatacatctcctgcattgagtacctaggagaagaagaatcacaggccaaggagctgccagctggggtcaggttcctccttgctataggcccctaattcatacctttgcccacttaaccacgcaccttcaggaactacagatccccaaataagcctggggtgaattaactttcccaaaaggcaaacgtgtaaatccttatgatactgttaccttatattttgcagtttacagaatgcttttgcattcattgtttattttgattttaagagggaccatctagggagaacagaggctgtcagttttactggtgatcacacaaggatcagatcccagctcttaacaattttttaacaatgtggccttaggtaaattacctgtgtctccattttctcacctgatttataggtttgttgtgagaattaaatgagaaatatctatgtaaaacatctaagtcaagctgctagcatgtagcaagtgctcgataatttagctattatgc

SEQ ID NO: 2904 - DNA, 166 bp, Homo sapiens
gctcattcatgcaaccaaataccacctattctccaaatatttattgaaataataattttaaaaagcccctttcaatcatactggagtctgtgctaatgaggtgactcttggaagatggggtctggtggccagaggagccaatcatgtgatttaaaaaaaaaaaaaa

SEQ ID NO: 2905 - DNA, 2116 bp, Homo sapiens
tttcttttgcgggacagaggatcagatgttgagagtttggacaaactcatgaaaaccaaaaatatacctgaagctcaccaagatgcatttaaaactggttttgcggaaggttttctgaaagctcaagcactcacacaaaaaaccaatgattccctaaggcgaacccgtctgattctcttcgttctgctgctattcggcatttatggacttctaaaaaacccatttttatctgtccgcttccggacaacaacagggcttgattctgcagtagatcctgtccagatgaaaaatgtcacctttgaacatgttaaaggggtggaggaagctaaacaagaattacaggaagttgttgaattcttgaaaaatccacaaaaatttactattcttgggaggtaaacttccaaaaggaattcttttagttgggacccccagggactgggaaagacacttcttggcccgaggctgtggcgggagaagctgatgttcctttttattatgcttctggatccgaatttgatgagatgtttgtgggtgtgggagccagccgtatcagaaatctttttagggaagcaaaggcgaatgctccttgtgttatatttattgatgaattagattctgttggtgggaagagaattgaatctccaatgcatccatattcaaggcagaccataaatcaacttcttgctgaaatggatggttttaaacccaatgaaggagttatcataataggagccacaaacttcccagaggcattagataatgccttaatacgtcctggtcgttttgacatgcaagttacagttccaaggccagatgtaaaaggtcgaacagaaattttgaaatggtatctcaataaaataaagtttgatcaatccgttgatccagaaattatagctcgaggtactgttggcttttccggagcagagttggagaatcttgtgaaccaggctgcattaaaagcagctgttgatggaaaagaaatggttaccatgaaggagctggagttttccaaagacaaaattctaatggggcctgaaaggaagaagtgtggaaattgataacaaaaacaaaaccatcacagcatatcatgaatctggtcatgccattattgcatattacacaaaagatgcaatgcctatcaacaaagctacaatcatgccacgggggccaacacttggacatggtgtccctgttacctgagaatgacagatggaatgaaactagagcccagctgcttgcacaaatggatgttagtatgggaggaagagtggcagaggagcttatatttggaaccgaccatattacaacaggtgcttccagtgattttgataatgccactaaaatagcaaagcggatggttaccaaatttggaatgagtgaaaagcttggagttatgacctacagtgatacagggaaactaagtccagaaacccaatctgccatcgaacaagaaataagaatccttctaagggactcatatgaacgagcaaaacatatcttgaaaactcatgcaaaggagcataagaatctcgcagaagctttattgacctatgagactttggatgccaaagagattcaaattgttcttgaggggaaaaagttggaagtgagatgataactctcttgatatggatgcttgctggttttattgcaagaatataagtagcattgcagtagtctacttttacaacgctttcccctcattcttgatgtggtgtaattgaagggtgtgaaatgctttgtcaatcatttgtcacatttatccagtttgggttattctcattatgacacctattgcaaattagcatcccatggcaaatatattttgaaaaaataaagaactatcaggattgaaaacagctcttttgaggaatgtcaattagttattaagttgaaagtaattaatgattttatgtttggttactctactagatttgataaaaattgtgcctttagccttctatatacatcagtggaaacttaagatgcagtaattatgttccagattgaccatgaataaaatattttttaatctaaatgtagagaagttgggattaaaagcagtctcggaaacacagagccaggaatatagccttttggcatgggtgccatggct

SEQ ID NO: 2906 - DNA, 695 bp, Homo sapiens
caatattttcacccctaaaatttttaacggggtttcctttttttctcacgactatttaagtttagattgctccattattaactgattaatgcactttgaagttctctggaattaattattttaacttggcctagcttcgactgtcaaggtggctgttataaatttgacttcgattggcagtggatgaagcctaagccagctgagtctctatcatagctgaaccctgaggacagcctcatagctcatgtatcagggacttttgccacatttcagaggcatagcatgaacaagtaatattaagccaagaataagcagcagaaccctgttccatatggaaaaaagaaaaacaatttttttgtccctaatgttcttccttttacatcctggaacaacaataaaaacatttttttaaacttgtctactgtaagatactgccatcataaagcagagacttacatgagtgaaagggttgcctcatcaagcagctcagtgtaaatggggaggctaggctctccccagccctatggtttttttatttcatgtaccccaggaaatactgtgtggtttctaaaagccctggttgttaaaagtagggactctgcctttttgttggtagggagaaaaaacgctattgctttgtcttacagagcgaatgtctgccaactacccgttcattatataagtctgaacttgga

SEQ ID NO: 2907 - DNA, 701 bp, Homo sapiens
taacaatgattgtgaatacagactggtccagcaccatgcctggcacctcagtgttccctggagcctgcttcttaaagatcacagttttgcttatttgaggtttgggcagcagccctacttcagaggtcctcacagggcagcagccagctgtgggtaggcatttccaggaagagcacaaggccttccttcctctctaccccagctgacagtttgctaagctatggagagtctgagtgggtagtgtaggagaaacagcatgaggtttgaagtcagaccaatagatagagattcaagaccctatctcagcactcacagttctaaagaccttttgtgaatcagataacatctttaaacctttgttttctcatctgtaaaatgggaataacaatgataatacctccttcagaattgcattaatatttgcataagattactgagaaatttcagtgaaatgataaaatgaccattgtttgttactgtgaacaacagtaacacttatataatactaaaagtaatgagaatctcttgcaggacaaagcccacaaacgctatctgctaatgagcattgaccagaggaaaaagatgctcaaaaacctccgtaacaccaactatgatgtctttgagaagatatgctgggggctgggaattgagtacaccttcccccctctgtattaccgaagagcccaccgccgattcgtgac

SEQ ID NO: 2908 - DNA, 439 bp, Homo sapiens
gcacgccggcgtgatgagggcacggggaaaaggtggctctggccggggtggctcggtttcctggggctatgtaactgagctcgtcgacttaggggtccttcttcgctgccctcgccgcgtgctagcagggagtttccgctcgggagagagactgtcctcacgcccgctgcgcctcctcgacggcagagcaggcttgctcgcccgtgggagcgtcccggccgagaagccctgaggggggaggggaggccattttgtcccgaccgactccccggaaccgggcggagcggctgggagaggctgcggagccgcggtcgccgccctcggaggcactggacgccgccactgtcggggcttcctcaaagctgttcgtaggtcgcccgcgccgtctcgagcctttttcccacgcttccccggtcctccggcctgagaacgcccgagt

SEQ ID NO: 2909 - DNA, 480 bp, Homo sapiens
  misc_feature (1)...(480): n = a,t,c or g
gaaaaaaaagaaaaaaagttggctggagttatcctcgtaaagnnnnnnnnnnnnnnnnnnnnnnnnnnnnnnnnnnnnnnnnnnnnnnnnnnnnnnnnnnnnnnnnnnnnnnnnnnnnnnnnnnnnnnnnnnnnnnnnnnnnnnnnnnnnnnnnnnnnnnnnnnnnnnnnnnnnnnnnnnnnnnnnnnnnnnnnnnnnnnnnnnnnnnnnnnnnnnnnnnnnnnnnnnnnnnnnnnnnnnnnnnnnnnnnnnnnnnnnnnnnnngccccccaccccatccatggcaaagtagtcttccatgaaactggtctctggtgccaaaaggttggggaccgctgtcatagagggaatcatttttgaaagagaacattggacttttgaaacagaataaagaaaggtgccaagcatantaaactcttaaagaaagggaggaacctgaaaggatagatggaaggaaanttanggaagccttttaagtgg

SEQ ID NO: 2910 - DNA, 423 bp, Homo sapiens
cgggcacgagaactggcagatttgcacccccccaccccgcctctctccctcaaaacaaccaaacaaaatgatttcagcccttgcttgcagagagatgagactcagacaaacagaagagaatgggggtaaaattcccagatccccggaagcttaaggtgggaaaggccttctgcgttgcgcgagtcctttgtcagccataaaacttcttgaccttttaaagcttagttagatcttggcgttgtagagacctgttgtaccagtttttaaatagtctcaaagaagctgtccagataacttttttttttttttgaatccagcattcaaaagttttgtttctattcagggtttctcctatgtctgatctttaattgcttttgaatgtttaaaaacaaaacaaacaaaaaaaatacaaaagaaaaccca

SEQ ID NO: 2911 - DNA, 1193 bp, Homo sapiens
aatgaggaagaagttggatccgagtggtaccctgaaaacagccctgctggactacatcaaacgctgccgtcctggagacagtgaaaagcacaatatgattgccctgtgcttcagcatgtgccgggagattggcgagaaccacgaggcagctgcccgcatccaactgaaattgattgagtctcagccctgggaggacagcctcaaggatgggcaccagctgaaacaactgctgctgaaggccctgactctgatgttggatgcagcagagagttatgccaaggactcctgtgtgcgacaggcccagcactgtcagcggctcaccaagttgataactctgcagattcactttctgaacactggccagaacacaatgctcatcaacttgggccgccacaagctgatggactgtattctggccctacctcggttctaccaggcttctattgtggctgaggcctacgattttgttccagattgggctgaaattttataccagcaagtgattcttaaaggagactttaattacttggaagaatttaagcagcaaaggttattaaagtccagtatatttgaagagatttccaaaaaatataaacaacatcagcctactgacatggtcatggaaaacctgaagaaattactcacatattgtgaagatgtttacctgtattacaagttggcatacgaacacaagttttatgaaattgtaaatgtgcttctgaaggaccctcagacaggttgctgtctaaaggacatgctagcaggttagatgatttcataggtgtctgttttcttgtactgttagcagattctgacagatgtgatgagaagaagaatgcattggagatctttgctaaagttgaacaatcccggtactgtaccatatcagtcctttgtgggtagtaggtagcaagtaagaaacttttcaggaggaaattcctatttaaaatagattgattttagatgattgttcatccacaccattttatatagatactagtattaagatcaaaagcttcctcttcctcaggacagcttctactttagatgatccaataatgattaaagaatacctgtacctgcagattccagtttcaaagaaatttaattattatttacacagttaaggaacaggtgatacattttcatttgttagaaactgatctttctgtaataaaatagattttcaattc

SEQ ID NO: 2912 - DNA, 329 bp, Homo sapiens
ttttttgataccacagagaatagttgggatgaaaggcatccagcccctgcttcctttaagatggcctctaggcagtgggtgttctgtaagcctggcaaaaattctggagccaatctctggcaaggctgagtgccaggcggggcctagggacccagggtcggtgcttaatgcctcccgcccattggaaattactgacctccaaatatatatatatatatgttttttaatttaaaggggaagtacactgcacaccttcctccactgggagaaagagggcccaatccccagctacccaccccccaccccccaaacacacacacacacacacg

SEQ ID NO: 2913 - DNA, 884 bp, Homo sapiens
  misc_feature (1)...(884): n = a,t,c or g
gcactttattgaatatcatatttgagtgtttaatttttgcgaggattataggctggactccagatccaaacttgacatgtagcagacccattaaaaacatacattaagcccctagcactgttttaatctccatggcctggctgagcttctgccatctgtcttcctaggcaccatgaggtctggacatctcatttggcataactcagctgtggccattggtggatctcatccttagtactagtccctgctggcagggttgacccaggcccacataagccattgctggcctccttggaggacttagagaatcctgagattgcccatgaggatggacatgcctttcagtctagcacccacctttagtgatgcctgtgggagattgagaagctcacaggggccttgggatgtctttcctatactccattgtctgcagcgtgactcccatactcttgagccaaggtagagaatttttaggaggcttgtgtggaggtttatggtggcccccatggttctgtgagactggtagaaagcacagaccccttagacttctccccaaggagaatacgtgagactagtggaggaaaggagagtaatgaaatatgcatttcgtgtcccaggctatcagagcacagctctaaggaaaaatacagggcatcgtatagcaactggcacagctctgtgagactgggagatattgcacaaccttgaaaaatcaagatgtgaccctactgaatgaacaaaataaatctccaataattgaccataaagaaatacaggtttctggctgggtgnnnnnnnnnnnnnnnnnnnnnnnnnnnnnnnnnnnnnnnnnnnnnnnnnnnnnnnnnnnnnnnnnnnnnnnnaatcantttgccaacatggtg

SEQ ID NO: 2914 - DNA, 364 bp, Homo sapiens
gtaccctggatctgtttcctcaaaataacactccacctttcacctagcaagaaggatggttatctgcatgggtgccatctttctgggccctccaaatgcggacagctcacctttgctgctaaaaacacctgcttcacctcccagctccaggtcattcctctgagatcttatggaaaagctctcagctaaattggacattaaatactagaggaatggattggttcacatactgggaaagtccagaggtcactggtgaatgcagggctccagttgtatcatcaggtcttagtttctctcctcctgactctgcctgctgctgtatcggcttcgttctcagtttgcacatgatgatcttctaggattg

SEQ ID NO: 2915 - DNA, 350 bp, Homo sapiens
atgaagaaattaagatggaaataaaaaaaatttcttgaaacaaaaaaaaattgaaatacaacataccaaaacctatgggatacagcaaaagcagtgctaagagggaagtttatagcaataaacacctacatcaaaaaaagtagaaagatttcaaataaacaatctaataatgcaccttaaggaactggaaaagcaagaacacaccaagcacaaaattagtagaaggaaagaaataataaagatcagaacagagtatatgaaattgagattaaaaattataaaagatcaatgaaatgaaaagttggttttttttgaaagataaaatcaacaaaacattagctagaataacc

SEQ ID NO: 2916 - DNA, 656 bp, Homo sapiens
gtcagtgtcctttcatcctgattcagctctgccttgcatcaccctcagcctaagggagtgggaaggaaatggggtgttttcttgctgacctgaggctatagggtcacttgccatttcctaccttctctgggggatttgagggtagaggcaggggaagatctgttgttgcagttgcttctgcccccttgatccaaatgaccatcatctctgatggagatgggttgggtacctggccttcatggcaccttcactgctagggatgctcaaggggcaggcctggggcccttcccctccctgtctcttctcggtctttcctctctgagcagcctcctacctcccctgcctgagccctcactccacagccctcccaggtacctagcagaggctgtcagtccttggctcacctggaacagggctggggctgggttggaacaggtgtgtgcccccaccacagctctatgactctgttctccctccctgccattgtggactcttgtatttgagggacctcaagagagtgaggaccctaccatccactgtccatattcagtcccagccccagtgcgcttcctctgttccctccctcagccatccaattcttgagttttctcactgattggttttctttctttttccttggattaaatgtgaaagca

SEQ ID NO: 2917 - DNA, 646 bp, Homo sapiens
ttcttttagcttcagcctttaaaatactagtcattatttattatttcttcaaaagcccatctctaattgtctccttagggagtttttgagttcacattgacattaattgtcactaactgtcagcagttggcattaaccagactctattttaggattaaatccacctgatccacctgcactatcagaacattcaggacgcgactcaggctgcagctcagagggctccaccggtggccctagacttgcatcaagctgctgccattgccactgcaccagcttgtatgccaggttaccacatagtcctatgtaaccatgtgggctgctgtagagtaattcccctacttttgtcccccacttcctcaggtagaggctcgtagacattacattggatgagcaggcagctcagcttggtcagagccagccgtctgctccacccactttgtcctatcacagacccagtcgcagacataaattctcaagctcatgtgcttgtctccttcccacccccagcccgtcatcaatgcctagtttggcctaatgcatcagctgcaccaaggcaaaatcatttttgccaaccagcccagctgcagtttggtttctggtcaagtccaatttatggacagcggagaggagtggacagcttctc

SEQ ID NO: 2918 - DNA, 612 bp, Homo sapiens
atttcggcacagagcgcttccattgctgacctctaccgacctctacctgtggtccttcctctactgcagcagagacactgttttcttcctttgttcttccaaccccatggcacagaaacactctccactgcggccaaggattgcaggagaggtggcatcagtgattcaagactgcttttcctacctcttcagtgtttctttcagtgatctgaagttaaagccagggggaatatcacagaagtgaagtgcaattctcatcatgtcatatcaagagcacacactaacaaacaacatgacttattgctgaatattgaacttgatcacctggctgaggtagtgtttggccagatttctctgtaaaggtgaataaactgacactggaacattcaggaacttcttcatggtcatggtcacccagctagagtgtggaagccaggctgtctgattcccaggatctgtgttcttaatcctatacataaggaagccataatgagtcaaccactatttttaagattcacagatgttcgggtccaattcaccagaatgccaagttatacagggttgtggaatcaaaaactgcaattagtaataaaatgtgatgctatctagaaa

SEQ ID NO: 2919 - DNA, 341 bp, Homo sapiens
  misc_feature (1)...(341): n = a,t,c or g
ggtgctggtcaacaatgcttatgcaggggtccagacgatcctgaacaccaggaataaggcattctgggaaacccctgcctccatgtgggatgatatcaacaacgtcgtgactgggaaacagcagtatatgttcaatgtcccctatggtgtgggcaaagctgcggtgaggacccagtggcataggagctgaggaggtaaaagacagtgatgttacctatagctcaggaggtacaatccccagtggtcagaatggtaaggctggctcctctcagctcctcctctgcctcatccatggacagttcctttgcttgtgctcctcttggttggctagagtangcatc

SEQ ID NO: 2920 - DNA, 448 bp, Homo sapiens
ggagcccaagcagctcccctagggactgaccggacctgacctcccctccctgtgtctgggtcttcaggttttagtttggtctttgttcatctgagttgtgctggggcaacgccaggaagtgccctgggtaacctctgctgtgcgctccttcccaggtggcgccatggattcctctgggggctggcgcatgccagggaaagcctgggccacacgggacactctcttctttatcgaggacacttggaaaggtgactgatatgggtgcttggcttctctggtcccagcttgccctccggggagcaggggctctgtcttgtcccagatgagctgagagcccctgagaggagggctttcccagccctgggaccctccgaagtgggtgttcggggtctcacaggtgcttcctgggacttcctgtggctgacaaggcttggctttgcttcgttcc

SEQ ID NO: 2921 - DNA, 851 bp, Homo sapiens
aaacatggagacagcgggcgctgcaactgggcagccggcctctgggctggaggctccggggtccacgaatgaccggcttttcctggttaaaggtggaattttccttggtaccgttgctgcagcgggaatgctagctggatttattacaacattatcattggctaaaaagaaaagccctgaatggttcaataagggaagtatggccacggctgcattaccggaaagcgggtcttcccttgccttgcgagctctgggctggggctccctgtatgcatggtgtggggttggtgtgattagcttcgcagtctggaaagctttaggagttcacagtatgaacgactttcgaagtaaaatgcaatcaatatttccaacaattcccaagaactccgaatcggctgttgagtgggaggaaacattgaaatccaaatgagatgagcatggatgaatttcaaaatgcttgttacagaaaggggtggctctggagacaccatgacagcaaaaggactgggactgatttctcccaggaacatgggcagattgctgactgaaccagtgcactggatagcattcagcctcatcacaggagagtatgtgtgtgcgtgctgggggagggtaaagttttcccacagttaagaagactatttaaaaatagtaattacaggaataacttccttatgtggaggggaccccataggaaatgattctgtttgtaacagttgaagcaaatttcatactaaaaaagtttataataaaagtatgataagaaaatatttataaaacagaccccctaatagcaatagtactgcaatgtgtctaattaaaggagtttcaagagcctttcttgtcaatat

SEQ ID NO: 2922 - DNA, 2194 bp, Homo sapiens
ggtcttacccagcgctggccggcggacctgaccacggctcctccccctgccacacctccctggccgtggtggggattgccctggggctctggcggacgtgactggtcccttcacccgctccttgtcggggtgtgctggggcgacccttgctggaggtactggcctcagccctttctcccgcttccccacccctcttacccccagattacattctctgtgtggtgtctttactgcagatgaaggatttgggggcagagcacttggcaggtcatgaaggggtccaacttctcgggttgttgaacgtctacctggaacaagaagagagattccaacctcgagaaaaagggctgagtttgattgaggctaccccggagaatgataacactttgtgtccaggattgagaaatgccaaagttgaagatttaaggagtttagccaacttttttggatcttgcactgaaacttttgtcctggctgtcaatattttggacaggttcttggctcttatgaaggtgaaacctaaacatttgtcttgcattggagtctgttcttttttgctggctgctagaatagttgaagaagactgcaatattccatccactcatgatgtgatccggattagtcagtgtaaatgtactgcttctgacataaaacggatggaaaaaataatttcagaaaaattgcactatgaattggaagctactactgccttaaactttttgcacttataccatactattatactttgtcatacttcagaaaggaaagaaatactgagccttgataaactagaagctcagctgaaagcttgcaactgccgactcatcttttcaaaagcaaaaccatctgtattagccttgtgccttctcaatttggaagtggaaactttgaaatctgttgaattactggaaattctcttgctagttaaaaaacattccaagattaatgacactgagttcttctactggagagagttggtttctaaatgcctaggccgagtattcttctcctgaatgttgcaaaccagatcttaagaagttggtttggatcgtttcaaggcgcacagcccagaacctccacaacagctactatagtgttcctgagctgccaacgatacctgaggggggttgttttgatgaaagtgaaagtgaggactcttgtgaagatatgagttgtgggagaggagagtctcagcagctctcctcccagtgatcaagagtgcaccttctttttcaacttcaaagtggcacaaacactgtgctttccatcttagaaatctgattgttctgtcagaatttatatttacaggtttcaaagcaataaatgggggaataggtagtttcctggtttagcccccatctagtcaggaattaatatactggaatacctaccttctatttgttattcagatcagatctggcctattttcatatttatcctaagccatcaaatggggtagtgcctcttaaaccattaacagtactttagacattggcactttatttttctcgtagatctttagctactttggggaggagggaaggtgctgataccttcaatttggttacttttcaagatttttaaaaataactagtgtagcttatcttaaacattttataaaaccttcagatgtctttaagcagattgggaagtatgcaagtgcttccttagcagggacagtggataatccttaatgggtttatcatagatttcaccctccccccttctcagaagagtgagtatgctcttaaatgtcaaacacatttttgttgttttgttttttaaatgatcagtgtctatttgatgtgatgcagatcttataaatttgggaattataatattgacatttctgtgatttttatatatgtaatgtcttaattgagatttctgttaaggcagaaataattaggctagggctcttagttttcattcctattgcccaagtattgtcaaactatggtattattttaatgttactttaaaaatccataatctgctagttttgcatgtacttatatgaaaacagtgcagtaagttgaaaactcagtatctatggaattgataaatgttgatctggtgtagtagattttaccgcagttgcgtatattaaaaaatggccgcctggatacgtttaattcccgtgggaatttcacttcccgagagggggtatggccaggggggcccagatttgaaa

SEQ ID NO: 2923 - DNA, 354 bp, Homo sapiens
  misc_feature (1)...(354): n = a,t,c or g
gcctcggccgccgcaatgcagagagaggagaagcagcttgaggcatcattagatgcactgctgagtcaagtggctgatctgaagaactctctggggagtttcatttgcaagttggagaacgagtatggccggctgacctgctgaacactctgaacaaggtcttgaagcatgaaaaaacaccgctgttccgtaaccaggtcatcattcctctggtgttgtctccagaccgagatgaagatctcatgcggcagactgaaggacgggtgcctgttttcagccatgaggtagtccctgaccatctgagaaccaagcctgaccctgaagtggaagaacaggagangcaactgacgacag

SEQ ID NO: 2924 - DNA, 853 bp, Homo sapiens
tttttttttggctcctagaatctcaatttcctctaaataaataaaaggggaagaaaatatccaggtaaataacatcaaatatcctcttaagtcttacttgtatttaaagactactaacacctctaggaaacaaacagcaggttgaggtacacagactaaaatgcatttcttacacaaattagtatgtaaacacagagaaacagtatgataaacatccaagtacccacatttacgtagaataatacagtaacgttacatgaccacaaaatcacaaaaagtgaaggaagctttgagatcttccagttagcagatttcacacctggctggtcacgagattcccctggggattccctcacagatttcctaggcctcttcctgaacagtcggattcagcaggcatggcctaggacccaggaatttgtatttttttcccatacaattcagtagtctaaccctctcattatgcagaggaggaaactaaagctcaagaggtcaagctgttgtctaagtgtacagagcaagtgacagaaacagggctagaatgcaggtctctcgtccctactctgccactttttctgtcacagcacaccacctcccaaagcttcccctagacctgtcacccttacccttcagctaagtagcctttaatagatattctgtcgttaaaactaggtagggcagggacacatttcatattccctctgatacaatcctaggcacctagtaagtgtccgataaatacttcttggttggcagttactcagcaaaagtctaatactttatcctccactcacatctcagtctacaatcatccaagcagatgcaaaattatctggccagataattttcaagc

SEQ ID NO: 2925 - DNA, 647 bp, Homo sapiens
  misc_feature (1)...(647): n = a,t,c or g
ggcgaagaaactacaactcccagggcgtcccggagcaggccaacgggactacgggaagcagcgggcagcggccggngaagggcacctcggagatctgggtgcaaaagcccagggttaggaaccgtaggcatgctgcgccccaaggctttgacccaggtgctaagccaagccaacactggaggcgtccagagcaccctgctgctgaataacgagggatcactgctggcctactctggttatggggacactgacgcccgggtcaccgctgccatagccagtaacatctgggccgcctacgaccggaacgggaaccaagcgtttaatgaagacaatctcaaattcatcctcatggactgcatggagggccgtgtagccatcacccgagtggccaaccttctgctgtgtatgtatgccaaggagaccgtgggctttggaatgctcaaggccaaggcccaggctttggtgcagtacctggaggagcccctcacccaagtggcggcatcttaacggcattggtggaagctggggtcagaaaagagaaatgaccatttggaggggcggggcctcctagaagaaccttcttagacaatggggggaggatgggactttgttttttccaagaataaacttcaactcctgtcaaaaaa

SEQ ID NO: 2926 - DNA, 3031 bp, Homo sapiens
cgggcggcgcaggggcggggctttacggacgcaagcacgtcgaagcgctgctcctggagccgcggagggtgcgggtttggctgcggtggtttctgtggcggttgctgtggcggagtttggaggttggagagaaatccaggtactcactagactggtaccttctgccaccatgggggagcttttccggagtgaagaaatgacactggcccagctttttctacagtcagaggctgcttattgttgtgtcagtgaattaggagaacttggaaaggttcagtttcgtgacttaaatccagatgtgaatgttttccaacggaaatttgtgaatgaagttagaagatgtgaagaaatggatcgaaagcttcgatttgttgagaaagagataagaaaagctaacattccgattatggacaccggtgaaaacccagaggttcccttcccccgggacatgatcgacttagaggccaattttgagaagattgaaaatgaactgaaggaaatcaacacaaaccaggaagctctgaagagaaacttcctggaactgaccgaattaaaatttatacttcgcaaaactcagcaattttttgatgagatggcggatccagacttgttggaagagtcctcatccctcttggagccaagtgagatgggaagaggcactcctttaagacttggcttcgtggctggtgtcattaaccgggagcgcatccctacttttgagcgcatgctttggcgggtatgccggggaaatgtgttcctgcgacaggctgaaatcgagaaccccctggaggatcctgtgactggcgactacgtgcacaagtctgtgtttatcattttcttccaaggcgatcagctgaaaaacagagtcaagaaaatctgtgaagggttccgagcctcactctatccctgtcctgagacaccacaggagaggaaggaaatggcttctggagtgaataccaggattgatgatctccaaatggttctgaatcaaacggaggatcaccgccagagggttctgcaggcagctgctaagaacatccgtgtctggttcatcaaagtgcggaagatgaaggccatctatcacaccctgaacctgtgcaacatagatgtgactcagaaatgcttgattgcagaggtctggtgccctgtcaccgaccttgactccatccagtttgcactcagaaggggcacggaacacagtggttccactgtaccttccattttgaacaggatgcagacaaaccagactcccccaacctataacaaaaccaacaagtttacctatggctttcagaacatagtagatgcttatggaattggaacttaccgagagataaatccagctccgtatactattatcacgttcccttttctatttgctgtgatgtttggagacttcggtcatggcattttaatgaccctttttgctgtgtggatggtactgagggagagccggatcctttcccagaagaatgagaatgagatgtttagcactgtgttcagtggtcgatacattattttattgatgggtgtgttctccatgtacactggcctcatctacaatgattgcttttccaagtctcttaatatctttgggtcatcctggagtgtacggccgatgtttacttataattggactgaagagacgcttcgggggaaccctgttctacagctgaacccagccctccctggagtgtttggtggaccatacccttttggcattgatccaatttggaacattgctaccaataaactgacgttcttgaactcctttaagatgaagatgtctgttatccttggtatcatccatatgctgtttggagtcagcctgagtctgttcaaccatatctatttcaagaagcccctgaatatctactttggatttattcctgaaataatcttcatgacctctttgtttggctatttggttatccttattttttacaagtggacggcctatgatgctcatacctctgagaatgcaccaagccttctgatccatttcataaacatgttcctcttttcctacccagagtctggttattcaatgttgtattctggacagaaaggaattcagtgtttcctggtagtggttgcactactgtgtgtaccttggatgctgctgtttaaaccattggtccttcgccgtcagtatttgaggagaaagcatttgggaactctcaactttggtgggatcagggtgggcaacggaccgacagaggaggatgctgagattattcagcatgaccagctctccacccactcagaggacgcagacgagtttgactttggggacaccatggtccaccaggccatccacaccatcgagtactgcctgggctgcatctccaacactgcctcctacttgcggctctgggccctcagcctcgctcatgcgcacgtgtctgaggtgctttggaccatggtgatccacatcggcctgagcgtgaagagcttggcgggaggtttggtgctgttcttcttcttcactgcctttgccaccctgaccgtggccatcctcctgatcatggagggcctctcggcctttctccacgcactgcgcttacactgggttgagttccagaataaattctacagcgggaccggtttcaagttcttacccttctccttcgagcatattcgggaagggaagtttgaagagtgagtccctgtgagggccgtgtgccccatgctaccctccccgcctccctccacagtgatcagctgtgcctctctgcctgttggttgtgatctgtggggcaccagctcattcgtgtcaccctgtctgtgagtcatttagatagaatagtcctccttggggtctcccaccacccctagctttgtgtgtagtgtagtgattttctggctgtcactcatactcactggggcaccagccttggccctcttaggccttccatccattccagaacagcctttcccacctcctgggtggtgagccagtcttgcattcccacgccatcccaaagccctttcatcttccccgtggcattgtagatgggaagggagcaac

SEQ ID NO: 2927 - DNA, 959 bp, Homo sapiens
  misc_feature (1)...(959): n = a,t,c or g
gaccacgacggaagcaagaggaccaggacaccgggcaagatccccgcagtgccagcttcccaggactcaggattccagtcggccatgaagcaataaatacaaacatgccccacaaggtgagaataaagccatcaaggtgatgaggaagaagtcacggggattttcttcttctaagtccaagcacagtggcaatatttcaagtattgcaaagaaaaacacacgtgtgtgtatttttgtctgttatgtggcgtgtgaccctggaaccccccgcatgggtccatggccccaccactgcctcccgcagactggggactcgttcaagtatctactgattcaggcagggctaaccgagggctgggcagaccaagggaggcccaggcggggtttgcagggcatgcccgcctggaatccggaaggcaggcctctctgcagacgccctccgtggccttgggcaaggcagaggcagggagggacagggctgtcatcaggcctaccctgccgaggagctgacatccaaactgactgtcaaanctggacggggagcttttgcacatgtttacttttttctttgcatgaagtattcccctcatctgctttccaggccccaggtagggaggttgttgggcacacacctgtccttgttgcttgccacagggaggggcggcaggggacagccaccaacacaggtgtgcaaagcagcctcacccgcccgccacacgcccctgtgccatctgcctctaacctggcccagtcctcgccctcccaaaaccaattcttaaacacctacaagttttctcctttaaagaaaaaatgagctgcataaaaataagtcacgttttaggaataaagtgtgaaagattacaagacgtatccagggctgagagaacacggtgcctctgctgccggtccccagaggaacgcttgaacaaagaactgcctctgcctctagcgcagggcag

SEQ ID NO: 2928 - DNA, 1194 bp, Homo sapiens
  misc_feature (1)...(1194): n = a,t,c or g
cgcaatgcagccctcctttctatgtgtcatactcgtttatctgggtgaccaacctgttcctattggtgcagagagaggagaagcagcttgaggcatcattagatgcactgctgagtcaagtggctgatctgaagaactctctggggagtttcatttgcaagttggagaacgagtatggccggctgacctggccatctgtcctggacagctttgccttgctttctggacagctgaacactctgaacaaggtcttgaagcatgaaaaaacaccgctgttccgtaaccaggtcatcattcctctggtgttgtctccaagaccgagatgaagatctcatgcggcagacttgaaaggacgggtgcctgttttcagccatgaggtagtccctgaccatctgaggaaccaagcctgaccctgaagtggaagaacaggagaagcaactgacgacagatgctgcccgcattggtgcagatgcagcccagaagcagatccagagcttgaataaaatgtgttcaaaccttctggagaaaatcagcaaagaggagcgagaatcagagagtggaggtctccggccgaacaagcagacctttaaccctacagacactaatgccttggtggcagctgttgccttttggggaaaggactatctaattggagaccttcaggcagcagtggtcctggccaggcaggccagccaggagctgggacgatccttgcaggaacctcaggattacagcaggtgcagatggcaggagctccaagccagcagcagccaatgctcagtggggtacaaatggctcaggcaggtcaaccagggaaaatgccaagtggaataaaaaccaacatcaagtcggcttccatgcatccctaccagcggtgagtgtggctggcaacctcgactccctggtgctctttgcagagttgggcagtgaaattaccttttgctcaaggctcacctagatgggtacaataaaaagaacatgggctttcagcagcagacaaatcccacttccaccactgactagctgtgtgaccttggacaagtgacctaatttttctgagcctgtttctcatttgtaaatggtgnnnnnnnnnnnnnnnnnnnnnnnnnnnnnnnnnnnnnatgaggaaatgaatgtaaagcacttagtacagtatatgaaataatgggtattcaataaatgatagtttctaca

SEQ ID NO: 2929 - DNA, 666 bp, Homo sapiens
  misc_feature (1)...(666): n = a,t,c or g
tcgggtgctaatcaaatggccgctgtaagggatctccacaaagccacgaagaagccaggcctttccgagactgtaaccgctgtgcagatagcgccgatccctgggtggccgctctctcgttctgcgcgtgcgctcgttctgggctgggagcggatgggtgctgaggcgtgtgacgtctctagtagtgtcgtaactgggtgtgctgccttttccaggtgtactgaggtcttcgtgagattcagggctaggactcgtgtggctgtgtcatgttccgaatgaagcttaaaaggtgatctttgagaactgaagacttgagacccctccatgggcccaggggctgccaacactaataatttcagagacttagaatctgaggagaatctccaatctaaggggaaaccggaagagggtcaggaaagagaaggggcaagcttaaagtgactcagaatcccaagaaagcaagtctcatangagagctgcgaatcgaggttaccatacagtatccaatcgtctnaaccttccnatccatactttccatgctgtctttccccctgaatgcaaggaaaaccggttaaacaaacgntgacaaaagaatntcagaccttgaatggaattcggagcantacccatttgntccanaaagggaatccccattggcaccangga

SEQ ID NO: 2930 - DNA, 7720 bp, Homo sapiens
ccctgggatggaggatctgtctctctctctctctctcctttttttttttttggtggagatgaaggggtgggtctatggtacatcacctgagttgtggggtaaatgtagagagtgtcaatcaaaggcagagctctcagagctgggaaggaggctctagatggcggctgtgccttagagagagcgcgctctgctccctgcctttgcctcactttacgcaactttccctaactttcgggcagcctcagggggcccccgtagccccctgcctttcctagggacttactggggtcgattcgaacctttttttgggagaaaagcagcttttaggagctttcttttcgtgccttgttggaaagaagcagccgtactgagagcccaggtcgttgttttttccagcttagaagccatggcgcacctccatttttgtgcgctctcctaatgaggttttttttctttcggacctgttttagtattaattattgctttatttttttgaccagttaacatatttgagggttattttatttatttttccgttttttaacggaggattttgcctttatttttaattatttgggatctgatatttttctactagtagataggactcttggtttggacatactacatggatcagtaaatacctgggcacaggacttcaaagcaaacacagattccccctcccccttaatatttaagaattaaaagatgatgagaaataaggacaaaagccaagaggaggacagttcgctacacagcaatgcatcgagtcactcagcctctgaagaagcttcgggttcagactcaggcagtcagtcggaaagtgagcagggaagtgatccaggaagtggacatggcagcgagtcgaacagcagctctgaatcttctgagagtcagtcggaatctgagagcgaatcagcaggttccaaatcccagccagtcctcccagaagccaaagagaagccagcctctaagaaggaacggatagctgatgtgaagaagatgtgggaagaatatcctgatgtttatggggtcaggcggtcaaaccgaagcagacaagaaccatcgcgatttaatattaaggaagaggcaagtagcgggtctgagagtgggagcccaaaaagaagaggccagaggcagctgaaaaaacaagaaaaatggaaacaggaaccctcagaagatgaacaggaacaaggcaccagtgcagagagtgagccagaacaaaaaaaagtaaaagccagaagacctgtccccagaagaacagtgcccaaacctcgtgttaaaaagcagccgaagactcagcgtggaaagagaaaaaagcaagattcttctgatgaggatgatgatgatgacgaagctcccaaaaggcagactcgtcgaagagcggctaaaaacgttagttacaaagaagatgatgactttgagactgactcagatgatctcattgaaatgactggagaaggagttgatgaacagcaagataatagtgaaactattgaaaaggtcttagattcaagactgggaaagaaaggagccactggagcatctactactgtatatgcgattgaagctaatggcgaccctagtggtgactttgacactgaaaaggatgaaggtgaaatccagtacctcatcaagtggaagggttggtcttacatccacagcacatgggagagtgaagaatccttacagcaacagaaagtgaagggcctaaaaaaactagagaacttcaagaaaaaagaggacgaaatcaaacaatggttagggaaagtttctcctgaagatgtagaatatttcaattgccaacaggagctggcttcagagttgaataaacagtatcagatagtagaaagagtaatagctgtgaagacaagtaaatctacattgggtcaaacagattttccagctcatagtcggaagccggcaccctcaaatgagcccgaatatctatgtaaatggatgggactcccctattcagagtgtagctgggaagatgaagccctcattggaaagaaattccagaattgcattgacagcttccacagtaggaacaactcaaaaaccatcccaacaagagaatgcaagggccctgaagcagagaccacgatttgtagctttaaagaaacaacctgcatatttaggaggggagaatctggaacttcgagattatcagctagaaggtctaaactggctagctcattcctggtgcaaaaataatagtgtaatccttgctgatgaaatgggcctaggaaagaccatccagaccatatcattcctctcctacctgttccaccaacaccagctgtatggcccctttcttatagtcgtccctttatccaccctcacctcatggcagagagagtttgaaatctgggcaccagagattaacgtagtggtttacataggtgacctgatgagcagaaatacgatacgggaatatgaatggattcattcccaaaccaaaagattgaagttcaacgcacttataacaacatatgagatcctcttgaaagataagactgtgctgggcagtattaactgggcctttctgggagtggatgaagcccatcggttgaagaatgatgactctttattgtataaaactctgattgatttcaagtccaaccataggctcctgattacggggacccctcttcagaattccctcaaagagctctggtccttgctgcactttattatgccggagaagtttgaattttgggaagattttgaagaagaccatgggaaggggagagagaatggctaccagagtcttcataaggtgctagagcctttccttctccggagagtcaaaaaagatgtggagaaatcccttcctgctaaagtggaacagattctcagggtggagatgtcagcccttcagaaacagtattacaagtggattctgaccaggaattacaaggctcttgccaaaggaacaagaggcagcacatctggttttcttaatattgtgatggaactgaaaaaatgttgcaaccactgctatctgattaaaccccctgaagaaaatgaaagggaaaatggacaggagattcttctgtccctcataaggagcagtgggaagttgattttattagacaaactgttgacaagacttcgagaaagggggaatcgagtgcttatcttctctcagatggtgagaatgttggatatcctggctgaatacctaactattaaacactatcctttccagcgtctggatggttccatcaagggagaaatccgaaaacaggcactggaccacttcaatgcagatgggtctgaggacttctgtttcctgctctcgacaagggctggtggcctgggaatcaatttggcttcagcggacacagtcgtcatctttgactctgactggaacccccagaatgacttgcaggcacaagcccgagcgcatagaattggtcagaagaagcaggtaaatatttaccgcttagttacaaaggggactgtggaggaggagatcatagaacgggccaaaaagaagatggtattagatcatctggtgattcagcgcatggacaccactggccggacgatcctggaaaacaactcaggaaggtccaactcaaatccttttaataaagaagagctgacagctattttgaaatttggagcagaggatctcttcaaagaactggaaggggaggaatcagaacctcaggaaatggatatagatgaaattttgcggttggctgaaacgagagagaatgaagtgtcaacaagtgcaacagatgaacttctatcacagtttaaggttgccaactttgcaacaatggaagatgaagaagagctagaagagcgtcctcacaaggactgggatgagatcattccagaggaacaaaggaaaaaagtagaggaggaagagcggcagaaggagctagaagaaatttatatgctgcctcgaattcggagttccactaaaaaggctcagacaaatgacagtgactctgacactgagtctaagaggcaggcccagagatcctctgcttctgagagtgaaacggaagactctgatgatgacaagaagccaaagcgcagagggcgtccgaggagtgtgcggaaggacctcgtggagggatttactgatgcagagatccgaaggttcatcaaggcttataagaagtttggtctccctcttgaacggctggagtgcttagcacgtgatgctgagctggtagataagtcggtggcagatctgaagcgcctgggtgaactgatccacaacagctgtgtgtcagcaatgcaggaatatgaagagcagctgaaagaaaatgccagcgagggaaaaggaccagggaaaaggagaggtccaacaatcaagatatccggagttcaggttaatgtgaaatccattatccaacatgaagaggagtttgagatgctgcataaatctatccctgtggaccctgaagaaaaaaaaaaatactgcttaacctgtcgtgtcaaagctgcacattttgatgtagagtggggggtggaagatgattctcgcctgttgctggggatttatgaacatggctatggaaactgggagttaattaaaacagacccagagcttaaattaactgacaaaattctgccggtggagacagataaaaagcctcaggggaagcagctacagaccccgagcggattacttgttgaagctgctcagaaagggtctggagaagaagggggctgtgacaggtggggaggaggccaaattaaagaagcggaagcctcgggtaaagaaggaaaacaaagtgcccaggctgaaagaggagcatggaattgagctttcatctcctaggcattcagataatccatcagaagagggagaagtgaaagatgatggcttggaaaaaagtccaatgaaaaaaaaacagaagaagaaagagaacaaggagaacaaggagaaacaaatgagttctaggaaagacaaagaaggggacaaggaaagaaagaagtcaaaagataagaaagagaagcctaaaagtggtgatgccaaatcttcgagtaaatcaaagcgatctcagggtcctgtccatattacagcaggaagtgaacctgtccccattggagaggatgaggatgatgatctggaccaggagacattcagcatatgtaaggagaggatgaggcccgtgaaaaaggcactgaaacagctcgacaaacctgacaaggggctcaacgtgcaagaacagctggaacacacccggaactgcctgctgaaaatcggagaccggatagccgagtgccttaaagcctactcagatcaggagcacatcaaactctggaggaggaacctatggatttttgtttccaagtttacagaatttgatgctcgaaaactgcataagttatacaagatggctcataagaaaaggtctcaagaagaagaggagcaaaagaagaaagacgacgtgactgggggtaagaaaccatttcgtccagaggcctcaggctccagccgggactctctgatatctcagtcccatacctcacacaaccttcaccctcagaagcctcatttgcctgcctcccatggcccacagatgcatggacacccaagagataactacaatcaccccaacaagagacacttcagtaatgcagatcgaggagactggcagagggaaagaaagttcaactatggtggtggcaacaacaatccaccatggggaagcgacaggcaccatcagtatgagcagcactggtacaaggaccaccattatggggaccggcgacatatggatgcccaccgttccggaagctatcgacccaacaacatgtccagaaagaggccttatgaccagtacagcagtgaccgagaccaccggggacacagagattattatgacaggtatgcaaaaggctgtgagacaccaggtgccaacctttgccaggagctgtttctagggagaaagtgacgtatacatgaatgtatttatctatcaaattactgaagatctcatcatgcatgtgtcagccacagcgaatcccatgtcttggttataggttttatgttttgttttctgggtcatagggagcacatttcacctgtgcaggaaaagagttttctgccgtcttttgaggaaatctagtgaagaggtcgccataaaatattagagtcaacaaccaaaattattaagctctgtgcgaggctgtcagccacactaggtatcagggatcccgagatgggtaccagcccacagtccttacctgccacgagcccataattgaagagtcaaagtcttctgaagctgcaccctctttacttcagtacaatgccaccagtagtacgatgagccaaagctttacattgtgagagtagcaagtccagggagagctaaagaggttttatctgtatttcctaatttcaaatcttggataatttaacctcatagcagctttggttttccctgggctgatgatgtgcgtcatttgcactgtaccttgaatttacagtgggaaaatttcatataaacgtgtcaaagtcgtgctttgtttttggaagatctggtaacagcagcccgcattagcagagagctgtagctgagtagctgccacctcgttgggagactgcccctcgctcccacccttctctattgtctggacccagtgggcatcttgccctgcgttcttctagtaggtctgtatttctatttgatgtcactttccttttgcctgaaggactttttctgctggtgataaactctttcagtgtttgtatatatgcctgaaaaagtattttgccttcatttttgaaagtagtttttgctgagtgtatacatttttggctttacagtttctttcagtgctttaaagatgtacctctgctatttacttgcattgttttgtgatgaaaaatctgtcatccttatctttgttcctctttacataatgttccttttaaaaaaaatcactgattatgatgtgccttggtgtatttttccttggtttcttgtgcttggaaatttttgaacttcttggatctgtgggtttattgtttccataaaatttggaaatttttacaatcttcttcaaatattttttctgatcccccactctctcttcttctttggagattctcattacacctatattagcttgcttgaagttgtctcacagctcacttgtattctgttgacttttaaaaaattatgctttctgtttcactgtggatagtttctattgctacctcttcaagttcactaatactttccttttcaatgtcaagactgctgtgaggcccatccagtgtactttgcattttatacattgtagttctaaaagttcggaaagttgtttttgggtctttttatatatgttctgtgtctaaccttttaaaacctggaacacagatataacaatggttttgatgtccttgtctgcgaatcttatcacttgggtcagtttcagttgatacctcctcactgtgggtcttgctcccctggtgctttctgtgcctagtaatttttgtcagatgccagatgtaacatttaccttgttgggtgctggatatttctgtattcctgtaagtattctggagctttgttatgagttgcaggttatttggaagcagtttcctttttcaggtcttgctgttaagattcgttaggtagaaccagagcagtgctcagtcaagggctaatgattgcccacccccaaggtaaagagcctcattgcactctacccaattgcgttagtctgttttgca

SEQ ID NO: 2931 - DNA, 1747 bp, Homo sapiens
tttttttttttctaggagaatttagctgttctttattgacatggaatttggggtggcgagggtagccacaccctccaggaggatgaggtaggttcagtgcttccagctcacacctttcctgggtcttccttcagtgtgacagttcggttaaagacaagctttccctgatggctgtctggatccacggagaaatatccaagacgctcaaactggaacttgtcgaagggttttgccagggccacagagcagtccactaatgctgcatccaccacgtgtaggtgatgccagggttcaggtcacttaaaaatccaccaggcacctcagtaggatcttcagggttcttgtgctggaatagtcgctcatagaggcgaacctcacacatcaaaggctgtgacacccagtgaataaaggcctttggcttctctccagcatctgcccgtctgcaggtcacctccagactctctacacaaccactggggcccttgacaacatgctgcagctcaatgacgtagcctgtatgcctcaggcccacaggctggccccaagccaggcgcttaaatcctggctctggctcctccttgaagtcagtcctctcaatgaagacaatgggtgcaaagggaacctgatggaagccttttggtctcatcagctgggaagttgggcacctggatgtccaaggacttggcagcaggaaagttggtgatgatgacccgtagtgactcccagcacagccatggctcgtggggctgtgtcattcagcacatcacgcacacaggcttctagagatgttggctccatgtggttttgtgccacagtcactcccacccggggcaagaaagttgttgattggctcaggtgggaaacccccgccgtcgcagggccgtgagtgtaaagagccgtgggtcatcccagtcccgcacagcaccagttgctacaagctgggaggatcttcctcttagagacaacagcatagtgcaggttgaggcggccatactcccactgcacagggcaatagacgtccagtgcattgcaaagccagaagtaggaagagcgtcgggcctgaattccttggtgcagagtgagtgagtgatgtgctcgatggagtcacagaggcagtgtgtgtagtcgtaggtgggatagatgcaccatttgtcccctgtgcggtggtgtggtgtatacttgactcgataggctacagggtccatcttgccatcctccatcaccagcttcatccgtagtgtggcctcgccctctgaaaacttgcccttgcgcattgcctcaaagagcagcagtgactcctccatgggacggtctctccagggtgaaggcagagtattatggcctttgagctcctctcctcgctggtggcacacataagccagacccctgcggatgagctccacagcccacgcatatagctggtcaaaatagtcaaacggatatgtgactttgtaaggtgtgtagcctagcccaggctaccatgtcacagatgcccgtgaagaactttgcttcctccttctcagggttggtgtcatcaaaacgcagaaaacagatgccattgttggccttggcatagccaaagttgaaattgatggctttggcatgtccaatatgcaggattccattgggttctggcgggaaccgggtacgtacctgcccaccagtaatctccaggtgctgctttagtagattcatggtgtgtggagtgaccacatagcctggggtcttgtagttctcaccaggcttg

SEQ ID NO: 2932 - DNA, 638 bp, Homo sapiens
cctttcaaactcctcgaccacagcttaccacagcaggaatacattttacatggcactcagtacacacatgcacatatgactaacaaaacaatacttacctacactgagagcaatgtactctgctattttctattttactttattctattctacctatttaaaaaatgctggccataatccaccaaaggactgcaaccacagtttgaaaaacaccgatttagagcatagagaatcaagaacagacggcacataaatgacccaagatataattctgattgtggtctggatcataaacccgcatcacattttaaatgtctattgtcttggagacaataagctgttttatgggggaatgggtgggtggaaaaatgggagcagggcttctgaagctgactaatacctgaagaatacggcaacgtgagaaagcactgacccggctgctttggtaaatggaagaaaatcatctcagggttgctaggaacatgggtaagaccagactgtagaaagatccttcaaaacaaaacagtttgccattcctttaacaattactaaccgtcaagaactttggaattgtgccacggaagacagagcttaagatggggtgggagccctttacctcccacttgctcccctgggcc

SEQ ID NO: 2933 - DNA, 433 bp, Homo sapiens
caaagatggcggcagggaccagcagttactgggaagatctcaggaaacaggctcgacagctggaaaatgaacttgacctgaaactagtttccttcagcaaactatgtacaagttacagtcatagcagtacccgagatggaagacgcgacaggtatagttctgatacaacaccccttttaaatggatcaagccaagacagaatgtttgagacaatggcgattgagattgaacaacttttggcaaggcttacaggggtaaatgataaaatggcagaatataccaacagtgcaggtgtcccctccttgaatgcagccctgatgcatacattacagcggcatagagacatattgcaggattatacacatgaattccataaaaccaaagcaaactttatggcaatacgggaaagggagaatcttatgggatcagtacg

SEQ ID NO: 2934 - DNA, 756 bp, Homo sapiens
gcagtgacaacacagactaatactaccagtagcctgactactactagaaactgcggcctgtgagatctgttaaaagttaagcctagaaaccaaagttccttcccaattaaagaaggaaaaacaaaacaaaacaaaacaaaaccaccacctattcaaaacaaagcagagaatttgtataatatttgatggtacctaaggtgcctaagaagcttttttgaaggtagcttttaagttctaggaagtcttttgttgaatttccttgtattggtttaaagccctaaataccatagattttatttcctctcttggaaaaaagatggaagtgacatggcagtatttcctgctgttctccagttacttcacaataccaaaataaattaaacgtactgttgcaaaactcctatgagaaatcactattcaaaaaatggtgccagcttgctgtttaatggtacaactgaagaggaaggagccttcccatttccataaaagaggcaaaggagtcatacccacatagcactactgccagtcactcttgccttcacagggtcacctctcctcacagaaagcagactggacaaatatcagggcccacctccctccaacatggaaacaagtccccctaagaaagagctgagactagtgtgctaatacctgttgtattttgtggagataaaggtgcaggagaataaactcctttataaagaagtgtctttcaggtgttctgaaaccctgccttgttacttacctttattaaaa

SEQ ID NO: 2935 - DNA, 422 bp, Homo sapiens
ggctggggataccatttagtgaactaaatcgacaaaaactttgcctattggaccagagtggagatgagagagaagtgaccagatcgatctgtgttatcagcagacagccaataagatttgctgataggttggaccacggattgtgaaggagtcagtgatagcaccaagactttggcccaaggaactggaaagatggaaatgtcaatgacagaatgtggaggatttcgcaagcagcagagtgtaggagaagcaatgcccttggctcatctagggcaaagggttgaattggcaactggaaatagaagtcaaattcagaagagaggtttatgtggacatctgtgtttaggtgtcaccaatatacagctgatactttttaaaaatctagtgaaattatcaaagggttaaatgcagagagggaagaa

SEQ ID NO: 2936 - DNA, 4102 bp, Homo sapiens
ttcggtggcctctagtgagatctggaggatccaaggattctgtagctacaatgttgtcaagactttttcgaatgcatggcctctttgtggcctcccatccctgggaagtcatagtggggacagtgacactgaccatctgcatgatgtccatgaacatgtttactggtaacaataagatctgtggttggaattatgaatgtccaaagtttgaagaggatgttttgagcagtgacattataattctgacaataacacgatgcatagccatcctgtatatttacttccagttccagaatttacgtcaacttggatcaaaatatattttgggtattgctggccttttcacaattttctcaagttttgtattcagtacagttgtcattcacttcttagacaaagaattgacaggcttgaatgaagctttgccctttttcctacttttgattgacctttccagagcaagcacattagcaaagtttgccctcagttccaactcacaggatgaagtaagggaaaatattgctcgtggaatggcaattttaggtcctacgtttaccctcgatgctcttgttgaatgtcttgtgattggagttggtaccatgtcaggggtacgtcagcttgaaattatgtgctgctttggctgcatgtcagttcttgccaactacttcgtgttcatgactttcttcccagcttgtgtgtccttggtattagagctttctcgggaaagccgcgagggtcgtccaatttggcagctcagccattttgcccgagttttagaagaagaagaaaataagccgaatcctgtaactcagagggtcaagatgattatgtctctaggcttggttcttgttcatgctcacagtcgctggatagctgatccttctcctcaaaacagtacagcagatacttctaaggtttcattaggactggatgaaaatgtgtccaagagaattgaaccaagtgtttccctctggcagttttatctctctaaaatgatcagcatggatattgaacaagttattaccctaagtttagctctccttctggctgtcaagtacatcttctttgaacaaacagagacagaatctacactctcattaaaaaaccctatcacatctcctgtagtgacacaaaagaaagtcccagacaattgttgtagacgtgaacctatgctggtcagaaataaccagaaatgtgattcagtagaggaagagacagggataaaccgagaaagaaaagttgaggttataaaacccttagtggctgaaacagataccccaaacagagctacatttgtggttggtaactcctccttactcgatacttcatcagtactggtgacacaggaacctgaaattgaacttcccagggaacctcggcctaatgaagaatgtctacagatacttgggaatgcagagaaaggtgcaaaattccttagtgatgctgagatcatccagttagtcaatgctaagcatatcccagcctacaagttggaaactctgatggaaactcatgagcgtggtgtatctattcgccgacagttactttccaagaagctttcagaaccttcttctctccagtacctaccttacagggattataattactccttggtgatgggagcttgttgtgagaatgttattggatatatgcccatccctgttggagtggcaggacccctttgcttagatgaaaaagaatttcaggttccaatggcaacaacagaaggttgtcttgtggccagcaccaatagaggctgcagagcaataggtcttggtggaggtgccagcagccgagtccttgcagatgggatgactcgtggcccagttgtgcgtcttccacgtgcttgtgactctgcagaagtgaaagcctggctcgaaacatctgaagggttcgcagtgataaaggaggcatttgacagcactagcagatttgcacgtctacagaaacttcatacaagtatagctggacgcaacctttatatccgtttccagtccaggtcaggggatgccatggggatgaacatgatttcaaagggtacagagaaagcactttcaaaacttcacgagtatttccctgaaatgcagattctagccgttagtggtaactattgtactgacaagaaacctgctgctataaattggatagagggaagaggaaaatctgttgtttgtgaagctgtcattccagccaaggttgtcagagaagtattaaagactaccacagaggctatgattgaggtcaacattaacaagaatttagtgggctctgccatggctgggagcataggaggctacaacgcccatgcagcaaacattgtcaccgccatctacattgcctgtggacaggatgcagcacagaatgttggtagttcaaactgtattactttaatggaagcaagtggtcccacaaatgaagatttatatatcagctgcaccatgccatctatagagataggaacggtgggtggtgggaccaacctactacctcagcaagcctgtttgcagatgctaggtgttcaaggagcatgcaaagataatcctggggaaaatgcccggcagcttgcccgaattgtgtgtgggaccgtaatggctggggaattgtcacttatgcgcagcattggcagcaggacatcttgtcaaaagtcacatgattcacaacaggtcgaagatcaatttacaagacctccaaggagcttgcaccaagaagacagcctgaatagcccgacagttctgaactggaacatgggcattgggttctaaaggactaacataaaatctgtgaattaaaaaagctcaatgcattgtcttgtggaggatgaatagatgtgatcactgagacagccacttggtttttggctctttcagagaggtctcaggttctttccatgcagactcctcagatctgaacacagtttagtgctttacatgctgtgctctttgaagagatttcaacaagaatattgtatgttaaagcatcagagatggtaatctacagctcacctctgaaggcaaatataagctgggaaaaaagttttgatgaaattcttgaagttcatggtgatcagtgcaattgaccttctccctcacccctgccagttgaaaatggatttttaaattatactgtagctgatgaaactcctgattttgtagttaatttattaagtctgggatgtagaacttcaagaagtaagagctaagttctaagttcatgtttgtaaattaatacttcatttggtgctggtctattttgattttggggggtaatcagcattattcttcagaaggggacctgttttcttcaagggaagaaacactcttattcccaaactacagaataatgtgttaaacatgctaaatagttctatcaggaaaacaaatcactgtatttatctccgcaggctatttgttcagagaggccttttgtttaaatataaatgtttaaatataaatgtttgtctggattggctataacatgtctttcagcattaggcttttaagaaacacagggttttgtattctttactaaagatatcagagctcttaatgttgcttagatgagggtgactgtcaagtacaagcaagactgggaccttagaaatcattgtagaaacacagttttgaaagaaaaataccatgtctctaagccaactttaattgcttaaaagacatttttatttagttgaaaaatctagttttttttgtaaactgtatcaaatctgtatatgttgtaataaaacttatgctagtttattggaagtgttcaagaaataaaaatcaacttgtgtactgataaaatactctagcctgggccagagaagataatgttctttaatgttgtccaggaaaccctggcttgcttgccgagcctaatgaaagggaaagtcagctttcagagccagtgaaggagccacgtgaatggccctagaactgtgcctagttcctgtggccaggaggttggtgactgaaacattcacacagggctctttgatggacccacgaacgctcttagctttctcagggggtcagcagagttattgaatcttaattttttttaatgtacaagttttgtataaataataaagaactccttattttgtatt

SEQ ID NO: 2937 - DNA, 565 bp, Homo sapiens
gacacctcttcaggggtgtgtggagtaaatagctcgaagagctgaagacagaaaaccagtttcacgccaggtgcgagagagagcataatggagggaagcccgctttctctctcctcttcttttctctttatttctttagagcacttgacttttttttctctctctctctagtattctaaactgaccccatgaccaactgagaatttatttttgtttcattggttgtttcacagaattagaacacacacgactttttattcctccattgcaaaatggaatcaagatactacacaagacctgtgctttcttcctttgcatgatttacacctccgcctgttttggtgctagctgtctagaacttctctcttggtttgaatctgattccttcacactacactagaagtttatttcatcttgttttgtctagactccagatacagagggacagctggactgaggacaagcaattccatctagcatagggtctctcagggttggtgcatccagccacatgggcagggccagtcacatctagtctatgtccccagagcccttggagttgcgc

SEQ ID NO: 2938 - DNA, 837 bp, Homo sapiens
tttttttttttttttttacaatttcaacatgttttttatttgctcacttaacattccaaacaaaatgacattttacactattgcttttacttaagaagtcaactgccttatccaaagtagacaaaaatcccaattcctttaagtgtccaagtggtactttttcccccagagaaagctacttgaatactttaacagaaacataggaatcgtcctataatagtaaggtagtagttgggtctaacctgtactacatttaaaacttttctcattaaaaaatgaatacagaaaaaaaccccaaacacctccagtcatcattcctctcagatttttaacaattccactaaccttcattaaaaattgcttttgtagagaggtgtataaatatgaaaatggaaagtaagcctccccacacctgttcatagagaagtggggtagagcatttatcctgagaaaactgctgctggtccctgttatttcaaaaaggataataaacattatggcccaccaagtcaaacctcctatcttctgtgccatgatcatgtgtaaccttttctgttctggctacgagcatctacttttcacactcatgcgattcttctcctttgagcaaatctttgatgaagttgtatttcactgaatgttctcaaaggggagaaagagtgcatgagcaattatagtactggaacaaaagtgaagagtacatatattttcacgtagaaaaaatacatacaaatccaagtagctcctaaaaatagaaatcagatgggcatttttaagaaaaagattgttttctaaactgtaaatggtgccagtaagacactgatttttatatctagc

SEQ ID NO: 2939 - DNA, 921 bp, Homo sapiens
ggctgatcttccccgctgcacccctcacgtggtcctgttagctcccaaactgtcaacctgaaatgaaacccagaggcaggctctccaggacaagtgagttaatctgggaatcgcagggggttgcagcctaggctgttcgtgccatgacagatcataggcctatctgagagggccgggcgaaggggaaaatacagatgagctcacaaaagttgttttgtaacaaaaaccactggctgtgggcgcttgctgcaggagtgggcgttagcttgttgttggagagagccttaccaggccgacgtccttgtgcaagctgcttatctagaatactgcagtcctgaggaatttccctgcagtaagtccggttacaggcaaacgtgcaggacgtgcaggagcgtcttgtgaggaggcctgctgcaggtattcctgcatgagagctcccccttcgtggcctcccgactccatttgtttagggattggtggaagtagttccattttggtacctgcaactttcacagctgtcgtgatgaaatcaggcttagctcttcatgattgagtacctgctgttcactgcttacagtataaaaccatgccacaattcctgtgacaatctttttttttcttttgagttaataattacctaatattttcacatatctagctttttactaacccatggccagcctttttttcaagtaccccaacgtttttgccacatgcctaacgataccgttttccaaaggctcaaacacatccgttgtgtctaactgattctcctgttccgacctagaccgatcacttcctgacccgggctgcacagctcttatctcgagcttttctctgctctcatccttgagactcactttgtctgtctcctttcttggattccctgtgtaaacgaaaaataaaatcctaagctctcta

SEQ ID NO: 2940 - DNA, 73 bp, Homo sapiens
tagttcttttgggatcagtgtgctagtctctcttgtcaaactagttactgaccagcaagactaaaaaaccagg

SEQ ID NO: 2941 - DNA, 1478 bp, Homo sapiens
gatttcggcacaggcctggctgcagcactatgcagtgaacagcgcggaccccggcgtgtttgtgctcctggcctgtggaccatgtccagtacctgtggccagctggccagcctaccccctggccctagtcaggacccggatgcaggcgcaagcctctattgagggcgctccggagtgaccatgagcagcctcttcaaacatatcctgcggaccgagggggccttcgggctgtacagggggctggcccccaacttcatgaaggtcatcccagctgtgagcatcagctacgtggtctacgagaacctgaagatcaccctggggcgtgcagtcgcggtgacggggggagggccgcccggcagtggactcgctgatcctgggccgcagcctggggtgtgcagccatctcattctgtgaatgtgccaacactaagctgtctcgagccaagctgtgaaaaccctagacgcacccgcagggagggtggggagagctggcaggcccagggcttgtcctgctgaccccagcagaccctcctgttggttccagcgaagaccacaggcattccttagggtccagggtcagcaggctccgggctcacatgtgtaaggacaggacattttctgcagtgcctgccaatagtgagcttggagcctggaggccggcttagttcttccatttcacccttgcagccagctgttggccacggcccctgccctctggtctgccgtgcatctccctgtgccctcttgctgcctgcctgtctgctgaggtaaggtgggaggagggctacagcccacatcccaccccctcgtccaatcccataatccatgatgaaaggtgaggtcacgtggcctcccaggcctgacttcccaacctacagcattgacgccaacttggctgtgaaggaagaggaaaggatctggccttgtggtcactggcatctgagccctgctgatggctggggctctcgggcatgcttgggagtgcagggggctcgggctgcctggcctggctgcacagaaggcaagtgctggggctcatggtgctctgagctggcctggaccctgtcaggatgggccccacctcagaaccaaactcactgtccccactgtggcatgagggcagtggagcaccatgtttgagggcgaagggcagagcgtttgtgtgttctggggagggaaggaaaaggtgttggaggccttaattatggactgttgggaaaagggttttgtccagaaggacaagccggacaaatgagcgacttctgtgcttccagaggaagacgagggagcaggagcttggctgactgctcagagtctgttctgacgccctgggggttcctgtccaaccccagcaggggcgcagcgggaccagccccacattccacttgtgtcactgcttggaacctatttattttgtatttatttgaacagagttatgtcctaactatttttatagatttgtttaattaataaaaaaaa

SEQ ID NO: 2942 - DNA, 2149 bp, Homo sapiens
gttcctgtgtcgtgtggcagcacatcctattttgagaagatatttaaatttccatgtcttcttggaatataatcaagatttgagtgtgcgaggaaaaaataaaaaagagaaacttgaagacttctttaaaaacatggttaaatcagcagatggagtaatcgtttcaggagtaaaggatgtagatgatttctttgagcacgaacgaacatttcttttggagtatcataaccgagttaaggatgcatctgctaaatctgatagaatgacaagatcccacaaaagtgctgcagatgattacaatagaattggttcttcattatatgctttaggaactcaggattctacagatatatgcaagttttttctcaaagtttcagaactgttcgataaaacaagaaaaatagaagcacgagtgtctgctgatgaagacctcaaactttctgatcttttaaaatattacttaagagaatctcaagctgctaaggatctcctgtatcgaaggtctaggtcactagtggattatgaaaatgctaataaagcactggataaagcaagagcaaaaaataaagatgttctacaggccgaaacttcccaacaattatgttgtcagaaatttgaaaaaatatctgagtctgcaaaacaagaacttatagattttaagacaagaagagttgctgcattcagaaaaaatttagtggaactggcagagttaggaactgaagcatgcaaagggtaatctacagttgctggcagaactgcctgggcagtgttaaatggagacacataagccacactccgccttcctgttaaaaagggctgccttccttcaaattttatttttgttttcttaatgatgttaagcatttatgctcactggaaacaaacaaaaagcagctgaaaaagtgcatcaactcctctttttctgagaaacatggagcagcgcacgcccaggcgatgccagtctgtgtgccgtgatgccgcactgtgttccccatgacagtggtccatcatcgtgcactcgtcatactcagaagtccaaagttcattcttctttaaagtagcctctataactctgtttattttataaatagtattccttatggctgccactcttatttacctttaaataatttctgaaatttaaccttttcagaatgcattgttgaaacaagataaagattgccttttttgaattttttaaattttgtttttaaaagcatataccaccttagttcattcatgtatcctggtaaagcatcttaatcagacttatttttaattactgaatatttcttagacgttttgggacagattttatgtaatctttataagtatgatttctgaagaaaagcaaatgcattagtatgtttgccttaaacttgtagactaaaccaagtattgtaaaataaacagcgataacagtgatagtttttaactctatggtcattgtatcactctggaaaatgtggagtagctgtaataaatctactcctgtattatgctttacagtgcaggtcttagtttttcttttttctcatttcttttgaaatgggcatctcgaacaaagtccaccaatccctttacaaaagaatgaactgctcctctgtgtgtacttcataggaaggtgggaatcgggacagagggcaggttagtgacagttattcctgaaatacaggagcagagtacagtctgttgtgggtttcccggattccgcggcctagctcagcccaattaagcatgagacataggccattgagccacttagtagttatgcgagtggatagattgggtatgtagagggaaagaggtctgctgtaaagaacaacacttgtttgtctgtggggaaagaaaagcagaatacttgagatgaaagttggcatacaaataggatactatcgccagtagttatattacaaacattatcggcctttctagtgtgaatgaacattagacacattattgtcattcctagtttaaagttaaggttgcgtggttggattttttccactatctttttctaatttttctaccatttgggagaccgtaggcatttggggcctgtcaccccttgggatggggttcctagtttgtttacattttcctgaacctcctgagcgcccgttcttgggtctaatccccagtcgtgatg

SEQ ID NO: 2943 - DNA, 722 bp, Homo sapiens
gcgagccgctcagtctccctgctctccgtggtcccggctcgcgtgtagcggcggcggcggcgtctccgtgaggaggcgcgcggggccatgacgtcagcgtccacaaaggtcggagagatcttctcggcggccggcgccgccttcacgaagctcggggagctgacgatgcagctgcatcccgtggccgactcttctcctgcgggttctccctgctgcgaacgggtcgaccacaaaccaccgccactcccaaccaccccagttcatggaattcccccagacggctgcaggctgtgttgtgcgaagtggacggagacggaaatagagatgctgagggctgctgtgaagcgatttggggaccgatcttaatcacatcagctgtgtcatcaaggaacggacagtggcccagataaaggccactgtgaaacgcaaggtatatgaagattctggcatcccccttccagctgagtcacccaagaaagggcccaagaaggtggcatctggtgtcttgtcacctcctccagctgcccctcctcccagcagctccagtgtccctgaggccgggggtccccccataaagaaacagaaggctgatgtgacactcagtgctctgaacgactccgatgccaacagtgacgtggtggatattgaagggctaggagaaactcctccagctgaagaaactcaacttcgaccagggcctgaccctggggtttttgggcttt

SEQ ID NO: 2944 - DNA, 386 bp, Homo sapiens
  misc_feature (1)...(386): n = a,t,c or g
ctttgaagaggccttcgtgtcaggaagaggactgggccttggccctcccccgccgcctctagggccgcagcaaatagcagcgctgtttttccagatcctggtgtaccgagcagcagcaaaggcggtccggcggcaggcatgttctcctccccggaccaggccgcaccgcccctggttagcacccgcctcagcttctccgccattcgccgcgtagttctgaaccaatcggtgggctcgttcccagccttagtcccgcccaagccgtggccgcattcgagatggggtttcaccatgttgggcgaggctggtctcaaattcctgaccttcagatggatccgcctgtcttnggccttnccagaagtgccagggnttataagggatgaagc

SEQ ID NO: 2945 - DNA, 2353 bp, Homo sapiens
gcagccccaagccagttggccccctccagagagagacattgctagcctgccctgaggaccccgcctggactccccagccttcccaccccatacctccctcccgatcttgctgcccttcttgacacactgtgatctctctctctctcatttgtttggtcattgagggtttgtttgtgttttcatcaatgtctttgtaaagcacaaattatctgccttaaaggggctctgggtcggggaatcctgagccttgggtcccctccctctcttcttccctccttccccgctccctgtgcagaagggctgatatcaaaccaaaaactagagggggcagggccagggcagggaggcttccagcctgtgttcccctcacttggaggaaccagcactctccatcctttcagaaagtctccaagccaagttcaggctcactgacctggctctgacgaggaccccaggccactctgagaagaccttggagtagggacaaggctgcagggccctctttcgggtttccttggacagtgccatggctccagtgctctggtgtcacccaggacacagccactcggggcccccgctgcccccagctgatcccccactcattccacacctcttctcatcctcagtgatgtgaaggtgggaaggaaaggagcttggcattgggagcccttcaagaaggtaccagaaggaaccctccagtcctgctctctggccacacctgtgcaggcagctgagaggcagcgtgcagccctactgtcccttactggggcagcagagggcttcggaggcagaagtgaggcctggggtttggggggaaaggtcagctcagtgctgttccaccttttagggaggatactgaggggaccaggatgggagaatgaggagtaaaatgctcacggcaaagtcagcagcactggtaagccaagactgagaaatacaaggttgcttgtctgaccccaatctgcttgaaacctgactctgcttctctcatttgtcttcctaccctactcacataattcactcattgactcactcattcaccagatatttattgacctgctattataagctttacatcctcccatgttgtcctggcatgtgcagtatacacggtctaactcatctctccccagatctctcagaaccttgagcttgggaattgaactggggtcacctgtgtcctttcttatggactcgcaggattttagaaccctaatgcaccctggagggtagctgggccagacttctcatttcacaggtgaggagactggtgccccacagggattaagtgccttgcccaaggtcaggcttatctccagagggaggtgccctggactggggcccagatgttcagggaccctgcctacacctcatttccagtgtgggctgccttagttagttatgagaacagggaagggctgggaagagacagcctccaaggtcaacacttggagagggtttcacttgctctgaagacccctggtccaggattcgccctctcccatgccttcaagtcagcatcaggcttagggcaaagaccaggcctctgaagctgcctcttgtaattcatgcaggaagatgtcaaagtcagccccatcttggctgatcagggtgttcagccttaaccccacctgtgttctgaagtctcttaccctacctgctcaggactgagacagttattcactgaacatatttattaagcacttgctgtaggccaacagttaagaatccaataatgaaatggacagattcatggaacttagagtccaataggaaagtgagacccagacaatgacaatgagataaatgttaggaagggggaggtatggggtgaccttccctgcagtcctgggggcctagatgggcccaagactggggtgagagtcttggcagagcctttgcaacaccttaagtggacaggactgggaggtcttggtggttggagccaacgtgggttccctgcggctccttagtcacctctgatagcagattgagggaggaaaacaggtaaggcatgaggaaatggccaggttgggttaacccactggtttcaaccagttcaggaatgaggttatttggccatgactggctgatcttgagctcaaggatctgcttcaaatgcacacaggcctagttgaagtttaaaccccagcaaaacattcctccctgtaaatggaaaatcctacttctacccccaccctgccctgttttttgttttttttttccccaagatcattagatgtcctcacccctcctcactgcctctcctctctgggacagggctgggacctttgaggaagataaagccttccttgactacccatcatattcagtgtccctgttcctcattcag

SEQ ID NO: 2946 - DNA, 755 bp, Homo sapiens
tttttttttttttttttgtctcacgcttcatttaatctgaagaatattacaggctctccgtcttcagatataaattatttataacgttacagaacaagcagcgaattcaaccacttaagaactaaggaagtctacatggtgttaattgctggccacagtcctcccgatctggttttttaaaaaagtcccccgggcccccatttcagtagacgtgcaccatgccgtagaggaacgtccagaacaggacgtaggtgaagaggcccccgatgaggcctcctgtaaagagaggtctccgtgatttgaaatatttgttccacctccttcccgccttgagaatgaggagcagggagagcaggacggaggcgagcaggtagaagatgaagccgtagaggccggtgaggccgaggatgccggccgtggcccccgacagcgctgacaccgaggtccggcaataatccaggacggcggcgttgccccgcacggccgcctcgctgatgaacggcggcccttcccgcttggccaccaccgcggccatcgcaccagcccgggctcggcctctcgctttctcgcggaacaacgcggagctggcaccagtcctgggcctcggatcttccaaagacgccgaggagattgagggtccgggccggccgggaggtggtggcgcgtctgcgttccccgccacggtggcccagttacctggaacacggcgccggacacactacttagcgttccctcagacgggcagtggaagaaat

SEQ ID NO: 2947 - DNA, 251 bp, Homo sapiens
gcctcaggttagaacctttggtcctgccctgctccaaacaaagtaggcccactttgagtatagttgcaaggctggttgttacagcagtccccaccctggcaaaatcctcttgctgacggagctgaagggacagctgagaatgggagtgtccccaggcaagatgccacagattcccactgttattacaaaagttcagcagttactcaaacataaacgcttctcaggtttttttcatccaggttggggtgcag

SEQ ID NO: 2948 - DNA, 1620 bp, Homo sapiens
  misc_feature (1)...(1620): n = a,t,c or g
ggcttgcgacggaagtggcctctctgcttctgcagggctggggaagatgctgcgtccagcgttagccgtggctgtaccttggcctctgcagcctcctggtgggggaggcagaggccccgagcccccgtggatccggctggagcggagccgggccgtacgcggtgctgcgagggcagaacctggtgttgatgggaaccattttcagcatcctgctggtgactgtcatccttatggcattttgtgtctacaagcccattcggcgtcggtgacagccagacaagttcttcaatgagtatttgggaataggataagttgtgttgcacacaggccagtggagaagttggaaccaaaactttcctacttggaaatgacctttggtctggacagttggtaaatgctaaatgaattagaagaaaacatgtactagacattattttttcctaacactgtagcgcaaataattggcccctgagtccgcttctcagtgtttctgactgtacttgttaaaagtaagacctgaaagctccaaaggtcagtgtaaagatggagtgttcatgagaaagaaaacatggtaaccttgtgagtgcctgtaagaaccacactgtaaagaactcatcattaatgcttgaaaatgttattaagaaggagacttaccatgcagacattccctatttaagaaccatttggttacagtgggttaagaatcacagatttttttttttaatctcacctgagttagcctagaatgcgctggttgcaaagtggtgtcagctgtggggatcttgggccctcgttcctcacctgcatcctgccctgcactcaggtgctccccctgaagtcagggtcacatcaggtagacctgttactatatgcacctttggcctggaatgctctgaagttggactggaaatgttactaggttggcctgttacaaaaaggaccccatcctgcttaaacacattgatctcccttgccctgcatttgagtctttctagcccacggtctgaaacttgaggcagctttccagatttggaatgtaaaaggctcagtgggcactctgttcatccctgggtggggagggcccagccaacagaagtgcatgtccactgtgcgggccagtgtgtgtttacacaaatttcatctcagctttgaaaatgctgctattagtttccactgttggtgaactggattttttcctcctattgaaatgatactttcatacttataaagctgtcgtcaatatttatttcaaggtgctagatttaattttgttattaaattgaaatgcttatcttgtgttcaagcacagcactgattttaacaacctgcatttaatgtgaagtaaccgaagtaggatactgtaactgtgtaaggattttgtttgtaatcttgtaacattgaaccattgaaatgttcagttctttgcttttgagcaaaacgtcaattaaaactaaagtaaaatcctatatattgttttactccaccagttatttcccaagtgtttgaaatgcaggtgtgtgtctgaatttggatctaatccacttaaaggaggnctgtggaggggaaattccttttttgaggncgggttttgggtccccttgcccggggaaagggttcccg

SEQ ID NO: 2949 - DNA, 1319 bp, Homo sapiens
cccggctcctcgcctcccagcccagtgcagccaggccccgggttcggcttgctcaggtctctgtccgggactgggaagccacggagggccgggaaagtggcacactcctggagctcaagcttcctactctctcatcgctgaataactaccgggcaggactgggtggaacagacagcatatttaggtcattgatgggctgctgggtggatggagctggaaagtgatgggcactgctttctggggctgccccaggttccttccgagggctcgcttttcctgggcagagcgggaaagaggaggggcaggccggtcgcgaaacgcaaatagtcgagaatagcgatccggggagaagcaggtgtctgtggggcccaagagaagtaccatctcgttaaaaattcagattgaactatcttacaaatggctcccagaagatccactccctgtgggaacacagcagttgtggaagtgaagacaggactggacccagaataagggttcaaatatgtggggaaatctgacctctaaattcttataagtcagagagtgactgaacaacagcagtgagacatcgaagagttttaatatctgctgtaaaccttggcacagatcatttacttctctaagactgaatccaaaaagcacaatggaatactataataagctgagacagcatggtgaattccagcacaagcctgagcattccctatagccagagaaggaggcccaacacctaacatagccttggatgcagaactgatagaacttggggaaagtgatgaagtagttgacctcacctgtgaatctctagcacctgtagtgattgacctaactcaccgtgactctgtagtgattattgaacaaaggaggaggccaagagcaaacacaaggccactccaagaccacactggcagttgtgtggtgaacaatgatgaggagggagtgaaaagggacagagatgtatgtataaccaacagtgcccaccataattccctgcaaaaaaattttttttgtcatatactacctggttatattcagtgtcaagtttgcatggatggatgctcagagattgaacttagtatacaacacatctactctatagaatgtggccacatctgtagtcagtgcttctgcacttcctttacacatactaacactgcccagtttgtttgaaaaaaatcagcctccatcagtatcactgcagttatatatgatgtatgccttattgctcaagacagatcctgtggctggatttttccatgtctttgtgcaggaactatgggttgttggcatccaatgctctgagcttaaaaatactgatt

SEQ ID NO: 2950 - DNA, 450 bp, Homo sapiens
  misc_feature (1)...(450): n = a,t,c or g
caccttgattgantcncnnnnnnnnnnnnnnnnnnnnnnnnnnnnnnnnnnnnnnnnnnnnnnnnnggcacgaggggtaggggccaagaggatggagagagatcagaacttgtggtagataaaaaccagaaataattagtgagtacttatctgtgagagtgagagagaaggtcaagccaaaggtaattcccatgtgtcttggttttgtttgtttgtttgttcgttcnnnnnnnnnnnnnnnnnnnnnnnnnnnnnnnnnnnnnnnnnnnnnnnnnnnnnnnnnnnnnnnnnnnnnnnnnnnnnnnnnnnnnnnnnnnnnnnnnnnnnnnnnnnnnnnnnnnnntcccgtgtatcttgagtggagtcctgggtggatggtggggaggcccctggggtggggaacacagcatggagagccagtttgagggacaggatagtggactcagacac

SEQ ID NO: 2951 - DNA, 1318 bp, Homo sapiens
  misc_feature (1)...(1318): n = a,t,c or g
gtagaaaataaactcttgtattgtagcacatttcatcacagcctgactaggaccagtgctcgactttctggtggcagggcccagagctcacggacaccactgacagtatggggggtgttctgcttggcaccatgtctggctttttggccagaagtcctttgcagagctgaatatccccttgccagcccgccagctctggctgggcaggacttgctcttgggtctgcagcctgcatcaggagcctccactttccccagtgctggattatgcatcctgctctccagggtccaccttgttgctacagctgcatggcttcctgctccactgactggttcgagggtgccaggtacttctcctggatgcccagtgtggaagagaaatggaagtcggctcccattgcggcagacatcatggcttccaagcttcgctgctcttgggctccgaaacagtatccattggctttatccacagcctgcaggactcgctggatgctctccttgtcctggatgttgagagggataaaggagacaaggctatagtcttcgatgagcttgcactagcttctcattgagctgggcggtagtggcggaagaaagggtcagaagccaggtggtcaagcaggtaggagaggtccagaacctctgtgtagtagtccaggttgaaggccagcttcccataatgctcaatgaggtccatcttggaaaggaggttgatgtggggcagttccacgtgcagcatggtggccagggaggtacacagtactgaaatgaacttggcagggtctgtgcagtagtgagaatccacgaggtggacggcagtcagcctgaggtcccactgcgccatttgggagaagatgctgcgcaaggcgcgatgatgcgtgcagagctccacctggcctgggcagtcgaagaggaagtagtggccgcggagggggtcgagcttggcacgcagccagtccaggttggcttccaggtactccatgcagtagagcaggccgccgttgggccccaggcgcagcgcgtgccatcacgtcgcccagccccaccagctcgcccacgtccacggcacactcgtacggcagcccctcgttggccgggtccaggttcaccagcgccacgcgccggcccagcgcgcgcaggaactcactcatgcccaggcagtacgtggtcttcccttganccgcgggccgatcaccgcctcccgaaggccgtggtcggagcgcccctncattcggcgcccgcggcccggagcaggtcaactcacagggaaaacggggcaggtagccgcgccggagacgagactgagggcgagggtccca

SEQ ID NO: 2952 - DNA, 703 bp, Homo sapiens
  misc_feature (1)...(703): n = a,t,c or g
cgtggaaagttccgcatcccattttttatgtccacagaatgtgagcatttgatccgccatatgttggtgttagatcccaactttgacaggttaatagctgaatgccaacaactaaaggaagaaagacaggtggaccccctgaatgaggatgtcctcttggccatggaggacatgggactggacaaagaacagacactgcaggcggacaggcaggtactgntatgaacatcagcgttccccaggtgcagctgatcaacccagagaaccaaattgtggagccggatgggacactgaatttggacagtgatgagggtgaagagccttcccctgaagcatttggtgcgctatttgtcaatgaggaggcacacagtgggtgtggctgacccacgcacggaagttacggaagatcagcatcgctctacctacaaggactccaacactctgcacctccctacggagcgtttctcccctgtgcgccggttctcagatggggctgcgagcatccaggccttcaaagctcacctggaaaaaatgggcaacaacagcagcatcaaacagctgcagcaggagtgtgagcagctgcagaagatgtacggggggcaaattgatgaaagaaccctggagaagacccagcagcagcatatgttataccagcaggagcagcaccatcaaattnttcagcaacaaattcaagactctatct

SEQ ID NO: 2953 - DNA, 357 bp, Homo sapiens
acctcccaacttgttgggattacagatgggagcccccatacccaccaatcacaaggatctttataagagaaagaggtaggagagtcagaattagagaaagtgatgtggtaatggaagaagaggtcagagagggagatttgaagatgctgcacttctggccttgaatatcgagtcacgaggtaagtcaaggaatgggggtggcttctagaagctgggaaaggcaaaggagcacattctgtctagagcctcccccagaaggaatgcagcccctctgacaccttgactttagccttaatagacctagttgggcttctggcccccagaactgtaagatggtagatttgtggtgtttgatgc

SEQ ID NO: 2954 - DNA, 607 bp, Homo sapiens
caagcactgaaaggaagaagcctgagatttgatccttgacaatttctggaaagcactggtcagtcacactgtcctggacagagtccaagttacccactaaagcttgaggtggatgttggcttcactcctgcagcacaatgctggccctagaaagcgagcattttcattcttcccatggcagctgattctttggtgccatttttttttttttctccataggccttgtgcagaaaggttttctcattgcatccatactgtgagaataaactgcagactgaaagaaacatgcctgcagggtccaggaactgggccactgtttcccagaacgggttgtgcctcagaaatctatttctcttttagatgttgaaccctgagagaactaagatgatatttcagaagagttggctgccttctctggaaacaaggaaaacccaataattccgaggaacattgggggttaaataccaagaataaaaattggttcttctttgacttcagcttaactgtattaagacagaaattaagccctctaaaaacaccacaaagagagatgattgtaatgatagaaatagaggtacagagctatgcaaaggaaacaggaagtgaa

SEQ ID NO: 2955 - DNA, 1103 bp, Homo sapiens
gtttagacaggctcaggtgagagacttgtttcaaggggttataaaaagaaacaccagtgctctgcagaagaatcagtttttaatttttttaatgtatctatttaatggaataagttgatcatagatttgtaaaccaaaaggtaatttctcaagtatttggaaataagaaaaagcctccctaccaccaaccttttggtcatctttctcattctcttacaatcatcctaatcccctagtacacccttaccatatatcaataagggcaccataatattatgcaaagaacagatatatatgcctgatctcttattagacttgcaccagagactgttgaaccactccaggcatgaactccaaagctgaggcacactgaccaagcccctgggcatctacagaagcaaaggcgttctctctccagctggctgctccttctggaagagccctttaatctgggttaatcggccatagagcctctctctcaatggaggaatgtggtagctagggtccagaatgtttgtcactcggcgctctctctcttgcttccataacttgtatgggtggggagggaagaacggtcgtcctctctctcttcgaatctgtaacgtaattccacttacagccagcatgcccccatactgccaggataatgaagtcattagtttgaaaaggcacatttgtgaaagctctgtggaaatccttgttgagcgctctcttgagtacgttcaaagtgatgtaggaaaggcttgtggaccagtaactgtcaatggctaaaaccaccgaataggagccaatgactccacaagtcagtatgttcagtattcttaggcagcccatgaaaactactggaatgaggatagctatgcaagagaaagtgacccagaatacaccatcatcatgaaaaatctttaggtttcccagtggagtaaagaaagtcactgacgagatgaggaaccccagcactagtccaacacagagcatgcagatcgagaggattccaaatcgccaccacacagctaccaagaacattccaccgacgcttccagtgacagctgtcagaatcagattcacatcatacttgataggtgtcagtcttgtaatcagtc

SEQ ID NO: 2956 - DNA, 1086 bp, Homo sapiens
  misc_feature (1)...(1086): n = a,t,c or g
gtcttggctccggatcgtgcgtgaggcggcttcggtgagagccggaaccgggcgggcagaggggcgctcgtagggttgggggacgcctgtgnttggctgcagcggccggcaagaccctggaagagaccgtggctatggaaacggccaaggctgtcttggaatgtcctgagcagccctccgagtcgagcctctgcccccgagtttctgagtgacctgggttgatatagattgaccttgtgggcagcgagagtcacagacaagacagcaagcaggatggagcactaccggaaagctggctctgtagagcttcccagcgccttccccaatgccccagctacctcctgatacccttgagatgcgggtccgagatggcagcaaaattcgcaacctgctggggttggctctgggtcggttggagggcggcagtgctcggcatgtagtgttctcaggttctggcagggctgcaggaaaggctgtcagctgcgctgaggattgtcaagcggcgggtcccaggcctgcaccagctcaccaagctacgtttccttcagactgaggacagctgggtcccagcctcacctgacacagggctagaccccctcacagtgcgccgccatgtgcctgcagtgtgggtgctgctcagccgggaccccctggaccccaatgagtgtggttaccaacccccaggagcaccccctggcctgggttccatgcccagctccagctgtggccctcgttcccgaagaagggctcgagacacccgatcgtgaagacctgctgagccagcctgttctccgggcctgaatgtctggggtgcttgtgccttttctgagaagcgttgtgactgctcaacatccccatcaaggtttgagtccacaaaagtggacctccctatcatgcttccccttccctctagcatgtgggaagggactgctgtgaagaatgacagatgtggggcctctgccaagttctgcattgctaaataagggcttcctctgccttctacctacagtgcatttgaactgccttctgaaagaggtccagggagggatttaggaaataaagtttctacctatttgatgagcctct

SEQ ID NO: 2957 - DNA, 470 bp, Homo sapiens
ggggaaggtgggaggggatgagggtggaaaaattacctatctggtattatgttcactgtttgggggttagaaggccaatccccaccgctaggcaatatatccacgtaacaaacctgcacccttatgccctgaatctatttgtttttcaacattgacttccatggtcactatttgtgaaatcactcctcatgaaccaggacttgcatgtttttttgtttctcaggtgaactgtcacccctacaactcagcttgcaaccagccctggccaccagtttccccacactgagctgaatatcggacatgcccatcttagacattccagcccattctgaaattccacatcgattcacctgacaaagtctgaagttccagggcaatttatctggaaaagcttacctggaatcacgtgtcatttcaaccaacaactgttgaagaggacgtggcattaaaaccaagggtatcaattatta

SEQ ID NO: 2958 - DNA, 1215 bp, Homo sapiens
gcagttagcaaaccttgatgaagcacctgctggacactgagggacccaaagctcaatcagccataatccctgctttcagagtttatattgtacctgcctaatccacccggcgtgactcatttcaacactaagtactaggggtgttgtcaggagacaaatctgaagtcaggagaggaaaatgcaaaggagccctgccgtgtgatggatgtgcattctcacttgggtcttgaagttctcattcctacatctcaagctagccgggcagtctcctctctatcagaagaaagcactgggtaattgggctagactgggctatgttgaaggtaacatggaactcttaagatcttgacccaggggcgacttggttttgcttaaggtggcatcaccaatgttccaaatcctttggggagatgagggcatccccacagaaaaagaggaataatagaccaatggattttctcctttcaccagtatgtttggaaccctctgatccaatgtcttttgatactgatctcttgtccaaatgagaatgtcgctttagctgaaattcaaatggctgtgacaatttaccgaaatgatgaagtaaccaccattcccacctttcactgcctaggctccaagtctggaatacatttttgaaataggaactcccttttgcaaaaaagaaacctgggtgtcagggaggtgaagtgacttgccctaggagcagacagcatgccaagaatggaattaggctcaggatccagcctgggctcaccctgtctggctcattcccacccaggaaactgaagataaaagatttgggaaaacacaccaagaaaaaggggcagttttctttgcccaagcatttggtgctagttagaggctgttcactctctcctgctcctcttcggagtagaaataaaggctgtgacacaaggaagccagtggggtgggagggaggcaccataatccctccctaaaacccacagaagactaacctgatactcttttgacccaactgcatcaacactaaacagctgcagaccccctgaatctttcacacatgccaagtgaacattcttgatgatttctctttgtgaccgcaaccacctgcaaaccagaacgactctagaatttccttccccgcccccctttttgtttagtttctaatctcttgtttatgaggtgtggggtttataagggactgaatcaaatgaatgtaacaaaaaagaa

SEQ ID NO: 2959 - DNA, 361 bp, Homo sapiens
  misc_feature (1)...(361): n = a,t,c or g
gatttctctgtctcagtgtctgctctcaggctaatgtttgtaaaagctggcccgtgtatgtgtgtgtgtgtctgtgtgtgtgtgcgcgcgcgcgtgcgcgtgcatgcatgcagaggcatccctttcatagacactgtcttggccaaagtggatatagatatgctggacagccttcttcatttcccccagaaggtggggggggtcctttatatcttgtcagtcaactacatatttttaaaaaacgatttgccatgtctatagagtaccagaaagaaggacaaggacttaagtgaacagttctcatttatgaacancccttcttgcttttntgccctctntctgatccataaccatgctgatg

SEQ ID NO: 2960 - DNA, 1677 bp, Homo sapiens
ttaaacaactcaaatggctttcttttaatgctaggaaaactgtccacctttcaacggtgacagggctgttaacacaggtaagagcaaacaaggtaaaaagtgaaagcacatacagatgatgcacacaaatatatataaaaattgaccagaaatcacaggacatgtaagcaatgttttcttaagcagaactttttttgtactttaaatagactaaaatatttggtgtaggtgggagaaagacatcagtattcaacaattttaacttgaaaaccagctgtaataaagcctcagcctcattgtttaataaaaataaaaaaggaaccacatcgtacttttgacaatcatagaacgaaagctcacaaagaacacatttaatatctccatcacagtgcaccaaggatgcagccactaaggacttccagagggaaaccaagaacagggtctgcatccatcatattgcattacaaagttaatgccatcagagaaaaaaaatctcacctcacgtgctcaatgttctagctggtaagcaccttatgagtatgaggctacaattgagagaaactgctcagtctgcatcaggacacccaattccttcacttgcattgggctgatgcatttaatcattttaacacaacattcacggaaaaatgttaacaacacattctggcttctcgagcagaacagactgggaaatgcagtagacgccagagcatcaaaggccatgtatttcctcacaagaaaagaaatctgcaacaattggtttccttttactatgaaaaatgtaaatttcaagattaaagtttaacccccataaggacgcatggatttgtacttacatatacacataggttcagaagaacttagctatctagttggcctcttctctgttccattataacatcagttaccttagctggatcactaagtgtgagtctcaccaccatactggtaccttcagctattacctgtgttataaatctcatgttccattcaaagtactaaatgactggatggcacatatcccaataagtatcagaaatgttgacagccatagtgcagctgagtttagaagcaactatgacaacatagggaagtaaggataaatcacaagaacacctaaggtggtcagctccttctggtgtgcctgggacttgttttgagtttagcaaaaactttacaagattaaaaatcagagcaaatgaatttcttaagttcaagatatgtactctcaaagggagaatcgcttttgggcagtggttaaggcctctgatgtgctacttatcagaaaaatccacatatatacaaaactctgcttaaaagttttgtatccagggaaagtcccgcatccagggaaaccctcaatcccaggcactttagggcagctggtcaccctgagaacactacccactcgttccttaatatcactagagaaaaggtaagaactttcaagggcataacctttaagggcatcagtccccaaaatatttttacatcactagctaatggctagttcctctaagcttgctgaaaggctaggaagtccagaaataccttatttaaacgtgttaactttaagaagagttggtagtaatcaagcaaattagtgagcagtgtataaaagctcactcttgaaatctgttttcagacaaatcttctaaaggtcttctagctttgtcc

SEQ ID NO: 2961 - DNA, 499 bp, Homo sapiens
  misc_feature (1)...(499): n = a,t,c or g
gaaggctcaagatggcgtgcttgttggagaccccaatccgcatgagcgtcctttcggaccaggaatgaaagttactgggagataacttcgaaggattttgcaacaaattcgagctgtccgactctgagaatggaagtaacagctagcagtcgccactatgttgacaggctatttgaccctgatccccagaaagttctacaaggtgtcatagacatgaaaaatgctgtaattggaaacaacaagcagaaagccaatctcattgttttaggagctgttccaagattgttgtacttgcttcagcaaggaaacctcaagcacagagctgaaaactgaatgtgcagtggtgttgggaagtcttgctatgggtactgaaaacaatgtcaagtctctactggactgccatattatccctgccttattgcaaggactactgtccccagacctgaagtttattngaagcttgcctccgatgcctgcgtaccatnttcancagtccctg

SEQ ID NO: 2962 - DNA, 356 bp, Homo sapiens
gttcatggtatcttatttcccaggtccttcattgtagccatgggcactgaaggactgaattggtaggtaggtcactggttgtaagacctactggggccaggtaagaacagtaattggcccagacaggtaggtgtgataaacagagtagaaaagattgtggccaagaagagtgaatgtgtcccatccaaaggtgcatccagatatgtctgtgttactatggcttcatggtttgggggtatatagaaattctcaggacctcagacctttgattctcctttagcaacacacatcgtcagcataaggcatctaaagattttgtggactcataacttatgtactgtttttgagatgattgc

SEQ ID NO: 2963 - DNA, 308 bp, Homo sapiens
gctcgacaaatctcaccaaaatctcttggatgcagcaaaagcagtgttaagaggaaagtttgtagtcctaactgcctttgtcaagacagaaagatctcaaattagcaatgtaactttgtacctaaaggaactagaaaaaaagagcaaataaactccaaagctagcagaagaaaataaataactaaaattagaaaagaacttaatgaaattgagacgtaaaaatctataaaaagatcaacgtaaccaagaattggtttttcagataaataaataagattgatatgcctcctagctatatgaacaaagag

SEQ ID NO: 2964 - DNA, 1408 bp, Homo sapiens
tttttttttttttttttttaatataaaaagatcaatgaaaaatttatttataaatttttcacgctgggctacaggtcaatatcgtacactcaggaatgtgctgcacaaactttatccagttagcagtgatcaccccgtgacccacacacagcttcgatataagcctagaaattctgaacattaattaacataattaaaaaggtatttgcatctagaaaaaatatacagaagaactccttgtggagtaatctgtgcctccatttcaatgtctgcttgtttcactgacattatcaatatattcttctcacacaaagttttataaaaagcgacggagggctgcccgaatacgaccagccacgcacaaagggcctccacccacctgtgtcctcaagtgctccccatttctgcacgaagggtcagcagcacttccatgaaggggaaacctcatttaaatttgaataattcagcctcccttttatttctcaggatcaaaacaacaaggggtgtggggctgcatagaaaattggagccacagaaaccaggaagggcggcctttcaggacagaaagtgacgcaggagaacctccccgggcccaggtctcgacgcaacccctcccccacggcaggatttcgggttcgaattgagtcctcgaagctctgggaggctaaaaaggggcaaaacgatccttcaattaactcagccattagcacaagagattcacagtcttataggtattttataaaaatataaatatgggtacactctgttgccttcacaacgctggatacatcgccctttaaaattgggtttataaccaagattcaaaaaatacacctaaaacttggcttaaaatatgttaatattttatattctgtcataaatgttatgacatttaattgtggcaaatccatttactttttttaaaaaagtgtgcaaccgttaactatgatagaacgcactagaaaaggtaacgaaccttcacccacccccccgtgtccccgccaccctcgagcgcccagcgagcttcccaggatcctggggaaactgcaaaacaagccggtttgggggatggtggcctcatccaggaggggcgggggagagaggcccctggggcttccaaaactcacggatttgagggagagggagaaggagggagggggaacagaacggggtggggaggtagacgcggggagaagggaagggggagggacagcacgggaacaccatcaggctgggcggtattttcagtgcaaccaagaaatggtagactcaagtttttagttttaagactagaaaaaaatgcatcactcccccccataaccacattgaccacgcagtgttttccaaacaaaaaaaccaggcgcacaaactccacccacaaatgtacacacacaagataaatagttta

SEQ ID NO: 2965 - DNA, 495 bp, Homo sapiens
cgacggtcatctgccagattctgatgatgattcagaactcagtgtggaagaacatcagagggagaggcaggcgctctttgacttatcaagctgctccctgaggcccaaaagcttcaagtgtcagacttgtaaaaagtcatatatagggaagtggggactggcccagcattttaaacttaatccaggccatggccagctggaccctgagatggtgctatctgagaaagccaatgggagcaccctccgtgggtgcacagaggaaaggacgctcagcctgaccttcccggggctgtccgtgccagcggatccgcgtgagggaggggcccgctcctgcttggtgagagagtcagcacgcggtggcctgggtaatgtttgcatctgggtgtcgttttcggccattctcacactgttataaagaaatacttgagaccaggtgaactgtcacccctacaactcagcttgcaaccagccctggccaccaccagtttccccaag

SEQ ID NO: 2966 - DNA, 505 bp, Homo sapiens
  misc_feature (1)...(505): n = a,t,c or g
atgattcggagggttctgccgcacgnatgggccggggcctcttgacccggaggccaggcacgcgcagaggaggcttttctctggtgcttggcacanttgcaatgaagagactgatggcatgtggactattcagaaaactgtggcaacactgttgggtgcaaggtgaccttatgagatgggctgacagtggggactgccaactcatgtgtctgtttagctcaccttttcctgtgcccatcctccaaccccccaaccatgtgggaaggaaatgtttggccctctgaccctaactacatcccacagactnggatggaaaggtgtctgagattaaggaagaagatcaagtcgatcctgcctgggaaggttcctgttgatcttacttgccaagacaccagccaccttgcctncccggaggcactncggatgtgggtngatcgtggggaggtnggggttntttgggtttntcttgtgggcctatttngcttgnaaagaaggtnggaagagc

SEQ ID NO: 2967 - DNA, 331 bp, Homo sapiens
gctttaaaagttattcaacctataaatgaatctataaaatatagttgaagtacagtgccaatgctactatagaaacaaataatatttatgataatatttctttgggaaaatacattgatgtccagcatgttagcactaaagcaaaaggactgggaattatccagatgtgagctactccacaatcccatatttggagctagagttcagtgtgtgggtggatggcgagtgatgggacagaaggacagaactggagatcttagggagagaatggttaaaaacaaaataagggcctggtgtggcagctcattcctgtaattccagcattttaaga

SEQ ID NO: 2968 - DNA, 1489 bp, Homo sapiens
tttttatgtcattcttcaacatttaatggtgccacagggttaaataatggccttacttttttggcctgaattttgccaaaattagcttcaaactctttttttgatccatttagatttgctagatgtccatcctttattctgtagcctgaggaattcagtttccttatcctgtactgtactatctgtggtgttaattcaagaaccattggcgtctctcttatctgagctatggaaattccttctctcaataatccttgcattctctcttctaaaactggaacagaataatataaaagggcaggacatttcaaaactaattgcttcaggtcatgatctgtgcatttaaaagcatttttagagaaggaaatactattctgtatacttcttgggcaaagttgaaaaagaaatcctttgagtttggatagaagctggagaatttcaaagctggtgaaaccttgctcctggagaaattctagtggttcccttatagctgtgggagaaatttaaacaaaataaaagggttttggcttaaacaattttagtagccaaactttcatgttggcctcagagccacctacatctagataactctcttggagaattcttaccatttgcttattcttctcaacaggattatgaaaaacattaggtgcagctgtcaaaagtctgctaatgaccacattttttagtcccaactcttgaaagaactgaacattcagcttctggttctcttggtctttaatagtaaagaaagattctggaaactgctctattaacttgattaactcttcctcatttttgcagaccaactgccagagttttctctgggtgttaacagcggttggactacagacaattgcttccgggcagcgttccaaaatactggctacagcagtctcatcggcacctagttcttgtaaaatattcgcaatttcttcaacataggtttcatcctctaaaagtacccatccttttaatctacgaattttcctaatgtcaactgaacatttatagagcttttccactgttcttgtattttctttgctcgactgtttatcagttgtataggtgaagcatgctaagaaaggtctgtattttggaggtgatcgcatctttctgaaagaacacagcctgcaggactgggatctcagcagcagcttccacaacatggctgcaatctactagctagtttccaccgtcctgggacttaaatggactcattctatcttacagtctctccccacagatcttgtcctcatccagatattcagttcatccacttgggattctttccaacttcttctcaaaatgtgatcttgtcagttccccgtcggcgtcagctccaagcaaggcacagggagttcccgggggccaggccccgtccttccctctctctccggccagcctccccacagtccgcagtccccgaggcctggagccgggatttcggtcctcggtctcaagaagctcccgacagttctcagcaccg

SEQ ID NO: 2969 - DNA, 2336 bp, Homo sapiens
tttttttttgaaaagttcaaattttaattaaaatctttattgaataaaaatgtttcagactaggtaagactaagaaagcagaatgttttacatctctaaaaaatattaaagctaaatctctataaatgcagtacaaagaaaagcctacagcttaagacacctctccctcccatccatacaatttggaatatcaactgtgtacaacaaatgtactcaagtttataatgtccccaaaccttaagactagaaaatcatcccaagaaaaaggcctatagttggtttaatttcaccctgagaatactgtgataaaaatcaatatatttcagagctagtaagtatttaaaaattagtgtctcaaaaaggggacatcataagggaaatacagggtttagaggtctgagctcaagtggtgtaagacagttctttcttcttcctcctttaaactcttcactttgctctaacacggaagatgggggacagtgatcccgaaggtattactaaaatattgcagctttcagtaattatgagaagcacagatatcaccagaaaagaaagcaatcatttggagtacagtaaattccactggccagatacaaaagcttatttgggagacagcagatctctctaagcaccgaaggagtgtaggttggtttttcaattgcctcaaaaagtgctctgttgtattatacctcaggacgtcgagttcaggatgtagtttagagagcaggacataaagtagtaaattcctcatatatatcacagcaagaaaattaacctaaaaaatttaaagactaaataatctcttaacaggtaaatactaaaaaattaaattggtattcatttaaaaatatacaaactgtgccctttatactaaagtgcattcagtcgtaatgtttaagcccctaaattccttctgtatgttctctaattccaaaatagtgtgtaacaatatactaactaatcatctatctaccttaatattgccttttgggaatacagtagaatctgggctattatcagggtggaatatttccccagttacaagccttacagcacttacgcatatcatcactgctaaaatgaagaatttaagtaaagttatctctagtatttagaatgtgttttttgtgtttttttgttttgtttttgattttaagaaggaattcttttccaaagttacttccaagtaaattacatttcatgctgggatacctgcttatgtgcatcacattttgacaaagggcagtggctcgctaacactaacatgaatttaaggccccagcatcattgcaatttgtcactcttcatcctcatcctcatcataataccgatttctctttatctgttcttccacagagagctctttgaccacttctccctcccagagttccacatcctgggatttctgattctgagtagtgaattcttcagcaaaggtgttgtctacaaaactcgaccaattcagagacttgggttcttgtggagattgttgtttgaggaagctgttatcatcttcatcggagtctgcaccattttctacaagattctcattctccatctccaaactatgaccttccttacttctcttccctgtctctcctttagattctttgttttgccaggttgtttttcccacattcccattcttcttagaagccttggcattttccacttgtttcctttctgcaactcttccacccacagactcttcactctgctctgacatgctccagcctttcctgataggtggggacacagtttttgggctcttgacagaggtgctttgaaatgaagctgctacagtgaatgggcggcttctttccttcagtgaagaagatcgtcttagcttcttcagatctagatcgacatcctcaggaacttcgggcttgctgatttcgtcttcaggaggccatttgggctttgacattttgatcccttcctccaaggcacttcctgaacttccaagttcagtggggggtggccaggcgatcctcagcttcttggtttcagctggcttgtcttccttctcctgctgagaggaggccttggcttccatacttgcagccaggacacccaccttagcaataggggcatcttctacccctgggctgtgaggggtctcccttgcatttgcaagctgggctggtctctccaaaatctcttcgttttcatttttgcttgcccaataagatccttgtgtggtctgtgcccaaagccttcatcatagtttgcccttaagatttaaagagttgattgaagtgaggcttacaatagattcttccatgtaaagatgcatatgttcctagactgagttttgttgttgcaataggaagcaa

SEQ ID NO: 2970 - DNA, 913 bp, Homo sapiens
ccaagatggggcgccatcttgcggtccttttcctggggccggtggtctggtaccctaaatctctcagtattgttgcccttgggtgcgtaaggccactcggcgctcaggggttactggcagcgcagaaggctcgaggtctgttcaaggacttcttcccggagacggggacgaaaatagagctcccagagctcttcgaccgtggcacggcgagttttccccaaaccatttactgtggcttcgaccccacggcagactcgcttcatgtgggtcatctacttgcgctgctgggtctgtttcatttgcagcgagcgggccacaacgtgatcgcgctggtgggaggcgccacggcgcgcctgggagacccgagcggccgtaccaaggaacgcgaggcgctggagacagagcgcgtgcgagccaacgcgcgagctctgcgcctagggcttgaggccctggcggctaatcaccagcagcttttcactgatgggcgctcctggggcagcttcactgtgctggacaactcggcctggtaccagaagcagcacctggtggacttcctggcggcagtggggggtcacttccgcatggggacgctgctgagccggcagagcgtgcagctgcggctcaagagccccgagggcatgagcttggccgagttcttttaccaggtgctccaggcctatgacttctattacctcttccagcgttatggatgcagggtccagctgggcggatctgatcaactaggcaacatcatgtccggatatgagttcatcaacaagttgactggagaagatgtatttggaatcaccgttactctaattacaagtacaactggagcaaagctgggaaagtctgctggcaacgctgtttggctaaacagagataagacatctccatttgaattgtatcaatt

SEQ ID NO: 2971 - DNA, 2272 bp, Homo sapiens
tttttttttttagtgtcaacatgccatttattttttgtcatcttgaactaaaagtacagctgcaagcaagcttgctataggacaagcttcagcttgggcaaacatcaactatctgcactcaggacttacctatttccagaggaatatcgatggaaggtcaggttaatacttaatttcaggttgtttgctacttttaaatcaatgcagtgtctagttataataaagagtcaaacaatgctttacattgtatatatgttcatagatttcatccaatataaaataaagacagtccttttaaacaaaagatagggaagaggtaaatgtgacactttttccgcttacaaaaagtaatgccttataataaattttaattcaaccatttaggggggtcagctgcagtgaaccttttatttcttcaaaatgctgcttctgccaacagaatttcatgttctcttctttacagatagataggaactccttcaattgtaattctgtttgccctagagtaggcacaaaattcagtgcaaccatggcatagtgttcttctggccagttcccacatctccatttcatgatgatcttcttatttgttaactgaaaagagaggggaaattccactgaaaatcttttaagacttcccacaatacaacacagaaaaatcctttcattgaaactcctagaagaatcaatgaacaacatacggtccttcttccagtttatacatcagcaccactgataattgtctttattgccaaaatgtctcagaacagcagtaacatcaaggacagcaggaatatataataatgttttaagtacagtaatagtaaccagaacagagggctgctgttaaggttgaggcaacacagaccctcgtgatttcggtgctaaaaacagcatatacaaaaagtaatattaagagttaatcccaccttacttcttcaaccttgagtctacttaccaatcctagatattcaccagtgatgttcccatcaaacatctggaatttccctcccttttcagtttctaatacagcagtagatttagaaaacttttgcaccaactaaccaaataaaacatgttattccagtacacactaacacataatataattatgaaatacaaaatataacaattaatatggtttaaaaatcctaaacatgtagcttttacttacagaaaataaaacacaaactctctcttcctagagggagaaaactcaatgtaatgcgacatagtcccaaagaatgcccatctcccctccaattattcagaaactatgctcagacttctgtcaccaccatcccacatcccttcaatcaaaaacacagccacaaggaaaaccaaaaaccagctcctgttctttgtaatgtattttctcccaatgtcagcacttaacatgctagcttagggagttacttaactcctttacagtgaagatgctatacagctgctctacagttgtgtcaaacagttccatcatgtgaagagccacagtgggaatccttacacccagtgccactggagatgaggcctgaacctgcagggtattcccactcagttttcttttgacagtcaattcctgggttgccatagctttcgttggtaaaatcattcccgttgtaaattctcagtgtcatctacttcattttcctcagaaagattgggtatttcaatcaatcccttgtgcttcactccagattctttaacgatgcctttccagcccagtttgatgttccactcatagaagaaaatcagctttcctttgcggctgctgcacgaagcctccccttccacctgcttcaaactcgttgatctcgccgcggccagcgtcattcttccacaacggatgcccaccaggagctcctggaactttccctttggacaagctggtggcatcccgctctgtcctgccagggaccagaaagtcgtgaatggaagccccagctgggatccacctgcctgggtgccagggtcacgtccaagcccagcccagatcggcccaagtcctctcaagcagcctcgaaacctgccaacctccaatgtgctcctcaaacctgctttctatcaaattcttttcatcctgctcagttctttaagatattattgtccactatgcaagtagtattctgtcttaaaaacactggcttatttaagggaggaggatctagctagctcgcccactggaaataggcaaagcctaggccacagggaaagtagcaagtagtgaactaatcagaatcatgacaataccaggctattcaaagtgtcttcg

SEQ ID NO: 2972 - DNA, 1226 bp, Homo sapiens
gaggagcaggggaaccagacggcagagctccaaggtatgaacatagacagtgaaacctaaagcaaataatggagagaagaatgcccgacagagacttctggattcttcttgctgatgatttttttccttgagctgtaaatctgtgacttctgcgacatgggatttaatttggctaaagcacccctgttgggtttcacagctggtttgcaataaatggttcttggtggagatactgagcatgtcttattgagtccctaatggaaatggtgatcaacaaaaggttatggaagaatggtttatgaacttcccataggaagcacctgagagatagtaaactgcagcaagtaactatgtgtaagtcctcatcaaatgaaaagcagaaagacaagaacaattagtcaagagcagtagccctgtcagagcctcggagcaatacctttctgtacccgtggtgagacaagacccagagctactggaaaacaagcactttggaagatttgttttgttttcatggaataataatatgtcaggatataatttaacgtgagtttcttatgtccccttaaagactgttagacaagaaaagcattcactggctaataatccataggtcgacctatgtcctaagttaggtgtaaggtccgatgccttggcccacactcgagctctctttacattgttagttgtcaaccttggctgatggaaatcccgtaaccactatttgttgcactgtgccttgaagggcagcaggcccaagtgctgctctgactgaaaactgagttaacaagacgaaatctaaaggatattcacagtgacttcaattcaggaagaatgcttccaaaagagcccagtggggaaatctgacatcacagaagacattaattcagtcactttcaaagagtttgtctacaggcggtttctctgttatcaaaggcatttgaaataggattttacttaaacaataatggaacacaggagtatttaaagtgaagaacactttgcctgaatgtgatcagggcacataagtgacattggcgtgcttcatatggcgtgcttggagccagaaaaacttagcggtttattttgtttatatttaagcacagctttaaaaaattcattatcgtttattcagtgtccgaattgaggccatttgggaagaaaattctagcactggtggagaattatagaataaagattataaatggttggataaaaaaaaaaaaaaa

SEQ ID NO: 2973 - DNA, 653 bp, Homo sapiens
  misc_feature (1)...(653): n = a,t,c or g
ggtctttctttataaggtgacagaaatggccaccagaatcatattaagcttggaaaaagggaggtactttttcccagtcagccctaagtatttccagagttaattttcactgggctgccttgtgtcagatgcctactgagggagtgggaagggtaggtctaataggaaatcttggtaacagtatatgttaccattaaagggaagcctgggattccaggcagatcaaaacaacaggtagggctcttgcctgtccaacgcttaacaatacactttgtgttggcacagtgagctttggcacatgaagttagttaaaaataaaatccatagttaactgataaacctttgttccagccaatgacccttgccttacccccaagaaatattatttattaaatattatgaaatttaaatgaaaacagttatgagctcttatgataaagcgtagagacaacccaatttcaagtcaactcacaggaagataataggacaatatatggttgtttatgatcttgtttttacactgcttcatattttacatatgtgactttcaaaatcttaagacttnnnnnnnnnnnnnnnnnnnnnnnnnnnnnnnnnnnnnnnnnnncctcccaaagtgttggggttacagcgtganccaccgtcccagcccc

SEQ ID NO: 2974 - DNA, 874 bp, Homo sapiens
ggagacaagaaaagtaatgaaaggaaatcattccagaaagacagctgcatttgtccgggcctgtgttgcctactgcttcatcaccatcccctccctggcgggcatcttcacacgtctcaatctctacctgcattctggtcaggtggccttggccaaccagtgcctctcccaagctgatgcttttttcaaagccgctataagccttgttccggaagttccaaagatgattaatattgatgggaagatgcggccatcggaatcgttccttctggaattcctctgcaatttcttttctactttattaatagttccggatcatcctgaacatggggtcctgtttcttgttcgagagcttctcaacgtgatccaggactacacctgggaggacaacagcgatgagaaaatccgcatctacacctgcgtcctgcatctcctctccgccatgagccaggagacgtacctttaccacatagacaaagtggactccaacgacagcctctacgggggagactccaagttcctggcagaaaacaacaagctgtgtgagacggtgatggctcagatcctagagcatctgaaaaccctggccaaggacgaggccctgaagcgccagagctcgttgggcctttccttctttaacagcatcttggcccatggggacctacgcaacaacaagctcaaccagctctccgtcaacctgtggcacctggcacagaggcacggctgtgcagacaccaggaccatggtgaaaacgctagaatacatcaagaagcaaagcaaacaaccagacatgactcatctgacggagctgggccctcagactcccgtctgcaaacaaggacctgacccccggggcccatccccaaggctcagg

SEQ ID NO: 2975 - DNA, 374 bp, Homo sapiens
ttacaaacctgattcatttagttcttcatagccaccatcttgataatgaataaagaaaaaacaaatgatgtattttgtcactctattcatttttatctataaagatttaaaatacctttcttttgagttaggttggttttatggttggaagaaggaaaggaggtagacctttgaatgccttgattgctgcccatttctctaggcagtgaagaaaggcagctaaagtgctgtctctgattatcaaatgccatatatgtgagtatacctgtgttgtttgtcatgctgttgtgaatactcacttgcttttttatccactcatcttttttatccacgagctcctgcattaaagtaagttagtaaccaggtcgacgcgg

SEQ ID NO: 2976 - DNA, 386 bp, Homo sapiens
ttttttttttttttctcagttatgttaactttattaataggctgcagtctcaaaaatctttcttttcatcatcagatgtttgcggaagttttggccttctagtgtgaacctggacctttactccatctataatatgattttcctgttgtagtgcattccgaagtccttcttctgaagaaaactgaacccaacccaaacctctgtgaaagccagtctccttgtcaaaaggtaaaatgcaccttctgacatggccgaactgtgcaaagtgttctttcagctgactcgacgccgcagtccaaggaattcttctcacaaaagcaaccggctgattgatacttctacgcagcgccgcagcacctcgcgctgctgaggccgccatcttcagc

SEQ ID NO: 2977 - DNA, 416 bp, Homo sapiens
  misc_feature (1)...(416): n = a,t,c or g
ttgantccgctacgacnnnnnnnnnnnnnnnnnnnnnnnnnnnnnnnnnnnnnnnnnnnnnnnnnnnnnnnnnnggcacgagcctatgtcctaagttaggtgtaaggtccgatgccttggcccacactcgagctctctttacattgttagttgtcaaccttggctgatggaaatcccgtaaccactatttgttgcactgtgccttgaagggcagcaggcccaagtgctgctctgactgaaaactgagttaacaagatgaaatctaaaggatattcacagtgacttcaattctagcactggtggagaattatagaataaagattataaatggttggataagacaaatgtaagcttatttcataaacatttaaagctgattcagaacatgttaaaaactgttcccaattccaactatg

SEQ ID NO: 2978 - DNA, 521 bp, Homo sapiens
  misc_feature (1)...(521): n = a,t,c or g
gcaaacctacaagatccaggagtgttaggttgccctcggacatgccttcacgccattctaaacatcttggagaaaggaacggaagggagaacaggcccagtggcggtgcgagaatctcctcagctggctgagctatgttaccaggtacacagaaaactgcgttttgtggtactgaatagaagaaacttgaccaggtgcatgagtacgccacagatatgacagtataacagcaggacttagttgaaatgagttcatttagcaatttgacctgtctttcatttgtggataaaatccgtaaagcacaaaccccaagttcttatagacccaaatcttatgttaatcacttgaaaaatagaggaaattagatttttgtgatggatttttaccagtagtgtagaaactttccaacagtgctgggttaaagtagctccttctgatgggcanaagaccttgggttccatctttgcccatgacagggaaagtcccttgggcttggcatgaaacnctntgctctgagtttt

SEQ ID NO: 2979 - DNA, 505 bp, Homo sapiens
  misc_feature (1)...(505): n = a,t,c or g
ggttacctgccaaaaaataatgaatatcttctcccggagtctgtggacctggagtgtgtgaagtactgcgtggtgtatgataacaacagcagcaccctggagatactcttaaaagatgatgatgatgattcagactctgatggtgatggcaaaggaactggatgcatttcagccataccccattgaaatcgtgccagggaaggtcttcgttggcaatttcagtcaagcctgtgaccccaagattcagaaggacttgaaaatcaaagcccatgtcaatgtctccatggatacagggcccttttttgcaggcgatactgacaagcttctgcacatccggatagaagattccccggaagcccagattcttcccttcttacgccacatgtgtcacttcattgaaattcaacatcaccttggntctgtcattccganccttttcaaccaaggtacaaccgcagtttgccgncatcatacctacctcatgcatagtaangananaccttgc

SEQ ID NO: 2980 - DNA, 1173 bp, Homo sapiens
gccacttccgggagtcggaaaggaaagctgtgggaccatcctggcaaccccggtgtttggctgggttctagcgtaccggtctgtgtggccggtgggggacctgcggtcggagtgggagggccagtctgcacccaagaggtggaagaggacgggctttaggctggaagcgccttagaggagccatttttccagcaggatgcctggtttgcttttatgtgaaccgacagagctttacaacatcctgaatcaggccacaaaactctccagattaacagaccccaactatctctgtttattggatgtccgttccaaatgggagtatgacgaaagccatgtgatcactgcccttcgagtgaagaagaaaaataatgaatatcttctcccggagtctgtggacctggagtgtgtgaagtactgcgtggtgtatgataacaacagcagcaccctggagatactcttaaaagatgatgatgatgattcagactctgatggtgatggcaaagatcttgtgcctcaagcagccattgagtatggcaggatcctgacccgcctcacccaccaccccgtctacatcctgaaagggggctatgagcgcttctcaggcacgtaccactttctccggacccagaagatcatctggatgcctcaggaactgggatgcatttcagccataccccattgaaattgtgccagggaaggtcttcgttggcaatttcagtcaagcctgtgaccccaagattcagaaggacttgaaaatcaaagcccatgtcaatgtctccatggatacagggcccttttttgcaggcgatgctgacaagcttctgcacatccggatagaagattccccggaagcccagattcttcccttcttacgccacatgtgtcacttcattgaggtcctgggcctatgtcaagaagtgcaaaaacaacatgtgtccaaatcggggattggtgagccagctgctggaatgggagaagactatccttggagattccatcacaaacatcatggatccgctctactgatcttctccgaggcccaccgaagggtactgaagagcctcacctgggggcattttgtgggtggagggccagagtgtgtatacccaggcttgtctggaaggagaaggcctttgctgcctgaaagtctcaaaaaaaaaaaaaaaaaaagat

SEQ ID NO: 2981 - DNA, 587 bp, Homo sapiens
  misc_feature (1)...(587): n = a,t,c or g
tttcttctatggccacatgtctctgtggctctttccttcccccttctcttccactgttaaggactcatgtgcttacttagtcctgaatggagacaccgtcatcatccacatgagcccactgtcctaatccatacaggctgctacaaggaaatgcattagaccaggtagcttataantnnnnnnnnnnnnnnnnnnnnnnnnnnnnnnnnnnnnnnnnnnnnnnnncaaggtgccggcagtcttgggtgtctggtgaaggccngctttctcatagaggcttccttcttgctgtgtcttcgcatgggtgagagggaacaaacaagctcccttgtgcctttaataaggtgctaatcccagtcatgaggggcagagtctcccgtaaggctttaacctcctaatgccatcaccttgagggttaggattttaacacatgaacagtgacggaacacaacgttcattccataggcaccaggggtagtctcctcatgttcaaggtcttttacctggattcacatggcatggatgttaccctttttcatgtaaggttntagggatttgtgggacatctttnggggggcccttttttt

SEQ ID NO: 2982 - DNA, 517 bp, Homo sapiens
  misc_feature (1)...(517): n = a,t,c or g
tctcctgcgcatcgcagatcnctacctgcacccgcccagcaccctcgtactcacctggtctcctgcgcattgcagatgccacatgcacccacccagcaaccttgtcctcacctggtctctggctgtccagagttgcttcctgttgacgacagctctcctcagaagaaagccagcttccctctacaagtgctctgggaaaaggagagcaggttgaagtaacatttcctgtactgagacttgcaccctgtgatctctcactcatcccaaattctgcatgtggatgtctttcttctgagaacacccgatgtgtgtggatcggaagctcagtgggcttattcgtatttaacctggcaaacctggaagtggaagctgctttgtattacaaggatttccagagcctcagcatcctgctgggccggatcgtgtgccctgaggaaccgcactncggatcaaaaggtgctgtgcttgctggcctccctctttggcgggaagattgccgtgttggagatcaacccgg

SEQ ID NO: 2983 - DNA, 523 bp, Homo sapiens
tttgtgtgacttctatcaaaacacagaaatacagcacacgcacaaaccagcacaaaagcgcagcgctctatttacagctccggctgggcacctgcccacctggccagccgcctgcagggaggggtgggagaggggtcagccacatcagcagggaaaggatacgaagcaggtaaagacagaaggaaaatgggcgggtgcggagaaaccaagagggaggtggagctccagcaatgcggacacgaggagacaggagcagaaggggctgggggagacctgacctgtccttcctctctccccccagattcccatccaggactccaaaagcatagctgaagggggtgtggcgggtgcagggatgcacggaaagaggtaaaatagagaggctccataggaattgggaggagtgggggaggggcagtcctggtggccgaaatggaaccaaccccaatgcaaaatcccccaccccacactgccacttccccctaagctgccagcacatctggtttccacaaatgccactccc

SEQ ID NO: 2984 - DNA, 1796 bp, Homo sapiens
aaaaggacagtttaattttgtacagattatgcttacctcaggtttctttagtgtgcttgaatgcccttctttccatataacacttatcttcttcttaattcggcaatggaatatcttttaagttttaaaaaaactggaataattatatctatcttttttgccgtttatatttaggggtttttgttgataaaatcaagtcttggttgtggcttgctgaattaaatatttatgagtggtgcatttttaaagtatagtgaacaagacaccatattaagtacagtgataaagcatctatattctgtaaaaaaaaaaaaaatctggcctatgcatgttttttaagaaaaaaaaaatggctgtatcggcctgtatgggactgtaatgcgcttagtggtctgacatatactggaaatgtatgtatactggcgtactttatattctctaaaatgcttaatgcctttgaaattttgtaatcaaaaaaaagctttgaaaaaatctaaaggggagagtattctttaaagtttttaacataagcttgtcaatgcacatgtagatggttagcatgtttagcaaaccttgtgaaattataataagtttgtagttacatgtgaaactctaaatgcatggcaactgttaatgtcataacagtttagttattttgttctgttctgtcatgtgccacaaaatatgtacttttttcacttttttccctttgtatatcagttacgggttacaactggttcattctgaaaacaacaacaacaaaagtccattcatattttttaacaattgtataagtgcccaagtaattcactacagcctaaagccttgcctttgtaatttgacttctgacatgttggcaatcaaagcatgcacttgtaacaatgaaaaagaaaaagcattttatattactactcaataaaatgtgcatgaacttacagaattctcatccttccactgagtccgctgaagggatttatgtgcacaaccaccatgtgtcttctaggtgctggcccaccaccacacatcacaggctgatttccacaggcttcttcctaggggcctcgtgatctgaggggtggtgcctacttccactgtaagaaagaatcttggtggatttgtgtctcaaatcagataagagaagcctgtttaaagagcagatgccatcttctggcttcctcaaggaggccagttaaaaaaccagagcattcctttttattgaaaaataaaattaatttgttatcaggttgtttcagttgtatttgggatgccctatctatctggctaaagcaaaaagtactaggctactaaggtggcattttcatcacagaaaagagttgcatttgtattaacaagaaatttgtatacccacggcttcagctactatctaatcatcacccgaagatttaagatacaccaaatttcagtttgtttgtaacattgttcatctttagtgcactttgttttatataataaagtatgcctgttatattaaataataagaatatggcaattagcgatatagcatacccatacaaagatgttctcgatacagtctggcaaagactatcccaaggttattttaatgaattcagacattttttcctgtggatatttctccatcctaaaaaaagtggcaaccaaggaaaatatttagatgcaacttactagagtgatgatgtgaaagaaatggtgattctggtatcatggtgtttattttctttcttataactgcagagaaaatatcctgactaaaaaaaattcatttttttggattcctttcttttacaaattgtgcc

SEQ ID NO: 2985 - DNA, 427 bp, Homo sapiens
  misc_feature (1)...(427): n = a,t,c or g
gtgttttnnnggtttacttcctnnnnnnnnnnnnnnnnnnnnnnnnnnnnnnnnnnnnnnnnnnnnnnnnnnnnnnnnnnnnnnnggcacgagataccctggaactttggtttttttccctgctgtatctctatcatctatgtcaatgactagaacaaagcaggcactcaataaattcagacagaatgaatgaatctctgcctagaaaaggcttacagatatgacatccaataaatatttgcagtaaaagaggcgatgtatcagatgtgtcacaaactaaatcctaggaggcttcatgtttagttcattctcagcagggagggtggcaacagctgctgagttggggccattaacttaggtgaagaatctgcatttactgcaaaagacttctggcgcagttccagaggccggaaagcaaggtgttcta

SEQ ID NO: 2986 - DNA, 548 bp, Homo sapiens
gaaaagacaaagaaatttaggacagtatgcaagatttggcctggattcttctgaggatgtgaagtaatagaaacagtaagactgttccagactaggggaagactagagacctaatagctggattccatgtgatcttttgttggactttgggattggaggtgagagtagagaaggcataatgcacgtttttgagacgagggaaatgtgaatatagcctgtatgcctacactcaagtctgaagacatgtaaaccatgtctatactaaccagccaaatatttgaacactaaaaggaagaattttcttaatgtggtaatggtatcatggttgtatagaatgttcctcctcttgggagatgtgtgttgaaaatagggtttgacgtctaaacctattttgttttggcaaaaaggacgtgtgtctgtacaaaagaagtggagccagtatggcaaaatgtttacaaggactctgggtgagaggtacataggtgcttactatactgttttgtttctgaatttggaatttctcaaaattaaaaaaatatctactgagg

SEQ ID NO: 2987 - DNA, 801 bp, Homo sapiens
  misc_feature (1)...(801): n = a,t,c or g
acccctcgccagattttgcactctgaggtttctatcttccagacaagagctgggaggcaagatttctggtttctggttcctagtntcactgccagcgggctcctgctattaggtgagggtttcttgctgtctggaattcagtttttccatctgccacatggaagttcatagccaggatagggcgggagaggcaccagaacatttctctccactgactttctcacccggttcccaccctcctccacctcctctcctccgggcccctcagtttcctctcctcatctctggcctcagttccagagggttagccccagcaccccactctcctgccactgtcagatagccttggtcatgcttcctagaatctacttgtccaagttctcctctccctggggataagttactgcagaaactggggatttagaagcttattcagggctgagtgccaaaagcttgggggaggagggacaggtcctcggcaataaacagtgtcacacacgcatcacagccatttgagaaatggcttctttgcagagctggggaagcccgggcagaagatgccgcagcctcctactctgggtcctgagggggggtggcaggtaccacagtgtagggcagcagggtcaggggccaaagtctatgcgttccatctccaatccagggcagtgagggatccttgaaacaccagggngaggcgtcagaagttgggaaggggcagggnaacagggatttcaagatttaaggnaaaccgcagcttnagccaggttttcacaaggttttnaaagtagggaagggnatttt

SEQ ID NO: 2988 - DNA, 353 bp, Homo sapiens
  misc_feature (1)...(353): n = a,t,c or g
gggagctgcaccatgagcttcaatnnnnnnnnnnnnnnnnnnnnnnnnnnnnnnnnnnnnnnnnnnnnnnnnnnnnnnnnnnnnnnnnnnnnnnnnnnnnnnnnnnnnnnnnnnnnnnnnnnnnnnnnnnnnnnnnnnnnnnnnnnnnnnnnnnnnnnnnnnnnnnnnnnnnnnnnnnnnnnnnnnnnnnnnnnnnnnnnnnnnnnnnnnnnngtaagtcacaggccagtagaaaatatttacagtacacatatgtgagcaaagacttgngttcaagatatatagagaactcctacaaattaaaaatataataaaaaataaaaaatggttaggcatcttaaacaggcaccatg

SEQ ID NO: 2989 - DNA, 607 bp, Homo sapiens
  misc_feature (1)...(607): n = a,t,c or g
cggcggcggctagggatcagacatggcggcggatctgaacctggagtggatctccctgccccggtcctggacttacgggatcaccaggggcggccgagtcttcttcatcaacgaggaggccaagagcaccacctggctgcaccccgtcaccggcgaggcggtggtcaccggacaccggcggcagagcacagatttgcctactggctgggaagaagcatatacttttgaaggtgcaagatactatataaactgaatagatttccttttcattcttcctgggaatagaagatgtaatggaagttccaagtatctgtatgcaggcctatgactagcttcacttcttggtgactaatactaagttgacaaaacagcatattctaaactggattgtcttccgttatccagtagcttttcctattctccataaacaaatgttccaaatcctttgattactcacctcagaatgcttggtctcactcctcttttcctcaatcctagtagatcataccctgggagaagaagtagnaactatcaggcctgacttcantagctntttcttcctctncaatccaatctgnctggaacctcatcantttcttaacccttc

SEQ ID NO: 2990 - DNA, 425 bp, Homo sapiens
  misc_feature (1)...(425): n = a,t,c or g
gggaaaacttaccctgggaatgaagatccgagttacttttggggtcactaaagggtgggcttctttcagtccctaaacccacagcactgtatgtaactggtggagaacaggagtataaagtgctttactcttaagtaaagcagacatcagtgtcccttacagaagagaagcaatttanagcagcttgaggataacagcaaaaatggcaggtgttaagtcggcttnnnnnnnnnnnnnnnnnnnnnnnnnnnnnnnnnnnnnnnnnnnnnnnnnnnnnnnnnnnnnnnnnnnnnnnnnnnnnnnnnnnnnnnnnnnnnnnnnnnnnnnntgtaaggtgaaaggcnacgncttacatggcaacangnatgttagaatnagcancccacnccntaggggaaacccntttgcnaaaccattagntcttg

SEQ ID NO: 2991 - DNA, 470 bp, Homo sapiens
ctgttcctttctctcttctgaaattcttattatacatgttaacaccttttacagttgtctcacaggtcttggatatttcattctatcaaaacagctgcatttttgaattctgtttgctaatattttatttgagaatgtttgcattaggtttgaaataagattaaatggttgttggttgttttgttttgtagtgttttgtttttgttttttcagtaggacctctaccagttttgctctcagcattagttggtaacttctcccttttcagtgttgtggagcagtttaaatcacatctgatgctgtggaacaacatacccccagaaatctgggatgacttttccctgtttcttctatgttagtagttgggtctgatttcctattactgcctgaataaattttggtaatttacaatttcttgcattggtctagatttttaaatttattaacaaaatggcttgtggtttttgttt

SEQ ID NO: 2992 - DNA, 485 bp, Homo sapiens
attagcagtgatttaatttttttagatgctaaaacttatgggtgaaagtggattaaatgtagccaaatgcaacatcaaaatcttcaggcacaaaaacccattaactttttcatactctcagaaggtgaacctaatttcaaatgaaagctgcctccagaatatgttgttaagcatatcctagatataattcattctagcaaacattctgtagaaattcacataacattttactgtactaaaagtaaattgcccatgtaacaaaaaatatcttttcagagcttgaaatgaattttaaaggatgactgaccgtccttggaagagaaacagtaaacaaataaggtttgtagcagtgatgtatgagttagaaattgcagttccagatgatctctttattaaagagacgatctacacttaatttggtcaagtgttatgaacatagttcatgttaagtctccatttaaatacaacctgaaataccaaagtta

SEQ ID NO: 2993 - DNA, 544 bp, Homo sapiens
  misc_feature (1)...(544): n = a,t,c or g
cctccccttgacccttgataccgtnnnnnnnnnnnnnnnnnnnnnnnnnnnnnnnnnnnnnnnnnnnnnnnnnnnnnnnnnnnnnnnnnggcacgagnnnnnnnnnnnnnnnnnnnnnnnnnnnnnnnnnnnnnnnnnnnnnnnnnnnnnnnnnnnnnnnnnnnnnnnnnnnnnnnnnnnnnnnnnnnnnnnnnnnnnnnnnnnnnnnnnnnnnnnnnnnnnnnnnnnnnnnnnnnnnnnnnnnnnnnnnnnnnnnnnnnnnnnnnnnnnnnnnnttcattcattcattcataaataatgcatacatcattatttatgtatgcataaataaccaaaaaggaaaaagagtgtctgcagggcgtggtgaccgttggagccttgtacgccgctggngggaatgtacagtagtgcgggcactgtgggaagttcctcaaaacacaaaagaagatggaattactctgtgacccagcagttncacgtctgggtacagaccccanagaattgaaagctgggtcttaaagaggtacctgcccccatgtccaat

SEQ ID NO: 2994 - DNA, 1536 bp, Homo sapiens
  misc_feature (1)...(1536): n = a,t,c or g
gcgcagatgtgaagggcgctgctctcaggagcagacagaggtggggatgaatcagtacacgcccacctcgggcccacaggggaggatgcgcggactgtgggtgtggggaggagacccctctgcgtcatgctgacggtgtcggcagagtcgccagcttctgcaggagcggtacctgtgggttcttctgtgacttgtttaaccgcatcttttgcccagtagttagtcttttcctgttgggacaccatgttggtagtttggaaatggtttcttccatccattgcctgccttttagctttgtcgatggtgttctgttgtaaattttggtgcacgtttaatgtgaacaatggttatgagacgagtgccatgagttcctgtgtgcctgtcacccagcccggccacaagaggtgctgggggcagtgtccacacccccctttcttaggacgcctgagtctcagatgtgacttatagggtatttcttatggcaagacggttaaaacaaacttcagcgtctcgtctgtccttctatggctgtggcttctgatgttctaatggcgttctcgtcagccggggctgagaacaaaataacatagactgtggggcttaaacagcagaaacttacttcccatggttctggaggttgggagtcttggatcaccgtgtagcatggtcaggttcctggtgagggtgggattcctggctaacgtaacgaaggctccctctcctgataccgtgtcactgggggtgaggcttcaacacaggaattttggggggacacatcagcattcactccatcacaggtggttagccctttaatccacgggaattttgtttggggttgtgtgagatacgggtctaacgttttctttttcaaatacgtagccagttgtcacatcatttattgaaaaaggaatcttttctccaccgactgacatgaaatgctaccatcatcgtaaataaaattcccgtaaatacttgctgtctctgctgtctcagtcctgactcacgggctgagttctctttctgcacagtagcactggcattaactgtgacagctttacagcaggctccctccccgaggccgttcagaagcattcctcagcgggtcctacacgtttcctctcccatgtcaagtttagaagcagtgtcaagacccacagcagtcctgcgggagttttaagggatgcacggagtttatggggacagtttggaaaattgacattcatgtgacttagagtcctactacttgaaaatggattccagctctcaacgaatttagagctttggcaaaatttttaagatttctttgatgtccgatgtgctcatttcttggtttgttcttggagtattttgtggatttttatgaaatccacaaagtttttgttataatgaatgggacactttcccataaaatgttgtaattctgtattgctgttttagtaaacactgttgattgatgtatattgatgttacacttgggtcacttgtaatagtttgtccggttccattaatttggaacctttttagggtnaaccggtc

SEQ ID NO: 2995 - DNA, 381 bp, Homo sapiens
tcttaaatgaggggacataagtatactctttccacaaaatggcaataataaggcataaagctaggaaatctactaactgtaataaatgtatgacattattttgattgatacattaaaaaagagtttttagaacaaatatggcatttaactttattatttatttgcttttaagaaatattctttgtggaattgttgaataaactataaaatattattttgtattgcagctttaaagtggcacactccataataatctacttactagaaatagtggtgctaccacaaaaaatgttaaccatcagtaccattgtttgggagaaagaaacagatcaagaatgcatattattcagtgaccgctttcctagagttaaaatacctcct

SEQ ID NO: 2996 - DNA, 732 bp, Homo sapiens
ggattaggctccctggggccccctgctgctgtgcccacctgcccacccaggtccccacctcctgcagcccagagggagctctgcatgtgggacactccctgctggcacagccacaccagatggacatgttggatgggctgtgcccttccccccaactgtggcccccacaaggaggtccccaagatctccaccccagtcatgctgatggggccttcagcaccagctctgtcctgggtcgatggaggaaagcccagccccatggccttgcccttcctggggcatcccacatcgtgccgccgacactgtgtgcccctggggggagtgaaggggccaggggcctttgacccccagcttaggctggctatgccctgagcctgccaacccagtttcagacactcatccttcatccttcctgctgccgccctggggttcctctataaacctcgctgctcagctgccccacaagtccacatgcccgatggtgaatgctcagcccaagtgagtgtggtggtgcagctggctagcacttgctgatagccactatgggctcgactctgtgctaagtggtatctggggacacagaggcaatcagacctggttccccccctggtggagttcacagtctagtggaggacagactgttaacaaatggcaacacggcttcatgcgtgccaggatcagagtacaaatcaggctgtggcaggcctcactggtaatggaaaagtgagggag

SEQ ID NO: 2997 - DNA, 535 bp, Homo sapiens
  misc_feature (1)...(535): n = a,t,c or g
aacntttangacccgattacgaatttaatacgactcnnnnnnnnnnnnnnnnnnnnnnnnnnnnnnnnnnggcacgagagcttatgaactattgggtaacagcagtggaacatgttaagtggtagtcactaacatatacttaggctggtcccttgggaataagtttaccagaggttagtctaaataatgactttttgattcatttacttattgaatgcatattacttgtgaaattgccttaaaccttctttggaatgaactggaacctaatataatagctagcatttattgagtattaagtaactaagtgccaagtctcatgctaataagcattttacaggatctcttataatccttacgacaacccttcgaggtagaggcacnnnnnnnnnnnnnnnnnnnnnnnnnnnnnnnnnnnnnnnnnnnnnnnnnnnnnnnnnntacggttgcaggaaaaattgcttggaattaggatttgaatccaggctggctgactcaagagaccatgtttttcatcattatagtaaaaatgatg

SEQ ID NO: 2998 - DNA, 1074 bp, Homo sapiens
actgatttcgcagtccttgggggatcaatcctccggtctcactggggacgaaccccaggttctggagcctctccccctgacagacagcttgtcaccggcacttatgggtcctctgggatttcagacaataccccaacttctgtaggttcagaaagtgctttcaaagcaggcagtggcacccacacccggtgggacacacctcctgggtccgaaaccactccatcatgtggctggtgtggccaccgtgcccacaggtcaggcagaaattggacgatccccgcacagcccacgtgacagatggcacactggaacgtgaagcctttgcaagatggcacactgcgtgccacggacctcactccggcagtggctgcagtacacgccgaactcgatccctttgtgagggtcaggaggacaggagacaaacttcaacacttcagctcgcttctctctcagaccccaacggtagaggatttccccatagcatttcttaaagtcatcaaattgctgggtattggcggggtccaggagccttttatttttatcatgctggtcgcgttctcgctcacggggatcactgtaggtcagactcccaaagcggagctcttctggtgaggattctcccccaaggggaggacaagtgctctgcctctcttcccgctatgttccagccgccagtgttgagccctgggtctgacatactggagcaggaaccagaagaggtaaagctaggatatcgactatgggacaccacaagattagaagaacggttaggaaaaggcccaaagggtttggtagcccctgaggccgagactgggcttcaaacacgctacagagcatcgccagtgtctgaacatcccggagccggcaatagtgagccaacagggactccagcagctgccgcccaaatggatgtcgagcccagggtgtttccaaatctgggtcagatttcggaccaaggcaaagatctgtagctaccgtagccagcgaccaaacctggacaagatcctttcttccaacgagcaaggcagaggcggcattcttctgacatgtttcctgaatatcattcacattcaa

SEQ ID NO: 2999 - DNA, 1078 bp, Homo sapiens
ttttttttttttgccttttttaaaatttttattttcagtacattaaatttactcataaaaacattctaaaaatgtacaatttgtcctttttaacaaagtataataaaacataaaaaccccaaaaacagaatacttgacatttacaattcaaaatcaaattagcggaatattaaatatttacaaaactatatcttttaaaaatattcataaagttacatgcaattttgtagaattgacaaaagaatggctcaaaaatgggagaattttccttcattcctaaaaagaaaatatgtccaatagaagctgtgaagggtatcgagtacacaaggtgtccagtttcagtaccaaagccttctctctttgtgcacgtaagactcacacatgtgatgagggcttgttacaacgcacgtgaggccgcggcggatgggccactgcccccttccttgggtgaacagtggagcaatgttaacctttggcctcaaccagcacagtatatggttttctagaatattgcgagtgttgagtgttgattaagagccttcattcagacccttgggacttttcaacaaattcgcctcttcagaacccatggctttcagtgccacctgactcattctttggaagtcacctgcatgctggaaatggcagccacccccgctcaggtcgcacaggactctcctctgggacagcagtcgagtcaagcagggagacggctttcctcacaaccttgaagaccatcagtcatcatgatgtacaacgagcaaggcataaaataaaacactgggaagcaggaagagtgacaagaaaatgaacagggagcaaggagggtgcaacccagttccccatcctggcaagtgcctaaagccccgctcagcctctgttccagctgggtgatgtttaggcaaagtcactaccccgccccactactgtgccccaagacagagtctgtggtataaactaactgtgctgactttgggcaataaaggacctagaattctaagtactgaattaaaaatacagaacctactaacactactgtattaacaagctgactcctgtaatcttttggagatgacag

SEQ ID NO: 3000 - DNA, 413 bp, Homo sapiens
  misc_feature (1)...(413): n = a,t,c or g
ggcacgagatttttattaacatcaaagtactgtaagttccagtgccaactgggctgaagatttcttttcacagaggatttgcttcctttccctctatgggaaagttctgtatcccttaaatcattttaagctgcttcatttgaaaaataattcttagtggtgtgctcatggagtggattgattgcggctactggggaaattctctcatggcttaagttttgcttttcaagcctgcaaagtgggtgaatgaagggagcccactcctggtgtgtgcannnnnnnnnnnnnnnangatgacgactgacttccaaaacctcagtgcatcacgactaaaggcattcnggagaccagaagccacttantaggagatcantagaggctgngcggtaatcnnctttaaaatcctaaaggac

SEQ ID NO: 3001 - DNA, 869 bp, Homo sapiens
ttactggagcatgaacaaggaagatgtcattgattcatttcaggtttactgcatggaggagccacaagatgatcaagaagtaaatgagttggtagaagaatacagactgacagtgaaagaaagctactgcatttttgaagatctggaacctgaccgatgctatcaagtgtgggtgatggctgtgaacttcactggatgtagcctgcccagtgaaagggccatctttaggacagcaccctccacccctgtgatccgcgctgaggactgtactgtgtgttggaacacagccactatccgatggcggcccaccaccccagaggccacggagacctacactctggagtactgcagacagcactctcctgagggagaggggctcagatctttctctggaatcaaaggactccagctgaaagttaacctccaacccaatgataactactttttctatgtgagggccatcaatgcatttgggacaagtgaacagagtgaagctgctctcatctccaccagaggaaccagatttctcttgttgagagaaacagctcatcctgctctacacatttcctcaagtgggacagtgatcagctttggtgagaggagacggctgacggaaatcccgtcagtgctgggtgaggagctgccttcctgtggccagcattactgggaaaccacagtcacagactgcccagcatatcgactcggcatctgctccagctcggctgtgcaggcaggtgccctaggacaaggggagacctcatggtacatgcactgctcctgagccacagagatacacatttttctacagtgggtattgtgagtgatgttcatgtgactgagcgtccagccagagtgggcatcctgctgga

SEQ ID NO: 3002 - DNA, 969 bp, Homo sapiens
aaagaattcagaaggcctgtcaggtgggtccggccggagaggcctcgccgcggacgccgtctctccagaactccgcttccaagagggagcctttggctgctttctctccttaaacttagatcaaattttttggtttttaatcagttatcttgggaacttaacctggcccctcacctcttctgcaccccccgcccccgaaactgtctcgtaatgaatttctgctgtcctcctgggagtggacggccgggtcccgtcccccgggaggcatcgctcgggttcagcaccttggctcccagtgggggccccgtggagggcgcccgtagtgataagcacaccggcacgaacgtcaggtccattcctcgaagtcggagccctcactctgccctgtcctggggctggctgagggcgaacgccccacctcactttctagagccctgtctgtcctagctcctatctgaccttgtgtgtaaatacgtacatctgtttttaaagtggatgggcccctgagaactcagtgaaatgcagagttctccatgcacctaaagctcctttgtcgctctcatggctgtcagatcctggtccctccacactgggtgctggggagggaggaccctcggggctaccgcgcgcccccccatcccacagatcaggagccaaggagggagaacagggcagcctgtgggactctaggatgcttcagaagaagcgacggcaccgtcaaccctctgttttttaaaggtggttggagactgttaacactgagctcattgacttctagagattttatttttactggttgatctcttggtggttttcaacttcctgctggaaactagaggtggggcaccccccaccccccagcctcgcactgtgtccttggggaaaggccccgccccaatcctggcccggtgtcactgtggcccggccacccctgagcgcccagctccctacctcctggacgtctctgag

SEQ ID NO: 3003 - DNA, 1573 bp, Homo sapiens
gttagaacctaaccctaagcccaggcttttctctccactgactgcctgtcagctagtctctccaccttggccatttccagccagctcccacccatcttttcttgaatctcttcctgtttcccttaggacgactgaggtgtgggctgacggaatgccctagttgaggtagtataggtgctcaggcccctaatccagacctctacctgttgctaccccccttcccctccctccaggactaagaagcaagatttcccaggtgctctgaaagctaattacttactcatcgaaggatctcaaatcaaagctgacccagtcttcatatccttcaagttcctttccattcctcaaggctttgttttgtgtctatattgatcccacagccactgcacttgcccttgccacacttgatctcaagggcatcttggaagtatttgaccatttcttgagatatggggggaaaaagtctttgtattggcatcttggttccagactcccctttccaaacctagaaaaatacagtgacctttgagcatacccaagatccctttctcactgttgcctgtcccctaactcacctccccacagcccctatcctttccccctcaacaaaaacaaaatctaccttacttgaggaattaggtaggtaaggaatgatcacattggagtttgggattaaaaacaccaaaaaaaaaaaaaatgcatttggttctctctacactggctaagaatattgctctacactgtaagttttaaacgttacgtttctgtatgaatgtagtgtgggtttgagtagcattgtgtgtgagtggccccacaggtacattcaccctctagtgcagcccctcagtttaatgaaggaaaaaaaaacaaacacaaagccttaagctctttgagtacttcctttaccaaatgagcatggttctaacacctggagctgggcctacattggaaacaagcccctcctgccctctgtccattcttagagcataccttcatccactccatgctcagcacgtctcatcccaagcgacaattagttggctagaaacacttttctgtaattttaaacttagactgttttgttacaaatttttgcaccattctgttaaagatgcagaattgggcttttttattttttacagatgaaataagcccttacctttcctcttgtctctggggaatgtcagctgatggttcttatttaaggttttgcattttgttcactatccactactgttcgttagccagaaattctctagtgatctgaagcaatgtgactgaagaccagttttaagttatgtgttggcaagttgccttatatttaaaaggaaaaagaaaaaaaaaaaagcctgattgtgttatgccaaatgatagcaacatgaagtcctaatttattgttcccaattgttttcctgccgtctgtgaacactggtacctccctgtcctgatcccccagggggcacctgtaggcttctgactcaatgccttctccgaaggtgttggccgccatcttcacccggggcccttttccagttcctgtttttctgagttcaggtttaaagagcaccactgt

SEQ ID NO: 3004 - DNA, 382 bp, Homo sapiens
aatccacctaaccctcaacaaaccatgatgtaatgaagcacgaatcacaccattttgtctctttcctaattcaaataggtccctggcattagttcatgccgagactagaaaactgaaccctagtactgttttttaaaacagttttaacagaaaattaaactgtatgtttgaaatcataagtaaaagtttgttgcttgcataagagtagcctcttgattctcatagtggtaattttgtgtcatatcatttagatgttgaaccatttcatttgtgcatgtgtatatgtgcccaaattcatcctctttgtttagaatctgcttacaaataaaactaatagaatctgaatacatttatcatatattcttccagggtattgaagtca

SEQ ID NO: 3005 - DNA, 606 bp, Homo sapiens
ggagcttttgtgggagcccacaccagtcaagttggatttgaacccagctgctctggctgcacttagaatgatgtaatattccaggatgctgctgcaggtggcgtatcatcgtacacactcagtgacatttctatcacaatcattttatggaagatgtgtgataatctgtttttactggtattaataaacacatacaatgaagaaaacagataacaaattttaagaccaaggtaagataactaatcaaggccatttaatccgtcacattcatctcataatagaaacacgttcatattccagtggtcaatgtagatttcaagttgaaaggcagtccctttagttgggggctgtccagagctgcagcagggctttgcacggaaggggtggccctgttagagttgcttctcctctagtttgtaacttactggacttttgtggaaaatatcagcgtcgctaccctcagaaacaaactaacagcacacgttaggaggagtcctcatcagctgttctcattgccagtgagatatattcagtattgtagatactacactaatttccaacataagaggcaggaaggagtttttggattctatccctctttttact

SEQ ID NO: 3006 - DNA, 565 bp, Homo sapiens
ctgaggaactgcggctgcggttccgagcggggtctggggctgttaccattgagtgaccagaaaggctctcggtgcaaagcgttcctgcagaattgcttccacgtaaagggaccttcgggaaatttcgctggataccggctggcattgacaaacccagcgtccctgagccttgtgaggtttccaggcaggctgattgcgaggcaacatgtctgcttcggtgaaagaaagccttcagcttcagctactggagatggaaatgctgttttctatgtttcctaaccaaggagaagtaaaacttgaagatgtaaatgccctgacgaatataaagaggtatttggaaggcacaagggaggcgctgccaccaaaaatcgaatttgtaattacactccagattgaagagcccaaggtgaaaattgatttgcaagtgaccatgcctcacagctacccctatgtagcattgcagctgtttggacggtcatctgaacttgacagacatcagcagctacttctcaacaaaagtccctatgtaagaagtgagacctttgttgagaagtagctgtcgacg

SEQ ID NO: 3007 - DNA, 1157 bp, Homo sapiens
  misc_feature (1)...(1157): n = a,t,c or g
ggctcagcccacgtaatggcacagcccacgtaatagcgcgtgcagtgtgctgggagtctggggaattagaggtggattcaaatgtaatttagaaacttggaaatcattttaatagtgaaattatgggtgatttttgctttttaaaacttgtttaaatgctgtcatatggttaaaagataaaagcagtgggaggtcatgttttccgtttttggaaagggacagtatctcctgaataagtgggaggaaaagttctttaactcatcgctttcagcaccacctgtgctggccttcacgttctgtctgtgtaagtggagggtttccaggcagtgtaagccctaacctggactgaagtccttgaggggaaggggtctgtgatgtcctgccttgtgatctgtcccccattcccttcccctgcaggaactcagcgagatgctgtacacagaccggcccgactggcacaagtgtgagtgcagtacgtggcccaaatctacaagtactttgagacgtaaccctgggagggcctggggcagccaccattgccacctactgcagcttttcctgggaagcgcctggattactgtccactggaccctggctctggcccaccacccagctgcctagacttcaaagacaggcttcaatccaagtggaccaacacccaaataagaaacagagtgggtcccacgatgtacctgtctgaaatgcaaatgcagctggactgtaaattggggactctttgatctcttgtgggatgcttctaaagagggcagcctccctccttccagaccaagaccccacacccaggcttgttttgctgattatattgggtggctgaacgaacacattatctgcagaaattcagacaaagaacatctccaaatcagtcttttggttgctgttgttaaaaatatcaacgctttgcctttatgaaacctttgcccttnnnnnnnnnnnnnnnnnnnnnnnnnnnnnnnnnnnnnnnnnnnnnnnnnnnnnnnnnnnnnnnnnnnnnnnnnnnnnnnnnnnnnnnnnnnnnnnnnnnnnnnnnnnnnnnnnnnnnnnnnnnnnnnnnnnnnnnnnnnnnnnnnnnnnnnnnnnnnnnnncccaaaactttgcccttgtgaaccctcccttcccccctcccccaacaaaaaaa

SEQ ID NO: 3008 - DNA, 374 bp, Homo sapiens
gagatgttttattgttcttaattattaactactcattttgattagtagtttgcctttcatgacagtacaaatttagtattgaaaccttgtttattcagttgatctcatgtatataaatatacatatgtatgttatttgactacggtgccttgtcaaagtatgagagcgttttatgtaaatgaacctgtactgtatatgtaattatgtctgtactgttcagtaattaatgtcatagatctggagttgggacatcctaccttctggcctgctctgttctctactgtaggaggccgatcctggcaaataacatttctcaggctcctttgccagcaggcttttggctcggtttggcaaatggggaagcacacgtggaa

SEQ ID NO: 3009 - DNA, 962 bp, Homo sapiens
  misc_feature (1)...(962): n = a,t,c or g
gcggccgcggcttactaccccagggcgaacggacggacgacggaggcggacggttagccgagccgggcgacctagagaacgagcgggtcaggctcagcgtcggccactctgtcggtccgctgaatgaagtgcccgcccctctgagcccggagcccggcgctttccccgcaagatggacggtttcgccggcagtctcgatgatagtatttctgctgcaagtacttctgatgttcaagatcgcctgtcagctcttgagtcacgagttcagcaacaagaagatgaaatcactgtgctaaaggcggctttggctgatgttttgaggcgtcttgcaatctctgaagatcatgtggcctcagtgaaaaaatcagtctcaagtaaaggccaaccaagccctcgagcagttattcccatgtcctgtataaccaatggaagtggtgcaaacagaaaaccaagtcataccagtgctgtctcaattgcaggaaaagaaactctttcatctgctgctaaaagtggtacagaaaagaagaaagaagaaccacaaggacagagagaaaaaaaagaggaatctcattctaatgatcaaagtccacagattcgagcatcaccttctcgccagccctcttcacaacctctccaaatacacagacaaactccagagagcaagaatgctactccccacaaaagcataaaacgaccatcaccagctgaaaagtcacataattcttgggaaaattcagatgatagccgtaataaattgtcgaaaataccttcaacacccaaattaataccaaagttaccaaaactgcagacaagcataaagatgtcatcatcaaccaagaaggagaatatattannatgtttatgcgcggtcggccaattaccatgttcattccttccgatgttgacaactatgatgacatcagaacggaactgcctcctgagaagctcaaactggagtgggc

SEQ ID NO: 3010 - DNA, 626 bp, Homo sapiens
  misc_feature (1)...(626): n = a,t,c or g
attgaggtaggcaacagctctgacttctatgacatcgtggtcatcgccacccccctgcacctggacaacagcagcagcaacttaacctttgcaggcttccacccgcccattgatgacgtgcagggctctttccagcccaccgtcgtctccttggtccacggctacctcaactcgtcctacttcggtttcccagaccctaagcttttcccctttgccaacatccttaccacagatttccccagcttcttctgcactctggacaacatctgccctgtcaacatctctgccagcttccggcgaaacagccccaggaggcagctgtttggcgagtccagtcccccaagcccctctttcggacccagctaaagaccctgttccgttcctattactcagtgcagacagctgagtggcaggcccatcccctctatggcttccggccccacggcttcccgaggtttgcactccatgaccagctcttctacctcaatgccctggagtgggcggccagctccgtggaggtgatggccgtggctgccaagaatgtggcctttgcttggctttacaacccggcttggttaccaagggaccttagacaangatttgattcaaaaaagattttgaatggc

SEQ ID NO: 3011 - DNA, 519 bp, Homo sapiens
  misc_feature (1)...(519): n = a,t,c or g
tggcatcttcactttttgcagtgattaatggaatcttctttactactgcagttaggagttgctggatagtttctaaatggtctatcttaatgacatagtttcccagctcagaactttcttctgttttcactgctgtctgaccctcctgagagaggcaactcggtccaggtgtttctggttcagtcttcacttttgcaacagctgctggagcagagctggggacaactggagttggggcagctacaggcagaatggcaggtggcttgctggtagaaaatgactgaaccactttattcacaggcatcaggatcgtctgcacccctccagatgtgtttacgctgagtggtttgagctggctgggaatcgtcaggacggcctgctgcggactggactgactggagtgaatctttaacagtcctagaacaaattggaagataaagccaagttgaaggcangtgcttcgggaaagctcttatcctctggctacccatattttgncatggaggaagttcccaggac

SEQ ID NO: 3012 - DNA, 507 bp, Homo sapiens
gcataagttcaacagcaaggcctcctatacttgatgtcttactgcagcgtcctttgtgctgggagctaaaaatggcaggacaaaggaaaggtgcgcacggtagaagggccttgagtatttgggaagtactcatggagtcacctcctccattgcctttagaacttatttctgactcctggtggtcagtgctccctaagtctttattttaaagtggaggctcctcagcgagcctcagggaatatgttactgctcacctggctctgaaagactgagtgtcactgaggctttagaaatggttctcgaagtgtggtcctcagagtacctttgttggaattgttgcatgtgcatatgtgtctgttggtggggggtggtacataccaaaaatactggattctgaacatcacatcagagtctctgaggatgaggtccaggaatttcactgagctccccagatgatgtttatgggcagtagcatttacgaaattctgttttcatgtcctgtttaca

SEQ ID NO: 3013 - DNA, 434 bp, Homo sapiens
  misc_feature (1)...(434): n = a,t,c or g
ggggggtggaaggtggtgctgctagctgggtcgcagacagttaacagggcaagggtctggtggcccaggcagttgtctgggtcctgctgggggacacagcccctgtccttcccccacgaggccaggctgatgccatcagacacaatcagtcctgggcctagcaagaccaaggggctggcccagaccctggcacaggggtcagatgggacccacagaggtgctcccagccagctccattctccccaccccaagccccaggagtgcctgcccttgtaggaggctgcatgataaggatgagataggctaggtgtgactgctagtttttttggttgnatgttgttttttttgagacagagtttccctcctgttgcctaggctanagantnatggcncnactgggctcaccacaacctncgcttccgggtagctgggat

SEQ ID NO: 3014 - DNA, 157 bp, Homo sapiens
  misc_feature (1)...(157): n = a,t,c or g
gggtaatctaagttttcttttatgttatccttataggagttttatagttttgtgttttacatttaggtctgtgatccattttgagtcctatttatctggtggaaacctgactgacatagcatatgnttctagtgtttaaaaaaaaaaaaaaaaagtc

SEQ ID NO: 3015 - DNA, 981 bp, Homo sapiens
  misc_feature (1)...(981): n = a,t,c or g
ggcaagagaaagaaaaaggaagagacagcatttggttatattacatcatttctaaaatctaatttcctggagtgagaatgacactaagggtacctacgagaacattccttcccatgtaaactaatagtgtaataaatactcatatagttactagttttagttgccaaacctagtttgtaaatggtaaatttgagaccagaactatattcttatgactatcagaccactgatagtttcactaagtcaactcccttcactaacaatttgatnnnnnnnnnnnnnnnnnnnnnnnnnnnnnnnnagtttcaacaattttctcataagctttaaatcaaattgatgagagaactttccctgtttttctgtcataaactacattatctggataaaggttcatactatttttacatacatagattatttaacatactttgcctctcttgctgcagagaactttgcttaagatatacagctgatctattctaatttcatgattatctatttatatttatttggtggtattgttgcttgaacactagttttcgagcagttttagagatgataccacttttacactggttttctctgtaattttagttccttatggttcctggtataaacatgtaaaatcttggcgggtaaagggaaagagtccacgtctactatttcttttctacgaagacctgaaagaggatatctgataagaggtgacaaaattggtacatttcctggaaaggaagccttcagaggagcttgtggacaggattatacatcttacttcgttccaagagatgaaggacaatccatccacaaattacacaccactgccggacgtaattttgaaccagaaattttcacccctcttgagaaagcgaattacaggagactcgaaaaatcactttacagtagccctgaatgataaatttgataaacattatgagcagcaaatgaaggaatcttcactgaagcttcgaactgata

SEQ ID NO: 3016 - DNA, 462 bp, Homo sapiens
  misc_feature (1)...(462): n = a,t,c or g
tcgcctgagtaccgtccggaattcccgggtcacccacgcgtccgcgaccctcaagcgctgtggattttcgggtacggctccctggtgtggaggcccgacttcgcctacagcgacagccgtgtgggctttcgtgcgcggctacagccgccgtttctggcagggagacaccttccattcggggcagcgacaagatgcctgggccgtgtggtgacgttccttggaagattcatgaggggttgcacttggggcgtgggcattaccaattgcaaggggagcaggtaagcaaggccctgaagtacctgaatgtgcgagaggcagtgcttggtggctacgataccaaggaggtcaccttctatccccaagatgctcctgaccaaccactgaaggcattggcctatgtggccaccccacagaaccctggntacctggccctgcgcctgaagagccattggcacncagatc

SEQ ID NO: 3017 - DNA, 404 bp, Homo sapiens
  misc_feature (1)...(404): n = a,t,c or g
gggaaaaggaaaggtaaggtattttcttccagttctggaggctggcatcacatggtgagggaggttatgagacatggccaaaatggcttttataaagacccactcctgttataacagactcactccctnnnnnnnnnnnnnnnnnnnnnnnnnnnnnnnnnnnnnnnnnnnnnnnnnnnnnnnnnnnnnnnnnnnnnnnntgtcgcaaggattaagttgccaacacatgaacttttgggggacacattcaaaccataacagtgagcttggatagatgaactaccaggaagcaacaatttatttcaaccccagcccccaaacatgatcctcccctggagttttcccttacagtaaatgacaccctcattcatgtaattgcagaagctgaaattctcaaagttacc

SEQ ID NO: 3018 - DNA, 5507 bp, Homo sapiens
agaaggagcgcggggccgtcgctgtctgcagttctaggcttgtagcctttgcactaaccctgccgcagtacatatccagccatactcatggaccccagtgatttccccagtccatttgacccattgaccctgccagagaagcccctggctggagacctaccagtagacatggaatttggagaggatctactggaatcccagactgccccaactcgaggatgggccccccctggcccttctccatcctcgggagccctggacctgcttgatacccctgctggcctggaaaaagaccctggagtcctggatggagccactgagttgctggggctgggggggctgctctataaagccccctctcccccggaggtggaccacggtcctgagggaaccctggcatgggatgcaggagatcagaccctagagcctggaccagggggccagacccctgaggtggtaccacctgatccaggggctggggcaaattcctgttcacctgaggggctactagagcctttggctccagattctccaataacactgcagtccccacatattgaagaggaggagaccacctccatagctactgcaagaaggggctcccctgggcaggaggaggagcttccccaagggcagccacagagcccaaatgccccgcctagcccttcagtgggagagactctgggggatggaatcaacagttctcagaccaaacctgggggctctagcccccctgcacatccttccttgccaggagatggcctgactgcgaaggcgagtgagaagccgcctgaacggaagagaagcgagcgcgttaggagagcagaacctccaaaacctgaggttgtagattccactgagagcattccagtgtcagatgaggattctgatgccatggtagatgaccccaatgatgaggactttgtgccattccggccccggcgctctcctcgcatgtccctacgctcaagtgtgtcacaaagggccgggcgctctgcagtgggcaccaagatgacttgtgcacattgccggacaccactgcagaaggggcagactgcctatcagcgcaaggggctgcctcagctcttctgctcgtcatcctgcctcaccactttctccaagaagccctcgggcaaaaagacctgtaccttctgcaagaaggagatcttggaacaccaaggactcggttgtggcgcagactggttctggaggctccttccatgagttctgcacatccgtctgtctctccctgtatgaggcccagcagcagcgcccgatcccccagtctggggatcccgccgacgctactcgctgcagcatatgccagaagactggagaggtcctgcacgaggtcagcaatggcagcgtggtacaccggctctgcagcgattcttgcttctccaaattccgggccaacaagggactgaaaaccaactgttgtgaccagtgtggggcttacatctacaccaagaccgggagtcctggccctgagctcctcttccacgagggccaacaaaagcggttctgcaacacaacctgcttgggggcgtacaagaagaaaaacacacgtgtgtacccatgtgtctggtgcaagaccctgtgtaagaactttgagatgctatcacatgtggatcgtaatggcaagaccagcttgttctgttccctgtgctgtaccacttcttacaaagtgaagcaggcagggctcactggccctccccgaccctgcagcttctgccgccgcagcctctctgacccctgttactacaacaaggttgaccgcacagtctaccagttctgcagccccagctgctggaccaagttccagcgcacaagccctgaggggggcattcacctgagctgtcactactgtcacagcctcttcagtggcaagcctgaggtcttggactggcaggaccaagtgttccagttctgctgccgtgattgctgtgaggacttcaagcggcttcggggtgtggtgtcccagtgtgagcactgtcggcaggagaaactcttgcatgagaaactccgattcagcggagtggagaaaagcttctgcagcgaaggctgtgtgctgctgtacaaacaggacttcactaagaagctgggcttgtgctgtatcacttgtacttactgctcccagacctgccagcgcggagtcaccgagcaactggatggcagcacctgggacttctgcagtgaggactgtaagagcaagtacctgctgtggtactgcaaggctgcccggtgccatgcgtgtaagcgccaggggaagctgctggagaccatccactggcgtgggcagatccgtcatttctgcaaccagcagtgtcttctgcgtttctatagccagcagaaccaacccaacctggatacccagagtgggcccgagagcctcctgaacagtcagtctcctgagtcaaaaccccagacaccctctcaaaccaaagtggagaacagcaacacagtgaggaccccagaggaaaatgggaatttgggcaagatccctgtgaagacccgatcagctcccactgctcccacccctccacccccaccacccccagcaacaccccgcaaaaacaaggctgccatgtgtaagccactgatgcagaatcggggcgtctcctgcaaggtggagatgaagtccaaaggaagtcaaacagaagagtggaagccacaggtgatcgtgctgcccatcccagtgcccatcttcgtgccagtgcctatgcatctgtactgccagaaagtcccggtgcctttctcgatgcctatcccggtgcctgtgcccatgttcttgcccactaccttggagagcacagacaagattgtagagaccattgaggagctgaaggtgaagatcccttccaaccccttggaggccgacatcctggctatggcagaaatgattgcagaggctgaggagttagacaaggcctcatctgacctttgtgatcttgtgagcaaccagagtgcagagggactcctggaagactgtgacctgtttgggcctgctcgagatgatgtcctggccatggcagtcaagatggccaatgtcttggatgagcctgggcaagacttggaggcagacttccctaagaatcctctggacattaatcccagtgtagacttcctctttgattgtggcctggtagggcctgaggatgtgtctactgaacaagaccttccccgaaccatgaggaagggtcaaaagcggctggtgctttccgaaagctgctcccgggactccatgagcagtcagcctagttgtaccgggctcaactattcatatggtgtcaatgcttggaagtgctgggtgcagtcaaaatatgccaatggagaaaccagcaagggtgatgagctgcgctttggccccaaacccatgcgtatcaaagaggatattctcgcctgctcagctgctgagctcaactacggtctggcccagtttgtgagagaaatcactcggcccaatggtgaacgatatgaacctgacagtatctactatttgtgtcttggcatccagcagtacttgctggaaaataaccggatggtgaacattttcacggacctttactacctgacttttgttcaagaactcaacaagtctctgagtacctggcagcccacactcctccccaacaatacggtgttctctcgagtggaggaggagcacctctgggagtgtaagcaactgggggtctactcgccctttgtcctcctcaacaccctcatgttcttcaacactaagttttttgggctgcagacagctgaggaacacatgcaactctccttcaccaatgtggtgcggcagtcccgcaagtgtaccacccctcggggcaccaccaaggtggtgagcatccgctactatgccccagtccgccagaggaaagggcgagacacgggtcctggaaaacggaagagagaagatgaagcccctatcttagagcagcgtgagaaccgcatgaatcccctccgctgccctgtcaagttctatgaattctatctctcaaaatgtcctgaaagcctccggactcgcaacgatgtgttctacctgcaacctgaacggtcctgcatcgccgagtcacctctctggtattctgtgatccccatggaccgcagcatgttggagagcatgctcaatcgcatcctggctgtgcgcgagatttatgaggaactgggtcgtcctggggaggaagacctggactgagctcgtgtgccatccatatccatctttcacatcaatgtctgtcctgtggccatgtccctcagggtgacaggcccaggaaccaatgctactcattctgaagggccctgactgctcctttccgctcacccattccctgccttctctaggaaccctggcttttatcttcttccgtaccacttgacaaccatggggccctggtcttctgtactcaggggctggtctcccagtgatgggcaaaagccagcttgcccgttttctttatgcttcagagtaaacccctccttctgggtccagactctgggtggagtgttaatagctctggtgatcctgttggctttgggtttcctgacccatcccgcataggtagagcctcttgttcctaggcatgacctagggaaaaacccagctgccttctctgccctgtgcccactcccttctctactcttccccagcaccatgccaaaaggtcttatctgaaaggtaagaaataaacaatgaaagcgatgaggggaccatttacataaaacacagagcttagacactcttcccctcctatgaaataattggttgttggcaccatctcaccaccgcatatccctcaccccctcggcaagcaccaatccttggtgctgccgtttttaaaatcttccaaatgcctttttttcctcagaggcagagaatgactaagtacggggagcagactcctgttgtgcagactcctgtccccttggtttctgtgtttgtctctctgccatcttaggttgccatgagccatggtgtcaacatgcttagccccctctgtaactgcctccctttagttcaatggacagacctcccaaggcaaaaactaccttctgacttgggttgaggctgggttcccctctattgttcccctatcataagagctaggccaagcctatgggaccttgagtcatgcaggatgggatctgtggtcaaaggacaggcgaggagctgtgggcgcagggcctgccgccactgcctacatcttctctcttcccccatcttgcattggaggtcccagaaaacaattagcttctggcaaagggggtacccacttctttccctgttgactttgctgtttcccaggctcctttttgtgtttttataactgtcaccagttagccactgtttaaattgtatatattgttctgaggcgcctggcctgtcccttcagtgagccatgcccacccttgtgttgtagtgagaagctgttgtcacgactaaccttctgtctctgaaattgtttgtttcaaataaagagttaaaattgtcaaaaaaaaaaaaa

SEQ ID NO: 3019 - DNA, 421 bp, Homo sapiens
  misc_feature (1)...(421): n = a,t,c or g
ccgccccctcttcgggtgagcgacgttgccgcttgggtctgatacccgtcgcatccgagaccgaggccgaatccgggctctgggagggaccgggttagtggggccctagctcgggttgaaagaattttgttttgtcaattattgtaattgctaatgccatcaccatcacaatcgtcatcattaacatctattttaattaaaataatcatcccagagcgcanaggtttgtcccttttggctcctttggcgggagaacaaagcagcgggtttttttccgctacagccgttttctaagttgctgggtttgaggtaggaagagaaaatggagagaggcacggacacagagacttggtcataaggcaaacattaacccccagcgaacacgcaacattaaccccccgcgaacacgccgggaatggat

SEQ ID NO: 3020 - DNA, 430 bp, Homo sapiens
gatttaatctcagtactatatgtacctgcaggggaacctgggaaatgtagttttatttcccatggccttattcttagctaaaatttagatttgattgctaagtgaaaaggggagactcaatattggagtaggcagccggtaatgtcactagttctgaggtgttccctagtggagctgaaaggagccatcagacaccaggatggtacctgtagatgatgccctccccacttttggttctttgattaattacacagatatttatggagcacctgttttgtacaggcactattctgggaactgggaagagagtaatggaaaagcaaacggggtctccacccttgcagagctcgtattttaaaagagcagctagatagtaagcaagtcagttacttagtgcgtcagagataaggggtgtgaagaaaaataaagg

SEQ ID NO: 3021 - DNA, 479 bp, Homo sapiens
ttttttttttttgaaaacctcattaataattttatttgattacattttgaaaagaatgtattttggatacattggcttaaacaaaacatgattaaaattaacaccatgggtttctttttgcttgcttaacatggctactagggaacctaaaatgacatctatggccagcattctggctcacgttgcattcctgttggacagtgctgtcctgggagagttgttcttatacatcacaaattgggcttttctgagtccaaagtgaaaaggaagtcaggtcggtttaggtgttctcattattcatgaagagagaggatgctcctttctcaggagagtcaagcctttcctatcacttgggcataaaaaggcctcgttgggagttgtcaagcactgaaatccctcgtgattggggcatggcattcttggtccccattttacggatgcagaaatcaaggctcagagaagtcaagtggctcacaaga

SEQ ID NO: 3022 - DNA, 1089 bp, Homo sapiens
  misc_feature (1)...(1089): n = a,t,c or g
ttttttttttttaaggttaatgctttaatgtattgacattttcacttacaaatgtacaatttgcgtatgtaggaaaaaatcagttctctagacacaacagaatactactagagacgggaaagcaatcacaaaaagatcaactctggggagaaagtggaactgcattccatgccttgtatctacatacactagggaaggaaaaagaaatattacacaggatcaaaacttgtggaaaatacacttgggtcattttgtctcaactgcaggaccttcttatgatccagatggctaccttaagtcctggatagcctaaaatgggcaaagtctggccttgttcacaaatgatgatccaaaacattaaccacagttctccttctctttagtatccaagaccctgaagttgactcaaggaatgaaaagaacaatcagatcagcatgtatataatatcattggccaacttcttcaaggtatggattatttaaaagtacacatggaagtaaaatgcttactcaaacctgaataagaagtttcttgtaactcaagcacttcttgactcacactaagtgtagcactgtaaacaaaagacatcgttgagaaactgaggctatcaaaacattggcatctatgggagttgtggccaaggaaataaaatacctgagcaaccttatacccagtatgcatttcataccaggatcaagtcactaatgacagccaagttccaggcttatctatggctgcctaatgagactggccccactaggatggggactggggaggggacacacatgagtgcccaagcttcagtctacacctccccccttcagccagaagcagccaggggagcacagggacatctgcttcaagagcattttggcagcaaaaatcaatactctgtggttcctggaattcccacccagtaattccaagttcaaaattaccaccagtgcaacatgaaaaactgttaacagtttttaagtaaagtgtacatacagcttnaataacgantacaatctgaagaaagccattcttcttatacaggatggaaaatcctcaaagcaacattttaaaccatggacactagagttgtc

SEQ ID NO: 3023 - DNA, 1314 bp, Homo sapiens
ggttttcctccgacttccggacatctccctgggagtcgcgcagagtggagtcaaaggcaaccagtgctcgctgcggtctctggggatcgggaccgcggcggcggcccgcgagcgggatgttccggggcttgagcagttggttgggcttgcagcagccggtggcaggcggtgggcagcccaatggagatgctccacccgagcagccgtccgagacggtggctgagtctgcggaggaggagctgcagcaagcgggagaccaggagctcctccaccaggccaaagacttcggcaactatttatttaactttgcatctgctgccacaaaaaagataactgaatcagttgctgaaacagcacaaacaataaagaaatccgtagaagaaggaaaaatagatggcatcattgacaagacaattataggagattttcagaaggaacagaaaaaatttgttgaagagcaacatacaaagaagtcagaagcagctgtgcccccatgggtttgacactaacgatgaagaaacaattcaacaacaaattttggccttatcagctgacaagaggaatttccttcgtgaccctccggctggcgtgcaatttaatttcgactttgatcagatgtaccccgtggccctggtcatgctccaggaggatgagctgctaagcaagatgagatttgccctcgttcctaaacttgtgaaggaagaagtgttctggaggaactacttttaccgcgtctccctgattaagcagtcagcccagctcacggccctggctgcccaacagcaggccgcagggaaggaggagaagagcaatggcagagagcaagatttgccgctggcagaggcagtacggcccaaaacgccacccgttgtaatcaaatctcagcttaaaactcaagaggatgaggaagaaatttctactagcccaggtgtttctgagtttgtcagtgatgccttcgatgcctgtaacctaaatcaggaagatctaaggaaagaaatggagcaactagtgcttgacaaaaagcaagaggagacagccgtactggaagaggattctgcagattgggaaaaagaactgcagcaggaacttcaagaatatgaagtggtgacagaatctgaaaaacgagatgaaaactgggataaggaaatagagaaaatgcttcaagaggaaaattagctgttcctgaaatagaagaataatccttaacagtctgcaaactgacattaaattctagatgttgacaattactgaatcagaaggcatgaaagagtataattttatgaaattcaaaattattcttttttcaagttgaaa

SEQ ID NO: 3024 - DNA, 598 bp, Homo sapiens
gcagtacttaccaagaatagttagcttgtaaccttacgtcgacatagttgttcttatttgaatgcagattttaaagttttatcacgcagttggaaaccacagctactatgagcatggattttttcatacttatctctttcatttccgtgaccacttggtccaaaggcatcaggattgtatccattttacaaatgataaaactgaagctcaaaaaggttaagtaacttgatctaagtccccacagctagtaagtgtcaaaaccccatccgaataacttcaaaacctgtaggtatagtcatcaaatgtgtcttgaatggaattacctacagtgagagttagtgcattaggtaacaagcgcagagaggaatgactgcctctgctgatggtaaccttgaattttacaaatgacactggagcctttctgagactagtgttgcatgggtcctcaataaaatcacactgttgttactcacttcctttgggtttataaccctggtgataaagtaattgagaatagtggagtaaaccctcgacttgaattcaggaaaattgttttcaaatccagtttcaataaatctcacatcaggcactctaaaaa

SEQ ID NO: 3025 - DNA, 1521 bp, Homo sapiens
  misc_feature (1)...(1521): n = a,t,c or g
catcgcgacagggtcgctttgcacgccaggaaggtcccctctatgtgctgctgagccggtcctggacgcgacgagcccgccctcggtcttcggagcagaaatcgcaaaaacggaaggactggaaatggcagaccatatgatggccatgaaccacgggcgcttccccgacggcaccaatgggctgcaccatcaccctgcccaccgcatgggcatggggcagttcccgagcccccatcaccaccagcagcagcagccccagcacgccttcaacgccctaatggcgangcacatacactacggcgcgggcaacatgaatgccacgagcggcatcaggcatgcgatggggccggggactgtgaacggagggcaccccccggcgcgggcagcagcaacagcggcggcggcacggcagcgctnaacatgcccgccgtccgtggcccacgtccccgctgcaatgctgccgcccgaatgtcatagacactgatttcatcgacgaggaagttcttatgtccttggtgatagaaatgggtttggaccgcatcaaggagctgcccgaactctggctggggcaaaacgagtttgattttatgacggacttcgtgtgcaaacagcagcccagcagagtgagctgttgactcgatcgaaaccccggcgaaagaaatcaaacccccaacttcttcggcgtgaattaaaagaaacattcccttagacacagtatctcacttttcagatcttgaaaggtttgagaacttggaaacaaagtaaactataaacttgtacaaattggttttaaaaaaaattgctgccacttttttttcctgtttttgtttcgtttttgtagccttgacattcacccacctcccttatgtagttgaaatatctagctaacttggtctttttcgttgtttgtttttactcctttccctcactttctccagtgctcaactgttagatattaatcttggcaaactgcttaatcttgtggattttgtagatggtttcaaatgactgaactgcattcagatttacgagtgaaaggaaaaattgcattagttggttgcatgaacttcgaagggcagatattactgcacaaactgccatctcgcttcatttttttaactatgcatttgagtacagactaatttttaaaatatgctaaactggaagattaaacagatgtgggccaaactgttctggatcaggaaagtcatactgttcactttcaagttggctgtcccccccgccgccccccccaccccccatatgtacagatgataatagggtgtggaatgtcgtcagtggcaaacatttcacagattattttgtttctgtcttcaacatttttgacactgtgctaatagttatattcagtacatgaaaagatactactgtgttgaaagctttttaggaaattttgacagtatttttgtacaaaacatttttttgaaaaaatacttgttaatttattctattttaatttgccaatgtcaataaaaagttaagaaataaaaaaaaaaaaaa

SEQ ID NO: 3026 - DNA, 602 bp, Homo sapiens
  misc_feature (1)...(602): n = a,t,c or g
gagccgngggggantttannacgactcacnngggggaatttgngccctcggnngccantnaattcggcacgaggagagctagcaccaggagctcctccaccaggccaaagacttcggcaataactgaatcagttgctgaaacagcacaaacaataaagaaatccgtagaagaaggaaaaatagatggcatcattgacaagacaattataggagattttcagaaggaacagaaaaaatttgttgaagagcaacatacaaagaagtcagaagcagctgtgcccccatgggttgacactaacgatgaagaaacaattcaacaacaaattttggccttatcagctgacaagaggaatttccttcgtgaccctccggntggcgtgcaatttaattncgactttgatcagatgtaccccgtggccctggtcatgctccangaggatgaanctgcaagccagatggagatttggccnccgncccaaacntgtnnagggaaaatntccggggggaaccacgtttnccggnncccccggttaagccnncnccaanccnagggcccgggnggcaaanannngnccccnggaaggggnaaagcanagggcgcg

SEQ ID NO: 3027 - DNA, 1305 bp, Homo sapiens
  misc_feature (1)...(1305): n = a,t,c or g
tgtgtgttaatttaatcatacaaatattcatttatacaataaggaaaaacctcctcatctttatctcctcctaggcaccatgaggccccaccacaaacatccagctggctttctacacacaccactgtccaggtgggaagggcagccactgctgctcctgcattcacccaaggaaacaaaggaaaggtgcggcgaggcagggtggggtgagtaatcagcttgcacttctgagccctggcaaccctaccatcctctcctgctgggctcagattgaatttggggaggtatttattctcatgcccatttcccaccatggccaccctcaggccacaccagctgtttggtgaggttctctccaggctggaagtaactttgatgggcttaaggttacagccagtccttatgggggagagaaggctgactgcttcttgtagaaaaatgccccaaattcaactgtcctcacggcaaaaagaaaaaaagcatgcacacgtgcacatccatccacacacacacacctcactccatgcacactgacagattcttcccaagtctgaacccctctgtctccccaactgggttcagaccctatcacctaaccatggtgtctgcctcacctcctgggtgccagacgcaggtggtcctgcccagaggtggcctgccacttggtgaagattctaagaggagcagggactattggggctgagaggtagccactaccaccccactaggcaggggagcagagaggggccctaggcattgctctgaacccataccagtgaggggagagagaatgaatgatactgataccctccctgggctggggaagccatggacccctctgcctgcactccatgacttgcacttactctggccctctgcaaggagctcatctcgcctccaaggatgtgcacagaaatggtttgttcttgggaagggagacaaggtgcttgggacatttaacttgccaagtgtggttgcctagaagcaagaggaagagcaagacagacttctggcaggcccagacccactgacggtggcccatgaagcccctgctgggaaactgggaaggggcacccagtgttgggcagaagaggaagtcaggaaagcaggggttgtgaagcctcccacaatcctgccagggacagtggagatgtgctgcttcaaggctactaagcagtaagaacagctgggcatgcatgggctccagggaggcagtgtctcaggagactggtaccagcagcagcagtcctgcctaatgaggccctcagacaaaaagccatcctgatgnctgtggcgtgggtacct

SEQ ID NO: 3028 - DNA, 705 bp, Homo sapiens
  misc_feature (1)...(705): n = a,t,c or g
tggaagttactgtgaggcggcggctaagaaggcggctctggtggcggcggtggaggctgaggcggcggccgaggcggcgacggaggaaacagaagatggcagattttttgaaaggactgcctgtctacaacaaaagcaattttagtcgatttcacgcggactccgtgtgcaaagcctcgaaccgacggccctcagtctacctgcctacccgcgagtacccgtctgaacagatcatcgtgacagaaaagacaaacatcctcctgcgctacctgcatcagcaatgggacaaaaagaacgctgccaagaagagagaccaggagcaagtggagctggaaggcgagagctccgcacctccccgcaaggtggcgcggaccgacagcccagacatgcacgaggacacttaagactctcaactccacaggcgcctcctgccaggtctgctcctcggtcgcccacccgcctgcccgccatgtgtaagcaccccgcccgcccgcctccctgccggcccatccacaccctgcgtccacaccacttccaacctcataggagccgatgtatttattttccttgagtttttatttatgctgtaacctgtatcaagcgttggttaaaggggacatcagacccagtagtgtgatgttggtagatgctttttaaaaaaaacaacattgtccccccgnacccccgncttgccatcgggccagt

SEQ ID NO: 3029 - DNA, 322 bp, Homo sapiens
cccggctttgcctccaccagcgccctggcctccgctcgggcctccacacgggcctccgaagagctgccgcgacgcccgcgccgcagggcaggtaaagagattataaatcttccactgaatgaaaaaaattttcttaaagctgcatatactccaagaaaaaaaccacaaatgtttttctgttttgcctgaatacatgatttaaacaagagatttccacagaagtctaccttctgtctgacggatatgccatcctgaaaaaggaaagaagctgaacttcaagttcctttcatttagccttgggcttccaccttctctgtggcta

SEQ ID NO: 3030 - DNA, 393 bp, Homo sapiens
ggaacaataagctattaatgatatatgcatagtttaagggtctatttttatattgtcagtgacaaaagaagtgcccattgtctcctggctgctatatccctcaaagtattttggcggctggctgtggaaatccagatggagacagcagtgaactgaatgaaacctgggagacaagaagcaggaagttctagcatccgccacattcacattgcacaaatgaggactaagctgtgaatttgaatgtgctgcttataatatgctgcatgaggtcattaggatggtgttaaaatggttccaagttagcattgccagttggtatctgtgtgactttggacaatttatttaatctgtcattgaatgttggttgctttatttgaaaaacaggactaataa

SEQ ID NO: 3031 - DNA, 371 bp, Homo sapiens
  misc_feature (1)...(371): n = a,t,c or g
gcagcttgactgtagtagactctgatggagctaccaactctactactgcaaacctgacagtgaacaaagctgtggattacccccctgtggccaacgcaggccccaaccaagtgatcaccctgccccaaaactccatcaccctctttgggaaccagagcactgatgatcatgggcatcaccagctatgagtggtcactcagcccaagcagcaaagggaaagtggttgagatgcagggtntttaggaacaccaaccttacagctctttgcgattgcaaggagggngattacaatttacccagttnacagttgacttgncacattaggggcagcagggccatntttcaagtgnctgtttattttggnaacctga

SEQ ID NO: 3032 - DNA, 1265 bp, Homo sapiens
  misc_feature (1)...(1265): n = a,t,c or g
agggccctcccagtgggtgacgctggagtttccccagctcatccgtgtctcccagctgcagatccagtttcagggtggcttctccagtcgccggggctgcctggaaggttcacagggcactcaggctctccacaagattgtagatttctaccctgaggacaacaactcgcttcagatatcctgcccctgcttctggggtgggtggtctgtgcctctggaagctttggactcacccaaacccgaatgggaaccctgatgtgtgatcttgaacacgtgacctctaggactccactttttctgtaaaatggtgctgatgaccacctgttctgtgtgagaggcttagagggacctgcagcttccccaggttgcccacatcggtggaagtgtgagctgggtctggaaggggtgggggcctgcgggtgggaaaccagaaatcaccagtttcccttgactgcccacgctcacactttccccataccagctgctgaagtggaccggctgaaggtgacgtttgaggatgccactgacttttttggccgtgtggtcatctaccacctgcgggtgcttggggagaaggtgtgagacctctaggggctgtctcctccaggaagccctccgggaagcacagcaaagtccctcattctgcacagaaggtttattggttcctcttgggaagggtcccctcccaccacctgtccagaagctgcctttgaagtcagttctgggtttccccagctctggctgaccattttgttccctgagtgtctgagtccccggcaggcggccttcactcagggtcagcgggcaccaggttgctctggaagagcttgaggatgtggttctcgatcacctgttgcactgagatggggcagggaaaaggtgggctgtgagcttgaatcgggagtggggtggaggcacaggccaacctgcgctctccccttaggggacaaacagggacccttgcagagacctgcattacagagcaaagctgggagaaccgaggactcaccccaggaacctcaacttcccctaagtttgtaaaaatgcacttttgtagcttttcagaattaatataaaaatatttcctaccaagcaaaatgtgtgaattgtgactttcatgaaaagatgagcnnnnnnnnnnnnnnnnnnnnnnnnnnnnnnnnnnnnnnnnnnnnnnnnnnnnnnnnnnnnnnnnnnnnnnnnnnnnnnnnnnnnnnnnnnnnnnnnnnnnnnnnnnnnnnnnnnnnnnnnnnnnnnttaaaaat

SEQ ID NO: 3033 - DNA, 1260 bp, Homo sapiens
caggaaagcccaggacctccggagcagacagcacagcagctgcagaggcaaggccagcatgtcgcccaacttcaaacttcagtgtcacttcattctcatcttcctgacggctctaagaggggaaagccggtacctagagctgagggaagcggcggactacgatcctttcctgctcttcagcgccaacctgaagcgggacgtggctggggagcagccgtaccgccgcgctctgcggtgcctggacatgctgagcctccagggccagttcaccttcaccgccgaccggccgcagctgcactgcgcagccttcttcatcagcgagcccgaggagttcattaccatccactacgaccaggtctccatcgactgtcagggcggcgacttcctgaaggtatttgatggttggattctcaagggggagaagttccccagttcccaggatcatcctctcccctcagctgagcggtacatagatttctgtgagagtggtcttagcaggaggagcatcagatcttcccagaatgtggccatgatcttcttccgagtccatgaaccaggaaatggattcacattaaccataaagacagaccccaacctctttccttgcaatgtcatttctcagactccaaatggaaagtttaccctggtagttccacaccagcatcgaaactgcagcttctccataatttatcctgtggtgatcaaaatatctgatcttaccctgggacacgtaaatggtcttcagttaaagaaatcctcagcaggttgcgagggaataggagactttgtggagctgctggagggaactggattggacccttccaagatgacgcctttagctgatctctgctacccctttcatggcccggcccagatgaaagttggctgtgacaacactgtggtgcgcatggtctccagtggaaaacacgtaaatcgtgtgacttttgagtatcgtcagctggagccgtacgagctggaaaacccaaatggaaacagtatcggggaattctgtttgtctggtctttgaataaccaacccagtgatttacatgctgatagctaagtgagtttttaatggccattgtgtatgattttgatgcacaactagttaaaagcctttcataccagtcagtatttcccagccttgagcgcacgcacacaccacacacatacacacacgcattatttttgttactttgcttctttttatgtttgtaatctgtaaatgaacacatggcagaaaataaccctgattggtagg

SEQ ID NO: 3034 - DNA, 289 bp, Homo sapiens
gaataaaaccattggtgactctcctagatttttacaaattagttaatacctttgcccagcaaattccccagccttccagttgtaatgccaagcttctttggggaagctcctctgggtctgtccctaattgtgctgtctggcccttgatttcatgcctggctttctccacaagactgggagggtccttgtttttcttaaaggctggcatatagtctaggcacacacattggactactgcaatatgaactggcatctactgcttggtccctgttctctcccccttccagaa

SEQ ID NO: 3035 - DNA, 336 bp, Homo sapiens
tatatatataaaataacacagcagccctgcatgcctagccatgggaaagcacagcctccaaaggataaggaaagctttttgagtaaatacaacatcctaaagtgacaatctttgaaacaaggccgttcacctgttgccaagtcctgtccttccaggaccgggtgtcacagcctggatgttaacagtcgcgttctcagacccccgcctctgtatctgtctcccggttcaccagcaaacacttctctgagaaaccacctggggtgcagggcagatgccaccaactcagcaggtgtttctctcctgtgctaccaacctgggaaaaatggaggaaagctt

SEQ ID NO: 3036 - DNA, 1295 bp, Homo sapiens
  misc_feature (1)...(1295): n = a,t,c or g
tttttttttttttttttttagtttataatgttttactatgatttagggcttttttttcaaagaacaaaaattataagcataaaaactcaggtatcagaaagactcaaaaggctgtttttcactttgttcagattttgtttccaggcattaagtgtgtcatacagttgttgccactgctgttttccaaatgtccgatgtgtgctatgactgacaactacttttctctgggtctgatcaattttgcagtagaccattttagttcttacgggcgtcaataacaaatgcttcaacatcatcagctcccaatctgaagttcttgctgcattgtgtcaaaagaaatttccttattttctactgccattcccataaaagtaagtagtctcatttttgccatattctgttcatgtaacaggccaagtgaatcaatgaagtctttattattctgataaaacttgacatatgatgccaatttagcactcacaaaaatggttaaaagatcatgaataagctcgccttccaaaaacttgactggttttaaagtaagaaggtggtcaaaaagaaatgcatttggatctttcaatgctcgtacaatacacctgtgggcatcaactcgagcctgggaagcattgtcctctgtgtaacttccgagcaattccaccatgacttttgaagcagcatcactcttcttacaatccacaagtgcctcataaagtagtcttaaaagggtgtgctttttttcagtggtgagattccagtcagaaatccattttctaacttgatccagctcagttgggatgtactggatggccccacaagatgctgccactttaataaggctgcaatacactgtgtatcttacaggagtattcttatccatcccgtggaaaaggttgcttaacaaactgcagtctcagagacgggcgttcaccttcgcgaaaatttgaccagcttttcaacataggctttcaatcaaagcttcttgcttgtctggttccaggatcaagagtagggatacccacactgttcatcacactttcaacatctttatcatcctccttcagacacacatcacaggcttcaataatttgagctaaatcaacatgaagtccaccttccgagttctcttctgaaatctcagctcctttagatttcagataagcacgaagctcagcagcctgatcttcttcactgatgtcgatgaaggccgggacgctcatggtgcagggcccgggcacagcggacactccactcgcaagaccacgccgaccgnaaaagggaactgggccgcgcgacgc

SEQ ID NO: 3037 - DNA, 427 bp, Homo sapiens
  misc_feature (1)...(427): n = a,t,c or g
ggaagaggatggcgaagaagtccagggcaagccttttcagttatacgcatcactttaacttccacttacattgtattggccaaaactgagtcacgtggacacagctagctaaagatagtccctaactaggcagccatgtagccagtgaatacagagaggtagagagggatttgggtctgttattaaaaggaagaaaaggagtgtgattcctgctgacagtttaggagtcttcaccacaaaaggattccagactctcaggctggaacctccctgccactttgttcatgcctgcaacaggctttattttttcacaaattggcaaaatattgaggaaagtaggttagtttatgttacatgtgggccacaattaaacttggaagggttaggacccaacagattttggggaaatttcaatttnaaaaagtta

SEQ ID NO: 3038 - DNA, 773 bp, Homo sapiens
gaggttggagtgaaagtttaatgagtgagagaagaaagctctctgctgtggagaggaggcctgaaagagggttgccatttttacagttgaatgtaaaggcttttataagaaaccgatgaggactgggcagctcatctgcataaggcatgaatttctggtagctccctgctgtccttctaatgtacatgtgggcggttagcttgagttacttactccatattgctttgttccccttactgcacatgtcaggggatgaaattttccattgcaggcatgtttgggcaagtcacctgtgtagtctgtcttatctatgaggctgtgggcatgtcttaggcaagcccccctgtgcaagttcccatatctgtgcctgcagcttgatttttcaggctgttcttttgtttaaaagaattctaccgagaacccaccctaactgcctgcctgactggtttcttcctttctcctctctcacttccttctccagatgaggaaacaagatcagagagggacagtgacttgccaagttcacactgagatgagtccaccctgtaccctcccctcctcaaaagagggaccttaccaaagggactgtcatcgggggccctcaacatccatatagtgatgacacttgggaagagatatgacaaaagcaagaaacagaatcctaaggtcttaaatgtaatgttggaaacaacattagagctggaaaacaacttaaggaataatggtaatgaggcatttgcatcattgtacaatgctaatgttattttatcctt

SEQ ID NO: 3039 - DNA, 508 bp, Homo sapiens
  misc_feature (1)...(508): n = a,t,c or g
tttgactcnnattcccttnnnnnnnnnnnnnnnnnnnnnnnnnnnnnnnnnnnnnnnnnnnnnnnnnnnnnnnnnnggcacgagagggtatgtgattcctccagttcctaagcctttttgaagttctgcaaggtagtttgccttgcttcttgtggcttccccttcttcaccttgtacaattaggtttcggttttctctgtttttggtttccactaatccattcacttttcaccttctaaaatttaactaacatttttttcttgctgttctcccattctctttgtcttttggggcatgtatcttttttattccttaattaccatcacttcagtggattttctagagacagtgganataaactcatgtgttctacatttaattggttanangtnaagagcaagngaggtttcgggatctaggtcncntttcccttnacttnctggttctgagngactcngcttaaaatatgngaaggacagattnnntgggggctggngnatannctacc

SEQ ID NO: 3040 - DNA, 1125 bp, Homo sapiens
ctgcgtggtgtgggcttgtgggtctttgagacccgaaaattgagagcgttttcgcactccagcggctgctcctggcggctctgcggccgtcaccatgccacagaatgaatatattgaattacaccgtaaacgctatggataccgtttggattaccatgagaaaaagagaaagaaggaaagtcgagaggctcatgaacgttcaaagaaggcaaagaaaatgattggtctgaaggctaagctttaccataaacagcgtcatgctgagaaaatacaaatgaaaaagactatcaagatgcatgaaaagagaaacaccaaacaaaagaatgatgaaaagacaccacagggagcagtacctgcctatctgctggacagagagggacaatctcgagctaaagtactttccaatatgattaaacagaaaagaaaagagaaggcgggaaaatgggaagtccctctgcctaaagtacgtgcccagggagaaacagaagtattaaaagttattcgaacaggaaagagaaagaagaaggcatggaagagaatggttactaaagtgtgctttgttggagatggctttacaagaaaaccacctaaatatgaaagattcatcaggccaatgggcttgcgtttcaagaaagcccatgtaacacatcctgaactgaaagccaccttttgcctaccaatacttggtgtaaagaagaatccctcatccccactgtatacaactttgggtgttattaccaaaggtactgtcattgaagtaaatgtgagcgaattgggccttgtgacgcaaggaggcaaagttatttggggaaaatatgcccaggttaccaacaatcctgaaaatgatggatgtataaatgcagtcttactggtttgacagcaatttcatatataattattgaggactacacaccaattgaagaaactgccattactgtgatgtttctgaatactaccaaacagccatacatgtctgcaatgaagagatttattaaattgtaaacattaaagtggtccagttttataaatggtctttattttgaaatacgctttgaccccatgttcataaaactgaatgattgaaaaaaagcaaatatacaaatatcctacttcatcaaaaaaaaa

SEQ ID NO: 3041 - DNA, 714 bp, Homo sapiens
agaatagagacagggtcttgttgtgttgcccaggttggcctcaagggatcctcctgccttggctcctgaggtgctgggattccaggcatacaccactgctcccagcccagatcctgtttcctccctgtgacatttcccgcacttgctgcagccatttgctttcttagacatcacagagtcctagcccagaatctgatcagatggtggaaggagaacttccagcaacagcatagagtgccctgcattgagggtgcaattcctcccggctctccacaggatctcaggggacaggccccgtgtcctgctgaccctctcaacaaggcacccgcttaccttgggtttattgcaagtgcggcgaccactcgcaagattcttctcttcagatcttccaagttggtcacactgagcctgggaatcacatccttccccaggacgagtgacacgatgaagctctgagaatattcctgcagagctttgctccaggagcccccggggtggggagaaggcgtagcacctgacctgcgggtaggcggctctgaccatggtggccagcagggcggccgcccctcccccgaggctgtggcccactatgaccagccggtactcaggagcaatgctgaaggcttggctcaaaatcccgtcgttgatgagtcgttggtaaacgtatctggcagcttgagaaatacccttgtgtgccaggcggtcctgcacctc

SEQ ID NO: 3042 - DNA, 1330 bp, Homo sapiens
ggtcctttccactagaagcgaggtgtgtactgcgtgcatgtttgctgagcgctcaccacgggctaggctccatgcccagttcctgtgaggagaaaacacgtttctatgtgcccggcaggtaggaggcactcacaaaatgttactttgtctttacagaattttctgaaggagagataaaaactgagttaaataaagatgatcagaatggatgagaaataactttagacattatttcattgaaccttcccaactgaaattattttatgatgttataacatggatagtaactcaagtagcaataagttacacagttgtgccatttgtgcttctttctataaaaccatcactcacgttttacagctcctggtattattgcctgcacattcttggtatcttagtattattgttgttgccagtgaaaaaaactcaaagaagaaagaatacacatgaaaacattcagctctcacaatccaaaaagtttgatgaaggagaaaattctttgggacagaacagtttttctacaacaaacaatgtttgcaatcagaatcaagaaatagcctcgagacattcatcactaaagcagtgatcgggaaggctctgagggctgttttttttttttgatgttaacagaaaccaatcttagcaccttttcaaggggtttgagtttgttggaaaagcagttaactggggggaaatggacagttatagataaggaatttcctgtacaccagattggaaatggagtgaaacaagccctcccatgccatgtccccgtgggccacgccttatgtaagaatatttccatatttcagtgggcactcccaacctcagcacttgtccgtagggtcacacgcgtgccctgttgctgaatgtatgttgcgtatcccaaggcactgaagaggtggaaaaataatcgtgtcaatctggatgatagagagaaattaacttttccaaatgaatgtcttgccttaaaccctctatttcctaaaatattgttcctaaatggtattttcaagtgtaatattgtgagaacgctactgcagtagttgatgttgtgtgctgtaaaggattttaggaggaatttgaaacaggatatttaagagtgtggatatttttaaaatgcaataaacatctcagtatttgaagggttttcttaaagtatgtcaaatgactacaatccatagtgaaactgtaaacagtaatggacgccaaattataggtagctgattttgctggagagtttaattaccttgtgcagtcaaagagcgcttccagaaggaatctctttaaaacataatgagaggtttggtaatgtggtattttaagctta

SEQ ID NO: 3043 - DNA, 749 bp, Homo sapiens
tttttttttgatggtggttgtctctaatatttatttgtctggttataaaattaatatgtgaggagcattggatttggtgagaacgttttgaaccctagctgtcacgtgccacctgcgggatctagaccagtgacttctcagaactgccatttcctcatctggtagacaggatggtaagccctgtcttgctcactccacgtatggcagtgcagatgaaatgagatcacagaggggaagcaattggcaggctggaaagtgctgacaaatggaaggggttgtgtcaccaccctcagctgaggtagtaccaaggtccaagctcctgcccctccccctccccagcccctaaatacacacacgaatggagggccacttgcagccttggtctgatggaattgggggcaaggccacacatcttcctcaagcttggccagatggggcctcactggggcccttccagaatcgggcatcggctgtggccagctgtgtgaggatctcctccaactcgggtccatcctctgggaaacgctcagagaaggatcggatgaggccagcacgtgacgcctcgtattccagaagctgcacgtctgagcctcattaccttcaaggcgagtgttgggctgaacaatgagcttccgagattccttacgcagcagcaccgtgtccctgagggtgaggaagcactcgggggcgcatcagtgaccgttgcatacccctcgtacagggcccgccctccggccacatcccctgtg

SEQ ID NO: 3044 - DNA, 507 bp, Homo sapiens
gaggatatatctgtactgagtggaggttggctgaaatgaccttttaattcccttccagggctaatgctctttaattcaatagcagcaacgcgcaacataaagaacaatatgaacacagttgtatggcagtggtgaggatgtaatgtctcaaacccccatgccaaaatattaaaaatttgaattctaacatgtagaatttggttggagtaaggaggtggagacataaaactgctgtttagttaatatgatattaatgtattaattgatgaatcttcttagttgccacaaaaattgatcatattgagtaggacaccaagaaaaccacagtaaatgccaaaaaagtagaagtaacaataacatatctgatcactatgcaatacaactaaaaaaatacaaattaaaagactaaaaactagaaaataaaactccaccattgggaaattttaaaactccccttaggtcaacaagaaaatcaaaaccaaaattctaggccatgtagaaaatgat

SEQ ID NO: 3045 - DNA, 3952 bp, Homo sapiens
tttaatgacaagcactcttatattcattttttatctcataactggataacacagggcagatctctctactttcataacttagttggttttgaagatagaaaaccttggagaaacactctcggagcaacaaatgaagctggttttaattatgcacataggttagaaagggccaatattctcagactccttataactgaggtaccctctccagttcatactttggtgtaaagaattgaaacaataaacagagcctgactcatagtaataacacaataaatatctgttgaatagatgaattgatacctgaggtgcagtgtgaacaggctggacctaagtgtctctaagcagaaaccatcctggtacatttcagaaaggctatattcgcacagcaggccttatttgtcagacctaccctcagtgccctgaggattctgggagacgaaaggaatagtagtatgacaaagaacaactgagttcttatttagttcatcctagtcccttgaataatccccctcagcatcaaaatttgtgaccagattttaaaagattcaataccatagataatcaaaacaacatcagtatgtgtatacctccttcaattatattctatacatatcaaactttaagaaatctggggcagggaatgaccaatatgagacccccttcccctctctctcccttttgccttttttattttctctcactctcccattctcttttctccttatttccttttcctcctaaaccagtcttctgcccttcccccagctctttctccttcttcctcattaccgaagttgaagagttctaaacatttgtggctccaaggggtggggcaaataaaactggttttagttcccagaaatgggagcagttctaagaacaaaaagaaaaccctgctcttggccacactaacagtgatttagagactctctcttgaacatatattcagaacatactattgagtgtgaatttgatctctgtatagagatttttgtttctgggttgttaattttaggatgatgatgatgatataatacaaataaaccattagtcacacagatgcgatccattttgtgtgtgtatttacggaaaataaggggtgggtgttatttaaaacaaatgaccatatcagatacatatttgtcacaattcctaagttcaatattcataagggctagctggagaagaccactttgggcaggaaattagtctgcatttattttatagcacaaggagcaggactagatgagccagagtcatggcaggaggttaattctccacctccaaccctcttttttcatgcttcaaataagaatgtgcagaacccttcaggcaatcctattggttagtatccttagcctgttcttgaccctagggagaatcagattcctttggtctatgacagtaatagaagttatttctttagataaattttgtttaaggctttaaattaattctatcttggcattgtgtggttctaaattcattcattcatttaacaaaacttacttgagtatccgctctctgccaagcacagtggtaaatgatgagtattacattaactccaatcaatccaatattcttctgtagaaagaacatctggcccagttaccctgctgtattagtaaactggagtatgctcagatgtcaatactgtcactaataagtgttgagacactctcaacatgtattatgtcctaatgatctggaaaatttccttcagtatgataataatgatggcaaaaatgacacaaagtagaaatatatagctactccttggtttccttcttcttttggggaatataaaaactgattttgaggattctgaggcagctcagtattgtggaaagagtatcaaacctggagtaagatgggctagatctggtcacagtttcataatcttagggaagttactgaaccttttgatcctttcccttttgattctaaaattgagtccaagaatcttttccctaacttccactgacattactgagaggaaaaaaatgaaataatgtttgtaaaagtgctctcaaaaccatagagctccacataaatgtaacttatcactatcaaacaatctttgacattcctttaagggaaaaccattacattatagtttctttttgtccatttttaagcagggggtatttatattatcaattagcattatttgagcatttggcagcacaacccacatttatttcctcatggaagagacaagttagaagttttccttgttgaaaatgaaatgcactccccgagggccagactcagagttggagatgctttgtttactcagggtttcagccaaggcttcaggtccacagaggaaaactcctattctggtattagggtgttgacttgcaattgtcttgaattcattatcccagttgggccgtccatacaaagtcttttgtttcaggcctgtgatcacatctttctcctcatcatggtgcacagcaaagtgattggcctgagactcatcccagccagtgaggtagatgttgtagctgaggaagccggcattgttcctttcctgcatctggctctccagcagttgcagcagatctgcaaaccactcaaaggcatgtgtgtcccggcacagccagtagaagtagatctttttgagcttcagattggtggcgttattgcaatatttgtaccagactgacttgagaatggatgcgaagggtgtgaccccaatccctgctcccactaacatcaccacctcatagctgaacacatcttcactggcagtgccaaagggcccatcaaccgctatcttaggtagtttccacgcatcttgaaactcctgcttatcacagccacaagcattgaacagcccctctgtccagtccccaacgatgcggatatggatactaaagaagtcttcctcaggggcggatgtcagtgtaaaagggtgccactccagcttggacacctttgggcacttgacaaaaatgtattgtcccacttccattttgaaccccttcttcttcatctgtagctcgatggttttgaaagggtgagtgaccaccttggtgatgaccaccttctgttgagatcgccaaaaccgcaccaacctctcacagagatacagaaacatgggacccactatccatttccaagtcataggagggtttccagcaaactgagggattgggcattcctttatttttccccattctgagattttttgttcacaaactgttatattatgcacagccaaactctctgcggtctgcccacgtacaattcgttcagctccatggatggcaaggccaatgaagaagatcacaaagagatgatgtgtgtaccaaaagacttcaaagtaagacctccggatggttttggtggaggaagtgataattaatatgaggcacagcgtgatgacaactccagtgatgcctgccaacagggtcacagccaggtacaggcctccttcagggttctttattctctttcgagcaaaattgagataactttcattttgcctgtctccaagttcagagagtgctactgaataaggatcagaattattgactcgggcattcacacaccattccacattaaatagatgtgcaatggtgtgaatcgcagagtgaagtgcaatcatccatgccaccattttatgaaaggtgagattcctgtccagttgtcttcgaactcttgttgagcagcacgcactggaacccctgaggaaggacagcagatttcgacagactggcaagagaatcagcatgcagttgaaattcaggcaggctgcaggggccctggccagtgccagtgctgacccaagaagttttcttgtgtaaaagaacttaggtggaatatcataaacccggtaataccagacaaagaggaagacgttcaaccccagccaaaccagaatagcaaaaatggagagcccctcattcacagcccagttccccgatggtggcagaggaag

SEQ ID NO: 3046 - DNA, 586 bp, Homo sapiens
gtaccctgcttccatttatgcagtatgccaggcatcggcacgattttcagtggcacacaggcggttgccaccaccagggccctaggcaaaattgcaaagaaggcagagtttgtctttggccctcccacctcccttatgcatttctctcccacctcctggcagtccccctgcccagcctcccggcaccatcatgctgccctcagattgtctaaagcccccaactttccaccactcacccagggaatgtcctttcttgaaagtgcccagtgatccaaaattaccctctcccatttcccctgcctaacaaaattcctactcctaaggattccagtgaagtttaggtaatctaaatgattaactactttatgtaattcaagttaaggtatatttaactaacagacttaaatctccaatgaattttaaaaggaactaattaaaaactgtcaggaaggggagggggaagaaaccttgagggggtgaggaggtaatgttttcccaaagccccaggactctgtgccacttcagattccttcacagacaggacactaagagtggagggggtcactgccaccttgaaccccacttc

SEQ ID NO: 3047 - DNA, 531 bp, Homo sapiens
  misc_feature (1)...(531): n = a,t,c or g
aaaatttgaanncctnagctcnnnnnnnnnnnnnnnnnnnnnnnnnnnnnnnnnnnnnnnnnnnnnnnnnnnnnnnnnnnnnnggcacgagcggcacgaggatgtgcaaaattatttttaatttttgaatatggagcaaagtaaaacttttgaaaactaatagagatttgcaaaattattttctttctgattttaaatgcttttaaattagataaattatatatagttcaatgttatttcttcattgatatattactagaaatgaatgtctggcaaagcataagcaataacatctcataagaagaggaggaatactgactaatactgtatagtaatacaaagttttgaggggcaaagagatattctcttgttttaaataaaagttacccagagtcattggatactctcttttctcttatgcattgattttggccttagcaaatatgtaaatttcttaaagtgtgaatactcttgaactaaagtaataattatcaacttagtaagagttttggtaagtggngaactttcttc

SEQ ID NO: 3048 - DNA, 338 bp, Homo sapiens
gcagaagaacgttctgaggcccctattttctgagcagagaagatttctgcccaaagtgggcaaaattaacttttccaggctcatccacccgttatctgaaatacagaatgcccccagtctttccaagtaaccagagtgtttctctgcagcagaaggctgggccatgaggccagctttaggcgctgaaggtgtgcacagggggtgagcttagaatggcccagtgtgcccagggtcatcggggtcccgcacgcagtgtgtggcacacagtaggcacacagcgagtgtgtattgaagttatagcaagttatatgagtgtgtctgcctcctgaccctgggag

SEQ ID NO: 3049 - DNA, 677 bp, Homo sapiens
  misc_feature (1)...(677): n = a,t,c or g
acaaaactgaactgcctcccaaaccagttcctgattcttaaagaaacgggaaggagggaacaggaaatggcttatcctaacaggaagtggtttatctgatcctccccctcttcctcacccactcaaccaaccacatatatcctcgtccctacccacgtactcaagtgtaacgtccgtatgcatatctatttgcggccacctcccaacctgtcatttactgggtagtgcctctgacagaagcctccgagtcttttatggnnnnnnnnnnnnnnnnnnnnnnnnnnnnnnnnnnnnnnnnnnnnnnnatataacttacaagccagagtgagcccattaatggatttggtcaggcttccctctggagagagatgcccttgatccagaaggtcccttggagttggctcagagtctattacctgcaatgagtgctgtgctggctccatcttctggggacagggcctcagtgggctgtaaaattggggtggtcatcagttcttctggaaaatgtagaaaagtggaaaaggaaatggagtgaattcttttgtttgaaagcacatgtttggccttcaaatttcaccaccccaccttcttccctattcaaaagtttatcatttaactcctagagtatatccaaatagaaaatcctagagaataaagaagaaaataaaccaccaccc

SEQ ID NO: 3050 - DNA, 1152 bp, Homo sapiens
  misc_feature (1)...(1152): n = a,t,c or g
tttttttgtttaataaatatgagcatttatttggcacccgatggcaatacaaaatcctggcagtgggagtggaaaggttctctctctcaaatacttccatactatgtcgacccaaaggcaggacttggcagcaaggctcacaaaccacccaaacaaatatttattgagcaccttgactactacaggcctagcattttgctagggaccatgggagatgtgaaggaagttatctcacacatgatatgtcttcaaggagctaaaaatgccagtggataaaagcaaaacacatggaaaaacaaagtacaaataataatccgtgtatattgtcaaaaggaacattttatcaaaaggtaggattgtagctaaggttggcttgccttcttccctcttttattcaacaaacatttaatgaaggcccactatgtgccaagcacttggtacatgatggtgaataaaacaaacaaggtttctgccctcatttacagcctggtaggggagacagaaatgaacaagtaaaagtagcatatatataaactgcaataaatgcaatgaggggaaaagacaagatgtggtgacagacacagaagtagactgctcagggactgaagggcccgggaattgtcaagacttgaggaagaaggacaccacctgagtcaagagtggtgggggtggagagctgagaaggcccaggaaaagggcaggaaagagcacaaaattagaagctgagaggagaccactccgggctggagcttagcaagaaatcaccatttaatgaggttcaaggggaaggcaagaaccagttctcataaaccaaggtgaagagtttacattttaaatgaggggtaatagaaagcagaagggttctaagcaggggggtgatcagatttatatttaaacaaccannnnnnnnnnnnnnnnnnnnnnnnnnnnnnnnnnnnnnnnnnnnnnnnnnnnnnnnnnnnnnnnnnnnnnnnnnnnnnnnnnnnnnnnnnnnnnnnnnnnnnnnnnnnnnnnnnnnnnnnnnnnnnnnnnnnnnnnnnnnnnnnnccaaaaaaaattaaaaaccaaaactactctgttatgtgagaacagactggaggaagaaagaatggaagtttttttttttttttttttaaaaaaaggtcttgcccg

SEQ ID NO: 3051 - DNA, 1316 bp, Homo sapiens
  misc_feature (1)...(1316): n = a,t,c or g
ttttttttttttttttaaacacaattactttattgatttcttacaatcaaatactgccaactagaattccttccactcacggatcactaaaaacaaagaagacttccttggtactttcaaatgatgccttatacaataaagttagaacttaaaatgcaccctcattaattatgtaaactggtaatttgttttaaaaagcataactaataatttggtttctttcttcataaaatggaaatttaaatatttcttctgatagtcttgaggttatcaccgttatgagtagtgcaaagtgtggcacatatagtttcatctagaagggtgtgtatcttacacaccttaaacaaacagaatgtgcattaacaaaatgcatacagtcaatgcatgatagaaagcatgtttcaaatataaggcagcccctccggcgaccatattatttaggttttgcattatcatttatggcattatagattaattacacataacttttatacattttaaccctgaagataagaaaaataactgttgcttgaaagaaattcttccaggtagccatttggtttgtatcaggagaaaccgaacctccatgagtttagcgtctgccaagtcggaatcattagctgaagtgagtgaatgagatacgcagcgcatttcacagtgactgtttcccaagtcctggcaatgcctctgctcccacagtccaccagatgaagcatttccgggattacccttctatgtggttttcccttttcatttctttttgctggattaacgattactgtattatttcctcttttccccttttctgtggccttccattttaattattcataaatcctttcagaatatcctcagagagctccataagaggaagttctggagatggaaaatccaagggaggaagattggggattggaatgtccttggctttcccagtatttgctgcgaacttctgccaggttgaggaggctgtagcagtttctgcatgtggtggcaagctccataactctgacgtttctacaaaatcagcatctacatccagctccttttctattggaccttttagaagtctggccttttcagcctttagttgtttattttctttccttaatctttcattctcagccacaaggaattccacatgcctcttcaaatctgcaattttggttgcctgctcctctataattgttttatcatcttttggggctttgcttccaanacatggctctgctggctcactcttttgctgaagtaaataaagtagtgtgtctggatnccctgtcaaagatcccctgaatctcaggcaggcatttctc

SEQ ID NO: 3052 - DNA, 1692 bp, Homo sapiens
  misc_feature (1)...(1692): n = a,t,c or g
tttttttttttttttttttgaggaagcaatttctttaattttatcggaatccaggacacaacaagaaaaacacccaaaaaccacatggagacagaagacgagacacaactcctcccccactgcctccctgctctagagtggggacaaagtgggggtgagacagctggggggagacctgaacctcagtccagccctacaggctccaggcctgcagggaaggagggtaacggggaggcagggcccagccccccagtgtggggaaacagctgagggaaggcccccctcaaaaggctccacctcctcaccagcactcctgcccagggacagggagcccacagcagcaaggggaccccgggggccatggccacattcatgactgagaagcagctgagtggaggcaggagacacgattatctgggcagaatcagttggggcaggggcctgggagggccccatgggccaaaccctgaggtcacaggagggggcccaaagcggggctagtgagtgaggtcctgagtgagtgggtcagcggctgggcccctttctccaagctgcctgtagcccctccaatactgctgccaggggggcccgcctccagggaaatggataagaaagcagcctgcccctgctgcagacagagccaggtggctaaggccaggaaggaaggcccggccaggccttgccacctgcccccagaggcctgtgggaaaaggacaggtcaggaagggtggggacaggggctcgaccggctcagatccaagatggtgccacgcttgcttgctgagtcccccatgagctggggtactgcactggggccagcgactagttagacaggaggcagcagcttctcaagaaattccttcacagctgccatctcctgaggacaggagctgtgcatgacacccgggtatgtcttgaactggaccctggcaggtgtgacaacagaccggagcttctggagccgtcagggccccaaaccgtacgggcaccatgggtccagctccccatggcactggagtatggccaggtccttgcactgccattagctgccctgggggaaggcccggtgcagaggcagccagcagctcaacgccacgatgccagccagagggtgggggcaggtgagggccgtgtagagggacagggccccgcccctgtgaaaagcctcccaggacgattcgattggcagggatcccgttcttcatttcatgctcaatcaaggccttgatgttctctgctgccttcttgatgccagcctcgtcctctggggcatctggactcagccccatcaggtcaaaccaggagggcatcaccatcttcatgttgagggtcacagggatcctaggcgcatggggacagatgtacttgacgtgagggagccggatggtggagagggcgtcagcccagctgtgccctgtgtctccaagtccatgtaaaaaaataaccgcggccgtttcccgctcagctccagacacggtggcagcatcggtgagcaggggcacagacatggtgttaccacacatacaccacacggctccacggcgggggcctgcatacatcggggcggcggtcaagagcaaaaccaggcacaggacacactccctgcccaatgatncaccaggccatcagccccacacagcacccaggttctgtcctgctgctgctgccactgactgcaaancggannncgat

SEQ ID NO: 3053 - DNA, 560 bp, Homo sapiens
cccctgtcctgcatcagactttcattcccacgttcttaggctttgttactgatacctcaaatcggaagttgtagttctgagaaaggcaagtcagcgttcttgaaatgcctgactggtagatatgcaactctggcctccagtcttccatgaaaataaatgctgcctgggacccccacccagaccacacactgacggccggctccggcggttgcccacccctcaggctggcccgggcacccaagactggccacagccagctctgtcagcatgttgtgctcggacaagctgtttccttcttctgaccaacccaggtgtgacctggggatgcagagctttctgttttgggtgttgggagaagcagcaggaaggagtcgccagatgatcaagctccccctttgctgtcatctgtgaatgagcttcgccaggtgggtgggcacctgggagccatgcagaggcctgtggtgctgagttagactccaggtactttgtggtcaaaggaaatcgcctagctccaggctgtgttaggacagtattagcatgaaggctgtgcgaccatcatg

SEQ ID NO: 3054 - DNA, 170 bp, Homo sapiens
ggagatacatgctttataccttaaaaaaaaaatctgtgactcctcactttggagggagggttctgtatatacgtttgacaaaggttattaatgttctttgccagtgatactgccttttactgataatttgtgtctgctagaactgtcagtatctgattaaagcggatatg

SEQ ID NO: 3055 - DNA, 803 bp, Homo sapiens
aaatacaaggacagatgcttctctgttccaagagggtttccttgaggaagctactgaagcagaaagacatgatggagacgagatcgcctcccctcttgtcaaagtgttaaaaaaatgttctgtcttactctgcgcctagcattggaaatgaaagtgacatttacgccacaacccacgtgtgcgcctcctctctttttgtttaaggatgatcaggtctatccaggaaacagctctggcatcccaaactgaaataattaggacgtatatagacctgacaaaaatggaaagggggtggggaatctgagggtctgtcttgcctaattgattccgctaaacggaatgcaggagatgtgaacggcaggacgctccgattcccacgctcgggggcaagtgataaagcgggggccgggcagcctatgacagacagccctgttggggggtgggggtatgaaaaaaacatcaagtgcacacaccatactcatctccatcgcttaagaaagtaaaggcatttcccacccacagccatctgcagcttcccaaatggcagcaccaactggtctgtagctgctacatagtctgcttctgttaattttttaaccactgtttaatctggccataattaagtttggctttcttcgttgtttgagattttcagaattcaaggcaagctagtagaaagcaattccaagaaagtcccatgactgcctgcccctaatgtcaaaatctcagtccatgagattatggccttgtgaccacatttttgcttttgttttgggtgggcaaatgtgtatagagataaaata

SEQ ID NO: 3056 - DNA, 438 bp, Homo sapiens
  misc_feature (1)...(438): n = a,t,c or g
tttganaccgntnnnnnnnnnnnnnnnnnnnnnnnnnnnnnnnnnnnnnnnnnnnnnnnnnnnnnnnnnnnnnnnnggcacgaggaccgagacactaatgaatagaatgtacatttgttcctgctgtgtgattgtccatctgtctgtgcctggacaaccactccatccccactggatgcagtaaacagcaccactgcccactggcattgtgaacctggtgtccatcactgagctctgctggggatagtctatgtggcagctgctgtagctcttgctcagagtgctggatcccagagtattgcagaagcccaagtggccagacctagagcaagagcccaaaatcagaaccctgcaagctggagaccagcaggcattaccatctggggctcccgtaggagctggcggtgccaggccacgctgtccactcgactctgctgt

SEQ ID NO: 3057 - DNA, 620 bp, Homo sapiens
gaaattttctaattaccacattaaaatagtaaaaaccaggtgaaattaattttaagaaaatactgtattttatatatatatctccaaaatattatttcagcatataaccagtgtaaaaactataaatgagatcattgacattttttttcataccacatttttagaaccctgtgtgtgtttacactgacagcacattccacttgagaccagtgctgcgggactggggagtgcaagcgtcagggtcccagccgaagcccctttagcttgggacttcacagccacagcctgagtcccagctcacaactccagaccaaattcccctcccagctcatgtgctgcgatcaagacagatgccacacatggcctggatccccacccccctggcctgctgtgttggctgggcttttccttggagcatggcccctggtgcttctgccactcctacctccctgcccacccccgaaaccccatccctcagagggaccgggtatttttcaacatcctcatccagatcaaggccccattgacattggagagaattcaagcccaacagggaattccattacttatcattgagcactgactaagatttttttttttaactagactttttctgaaac

SEQ ID NO: 3058 - DNA, 286 bp, Homo sapiens
gcagaggccagagagagcaggaaaggaaatggaaaggaacctcaccttcatgcttggggaaaaggagaaacctgtgttaatgtgtcttcccaacatcccactctcttcagcaatcgctggaacagccatgggccatccctgctgagtcaggaaagaagctgagggaagagtcgggattgaaaagcagcagacaagggaaatgtggacacaagcacatgaagagaacaccatgtgaacataaagatggccatctacgagccaaggagagaagcatggaatggatgct

SEQ ID NO: 3059 - DNA, 430 bp, Homo sapiens
ttttaacaaactgaacagtgtttggtctggaatgtgtttaaggaaaaggcaaagttcgcagagtgtgggtagacagaatagggaagaagtacagtttcagaagaacatgcaaaggtttcgtgcactggctgaattcaaggaccttcaattaatttgccagaagtgattgtgcaaacctgggaaagaggacatcttacttctgtttatgaaaaacgggaggagcttccctttgcccgcacttgccttcctttctcatatccaaaggaatcccagtcgtgtgcttgttaaattctgcgaagcagcgaggggctctggctgaagctgcggcagtggccctacttccaccttcagccctagagcaatggttccagcgtggcctccccaacgcgaagactcaattctggccaaggttctgggggagagggagagt

SEQ ID NO: 3060 - DNA, 375 bp, Homo sapiens
gggactggaggtgaggcggtggggcttaggatgcgcaggagcccaacggtggtccgcagtcgggagagcagtgcggggctgcttcctccccacttggtcaataagtcgcccacgtgtccggcctcggtggctcctgccagccgggtgagctctgcagccgctctctgtagagcctaaaaccgtgaaaaggccgggccagcgccaagctgggcgtctttactgtaacacacccgagcacagcccagctcgcctgcccgccaccgccatccagccccagggagccccacacactcctggagcttcagctgccccctctctagtgtttacttgagatccagcttagtcctagaaaaaggagctgaagccttagagagc

SEQ ID NO: 3061 - DNA, 454 bp, Homo sapiens
  misc_feature (1)...(454): n = a,t,c or g
gttagagatgggcctttatggaggtaataaagatcaagtgagggnttaggagtgaggccggggttcantagaactggtgtccttataaaaagaggagaagatatctctccctctgcgaatgcacagaggccattggaggacacaatgagaaggtggctgtctacaagccaggaaccaaatcagccagnnnnnnnnnnnnnnnnnnnnnnnnnnnnnnnnnnnnnnnnnnnnnnnnnnnnnnnnnnnnnnnnnnnnnnnnnnnnnnnnnnnnnnnnnnnnnnnnaagctgaccaatatagctttcaacagctttggggctgttgaaaaagcccctctttcatacataacaggtgcttcctctttcatacctaataggtattaaaaattatctttgttcccagatctctagcagtaaaacagaaaggtactctgttggacaggtttggccacatgc

SEQ ID NO: 3062 - DNA, 1807 bp, Homo sapiens
ccagggcctgactaaacctggagactcgggtggccgaggggcttcataccagctgaagagcgacaagccgctggcagccgcggatctcaccgccgctcagggtttttagaacttcagccataaaaatgggcagaattttccttgatcatatcggtggtacccgtctgttttcttgtgcaaactgtgatacgatcctgaccaaccgctcagaactcatctccactcgtttcacaggcgccactggcagagcatttctttttaacaaggtagttaacctgcagtacagtgaagttcaagatcgggtcatgctcactggccgccacatggttcgagatgtgagctgcaaaaactgcaatagcaaactgggatggatctatgagtttgccactgaagacagccagcgatataaggaaggccgcgtgatcctggaacgtgctctagttcgagagagtgagggctttgaggagcatgtaccatctgataactcttgaagatacagagagaaatccatcttttcccaggtctccttcactgaaaacaaaaatctacttacatacactgtcaccttagcatcagagtcggattaatgaactgcggaacaagaggttgtgagaatctaagatggaacctttctttctttctttctttttttttaaattttgtattttccatccaacagcagtgtgtagagagaatattatgcagatgccgttaattttttaccctatgtttacatcttgaggcagcagagtctgtctgcagctatgtggtgagctatgtaaggaaaaaaatctgggctgttagagtgaaaaagtgtgttttatgtcaattgtgaaaggaaaatgttaggagtatggtttttaaacttgggcttcattttaaacttttttttttaaacccagttatttcacttgatttgctagcttcagagaagagatccgaatctgtgcccagcgctaaaggctcagtgttagcatggcttgtgctggccggtgtgccatattcttgttggagatgaaccgtagcaccagagcccattcttccttgtcagtcttggcccaaagatgtcaccattcctagttatttgtcaccacataattggtgttgattggaaactttttctgagatgggacagaactgctgggttgtctttttccatgtaacttaagcatagtaatataaataaagtaatagttggatgcttttggtcctgtgttgcttttaaaaacaccttataaaagaggagagtatttgataagcaattttcatagtagtaaagttttttttcatctcttaaactaaattgaccatgcatataatattctttgtttaaatgaaagcatactgttgaaacccgcagtgttgcatttagaaaacagttgaacagaatgtcaatgtgcattcatgcaaaaaaacatttaatctgcatctgttttagaaaagggggaaatgaagcaacttgtctaaaaatactgctttacaaagcatttcagcctttccccctcagttttgcattgattttttgacaagtctgtagagcctaatagtttccatcaaaggcctagatctcttatttagcatttttttcagctcttctctcagaagttcagctgttgaaacgaaaactgtactttgtaccctcacatacaaagggatcaaatttgacctggtgttattttagccccaaatttatgacattacacaatattaaaatgtaaatgtttctttacccaaactacttctagatattctagtatttgcttctggtggaattaaatgacggtaaaattggctaattatttgaatg

SEQ ID NO: 3063 - DNA, 506 bp, Homo sapiens
ccggacccgccagtggtatggctgagccgactagtgatttcgagactcctatcgggtggcatgcgtctcccgagctgactcccacgttagggcccctgagcgacactgccccgccgcgggacaggtggatgttctgggcaatgctgccgccaccgccaccaccacttacgtcctcgcttcccgcagccgggtcaaagccttcctctgagtcgcagccccccatggaggcccagtctctccccggggctccgccccccttcgacgcccagattcttcccggggcgcaaccccccttcgacgcccagtctccccttgattctcagcctcaacccagcggccagccttggaatttccatgcttccacatcgtggtattggagacagtcttctgataggtttcctcggcatcagaagtccttcaaccctgcagttaaaaattcttattatccacgaaagtatgatgcaaaattcacagacttcagcttacctcccagtagaaaacagaaa

SEQ ID NO: 3064 - DNA, 627 bp, Homo sapiens
gccaaaagacacaaaatttaacccaaaaactagaagagaaattcggaacattgagtggttctctattgagaaattgccttgtcatagaaatgatatgacccccaaatccaaacttggtttggcacctaacaaattttttatggccattccctttatcagaccattaagggactggctttctcgaagatttggcgattcctcagacagtgacaatggattttcctcaactggtagcacgccggctaaacccactgtggaaaaattgagtcgaaccaaattccgccacagtcagcagttatttcctgacggttctcctggtgaccagtgggtaaagcacaggcaaccactgcagcaaaagccatataataatcattctgaaatgtctgaccttttaaaaggaaagaatcaaagtatgaggggaaatggcagaaaacagtatcaagattcacctaatcaaaagaaaagaacaaatgggcttcagcagcaaagcagcagaattctttgatgaagtgtgaaaagaaacttcatccacggaaacttcaggataattttgaaacagatgctgtatatgacttgcctagctccagtgaagaccagttgctagaacatgccgagggacagcccgtg

SEQ ID NO: 3065 - DNA, 1179 bp, Homo sapiens
aaaaatgaaaacgacacatttattttcccttttattcaacaccctccccacccagtctccccgcccccaagggtccgacacgaaaggtccaggccctcctcgggcgcgacagggagccgatccttaaaagcaaaccctacaaataaataagcggggtcgggggcgggggtctctgcagtccagggcctacggtccaacggcagtcaggtcgaatcaattcaccagcagcgaatgctcctccgaggggtcccttccgcagcagcagagaaggctgcaggccgagccgctcccgcggcggaacttgccggaggtggggctgtcctggcactgtgcgatgtaggcctgcagctcgctctcctctgcgcctgcgccgccgggatgcttgatggtgtcgtaggcgccggtgatgagcgcgatgaagaggctgagcaccatgtagatgaagaggctgatgaaggagtaaaggtagagctgggagaagagccacaccaggctgctgcggccctgctgcgcctgcatggcggcgaacgtcacaaacatgtcgtccccattgatgagcgagaacaggcactcagacaccatggagagtgagcggaacttcacatgatagggccccagcacgatccagccacagaagcagtagcccaggtagatgacagccacgcagcagcagaagcgcatgacgctgggcagggccacccgcagtgtggcgatgaggatattgtagttgtggaagaaggtcaggtagcggatcacgcccacccacaccagcagcgtcgaggtgcccaggaggatgctgcagacgtcgtagctcgccaagttcttggcctcgatgccgatcttcatgatggtgcccgagatggtgagcacatcgctggtgacgagcaggatgtaccagccattgacaaattccagccgctcccacaggctgatgacccgtccccgctgccgccacatgaaccccacaaactcgttctgcagcaggaagcctcgaaggagtgagcgggcgcagaggaggaaggacagggagcaggtgaggatgaccaccacgtcaaacaggagccggaagctgttgtctccgtgctggaagacactggggtgcttacactcctggatgtggccctgggtctccaggctgatggggatccgcccactgtgtgctttgttgtcaaacgtgat

SEQ ID NO: 3066 - DNA, 1226 bp, Homo sapiens
  misc_feature (1)...(1226): n = a,t,c or g
agctgctgaaagagaatgaatgcttagaaggaatgttgccttaaaggcttttctaaaactttttaggtaaaggacaaattctgggaggacgaaagataataagtaggactagttacatagagacttaggatgtccatagtctttcaagaaattgcccaacctttgcgagaaggtgttatggtaatatattgatgttgggttaaagcaaattttttcagatagggtagatttttatacatttataaagtaaaggggagtaggaaagattaaagatagatcaaagaaaggaataattgatggaacaactttctggaagagattagagggtatgtgtcttttgaactctggaagacttgattttagagaggataaaggaagaaagtggataattctagaattaaacaccaaaaggttctatgtgtctggcaccatgtgaagcaacttacctattatttcatttcatttcatttcatttcatttcatcctataacagtcctaagagatcaaataatttgtccacgattacacagtcagtatgtagcagggccagcattcaaatcctcatctgtctatcaaacccatattcccttctattatgctatactgttttcaagttgaaggaaatcaaaccaagaatttctgttttttcactgcgattataaggaaaaatattatttttctgaaatgagacatattgatgtttaagaccttgaggtgacaggtaaaatttggaatatctgtgatgggaaaatgcaaaaaggaaggaatgggtaaaagatacctattaccatctatgccctggtatttcacttcttccattggcacagcatagactttagattggccatggattaaaaatttgaggaattctgacaaaaaactaaatagaaaggagtttgttttttaagtaggtatatgatgggtcaaatataaacttactactaacaaaactttaaacaattccctaaatgccaaacttttataaacaaaaatcaaacaaaccatcaagcaaaagagtccatagccagcagaccaaatgttgaaatctctgggctaatttgtaagatctatgttttaaaactccttagtgaagaggggcaagaaaacctctcctctttttcctctcttggtggaaatgttttgntgttggtgntggttttttcctatactatatgtaatttctatattgttgttttgngnattttggtattataaaattatacttc

SEQ ID NO: 3067 - DNA, 484 bp, Homo sapiens
tactcatctgacaaagggacctatggctttcttataacatagagaatatggcagaggtgatgggatgtagtgattatgttagataggacgttaagttgtcttgctaggaggctgtctgtcttgctggctttgaagatgtgagctgccatgtcatgagtggccagatggagaggcccatgtggcgggaagctgaggacagcaaagaacctggggccctgagtccagcagcctgcaaggaactgaatgctgccaacaaccagatgagaagggaagcagatcaatcaccagtcaagcctccagatgagaactgagccctggctgacattatggttgcagccttgcactgaacccagctgagtcactcctggattcctgacccacagaaaccatgcagtgataactgtctgctgtctcaagccacaaagtttgcagtaatattgttgcacagcatagatactaatataaaactgtcctacatcatgtg

SEQ ID NO: 3068 - DNA, 1130 bp, Homo sapiens
aggagcgcaggtaaggcggcaccccactcccggcggcctccgggcctccttccgcacgcaccccgagctgcctccgcacagttggaggagcgtaggagggacccccacccagggatgacactccaggaaggggactgcggaggaagccagactgtgtccctgacaatgggaacagccgacagtgatgagatggccccggaggccccacagcacacccacatcggatgtgcacatccaccaggagtctgccctggccaagctcctgctcacctgctgctctgcgctgcggccccgggccacccaggccaggggcagcagccggctgctgggtggcctcgtgggtgatgcagatcgtgctggggatcttgagtgcagtcctaggaggatttttctacatccgcgactacaccctcctcgtcacctcgggagctgccatctgggacaggggctgtggctgtgctggctggagctgctgccttcatttacgagaaacggggtggtacatactggggccctgctgaggactctgctagcgctgggcagctttctccacagccatcgctggccctcaaactttggaatgaagatttccgatatggctactcttattacaacagtgcctgccgcatctccagctcgagtgactggaacactccagcccccactcagagtccagaagaagtcagaaggctacacctatgtacctccttcatggacatgctgaaggcctttttcagaacccttcaggccatgctcttgggtgtctggattctgctgcttctggcatctctggcccctctgtggctgtactgctggagaatgttcccaaccaaagggaaaagagaccagaaggaaatgttggaagtgagtggaatctagccatgcctctcctgattattagtgcctggtgcttctgcaccgggcgtccctgcatctgactgctggaagaagaaccagactgaggaaaagaggctcttcaacagccccagttatcctggccccatgaccgtggccacagccctgctccagcagcacttgcccattccttacaccccttccccatcctgctccgcttcatgtcccctcctgagtagtcatgtgataataaactctcatgttattgttcccag

SEQ ID NO: 3069 - DNA, 1430 bp, Homo sapiens
  misc_feature (1)...(1430): n = a,t,c or g
agcagctgctccaggagaaggcagctttccgggagctgatcgcgcagctagagctcgaccccaagtgcagggggctgcccttctcctccttcctcatcctgcctttccagaggatcacacgcctcaagctgttggtccagaacatcctgaagagggtagaagagaggtctgagcgggagtgcactgctttggatgctcacaaggagctggaaatggtggtgaaggcatgcaacgagggcgtcaggaaaatgagccgcacggaacagatgatcagcattcagaagaagatggagttcaagatcaagtcggtgcccatcatctcccactcccgctggctgctgaagcagggtgagctgcagcagatgtcaggccccaagacctcccggaccctgaggaccaagaagctcttccacgaaatttacctcttcctgttcaacgacctgctggtgatctgccggcagattccaggagacaagtaccaggtatttgactcagctccgcggggactgctgcgtgtggaggagctggaggaccagggccagacgctggcaaacgtgttcatcctgcggctgctggagaacgcagatgaccgggangccacctacatgctaaaggcgtcctctcagagtgagatgaagcgttggatgacctcactggcccccaacaggaggaccaagtttgtttcgttcacatcccggctgctggactgcccccaggtccagtgcgtgcacccatacgtggctcagcagccagacgagctgacgctggagctcgccgacatcctcaacatcctgggacaagactgacgacgggtggatctttggcgagcgtcttgcacgaccagggagagaggctggttccccagctccatgactgaggagatcttgaatcccaagatccggtcccagaacctcaaggaatgtttccgtgttccacaagatggatgaccctcagcgcagccagaacaaggaccgcaggaagctgggcagccggaatcggcaatgacccccacccagggggccagcgggagcagggcctgcatgatgaccccgacagatggtggggggggggcctctgggaatcacaggccagcacctccccaggtggcaggatctggcttggggtgcccggncctcatccctgcccacgcagtgagtgcccatgtgtcttggccccttgcttgcaaactgggtaaagggtgcccaggcctctcctgagcatttgtnnnnatganngtttcnnnaannttatcncaacctcctnntnncctcncagggggnncaaagggntgntcccctctgggtnnangattccccntgggttctagggtancggtaangnnnnangtanatnggnctttngtcngnnnannctntttngcttttnnntttccanannntcngctccnnntgnnctcttcnnnngtgcct

SEQ ID NO: 3070 - DNA, 1452 bp, Homo sapiens
tactttggctccatccccctcaaaaacaaaacaaaaaatccatttaaagtgtcctcctagaaaagcctcagaactgccttcaactacatctgtcacctttatagaatattttgaaattctggaagaggatgggaagcaaaattctaatttagctagagctgtgatccccaaataagtgctgacaaaattgtctaccacagaaaggccgtccttgtcatcttgtaggcatcactgctgctaaatcacatcagtacatgccttctgtggggagatggcagggggcaggggcaggaccaggggatgggattagataaagtgtgataatgtcctttagataaaagaaatcctacgctatagaacaaggttctgtactcttggagttggtgtctgagatcacctggcacagtgttacagagattttccactcccataaatcactcctaaaagagtttgcataagactcggtagacctgtgctattcaatgtggcagtcaacagccatatgtggcgatgactactcaaagtttggcttgttcaaatcgagactgtgttgtacacatacaatacacaccagattttgaaggcttggtaccaaaaaggaatttaaaatatttcaccaatatttcatattgataacatgctgaaatgacactattttggatgtactaagtaaaatattaacaatttaatatatttatataattgaaattaaaattcttttcacccatttttatttttttaaaaatgtggcccctaaggaacttcaaattagacatgtggataacgttatacttctattggacagccccactctagacttacatggtgtggggtaggcagtgaaatccgtaaataggaaacgcaattctgcaaagtatctaaatagacagaaacaacacaaatatttttgctggagtcaggagcactgtgaggcacagaacatctcccagaaagcagattttttttttctgccgaaaaaccaatatatatatgtatgatcccaattaaaagacaaaagcaaatgagccccaaactgcctgtcttcagcatttgcctgggagctgctacctttgctcttctagcatcttctaggtaccaaggatattagccacttgagggtgttgggcatatttgtttcattgtaggcaaaatcctcttgtggtttcccctccccaggtattgttgagtctgttcaaagctgggtgtgttgaaacactgcacaaatcctgccactcttgatgtgccgcttgtctcagccttggcagaggctgagtctgttcctgtgcccacctgtccagcaggttttgatgttggctcctgaaagagtttgtattaatttaattttgcactagtcacagttggttgtaaactgtatcaaatgttttgggagattaattgcctgagatggaaagagagatggatgatttattgcttcaattgttttaaattaaa

SEQ ID NO: 3071 - DNA, 598 bp, Homo sapiens
  misc_feature (1)...(598): n = a,t,c or g
aagtaattcaaactgaaagacccttttttgtcatatggaacttggtgacgattttttgtcttaaagctggtttaaaggtaggataggcttttacctttattgctttagcataaatttggtttactgaattgactggcttgagattagaattattcagttgtttgtaagatcaaagccactggttgttttaaagataacgtgtatcttttaaaaaattgcccaagctgattagaacaagtttaggagttgggtacatttggttcaagtgctgcaatctgtatgtactaaatagctttactttgtgtatgtgtacttataatgtgtagatgtactactacccaggttttgtcaaatcatcttttttaaagtttttttttttttaattgggttccaggacctttgtaggagaggccaatatggttaaagtagaagatattacccgatagcattttcccccatggcnccccacataaaaattaatatttcccctttaaagccttttccatatacagaagaagggggacctcntccancaagtatattggtgcccctgaggncacagcaaacccctcccatatgganccccnttgaaagtggc

SEQ ID NO: 3072 - DNA, 473 bp, Homo sapiens
ggattaatatcactacttgaatactgacagttgttgattagacaccgaaaggttactgattgttgaatgtatctgtgttagagctgtgcactggcacgcttgcatcaggggctggggccacacggccgccacacagattcccccgtgatgcctggagctgcttccagagccgggtgtctccaaaaggcacctgtaggacttcccatttagaaatctcttgagtgggtttgtatgttaccttctccaaggtttatttaggacagagatattgctggaaggtcatgggtcagattccctcacaacccacctcgtctgcgggtgcagccccactccaaggctccccgttattggggtatgtgaggagcagtaaatataaaaccagttcaactgtcctcatggaatcaccctttctgtttttgcagtattcataaagctagtgtaaggtctggttttagtctattaaatcttagaga

SEQ ID NO: 3073 - DNA, 642 bp, Homo sapiens
ttttgcatgctgctgcatggttttattcctcatgggtagatgaacacacactggtatatggggaaatcctcacccgccctccgctgctcttctggaggtctgtcctcttgctttcctcctctgccccagcctggtgctgccccaagccctgccctggcaaagagagaactgtgcacagcggggaggctctccaagccagaggcctcgcacgcagctgaggaatgacgcaggggcctgcaggcagctcacgcggagacaggtctgtggggccccgcgtcagaacccacttcacatcccaaagccccacctgctttgatcttcaatgctgggctcaatgtcagatctggctgaccagaggggctcaatgaggctcactggctcttcatgcaccctgctgtggcctgagcacgtccccccaaaacccacctgcttaagtcctcacctgcaaggggatggtattaggtggggcatttgggaggtcatccggtcacagggcaggggcacagcctcatcatgggaccatcaccctcacaaaagaggttgcatctactggtgctttcatcttgggcttccagcctccaaaactgaaactgatttctgttgtttataagccactaggtttacaatattttcttttttttc

SEQ ID NO: 3074 - DNA, 406 bp, Homo sapiens
cagaaatgtgctattttttcagtgggcaattttgtaatatattcagactatccagatacagagatgactaaggtcattgatagcgtctctgaacaatcagacggatcaccttatctctacacagctggcaaacaccaggctgcggcttggattaaccaggaaagaaagcttttctcactcgagttgtttttatgtattgatggggacttttccacctcattagactaatactcattcaaaaagagtttggttctgctgtaaatccttgccgcctgctgaaacatggtgtgcaggtcaacggagaatactagctgctcctttttcaccacctttaccaatttcctatttgatggtttgtaagtagacagtaaggcaaggcagatgattattaccctcagaaaggttg

SEQ ID NO: 3075 - DNA, 1798 bp, Homo sapiens
tttttgaagggttaatattagcaaagttttactttttttttttctgctcataaatgactctgaaaaagccaatacgcaagaggctaacacaactgtagtctaaaggcaacgtcgaggtcactgatatgtccctcagacaagaggcactgctcagaatccccctgtgctgggggtgagggaaggaggggacggtttaggacagaggaataaatacatgtggttgtgggagttctgccatcagggatggtggccccagcccaggaccccaaaaccctgaggcggtgcagtgggctgccaaccccccagctcggggttccccaaggctgcctcagtgtttggatgggctggaaggaaatgctgaggttctgggagggccccatggccagccccctcttcccactctagccagaggagagccaagctcccggctggccagggccctggggtagggagcagtgcccccaagagggctttctggtgtcaatgtctcatgcagcgtcaggtggtgaggcctgggcctggccctgaggcgggagtgggggtgacaggcgaggctggggtgggccctggcacctgcagctttgggctgccatgtgtgtctgctgacatcccgactatggtccacggccgggaatggtgggcagacggggctgctggcagccctcagccttatagtgtgtgtggggggtggacgaggggtcatgaggacagggatggggctgggcgtctctggtaaggaccagtaagtgccaggcaggacgtactctgaaggctcagccgtggcccatctgggacacagccctgctcccgaaggggctccaggggaactgctcagccaggtgattcaccagggcacgggcaggccaggcttgaacccggggccccagtgtgcgatgtggggaggtgactgggtgagcgtgaacagggcgtggggtgcgcgggggcggtggccgtgtgaccggtgcccggccctcagaagacgaagcagcgctccgtggggtggcccacgtggtcccaggttgggaaggcaggcgtactggatcatgggtggggggccacacatcagcaccagcggctcctcctctgggggtggaaggtggtcccggatcatctcctcattcacgaagccctggccgtagtcccaggcttcaggggctctgtccagcgtgtaccagagcttgaagcgtgcagaatgtttgttcctgagttcctccagctcaggtcgcagcaggatgtccttctcggtctggttggcaaagagcaggtggcacacagtgtggtcatcagggtccttcatgatggcgcggatcacctgcagcatcggggtgatgcctgtccctcccgcgatcatgcccacagacttcactgtcctgatgatagggttggactttttgtcaggtcggatggcgaacttccctttgccctggtagaccagcagcccactggggccccggaactcaatggtgtctccaatctgcatgctctccaggtactgagacatcttccctccagcgggaaacttgggatgggtgtccttgaagtaaaccttgatgaccaggtccacgaagcccttgtcatcatcgctggagattggtgtatagggccggacgaccaggtttccatcaattcgagccgagaggtagatgtgctggccgacagggaggcccaggatgtgctggggtggcggcagggcaaagcggaagcgccgggtgtcatggctgatgatctcccggtcgatgagccgcagcgggtacttgatgtccgggctctcgagagcgagcgcggcgcggggccaccg

SEQ ID NO: 3076 - DNA, 1346 bp, Homo sapiens
  misc_feature (1)...(1346): n = a,t,c or g
gaggtttaaaagcaataatttagagagagagcaggagcagcttgaccgcatcgtgaaggaatctggaggaaagctgaccaggcggcttgtgaacagtcagtgcgaatttgaaagaagaaaaccagatggaacaacgacgttgggacttctccatcctgtgggatcccattgtaggagagccaggctactgccctgtgagactgggaatgacaactggaagacttcagtctggagtgaatactttgcaggggttcaaagaggataaaaggaacaaagtcactccagtgttatatttgaattatgggccctacagttcttatgcaccgcattatgactccacatttgcaaatatcagcaaggatgattctgatttaatctattcaacctatggggaagactctgatcttccaagtgatttcagcatccatgagtttttggccacgtgccaagattatccgtatgtcatggcagatagtttactggatgttttaacaaaaggagggcattccaggaccctacaagagatggagatgtcattgcctgaagatgaaggccatactaggacacttgacacagcaaaagaaatggagcagattacagaagtagagccaccagggcgtttggactccagtactcaagacaggctcatagcgctgaaagcagtaacaaattttggcgttccagttgaagtttttgactctgaagaagctgaaatattccagaagaaacttgatgagaccaccagattgctcagggaactccaggaagcccagaatgaacgtttgagcaccagaccccctccgaacatgatctgtctcttgggtccctcatacagagaaatgcatcttgctgaacaagtgaccaataatcttaaagaacttgcacagcaagtaactccaggtgatatcgtaagcacgtatggagttcgaaaagcaatggggatttccattccttcccccgtcatggaaaacaactttgtggatttgacagaagacactgaagaacctaaaaagacggatgttgctgagtgtggacctggtggaagttgaggctgcctggtatttgattatatattatgtacatactttttcattcttaacttagaaatgcttttcagaagatattaaatatttgtaaattgtgtttttaattaaactttggaacagcgaatttggatgttccagaggttggacttgtattaggtaataaagctggacctgggactcgtgaggaaggaatgtgcttggggctgttgcnataccctgtgcagcattctttcaaaatagtgcccttccaatgcntcctccttaatgtcccnccagacaggatcacncctaagaagccgt

SEQ ID NO: 3077 - DNA, 485 bp, Homo sapiens
  misc_feature (1)...(485): n = a,t,c or g
ggtgactccataaaacaagaagaggcccagaaaagctttgttgacagctggagacagagatcaaacactcaaggttccattttgataaacctgctcctgaagcagcctttgatcccagggtcatccctaagcctttgccacctcctgagtagtagttctgagtctcctgctggcacccccctgcagccaccagggtttggcagtaccttggctggaatgtcaggcctcaggaccacaggttcttatgatgggtcattttccctctcagccctgagagaagcacagaacctggcattcactggactgaatctggttgcccggaatgagtgctcacgtgatggagacccagcagagggaggcagaagggccttcccactctgccagcttcctggagccgtgcatttcctcccccttgtacagttcttcatcggcttacactgccagggncctgcaggacttgggcagctgctaagagaagcggagca

SEQ ID NO: 3078 - DNA, 513 bp, Homo sapiens
aaaggcacagatgcaagcaaagaaatgaatgcatctctgggctgtctcatccttggaggcatttgacttgtgcgatttcagagtctgacaggagcagaagaagcggcgctcaggcaagcttttgccactgactttctgcacaaaagatgtatgcaaataccccaaactgtgcttctggcttgccttgcatttcaccaccaagatgtttttagtaattctctgcaccagaggacctgtgggttccgtggccaactgccagatggtctgtttggtttccggggaggcctgcattgcattcaggaccgagctcttcagggtcagaggggtggcctctgcctgggcagtttcaccgccagcttgatgtgctggcactggttttccacaacgccttgagtggcagctttcaggcatgaggggacataacaccgtccagagctcagctgagtgatgatcgtcccatccactgtctggattgttgtctctggaaaccccgaggttccacaaagcatcggt

SEQ ID NO: 3079 - DNA, 686 bp, Homo sapiens
gaacaaacacacctggcctccccaaggttcagtttttatccctctcttggacaggtcagtgacttgaggtcatttcttcacaagctccggtaggcaccccacagtattgtcaaagagttctgtgttagggaagtgtccagttttgtccaagaggaaatagaagcgtcggcctttgactttcagaggtagcatggcagggacttcaccccggtgggccatgcaagatacctgcttcaaaggaactgtgaaatgggcccccaagccaaagggggcatgagtggtgagggtcacctgctgccctccagctcgaagcaccactgagcgcacagaccggagagagaagagaagaccagcaccgagtacgagggctccgatggcgccgcagccgacggccagaccgtagcgccagaacgcggagcgcaggtcgaaggggccacgatttgggacctccgcatccagaggctgcaccggaaccgggggccgggacacggctgccacagccatggaagcccagaagacgccctggcccgcgcagaacagcccgaggatggtgaagaagcggccccgatcatgctcaaagagcagcacatcccgttgcagcgtcgtgccttgcaggggccggcaggtgagcaggggccgcagcacgggctagcacgcccgtgggccatcgcctccaaggcgccgcc

SEQ ID NO: 3080 - DNA, 759 bp, Homo sapiens
gcgccggcggagcagtctgagcccgacgatgaggccggggacgggagctgagcgtggaggcctcatggtgagtgaaatggagagccatcctccctcgcagggtcctggggacggggagcggagattgtccggctcaagcctctgctccggctcttgggtctctgctgacggcttcctgaggagacggccctcgatggggcaccctggcatgcattatgccccaatgggaatgcaccctatgggtcagagagcgaatatgcctcctgtacctcatggaatgatgccgcagatgatgccccctatgggagggccaccaatgggacaaatgcctggaatgatgtcgtcagtaatgcctggaatgatgatgtctcatatgtctcaggcttccatgcagcctgccttaccgccaggagtaaatagtatggatgtagcagcaggtacagcatctggtgcaaaatcaatgtggactgaacataaatcacctgatggaaggacttactactacaacactgaaaccaaacagtctacctgggagaaaccagatgatcttaaaacacctgctgagcaactcttatctaaatgcccctggaaggaatacaaatcagattctggaaagccttactattataattctcaaacaaaagaatctcgctgggcttaaagactttgaggatcttgaaggataccagaataccattgttgctggaagtcttattacaaaatcaaacctgcatgcaatgatcaaagctgaagaaagca

SEQ ID NO: 3081 - DNA, 150 bp, Homo sapiens
gcggcacgagcaataccctgtgaagaccatttgttgtcccactgaaaactaaggagcatgggctggatgcttgaggccaggagctcacaaccagcctatacaatgtagaccctttctctatgtatatgtttaacatgtaagaaagaaaag

SEQ ID NO: 3082 - DNA, 461 bp, Homo sapiens
ggatcaacactgcctgtggactggacggtgcataggttttggcaaccatcactattacatattcttcttgttttcctttccatggtatgtggctggattatatatggatctttcatctgtaagtgtaaatttttcttacaacaagcacatacatctacacccatttctacttttccttgtaaacccttgtatatcacattctggctgggtgactataaaccatactcctaataaaaacaaagcaaatgcctctaagactccctcagcattgggaagctgcaagaaatacaagatgaggttagttctcagtactttaggaaaaaaatgtgataaatttgaaaagtagtcaaaaatagaaattcatttaaggcaagtgcagatttgctccccagtgaagaaggaaagtcagctgctgaagtacaaagctggaggtgataactgaataaaacaggaaaaaaaaa

SEQ ID NO: 3083 - DNA, 1492 bp, Homo sapiens
gggggcgtgcggaacggggtgtctcggcgcctctgcgcgggaagatggcggaacaggctaccaagtccgtgctgtttgtgtgtctgggtaacatttgtcgatcacccattgcagaagcagttttcaggaaacttgtaaccgatcaaaacatctcagagaattggagggtagacagcgcggcaacttccgggtatgagatagggaacccccctgactaccgagggcagagctgcatgaagaggcacggcattcccatgagccacgttgcccggcagattaccaaagaagattttgccacatttgattatatactatgtatggatgaaagcaatctgagagatttgaatagaaaaagtaatcgagttaaaacctgcaaagctaaaattgaactacttgggagctatgatccacaaaaacaacttattattgaagatccctattatgggaatgactctgactttgagacggtgtaccagcagtgtgtcaggtgctgcagagcgttcttggagaaggcccactgaggcaggttcgtgccctgctgcggccagcctgactagaccccaccctgaggtcctgcatttctcagtcggtgtgtaatcacgttccagggcccaaagcccagctctttgttcagttgacttactgtttcttaccttaaaaagtaattgtagatggaaatcagttgtgtttggcaggagaatcaataaaaatctttgattcagacagcttatggggtattttaagcattcttagactagttgaacatctcactttgccccagttacaaaaatagtagaacaagcaacataaaacaatgaaggaaaacctcacttgaaggcccaggtcaacatctaagcctgttgagacttagataatcgagtctacctcttcagtaggtttgtgtggatggcctggaggcaggtgcttgctccccagtgctacctctctcttccctagggccttttgtggattgacagtagtcccctccgtaggagctcacagtctagattagaagtgttttaatttctacacacccatagtgcacacttgtatattgaaaagatagggaagagagaaacatttatggaatcagtcgttggcaccttcaatacttcatgatttttgtcgagtttacttcatgaggaggtcagcccattggctcccatctgaaccactttgcctctgaaacttaattacatccagaaagaaggacacttgtatgctagtctatggtcagttgaggaatatgactgtttttatatgcacatgtaacccaaatgtccaatataaattggcttattttttaaaataattttaaaagttgggaaaagtgttattatttggcatgcttaaatattgaataagtattcttcatcagcatttaataaatgtataggcagatgtaaggtaatttctgtgtattttgagataatgtcaaaatcatgaatatttcaaaataaactggggagttataaaaatacaactagagata

SEQ ID NO: 3084 - DNA, 445 bp, Homo sapiens
  misc_feature (1)...(445): n = a,t,c or g
ttttgatntcctntttganaccntnnnnnnnnnnnnnnnnnnnnnnnnnnnnnnnnnnnnnnnnnnnnnnnnnnnnnnnnnnnnnnnnnnggcacgagcaggtgtgagctaccatgccnnnnnnnnnnnnnnnnnnnnnnnnnnnnnnnnnnnnnnnntccgtttcaaaaaaaaancaaaaaaancaaaaccaaaaaataaaaaancacatcagcttgacattttggaggcattcccanactcagggttagtcagcanattancatttaaaanaaagtcttgtccctacagattccctgacctcagctacccatgaagggtggnaanaggagtccttancaagaagtccaggaagttgacaacctcctcagacctgataggacactcctctctccaccctgcctcctgactgatttaatcttaggggtgtgaggacctctgaaaa

SEQ ID NO: 3085 - DNA, 490 bp, Homo sapiens
gtatgaaggaaacggtttcgatactctcttggcagttcaaattgggaaggtatggggaacatggattcatagaagtccctgagaacagccttcactgtctgagcatctttatgattgtggtcaatgttgtcattcaggcaaacaaacttcctgaaataacagagagccagggttattagttacatatggataatcctgacctaacaaaacaaggatgtggattccaaatatattttaaatggacttatgtcccaagttggtatatttgctgatatgattctctgggggaatgatattctataaaatttttctttagatattcctcacgtataaaacaagagagctagggtagatggccttttagctatgggagtaaattaatttaatgacttccttttagagtgtcctgaattaattgttcaataaatgtagttaactgactagaatatttgttggcagctagcaagacatcagtggccaggcatgcgct

SEQ ID NO: 3086 - DNA, 1257 bp, Homo sapiens
cggcgcggggcaggttccgggctgcttaggttggcaccggtccgtggtccccgggggcgcagtcgcagcgctcccgccctccaggcgtcagcgacgtgcgcggctccagtgcggccggaacctggcgcaactcctagagcggtccttggggagacgcgggtcccagtcctgcggctcctactggggagtgcgctggtcggaagattgctggactcgctgaagagagactacgcaggaaagccccagccacccatcaaatcagagagaaggaatccaccttcttacgctatggcaggtaagaaagtactcattgtctatgcacaccagggaacccaagtctttcaacggatccttgaagaatgtggctgtagatgaactgagcaggcagggctgcaccgtcacagtgtctgatttgtatgccatgaactttgagccgagggccacagacaaagatatcactggtactctttctaatcctgaggttttcaattatggagtggaaacccacgaagcctacaagcaaaggtctctggctagcgacatcactgatgagcagaaaaaggttcgggaggctgacctagtgatatttcagttcccgctgtactggttcagcgtgccagccatcctgaagggctggatggatagggtgctgtgcccagggctttgcctttgacatcccaggattctacgattccggtttgctccagggtaaactagcgctcctttccgtaaccacgggaggcacggccgagatgtacacgaagacaggagtcaatggagattctcgatacttcctgtggccactccagcatggcacattacacttctgtggatttaaagtccttgcccctcagatcagctttgctcctgaaattgcatccgaagaagaaagaaaggggatggtggctgcgtggtcccagaggctgcagaccatctggaaggaagagcccatcccctgcacagcccactggcacttcgggcaataactctgtggcacgtgggcatcacgtaagcagcacactaggaggcccaggcgcaggcaaagagaagatggtgctgtcatgaaataaaattacaacatagctacctggggatacttttttctttctgttttttgtttgtttttaattttagctttaaggagcacatggccagtactgtttcaggggaatattgggtggcgctggggtttgggcttctattgatcccatcacccaaacagtgagcatagttcccaatagatagtttttaacactt

SEQ ID NO: 3087 - DNA, 322 bp, Homo sapiens
acatttccaaagtaaatgctcatttttagcacagaatcttttaaagaccttacaatcaaatttatatcacattagtccatttcaacgccatattttctatttatctttacttctgtgtcctataaaggaaatgatatcattcaacattcaaaagcatcttttaaaaaaattatttttttagtctttctatttgctctttggagtcatataaatttctttattttttcattcttctctttcatgtaaagttgctggattttataatactaggatttcataaaaggaaaaagaccttcctctaaaaacaaatgttctatgtgag

SEQ ID NO: 3088 - DNA, 1495 bp, Homo sapiens
  misc_feature (1)...(1495): n = a,t,c or g
ccctgatcctgccactgcactcccagcccggccgacagattgagaccctgcctcaaaaataatcataaatactgagtttggggaggttcattatgattgacgcacttgagttactgatttgggtcgagggttcagtgaagctttggtttacatcttgtgcagctaaccacgttgagcacagagcatgagacttcatcatgaggaggtaggattaaggattaggcttctggactcgtggttcgtgatgttgtcacattagaaacacatctagcatggttacaagtttagatcttaagtgacacaaaaggccccagctgtgatgaagtccaaagccacattctctgagggtgccctactccctgggaagacccacccaaagtccttgctatgaagcagatcactggggctgaccttgggtgtattaagttttggagtcagggtcaccaaagtgtgagtttcacagttgaacacgatggttcagaagcagggtatagaatgaaaggcaggagataaaattgcacttctcaattgctctgaactctagctagacttgacatgggacgtgaataaccttcctgtctagagagctgcctccttgaagtgtgacattgtctctctcacttccagaacaccggacccaggggagatgtggattttcagcaggaactttattccaatgctaatggcagacatcaggaaggaggagaggaaccatttgtgcagatcatctagaagaacctggaccattcttgacagagctgaatacagtgatcacgttgtcctccaaggagcaggggtggggtggggtacttctaggagtcagttttgcaggctgtacaggaagcatggnnnnnnnnnnnnnnnnnnnnnnnnnnnnnnnnnnnnnnnnnnnnnnnnnnnnnnnnnnnttcttcttaatattcctttgaaattctttatggtgcacaggtagcgtagaaaataactgcttcacgctgactgtggtccctctggggtgggggtagggggttttctggatgattttcccatcgtgatcaaacaccagtcgagtcccaaccttcgccgatacgtggcaggtagaaatggtgacatcactcagtgcacaaagtgagctcagagctttcccccgaaagccaaaagtttcaacccgagttaggtcggcaaactcttgaatcttagatgtgtgatgtttcagagctgaaagagattaagccttcgaagttttcttcttctaccccacatccattgcctgaaacttcaatgagatccattccatagtccttaagctttagatcaatattagtgggcaccagcatccagactgtttcctactatcttcttcaccgcagtgcttagactcagtactaccggcccagagcaaatctgatggactgacttccgatcaataggtttgatggccttagcaggttctgtactccagctctcagctcgctccaaggatgcaacaccggatccgcctcgggaactggaaaag

SEQ ID NO: 3089 - DNA, 520 bp, Homo sapiens
  misc_feature (1)...(520): n = a,t,c or g
ggaaaaatgatattcattgtcctaatgtgtaaatttcaacaatttgcaaatttgtagattctttagaatagaactaactcaagcccttcattctgcagctgaggctcactgcccccagtgggcagtgggtccagggggtttctgaggacagggcatgacccagccctgctgcccccaagatggcacctggcttggaggggtgaggggccctgttagtctgactttgaagaagaccagccttccagactcgcttggtgccctgacaggtatgtgtgctcttctctctcccacccaacagccccttttgggagacagggtctgagaggagtcagggtcgtataaccttaacacagtgtgttatccaaaaacccactaaccctgttactcntgtctgtctgctatgtgaaaccaagggcggtgttaaagtttatcaccatgatattcagatgttcnttgggacatctgggatngggtcanggntcnnctngngggtcnnnaggncgntntnnttggggaaatt

SEQ ID NO: 3090 - DNA, 1297 bp, Homo sapiens
cgtttctaaacagcagtacaaaggcatggcgatatttacccccgtcatatgtggtgttggtggcaatctggtggccattcagaccagccgaatctcaacctacctgcacatgtggagtgcacctggcgtcctgcccctccagatgaagaaattctggcccaacccgtgttctactttctgcacgtcagaaatcaattccatgtcagctcgagtcctgctcttgctggtggtcccaggccatctgattttcttctacatcatctacctgggtggagggtcagtcagtcataaacagccagacctttgtgggtgctctacctgctgggcagggcctgatccagggtgacaatcctgctgtacctggcagaagtgatggttcggctgacttggcaccaggccctgggatcctgacaaccactgcatcccctaccttacagggctgggggacctgctcggtactggcctcctggcactctgctttttcactgactggctactgaagagcaaggcagagctgggtggcatctcagaactggcatctggacctccctaactggggccccgctggtcccatttgctcattagaatttcctctcacatcagtgggatacagaattcagtttctcccttgccaggtccttgggatggttgacccctgcctctgcagtagccttttgtgagtctgctaaggtagctctcacacacctcggctctggggttgatacctgagcctgcaatagagccctgaaatcaagagcatagcttgagtgtgtgaatatgatgtgtgcacatgcttaatgagcgtgcaagtgtgcacacgtttgtggagaggagggtgttctggcctgagaaggtaaagaagaggcatgtccagtatgctttgcagggtgtgtttgctcttttccatgcccatgcaacccagattggggtggagcaggaaggagctcttttctgttcccaagcctcagaactcttgagctgtggcttacttgctgtcttcaccaggttcaagctccgtgggccacactgctgctgtgccaagaaggtgtacagcctccccaggatggggcctcatacaacccttcatctgcactcaacatttaatcgtgtccttgctgtctttttattttcctttttgtttgttagcaaaaacctctatttagatttcaataatcagagaagtgtaaaataaaacagattatattgtacttgaccctttatgtctttaaagatagttaatgcaaccctgaggcttggggtctataaataacaaaagcatctggaaaaaaaaaaaaaa

SEQ ID NO: 3091 - DNA, 778 bp, Homo sapiens
tttttttttttttaaaaaagagcattttattttaataaagaataaaagagatcaatatactgttttaatggatacaaaaataaatattcattcagcatattaaagatatgtgctttgacattcatttgaattggagattcaagcctattgttatcttatgaacacttcagcaaacaggactgccattcttaaaaatataatgctttgttggacaaaagggacaagccacgtcccctggtcctctcctctattcgcctgtgaactccatccacacgtaaaggacctctgggtctgactgtcccctccacaggcatggtgctgggaaaaggaaacaggcatatctggcttttcagattttaaaccggaaactctcacagtcacaaatccaccatgagacttgggagattggatgagctgtctcccaaaccctaacaccttccaccttctcaaaatgaaggctgccctttcactgggaggttctgaatgcgggattggtgcctgactcaggctgggccacaaaggagaaaggaggacatggaaaatccgacaattcgaagtacaaatatttcaaacacatgtgaaaaccatttggaaagaagaaaagaggtatctggaatgatttcatgacagaaatgaaaaaaataaatttagttctaatcttcctggcaacaaagccccagaggagaaggtttcattgtctgaagataaaaacacacccgtttgcctggatatgaacacatattcctgcaccaaattctagaaagaatatactttcttc

SEQ ID NO: 3092 - DNA, 797 bp, Homo sapiens
  misc_feature (1)...(797): n = a,t,c or g
aaggaacacacacagcagccagcagtaatgatcgggcaagtctcattaacaatgcatttcagctcgtcagcattgggaagctgtccattgaanaggccttggatttatccctgtacttgaaacatgaaactgaaattatgcccgtgtttcaaggtttgaatgagctgattcctatgtataagttaatggagaaaagagatatgaatgaagtggaaactcaattcaaggccttcctcatcaggctgctaagggacctcattgataagcagacatggacagacgagggctcagtctcagagcaaatgctgcggagtgaactactactcctcgcctgtgtgcacaactatcagccgtgcgtacagagggcagaaggctatttcagaaagtgggaggaatccaatggaaacttgagcctgcctgtcgacgtgaccttggcagtgtttgctgtgggggcccagagcacagaaggctgggattttctttatagtaaatatcagttttctttgtccagtactgagaaaagccaaattgaatttgccctctgcagaacccaaaataaggaaaagcttcaatggctactagatgaaagctttaagggagataaaataaaaactcaggagtttccacaaattcttacactcattggcaggaacccagtaggatacccactggcctggcaatttctgaggaaaaactggaacaaacttgtacaaaagtttgaacttggctcatcttccatagcccacatggtaatgggtacaacaaatcaattcttcacaagaacacngnttgaagag

SEQ ID NO: 3093 - DNA, 530 bp, Homo sapiens
aaaattcctcaggattctatagcagaaatctttaatcagtgcgaggaacaaggaatggaaagtccacttcctgctgaagatgataatgctatccgggaacatttgtgcatcagagcttatttggaagcccatgaaacctttaatgagtggtttaagcatatgaattcagttccacaaaaacctgctttgatacctcaaccaacttttactgagaaagtggctcatgaacacaaagaaaagaaatatgaaatggattttggtatttggaaagggcatttggatgccctaactgctgatgtgaaggagaaaatgtataacgtcttgttgtttgttgatggagggtggatggtggatgttagagaggatgccaaagaagaccatgaaagaacacatcaaatggtcttactgagaaagctttgtctgccaatgttgtgttttctgcttcatacgatattgcacagtactggtcagtattcaggaatgcctacagttagccagatatggtatcctctgagcgccacaaactgtac

SEQ ID NO: 3094 - DNA, 406 bp, Homo sapiens
gtgggttcttggatatgtgtagtgtgagcatgtgtgcatgtgtgagcctgtgcacgtgcatgttgtaggtgcataagcatgtacacgcgtgagcatgcatgtgcgtgtacacgtgtataggtgtacatgtgcatgagttgtgtacatgcgtgagcacgtgtatagatgtacgtgtgtgtgcgcatgtgtgcgtgtacatgtgtttgtgtcttgggtatgcataagcatgcacgtgtgtatgaaatgtcccgtgtgtatgcatgagcacgtatgcatgtgtgatgcgcatgcacttgtgtacttctctgagggggcacatatgtatgagtgtatgagtgcatacatatgcatatggtgtacgtgtgtgtactttgtgtgtggccatgtatgcgtatgagtacttgtg

SEQ ID NO: 3095 - DNA, 501 bp, Homo sapiens
cagaatgtcaaacttctgttggtacattgttagccaaaatgaagacctgtgttgatacctataccaaccgtttaagatctaaaagggaaaatgttaaaacaggagtaaaaccagatgcgtctgatcaagaaccagaaggacttactcttttggtaccagacatccaaaagactgctgagatagtttatgcagccaccaccagtttgcggcaagcaaatcaggaaaaaaaactgggtgaatactccaagaaggcggctatgaaacccaaacctttgtcagtattaaagtcacttgaagaaaaatatgtggctgttatgaagaaattacagtttgatacgtttgaaatggtttctgaagatgaagatgggaaattgggatttaaagtaaattaccactacatgtctcaggtgaaaaatgctaatgatgcgaacagtgctgccagagctcgccgccttgcccaggaaagctgtgacgctttcaacctcactgcctctgtcttca

SEQ ID NO: 3096 - DNA, 419 bp, Homo sapiens
  misc_feature (1)...(419): n = a,t,c or g
ctgtaaaagcatttcctctgaatattttattcagaaaaaaaaacacaaaaagataaggcagaaacaaaaatcccagtcatttgcagtatctgtcggctttcaatttggtcctcttgtttaaacaaagaaaaatagtaaaattaatctatgtaaaacatgccatatatattcaactgctactaaatataaaaagctataaaactgtgtgttcaattttggttactgtattatcacaacacttatattaaaatatgtatacttttaaatttggtttctataaaaaatgggattctaatcccataaaagttatttcctaatattcaataaatgttgcctaagggttttttctatccaaatagcaattttattccggaatttaagggnggccccaaatttccatttaacagggtgagaatggc

SEQ ID NO: 3097 - DNA, 321 bp, Homo sapiens
gtttttcttctcatcttgggaaactagccatttccagacatctcttcgtccatataattgaagaaactaatgtctaataggtaaaaccctgtttctgtaatctcaggtgtaaattcaagccaagcagcctagggtatatataatttctcaaaatgtggttcttgaccaccaatcacctagattcccggtccccaccttatccatttgggaaataaagtccagcagtcagcattcttccaagcttcacttctaatcattcttttaaggcagttcttatgcaaactgaaatttgagaagaactagtacctccagtaaagctct

SEQ ID NO: 3098 - DNA, 2737 bp, Homo sapiens
gagttggggctggcgctccggagttgctgggctcagcgcagctcccattcattaaggaaccagctgcggaggaaggtggccgagcgcccgcgctgcccactcgctcgctcgcgcactcagacgcgcgccacaacagcgcgccccaagctgcgcagctctgcaaaagtttctgctcgggatctggctctcttccccttggactttagaacgatttagggttgacagaggaaagcagaggcgcgcaggaggagcagaaaacaccaccttctgcagttggaggcaggcagccccggctgcactctagccgcctgggtgtgtggctgctgttgcgggacgtcttcgcggggcgggaggctcgcgccgcagccagcgccatgcaaaactacaagtacgacaaagcgatcgtcccggagagcaagaacggcggcagcccggcgctcaacaacaacccgaggaggagcggcagcaagcgggtgctgctcatctgcctcgacctcttctgcctcttcatggcgggcctccccttcctcatcatcgagacaagcaccatcaagccttaccaccgagggttttactgcaatgatgagagcatcaagtacccactgaaaactggtgagacaataaatgacgctgtgctctgtgccgtggggatcgtcattgccatcctcgcgatcatcacgggggaattctaccggatctattacctgaagaagtcgcggtcgacgattcagaacccctacgtggcagcactctataagcaagtgggctgcttcctctttgggctgtgccatcagccagtctttcacagacattgccaaagtgtccatagggcgcctgcgtcctcacttcttgagtgtctgcaaccctgatttcagccagatcaactgctctgaaggctacattcagaactacagatgcagaggtgatgacagcaaagtccaggaagccaggaagtccttcttctctggccatgcctccttctccatgtacactatgctgtatttggtgctatacctgcaggcccgcttcacttggcgagggagcccggcctggctccggcccctccctgcagttcaccttgatcatgatgggccttctacacgggactgtctcgcgtatcagaccacaagcaccatcccagtgatgttctggcaggatttgctcaaggagccctggtggcctgctgcatagttttcttcgtgtctgacctcttcaagactaagacgacgctctccctgcctgcccctgctatccggaaggaaatcctttcacctgtggacattattgacaggaacaatcaccacaacatgatgtaggtgccacccacctcctgagctgtttttgtaaaatgactgctgacagcaagttcttgctgctctccaatctcatcagacagtagaatgtagggaaaaacttttgcccgactgatttttaaaaaggaaaaaaaaaatgttttactatgtggccttccaaaataggtagtgtttgcctatgtggaaacaacagcaaactaacaccaagtgccagagtcctgggatgtgcaattggtttaagtgttcatgttctagtgaacacagcttgttcaggaacaaacactaaaacgatttgagtagaggctgctggtcaccttttgtgacctgaggaatcccaggcctgtgagaaaagcaaaaattcacattgcagcacatgatgccagaaatagcactgaatcaagaaaatagccattgcggagctgccctcttgagtctttctgtccatcccattctattctgtactgtgacttcagttcaggaagttttgttttgtgttttaaataaaaggaaagagcaagtttgctcagtcaagtgatcagatcccgaatctagattcccagttctaaggccttatcacctcccctgcccataggccaacaaccatagttcctcacattagtgattagcagactctttgtggacgagtgaatttcacaaacagcacaatttcagaagaaatcgaggggcacaggccctcaccttttcttcttttgacgcatcatcctgtgatgttgaaatgtcagttgcaggatgctgatgttgtgcacgtcaatcaccgggcacttgcatactcttaggaaacagttcgacttcggttactgccttctcccttgaaatccttgctgcgtgcccaccagggatttcctgtgagggcccgggaatgagcaaggcatggtctgccaccagctgacggaaagcagccttctgtacaacagatggggagggtgaagggggcagaatgaaaatcgaaccaaccttttaggctgttgcaaatcaggaagggagccagagaagcagggcagtctcatgcatgagaagggttacccttcaggatgacagagctgagggtctttgtaggagttgctcttgctgtgtaaagcactattgtcttggggttgagccctagggcagttcttggtaggttctgctgggcagaacatatgggttaaatctcggtagagagttttcctcatcctctatccgtaagtgtccttccatgcaaggtcccactctaggtgatagacaggggaccccttctactgaacctttgaggaaaggaggaaggaagaaatgcgtttagatcttggatgcagacctttcaaagggttaaatgttaaccatatggatcaaccacatgcacatccttactacaggattccgtccttttcatttcaacttataggcaggtatgatttttatatata

SEQ ID NO: 3099 - DNA, 506 bp, Homo sapiens
ggaaaaagagtttataatgctacaaaatgaacaggagataagtcaactgaaaaaagaaattgaaagaacacaacaaaggatgaaagaaatggagagtgttatgaaagagcaagaacagtacattgccactcagtacaaggaggccatagatttggggcaagaattgaggctgacccgggagcaggtgcagaactctcatacagaattggcagaggctcgtcatcagcaagtccaagcacagagagaaatagaaaggctctctagtgaactggaggatatgaagcaactctctaaagagaaagatgctcatggaaaccatttagctgaagaactgggggcttctaaagtacgtgaagctcatttagaagcaagaatgcaagcagaaatcaagaaattgtcagcagaagtagaatctctcaaagaagcttatcatatggagatgatttcacatcaagagaaccatgcaaagtggaagatttctgctgactctcaaaagtcttctgtca

SEQ ID NO: 3100 - DNA, 947 bp, Homo sapiens
cggctagatatggcgtcctctttgcttgcgggcgagcgattggtgcgtgctttgggccccggcggagctggagccagagcggctaccccgaaagctgcgggccgagcttgaggccgcgctggggaagaagcacaagggcggtgatagctccagtggcccccaacgcttggtttctttccgtctcatccgggatctgcaccagcatctgagagaaagggattccaaactatacctccatgagctcctagaaggcagtgaaatctatctcccagaggttgtgaagcctccacggaacccagaactagttgcccggctggagaagattaagatacagctgggccaatgaggaatataaacggattcacccgcaacgtcacttgtcaggatacaagacatggtgggactctcagcgacctggggaaagcaagtgagatcattgaaggctctggtcatcaccatcttcaatttcattgtcacggtggttgctgccttcgtctgcacttaccttggaagccaatatatcttcacagaaatggcctcgcgggtgctagctgcattgatcgtcgcctctgtggtgggtctggccgagctgtatgtcatggtgcgggcaatggaaggcgagctgggagaactgtaactggtgcttcatcatcaagtctagagaagactttgggggcttcaggctccaattggcagtcaccgactcagtcaacccatcagactttttgtattcagctccagttagtcagaagaccagcccaggccagctgctgtttctgtggggagccctaatcttctgtgaatttccaaagggagcattggaggagattgagataacacatctttaaaacagaaagaactggtcttggtctatcagtacctcttcctgaatctggtacccatctgccttctccagttcattctaaacactgctgggactagggttt

SEQ ID NO: 3101 - DNA, 400 bp, Homo sapiens
gggactcccgcaggactcctctgatgcagggcctgaagtctgtacacgtggtccagatttgtccttgtcttttcttcacactgagttctctatatttattgaacatcttgtccttttaagccagagtagtgtaaactgcgtctcggatgtctgtcttttgtctcgaagccacgatggatcgctggtttcctctgcagcgcgagggctccggcgaccagaggattcttcccggaaggcattcctgccgcgctccccggggcacccctcaattgtgtactacgtccttgtttagtgtgtatccgtgcccacgtagatgatgtctgtaacgtagttttgtttgaaatatgagaatatgcggcttaaactttgatctgtaaggagcgggggccgtggcgttttt

SEQ ID NO: 3102 - DNA, 394 bp, Homo sapiens
ggattatcattagttcttataggttttgggttaggcggtgaagttaagagcaatgttttgtgggcagggtggatctcacaaagtacattctcaagggtggggagaattacaaagaaccttcttaagggtggggaagattacaaagtaccttcttaagggtgggggagattacaaagtacattgatcagttagggtggggcaggaacaaatcacaatggtggaatgtcatcagttaaggctatttttacttcttttgtggatcttcagttacttcaggccatctggatgtatacgtgcaagtcacagggggatgccatggccctggcctgggctcagaggcctgacagttatcacctaagattctgacttttaattatatataacaattggatat

SEQ ID NO: 3103 - DNA, 619 bp, Homo sapiens
gggaaaagctgctgacagagtggccagacacaataccactgtctttggctctggggacagttggcatgccaggcctgactgcctactttggcctacttgaaatctgtggtgtgaagggtggagaaacagtgatggttaatgcagcagctggagctgtgggctcagtcgtggggcagattgcaaagctcaagggctgcaaagttgttggagcagtagggtctgatgaaaaggttgcctaccttcaaaagcttggatttgatgtcgtctttaactacaagacggtagagtctttggaagaaaccttgaagaaagcgtctcctgatggttatgattgttatttgtataatgtaggtggagagttttcaaacactgttatcggccagatgaagaaatttggaaggattgccatatgtggagccatctctacatataacagaaccggcccacttcccccaggcccacccccagagattgttatctatcagggcttcgcatggaagcttttgtcgtctaccgctggcaaggagatgcccgccaaaaagctctgaaggacttgctgaaatgggtcttagagggtaaaatccagtacaaggaatatatcattgaaggatttgaaaac

SEQ ID NO: 3104 - DNA, 745 bp, Homo sapiens
gttcgtgaaggcagtgagggcttaccgttattacactgcggccggccagaatccgggtccatccgtccttcccgagccaacccagacacagcggagtttgccatgcccgagaatgtggcaccccggagcggggcgactgccggggctgccggcggccgcgggaaaggcgcctatcaggaccgcgacaagccagcccagatccgcttcagcaacatttccgccgccaaagcggttggctgatgctattagaacaagccttggaccaaaaggaatggataaaatgattcaagatggaaaaggtgatgtaaccattacaaatgatggtgctaccattctgaaacaaatgcaagtattacatccagcagccagaatgctggtggagctgtctaaggctcaagatatagaagcaggagatggcaccacatcagtagtcatcattgctggctccctcttagattcttgtaccaagcttcttcagaaagggattcatccaaccatcatttctgagtcattccagaaggccctggaaaagggcattgaaatcttgactgacatgtctcgacctgtggaactgagtgacagagaaactttgttaaatagtgcaaccacgttcactgaactccaaaggtggtttctcagtattcaagtctgctttctcccaatgagtgtaaatgcagtgatgaaagtgattgacccaggccacagcccaccagtgtagatcttagagatattaaaatagttaaga

SEQ ID NO: 3105 - DNA, 613 bp, Homo sapiens
tgttctctctcccaaatcctttgcactgtcatctcaagaaaccaacagccacataatctatgttggaaacacataaaatatctgtatgattttccccatctgaaactttgatcaaggcctttttattcagcagacttttttcttcttttaacatttgactataatggcaaaaatgacataggtcatataacatctgttttcctggcacaaccagacagaaggttgaattggaataaggaaaaattcattccgtgggcatcctaaacataccacattctattttcaaggtatgtggcaatacagattacttactttttctctataaataaacttgagagacaggcttagaattaatacttccaataaggttatatataaaggacaaaaaaaccaaagtgattcctcaaaaaaactccaaaccagcatttggccaacaaattgtcatgtggtgttacatgctggattataaaagtatactgtgcaaccatctttaatttttcaaattttcttaccatgtatagaggctatatcatagtttatggactgaacaagtaaatttaagtactctgttaatgtgcaaatgactttggaatccaaaagtcagttataaagg

SEQ ID NO: 3106 - DNA, 4979 bp, Homo sapiens
cctgactgcgcggggcgctcgggacctgcgcgcacctcggaccttcaccacccgcccgggccgcggggagcggacgagggccacagccccccacccgccagggagcccaggtgctcggcgtctgaacgtctcaaagggccacagcgacaatgacagctgacaaggagaagaaaaggagtagctcggagaggaggaaggagaagtcccgggatgctgcgcggtgccggcggagcaaggagacggaggtgttctatgagctggcccatgagctgcctctgccccacagtgtgagctcccatctggacaaggcctccatcatgcgactggaaatcagcttcctgcgaacacacaagctcctctcctcagtttgctctgaaaacgagtccgaagccgaagctgaccagcagatggacaacttgtacctgaaagccttggagggtttcattgccgtggtgacccaagatggcgacatgatctttctgtcagaaaacatcagcaagttcatgggacttacacaggtggagctaacaggacatagtatctttgacttcactcatccctgcgaccatgaggagattcgtgagaacctgagtctcaaaaatggctctggttttgggaaaaaaagcaaagacatgtccacagagcgggacttcttcatgaggatgaagtgcacggtcaccaacagaggccgtactgtcaacctcaagtcagccacctggaaggtcttgcactgcacgggccaggtgaaagtctacaacaactgccctcctcacaatagtctgtgtggctacaaggagcccctgctgtcctgcctcatcatcatgtgtgaaccaatccagcacccatcccacatggacatccccctggatagcaagaccttcctgagccgccacagcatggacatgaagttcacctactgtgatgacagaatcacagaactgattggttaccaccctgaggagctgcttggccgctcagcctatgaattctaccatgcgctagactccgagaacatgaccaagagtcaccagaacttgtgcaccaagggtcaggtagtaagtggccagtaccggatgctcgcaaagcatgggggctacgtgtggctggagacccaggggacggtcatctacaaccctcgcaacctgcagccccagtgcatcatgtgtgtcaactacgtcctgagtgagattgagaagaatgacgtggtgttctccatggaccagactgaatccctgttcaagccccacctgatggccatgaacagcatctttgatagcagtggcaagggggctgtgtctgagaagagtaacttcctattcaccaagctaaaggaggagcccgaggagctggcccagctggctcccaccccaggagacgccatcatctctctggatttcgggaatcagaacttcgaggagtcctcagcctatggcaaggccatcctgcccccgagccagccatgggccacggagttgaggagccacagcacccagagcgaggctgggagcctgcctgccttcaccgtgccccaggcagctgccccgggcagcaccacccccagtgccaccagcagcagcagcagctgctccacgcccaatagccctgaagactattacacatctttggataacgacctgaagattgaagtgattgagaagctcttcgccatggacacagaggccaaggaccaatgcagtacccagacggatttcaatgagctggacttggagacactggcaccctatatccccatggacggggaagacttccagctaagccccatctgccccgaggagcggctcttggcggagaacccacagtccaccccccagcactgcttcagtgccatgacaaacatcttccagccactggcccctgtagccccgcacagtcccttcctcctggacaagtttcagcagcagctggagagcaagaagacagagcccgagcaccggcccatgtcctccatcttctttgatgccggaagcaaagcatccctgccaccgtgctgtggccaggccagcacccctctctcttccatggggggcagatccaatacccagtggcccccagatccaccattacattttgggcccacaaagtgggccgtcggggatcagcgcacagagttcttgggagcagcgccgttggggccccctgtctctccaccccatgtctccaccttcaagacaaggtctgcaaagggttttggggctcgaggcccagacgtgctgagtccggccatggtagccctctccaacaagctgaagctgaagcgacagctggagtatgaagagcaagccttccaggacctgagcgggggggacccacctggtggcagcacctcacatttgatgtggaaacggatgaagaacctcaggggtgggagctgccctttgatgccggacaagccactgagcgcaaatgtacccaatgataagttcacccaaaaccccatgaggggcctgggccatcccctgagacatctgccgctgccacagcctccatctgccatcagtcccggggagaacagcaagagcaggttccccccacagtgctacgccacccagtaccaggactacagcctgtcgtcagcccacaaggtgtcaggcatggcaagccggctgctcgggccctcatttgagtcctacctgctgcccgaactgaccagatatgactgtgaggtgaacgtgcccgtgctgggaagctccacgctcctgcaaggagggggacctcctcagagccctggaccagggccacctgagccaggccttctacctgggcagcacctctgccgacgccgtcccaccagcttcactctctccgtctgtttttgcaactaggtatttctaacgccagcacactatttacaagtggacttacctggcagacttgcccaggtcaccaagcagtggcctttttctgagatgctcactttattatccctatttttaaagtacacaattgttttacctgttctgaaatgttcttaaattttgtaggatttttttcctccccaccttcaatgacttctaatttatattatccataggtttctctccctccttctccttctcacacacaactgtccatactaacaagtttggtgcatgtctgttcttctgtagggagaagctttagcttcattttactaaaaagattcctcgttattgttgttgccaaagagaaacaaaaatgattttgctttccaagcttggtttgtggcgtctccctcggcagagcccttctcgtttcttttttaaactaatcaccatattgtaaatttcagggtttttttttttgtttaagctgactctttgctctaattttggaaaaaaagaaatgtgaagggtcaactccaacgtatgtggttatctgtgaaagttgcacagcgtggcttttcctaaactggtgtttttcccccgcatttggtggattttttattattattcaaaaacataactgagttttttaaaagaggagaaaatttatatctgggttaagtgtttatcatatatatgggtactttgtaatatctaaaaacttagaaacggaaatggaatcctgctcacaaaatcactttaagatcttttcgaagctgttaatttttcttagtgttgtggacactgcagacttgtccagtgctcccacggcctgtacggacactgtggaaggcctccctcctgtcggctttttgccatctgtgatatgccataggtgtgacaatccgagcagtggagtcattcagcgggagcactgcgcgctatcccctcacattctctatgtactatgtatgtatgtattattattattgctgccaagagggtctgatggcacgttgtggggtcggggggtggggcggggaagtgctctaacttttcttaaggttttgttgctagcccttcaagtgcactgagctatgtgactcggatggtctttcacacggcacatttggacatttccagaactaccatgagatggtttagacgggaattcatgcaaatgaggggtcaaaaatggtatagtgaccccgtccacgtcctccaagctcacgaccttgggagccccgtggagctggactgaggaggaggctgcacagcggggagagcagctggtccagaccagccctgcagcccccactcagccggcagccagatggccccgcaaggcctccagggatggcccctagccacaggccctggctgaggtctctgggtcggtcagtgacatgtaggtaggaagcactgaaaatagtgttcccagagcactttgcaactccctgggtaagagggacgacacctctggtttttcaataccaattacatggaacttttctgtaatgggtacaatgaagaagtttctaaaaacacacacaaagcacattgggccaactatttagtaagcccggatagacttattgccaaaaacaaaaaatagctttcaaaagaaatttaagttctatgagaaattccttagtcatggtgttgcgtaaatcatattttaggctgcacgggcattaccccacacagggtggcagaacttgaagggttactgacgtgtaaatgctggtatttgatttcctgtgtgtgttgccctggcattaagggcattttacccttgcagttttactaaaacactgaaaaatattccaagcttcatattaaccctacctgtcaacgtaacgatttcatgaacgttattatattgtcgaattcctactgacaacattataactgtatgggagcttaactttataaggaaatgtattttgacactggtatcttattaaagtattctgatcctaaaaaatattccaagcttcatattaaccctacctgtccacgtaccgatttcatgaaccttatcatcttgtcgaattcctcctgacaacattataactgtatggcagcttcacttcataaggaactctacttcgacactggtatatcactacagcatttcgatcataacacaacaac

SEQ ID NO: 3107 - DNA, 355 bp, Homo sapiens
gcaattttacacgaggaaattggggtacagaagagtggtcccctgtgcccatggtcacaagggccataatagacagaggcagggtttcagcccaggcagcttgacttggaacttggggagccactcttgccaaacttggaggtccctactgtctcccgtaacattgtattttcagtacagcagcttataggttcaccagaggccaacttagaaatctgtgattactttgcaacatcttgttaatggtattgcatgatgtccctcatagagggccctcatggtgggatttcttcccagatccagggagtaagggcactggggaagggcagggaaaggcaaagggtccaggccagtg

SEQ ID NO: 3108 - DNA, 2236 bp, Homo sapiens
  misc_feature (1)...(2236): n = a,t,c or g
attcgcggccgctgcaagaaccagcgcaagagggaagcggagttatagctaccccggccgcggagccgctacanctgcactacccccgcccccttctttcctccagacgccgaagtcgcgggcgctcatggcgggcctggaggtactgttcgcatcggcagcgccggccatcacctgcaggcaggacgcgctcgtctgcttcttgcattgggaagtggtgacacacggttactgcggcttgggtgtcggtgaccagccgggtcccaatgataagaagtcagaactgctgccagctgggtggaacaacaataaagacctgtatgtcctccggtatgagtataaggatgggtccagaaagctccttgtgaaagccatcaccgtggagagcagcatgatcctcaatgtgctggaatatggctcacagcaagtggcagacttgaccctgaacttggatgattatattgatgcagaacacctgggtgacttccacaggacctacaagaacagtgaggagcttcggtctcgtattgtgtctggaatcatcacacctatccatgagcagtgggaaaaggctaatgtaagcagtccccaccgggagttcccccctgctaccgccagagaggtggacccactccggattcctccacaccacccacacaccagtcggcagcctccctggtgtgatcccctgggcccgtttgttgtcgggggagaagacttagacccttttgggcctcggagaggtggcatgattgtgggatcccctgagatcttggcttcccaagagcacttattgacccttcctcaggcctcccgaaccgacttcctccaggcgctgtgccccccagggagctcgctttgacccctttggacccattgggaccagcccacccggacctaacccagaccatctccccccgccgggctacgatgacatgtacctgtgaaggcctcaagaatgtaacatcccaggcttccctccattctcctggagctggccaccgctgtccccatcagcaaccatgttgcttgcaggctgggggcaagggattctgctcatgtgtgtggagaccggctgggatagcctccccaccccttatcagagccaagacacctgctgcagctctccacctagctgcagatagctcccaaagagaaatcagtgtgtctctttcaccatcagctcctcccctttcaccaccagctcctctccactttcccaagggagactccggcaaccttcagcaacatatatcctcgaccagatgcagtgctataagaacagaacgcattttggatgttattattaagaaccaaatgtcaatacagaattcatgttgccggtttcccacttttctttttacattaatgcatagctgcttccatttatgagactttagagtttgagtttctgtagggctgaatgactctttttcctgcccagggcccattcttgcttctcaggcaccttccgtttattaattgccattgctcctgacatcactaagatgggtccccttctggctgcatgaatggaaatgagtgactggaaatcccataggccacaagaatgactttcacaagggcaggaacattgtggaaagactgcatcattctgatgaggcaaaatcctccagctattcctgtctgggccagttttgtaggtccatctgtgcatgggcagcagtagtcaaaaagccaaggaaaaaacagagcagacctgaaggctaatcttatttttgccactaacttagtgaatgaccctaagcaagttccttctcctcttagggccttgtgccaagcctatgaaattggaggtggctttcctgctctaaagcattttgatgtctcattctgtgtttggtaacccctataaactggggcagaggaaaagaatgatggttcaaggccatacttcccttgaaccttgtgtggttcttgcctaactctgtggtttttggaccccatggggcccagacagagcacaggagcatgggctgcctctgagtgtggtgttgaacttcgggaggagcagggagccctgcaccttgtgtcctggcccacctgacctttggtgttctccggatccttttcagcccgaggcctgacagacgcgggcagtgatgagccctgttctggagtggaaagagcacgatagagcnccaggctaagaggcacgagatcaaggcggtagtcactttcgctctgcagctagcatttcaaccatatgtcacta

SEQ ID NO: 3109 - DNA, 495 bp, Homo sapiens
  misc_feature (1)...(495): n = a,t,c or g
acccacctggattgggcccaggacagcagctgctttgtcaccaactccggggactatgagattctgtactgggacccggctacctgtaagcagatcaccagtgcggatgctgtgaggaacatggaatgggccacagctacttgtgtcctagggtttggggtgtttgggatctggtctgagggggcggacggcactgatatcaacgctgtggcccgctctcatgatgggaagttgctggcttcagctgatgactttggcaaagttcacctgtttagctacccctggctgtcagccccctctgctatagacatactctgggtatatagcagagggggttatgggggcgggagggtagactgacatacagaagtctctatttatccgggtgggaagagggagtcacatcgctttggggatccattggtgtttggtttggggtgttttttaagttttttcttttatatcatccagaaataaagacacgttntntaaaaa

SEQ ID NO: 3110 - DNA, 691 bp, Homo sapiens
gaccatccaaggacgcactctgcgattgagtggaggcagaggaagccactcatgccagcagcagttgagtttcagaagcagccatagcgcttttcagtacagtacaatagtagccagcgtgaggcaggacagtgctgcgccttagccggccttggctctcatctccatgtggctcttgggtgccatgtgtcctactccagagaggagggggccggtcacttgagaagacagcctttatattctgtatgtggcagtgacattggtagccacacctacccagtgtctactaaccacagtgcagatagcccttgggtagaccccaggaagtgttgaagacagacactgctgttgccagacaacactagcagaacgatgctggatttgacaacagtgtttgctaggacggcccagagctcatcactgcagttttattagagtgcttctttatctttaatgcagtatctttgaggcctgtaacatcctagatagttgccatcaaacaaggaccgtctcgcattgaaaacagatgtaagaatttctctttcaggcccagaatctgacagtgctttggcttgggtcatgagcagcggggagttgggaagagatttttttttttagagttttacatattggcaggttgtatttttttaatgttttaataaaagtttgacatgacattaattcaaaaaaa

SEQ ID NO: 3111 - DNA, 483 bp, Homo sapiens
  misc_feature (1)...(483): n = a,t,c or g
gtgnttgaancctttgaaagccncggactgacncnaatnntnnnnnnnnnnnnnnnnnnnnnnnnnnnnnnnnnnnnnnnnnnnggcacgagcatggtgagagggcaagagcatgtcagctcaggtctctcttcctcctcttataaagccaccagtcccatcatgnnnnnnnnnnnnnnnnnnnnnnnnnnnnnnnnnnnnnnnnnnnnnnnnnnnnnnnnnnnnnnnnnntaacatatgaatttggggactaagtttccaacacatgaaatttgagggacacattcaaaccagaataccatataaatgtacttatgtttaattgctttgttgctaggaactttggattgcgacaaacacagattttaaaactactgctttatacacttaaacatacaggttcagaatctttttattttgacatgttaattattcaaaaaatattgcagattaaaattcctctgcaactgtagttattaccaa

SEQ ID NO: 3112 - DNA, 540 bp, Homo sapiens
ggctgcaaatcgtttttatgggaacctgcagggtgacccggcaccttgcctaactgggcttagagtctaagggcttgggggctgcatctgatacaggttggagtttggggtgggagagtcctaggaagggggccccaagtagaaatgagagaaatcaggaagggatatcgggggcgtccacgggggtgctccgactggccttgcacccgtaccccagctctgcaccccccgtcacgagcagttcaatgcccgtgcagaagttggcttcggaggccaggaacactgccgcagccccgacctcagcgggctggcccatgcggcccagtggctgggccagcatgccctctcggattgtggccctagggtctggcattaaggctgccagctcctcccacagcggggtccagatgtttcctggggagatacagttgactcggacaccatatggactttcatccagggccaaagctttggtcatggctgttactgcccccttggtggccacatagggaactgcctgggcctggccgctcgtgccgc

SEQ ID NO: 3113 - DNA, 3080 bp, Homo sapiens
gtcatgcctcaggggtcttgtcatttgtcagctgttccctgtcggtcatgtcctcctgaggaggtctggctctgtcaaagaatccacacttccataaagctaaggttaaaatggcgagaaccaacaatccaagaagtattgctagtattattacccataatgggattgagaaggaaacattcggagttgcccaaataactgatgtcttaattgctatgcttccttctgggagttttgctggctgatctgtataaggcatcttcttaacttcaaaggacaccagggatgcaagagcatagggatcattttttctctggaggaaggtgtgggcccataatcgtgacctgactttcaggactgcgctttctcctccttcgagtcgtcccactgcacaggagatttgtaaacactcgatatttgtacaattcagtatttttgcagggctctgtctgtggaattcgaccacatgtacatccctcttcctgacaagatgaggaatagtagagtttcgcaaaaaggcgctgagctcaggggtgtcctctggggaggcagcaggctttatatcctgtggattgatattaggatttggttggcactgcagaggtcccagagtttgaatatggaaaatatagagaagaaattcatcccgggcagagaaaggccagcccacctccaggatggtgtcactgatggtacttggtccaatattgtgcagctcataaatatgttccaccaatggtccaacctcctcctctttgtggggctcctcttctggttcccagttatgaatgggcagaacaatctgcggagggtgtgacactcctcttatttccacctgcgctacagcagtgatgttgatttgcaggctcacaaaattgctgtctggattgtccttgttggaacttctgatttggagatcgaagttaatgctcatgtttgttttctcaagacgtggaactgcaaatcggaggcccagggaataatttgttccagacaccatagggttcccaaggtcacacaccaccatcctggttacattttccatcttgtactcacagctcagtggtcgaaatcccttgttgttgcgttcgattccaacataatctgcctcttctggtatcattacaaagagttcagcttcatatgctccttccccttcatttcttgcatttattatgagcataaggtgattttcatctccaatgattacctgatgcttatctggtctagccgacagcttcaagtcaggaacacacagattgtcttctccacagtccaccagaatgtgagcctgttcactaacaatgttttctctgtagtagttcaatattggtttcacttccaggccttctttaaaggtggattcgtccaaactgtaattcaaactaatgttgattggagataatttatctcggaattcagtttcatctcgaaggtaaacgatgaaatcctggcactggtgggatttctgcctttttatcacaagagggaagacgcgatgagcctgatggttatcaaggaagagcgtccgtttaatagctcctttctgtttcagggaatctaattgcacctctgccatcaagactattgtgtttgcaatgctctggcctgtgacagatgcacatactcttaaagaaaagcaggcagcagatgtcatagagtctggaacctggcaagttttattttcaagattgataatcattgggtgcagcagaagctgggcatctacagtcacaaccggtcttgctctgtaaacagcgacttttcctgttccaaatgcacccacaatcaaatctgggtaatcattcttgtctatgtctgaatctcctcttaaagtaaagccaaatccggaagggacagcatgtgaggcccacactccttgcagaacttgggaaggcttggtgtttaagccatctttgttcccattataaatgagcactttgcctctttgatccttgcctgcaaaaggcactccgatggcaatgtcattgtagccatcttggttcaggtctcctaagtgtgccatagcactaccgaatctcccaaacgtctcggtgccagtgaggatctgggggtctctgaagaggagagagctcacttgcaaatacaggtagatttgccctacttctctggggttgctctcaaattcacgttccataaagagaggtgccccaaccaggacatcatccagtccatcactgttaacatctgatacgacaacggtatatccaaaataagatgccatctgttctcccgtgaaattctgaataaacgtcatatcgtaggagttaatgatggaaacatatccaaaattctgtgctcctcttggaattccagcaaccaattcttgctgagaatccccagtaaactccccagcagcaactgagtatccaaggtaactgtcatcataggaagctggagccacttccgtctgcttttctcctgccagtttcctgaggatatccttgaatgagtaatttgcaatgatatctgcaacactggcagtgatcacttgtccttgccagtagaaactcccaggtcctcccacaataaggtctccattcttataaaaatccagactaaatcctgcttggcagtaaccctggccttccggatcagcattgctgtttccgcaaggagagaactcggcataagcgctgaagttctgaattgctacatagcaggtgccaactggtcctttttctggtgtcggtttaagagttctccagtgatataaaggagcacaggcccacaacttttcctttgtgagctttcactgttgctccaaaccactgattggatttgaactcgataggttctttggttccattaactctgatctttctgttgttggtggtgtcaaacggtatctgcctgcactgcgcagacccctccgcgggccaaggacagtaatagacggctcccccttccacgatatcgggctggctggtgttggctttgggcgcccccaccaagacactcgctgtgcgggcgtcgggtatgtggaagtccacggcgtagccgaagtagctgcccttggggccgctgtacactgcgagcttttccacgtccaggttgaa

SEQ ID NO: 3114 - DNA, 466 bp, Homo sapiens
  misc_feature (1)...(466): n = a,t,c or g
gtgaggcgtttactgatgcttcctggtccggtggcctcggtcccggtaagccaggcatgaagatcacaaggcagaaacatgccaagaagcatcttggcttcttccgcaacaacttcggagtccgcgagccgtaccagatcctgctggacggcaccttctgtcaggcggcgctgcggggccgcatccagctgcgggagcagctgctcccgctacctcatgggggagacgcagctgtgcaccacaagatgtgtgttaaaagagctagaaacattgggaaaggacttatatggggcaaaactgattgcacaaaaatgccaagttcgaaattgtcctcatttcaagaatgcagtgagtggatcagaatgtctgctttccatggttgaagagggaaatcctcatcattattttgtggcaacacaggatcagaatttgtctgtgaaaagtaaaanagaagcctggaagttcc

SEQ ID NO: 3115 - DNA, 3555 bp, Homo sapiens
gaattccgcgccagggccgaccgttcttcctgtactacgcttcccaccacactcactaccctcagttcagtggacaaagcttcaccaagcgctcaggccgtgggccatttggggactccttgatggagctggatggagctgtaggggccttgatgacaactgtgggggacctcggtctgctggaagagacactagtcatcttcactgcagataacggtcctgagttgatgcgcatgtccaatggcggctgctctggcctcttgagatgtggaaaaggaacaacttttgaaggtggcgtccgagagcctgccttggtctactggccaggtcacattactcctggtgtaacccatgagctggccagctctctggacctgctgcccaccctggcagccctgaccggggtccgctgcccaacgtcaccttggatggtgttgacatcagccccttgctgctaggcacaggcaagagcccacggaagtctgtcttcttctacccgccctacccagacgagatccatggggtctttgctgttcggaatgggaaatacaaggctcatttcttcacccagggctccgcccacagtgacaccacttcagatcctgcctgtcatgctgccaaccgtctgacggctcatgagcccccactgctctacgacttatctcaggaccctggggagaactacaatgttttggaaaaccacagagggaagagatgggaaaatggctgtccaggagttttcggaattcgggttactgctgcagcttttggggtcgcccggccgccgctattacagtcttcccccgcatcagaaggttccattgccttctctttcccccacaatgcaggcaggcaccatagcccgttgggaaaaaaaagagggggacaaaatcaatgaaggtgacctaattgcagaggttgaaactgataaagccactgttggatttgagagcctggaggagtgttatatggcaaagatacttgttgctgaaggtaccagggatgttcccatcggagcgatcatctgtatcacagttggcaagcctgaggatattgaggcctttaaaaattatacactggattcctcagcagcacctaccccacaagcggccccagcaccaacccctgctgccactgcttcgccacctacaccttctgctcaggctcctggtagctcatatccccctcacatgcaggtacttcttcctgccctctctcccaccatgaccatgggcacagttcagagatgggaaaaaaaagtgggtgagaagctaagtgaaggagacttactggcagagatagaaactgacaaagccactataggttttgaagtacaggaagaaggttatctggcaaaaatcctggtccctgaaggcacaagagatgtccctctaggaaccccactctgtatcattgtagaaaaagaggcagatatatcagcatttgctgactataggccaaccgaagtaacagatttaaaaccacaagtgccaccacctaccccacccccggtggccgctgttcctccaactccccagcctttagctcctacaccttcgacaccctgcccagctactcctgctggaccaaagggaagggtgtttgttgaccctcttgcaaagaagttggcagtagagaaagggattgatcttacacaagtaaaagggacaggaccagatggtagaatcaccaagaaggatatcgactcttttgtgcctagtaaagttgctcctgctccggcagctgttgtgcctcccacaggtcctggaatggcaccagttcctacaggtgtcttcacagatatcccaatcagcaacattcgtcgggttattgcacagcgattaatgcaatcaaagcaaaccatacctcattattaccttctatcgtgtaaatatggagaagttttgttggtacggaaagaacttaataagatattagaagggagaagcaaaatttctgtcaatgacttcatcataaaagcttcagctttggcatgtttaaaagttcccgaagcaaattcttcttggatggacacagttataagacaaaatcatgttgttgatgtcagtgttgcggtcagtactcctgcaggactcatcacacctattgtgtttaatgcacatataaaaggagtggaaaccattgctaatgatgttgtttctttagcaaccaaagcaagagagggtaaactacagccacatgaattccagggtggcacttttacgatctccaatttaggaatgtttggaattaagaatttctctgctattattaacccacctcaagcatgtattttggcaattgggtgcttcagaggataaactggtccctgcagataatgaaaaagggtttgatgtggctagcatgatgtctgttacactcagttgtgatcaccgggtggtggatggagcagttggagcccagtggcttgctgagtttagaaagtaccttgaaaaacctatcactatgttgttgtaactaactcaagaatttctaaactctcccaggtcacactgattcattcttaacaagatatttatatgttattaaacaggtggttctttttattttaaccagttatttttattattgagtctgtccagataagttatttataatgggcattactgaatttttaaaatgccgattacacccaaatattgtgcacatttaataatcagacaccagatttttagctctgtactcctaattaagggacatgtatgtggccttgcctagccctttggtgataagtacttcctctaggaaatgtacgataggtagaattgtggttccctaaagacaagtacataaaggtgaccctgatgaaaccttgaagttctgaaatttaactgcctaaaatgttctccttagatgtgagagaaagagaaatcaggaaaattaattctcttgggggaagggcttgaattgaagctttactttagaatttagccctggtttgaaattttccattacatgatcttggtttatcatcgatgggaagggtagaaaacttcaaggaaaataagtgaaattttaaaagtcagcattttcttagacctcttcagctgattgtttatttttctatgaattcctacacatggttattcccccctacttgagataatctaaatataaaccagctacttgatgtaactgagaatttgtgtggatatttatttaaacaaatgtgtaattttgagtacagaattcaacagttacctccaaaaaagaaacattgttaatataatttaacagaagttgtgaaactaaaattttctaagattaactggtagttcattgtaaatgaacataatgaacagaatttatgactccactgtggaaaatgctatcaaataactaaggaatatatatggaataagtgtacatatgtaaaatattgttactagagttagatatgtgccaaagtccatttatcccaaatcctgtctgaaaaggaggggtaccattggtaaacattttggagtgcttaaaaatgccaaaaacaaaatggtaatttctactttgataaagtaaaaaagttaaatgtgtgta

SEQ ID NO: 3116 - DNA, 1388 bp, Homo sapiens
tttttttttttaatttgaattcactttaatattttttaaggtagcatatggcactttggggacaggaaaaaaaagtcataaagtccacaaacccatgaaggtgtcagctcacaaagctggaaatgactgcattatcgattctgctgtcacagtaaatgttccataacaaaggcatgttgaatttggtctcattcattagagtataggacttatgtttggtcacatctttatcatttaagaaacatttaaaaatggtattcatttttatttcaacatgtcaactgtgcatttccaaaacagcaggcttttcaaaggaataaatcagaactgtaaacacaagatacagtacaagtttttgacttcctacagtcagtttcacaaatccacatactgtacattcataggtgaggttaagcctgtcacccatttctttatttctataattacacaagcataataaatacatctgcttttaaaggtcacttaaaatgagtcataatttacagtacagtacgtttcagttcaagtgcaaaaaataactatttgctgaattctatttctttcagttattttatttttaagctgtgttttattgtgaagcgagacatccaagtgtagaatttcttatcccaaatgcagtattgggcagaactatggtgtcatggagaagccctcactttacaattgatcctgtctaatcagggtcagagggtaaggtgagttgctcatttcgactgttcttttctttcctctctctcctgtgctcatccacagctattataaattatataattcacctttattcagctaaaacagttttcccttttccacactcccccccaggtttcctgttaacctctgctttgatttttagtggcaaggctttagcgtgcgatccacccagccattgttctggctgcagttgtaacgtttggcagttgcatacattacattgtccagtgtctgactgtgtcttcatgagaacgaatatactgagattttctttctttagtcattggaaagtatagttgctacttattgccatccttcccattcatggtttcctatttaccaccttttcctcaccaaaaacaaaacaaaactgacccaatatgtaatttctaaaaattgtatccttcccccaggcacttaaatcttatactgtgatttgtaactagtactgcttatttaaggaactcttaggaattcagtgatttttgtgtgtttcattccctcagctaattagagcctgaattactataagatagtaaatagcgagagaggctatttacagtatcaatatatttagtaaactcttgtcctatcaaaacacaggatactgagttggttggttgatttgaaataatcgcttgtttctgttttttttc

SEQ ID NO: 3117 - DNA, 561 bp, Homo sapiens
ggaagctcaaggactctctctttgatctggatgggcccaaagtggcatctcctttgtcccccacatccctgacacatacctcccggccccctgctgctcttacccccgtgcccctttcccagggggacctctcccatcctcctcgaaagaaggaccgaaagaaccgaaagttggggccaggagctggggctggctttggggtgcttcggaggcctcggccaactcctggggatggggaaaagagatctcgaatcaagaagagcaagaagcggaagttaaaaaaggcagaacggggggatagactcccacctcctgggcctccccagggcaccccccagtgatacagactctgaagaggaggaggaagaggaggaagaggaagaagaagaagagatggcaacagtggtagggggtgaagccccagtccctgtgctgccaacaccccctgaggctcctaggccccctgccacagtgcaccctgaaggagtccctcctgctgacagtgaaagcaaggaggtgggcagcactgaatcaagccaagatggagatgccagctccagt

SEQ ID NO: 3118 - DNA, 372 bp, Homo sapiens
gctggtctcaaactcctggggctcaagcagtccttccaccttgggcctcccagaggcactggggtttacagggtgtgagccactgtgcagcctccttttatctaattgtccccacagcagacttgtctgggtcttgggctattttccggttgttaaaggtgttttcagggatgggagggaatcagttccctgaggatagttattaagttcttgcctgctaggaaaggggacagtaagtggggttgatatcattctagacttgttaagaaattgttcagaattttgattgtttttcatagcagcttgattaaaatacagattttaataatttccttactacttttataggtagtgctttcaaaaaaaaccagc

SEQ ID NO: 3119 - DNA, 515 bp, Homo sapiens
gtttggagctcaaaaatattacaatgagaaaataaaaagctattaattagcaggagacttaatcacatgaagaatttcaattagatatttcttctacgtagtatagttataactttgcattccattgttttccttctctatagtccattgtatttctgtggggtttttttttttcaggttttgagttcaagaacgagattaaaaaagaaaatctaaaatgggatgattcagaggaagtagaaataaacaaggctttacagagaaagtccagaggagtttattggcactctgagctacaaaaaggcttgggaggagtgagccaacatcaaggaaggccaatgtaggaaattctccaggggagagtgaggagaaaaccccatcccaggagaagatgagtcaccagagtttttgtgccagggacaaagcctgttacacatatcctctgtgggaaaaactgctcttcagagtgttgccacttttcccccacaagcccagcgcttcaaactgggaaaaat

SEQ ID NO: 3120 - DNA, 2360 bp, Homo sapiens
cagaatttacccctgacgcggcggcggccgacgggaagctgtgtgtgcttaggtcgtggtggccccggtggtggtgggctccgggcgggctcgcgtcatcctgcccccgctgcgatgcatccgcggcgcccggacggatttgatggcttgggctaccggggtggtgcccgggacgagcagggctttggcggcgccttccctgcaaggtccttcagcaccgggtcggacctgggccactgggtgacgactcccccagatatccccggcagccgcaacctgcactggggcgagaagagcccgccctacggcgtgcccaccacctccaccccgtacgaaggccccacggaggaacccttttccagtggcggcggcggcagtgtgcaggggcagagcagttgaacagtgaatagatttgctggatttggtattggacttgcaagtctctttacagaaaatgtattggcacatccttgcattgttctacgccgccaatgtcaggttaattaccatgctcagcattaccatctcactccatttacagtcatcaatattatgtacagtttcaacaaaactcagggacctagagccctgtggaaaggaatgggaagtacatttattgtccagggagtcacacttggagcagaaggcataattagtgaatttacacctttgccaagggaggttttacataaatggagtcctaaacaaataggagaacaccttctactgaaatccctaacttacgtggtggcaatgccctttttattcagcaagtctgattgaaacagtgcagagtgagataattcgagataatactggcattttggagtgtgttaaagaaggaattggaagagtgataggcatgggagtgcctcatagcaaacgacttcttccgcttctttccttgatcttccctacggtgcttcatggagttcttcattacatcatcagctcagttattcagaagtttgtcctactaattctaaagagaaagacttacaatagccacctagctgagagcactagccctgtgcagagtatgttggatgcttattttccagaacttattgctaactttgctgccagtctttgttctgacgttatactttacccattggaaacagttttgcaccgccttcacattcaaggaacacgcacaataattgacaatacagaccttggctatgaagtgcttccaattaatacacaatatgagggaatgagagactgtatcaataccataaggcaggaggaaggagtgtttggtttttataaagggtttggtgctgttataatacagtacacactgcatgcagctgttttacagattaccaaaattatttactctacacttcttcaataataacatttgagatttaggttccttcactgagtagtctggaagatataatctggataatttgctatgaagttatgagggatacaagtgaaatactggggaagaaaatggattggaaagtaaaattggtactaaagcccatactgattatcttgactttgttttttaaggcataggtatatattttggatcaaaatccttccaaatttgaaaactcaataaaaataacacttattaaattctagttagtgtagcactcatgctgaagtaaacatgatcgtaggcagaagcaaaattttattataaaatctaaaacaaaactttatagagttgaatctattccatctgacttcaatatttgccaaacgtttattttacctcctagattgatgttggtatagtatccttaatacagtgtagtatattaatgtccttaatacaatcaggaggtttttacctttaagcaaataaattatgtcattattgaaaaagacttaagggatgattagacttggcaatctgtaagcaggagtataaatgttttaaattgcattgtccctatgtaactatcttaatggctatatatatgtattttataaagccatttatgtatacacatgtaacttggaatttccttcatccctacacattttctacacttacatcaccttattgcataaaacaaagtcacgcgctttctgcttgaacatcaaaatatcaaaaaccaaggtacccaaaagatacaagtcagagacaacatccttgtccatatccaaacccagtgtttcagtgctagcaacttaatttctcatacatttatagagtttggtttgctttgctagttgtgtgaatcattgggctgtttttagagccactgttaagagagaatataaaataatcatgacaattactactgtttccacatttacaaattgtgtacttaaatgaacctcatttcccttttatttctgaatggcttgtctgagaggaaacaaaatta

SEQ ID NO: 3121 - DNA, 875 bp, Homo sapiens
gtctgtgagtttagtctcctcacagtgaatcagttgagaaggatggccgagggcccagtggaagagaaatgccttgtgattagaaaagagcgcatcgtggatatgttcatggcatagacatgagttgttttcctttgtatctgaacaatgggaaatgttggcgcaagtctttctttgcagagtctttctatgacagccaagagtctgtttgccattcaagaccaaaatgaggccatgtgcctgctacctgccaaggcttctgacgtggcagtgccagggagcagagtggcatcccaccacagaggactctgaccaaagcaaaagcttcgccgggaggggaggttactttccacccagcactgggagacagagccaggtattagaagagagaagactgagagcctctaggtttgcaggaatgcacttggctgttcttaggtttttgtgtatctttaactgttactctaatttattgatgcttaacttggggcctgtgtacttcttgtagtttggaggcccatgaatagtctttatcgaccctggggaaattgtacagaaaattgtgggtgagtcattcttgggagggaaccccagctcctcacaaaggttcctctctcaccctgccaaggataaggaccattgctctaaattacatattattctgaatgtaatgagagcattgatactagttgaactatttcatcttgtagaacaatttacagttgtctagctcatgtgctgccctgtactgcgacatattcacttctgttggaggcctgcaggtgaccatggcttgcctcttgatgaccatgctcatgtgaaagcttggtgcccaaaagaaaaataaaaagcatctctaaagaatgagaattgtc

SEQ ID NO: 3122 - DNA, 468 bp, Homo sapiens
gctggaagggcacatgagggaatgttctggggaatgagaatgtcctggaaataccctctatcttgattctgtggttacacaggtgtctacatttgtcaaaactcctcagccctcacttgtgcatttcactgtaatggaaattacaccttattaagaaaaaaaaatggaaaactgaaagataggtctggaggggctcatgtttcaaggaaaacagaaactgattcctttgtagtgctgaacatactgacgactgggaaagaagacacaactgaagatgcctctgcaaaatcagcccggtcccatccttggtccctgcttacgtttgagtttgagacccacaggttaaggccttgaacgacatcttcaaagatctatgcagaactacgacatccaacatagaagcgccatgagccacatgtggctatttcaatcaaattaattaaaaataaagtgaaaaattcaaccctc

SEQ ID NO: 3123 - DNA, 693 bp, Homo sapiens
tttttttttttaaaaaagctgtaggtttattaagcagagtgacagtacaaagctttcacagcgtggaaggggtcccgagcggggtagccagtgttagatttttttatcaccttttaaactctctaaggcaggaaatatgtgtggtgggaagatgttaccagagggagaaacaaagacaattaacatgtctcagatcttgaggaaaactggaattgtaacttaagttttctctacttataaccttgcagcgggatggcaaaggagacaggatctcacgggattttacaaattgtgtttacaaggaattggaattgggaccatagataaggtctgctggtcacagaaaagtgggcttttaacattccttttagtttcaggggagggggaagggagagagggagagaggacacagggaagcttacaacaaaattttcgctgtttatagctttcttggggaagaaaacacaggcgcaaattctgatgttaggaatgttttaagcacatatcttcagtactcttcatccaggaccgaagtaagtcctgatgcaggaaatgagtgtttcacagctttctgaacccctactcgacccaggaagcccagctggaccctcctttcatgagcaggttggtcagcccctgcactgccccttccagcctctgtgcatctcttggggacggggcaagtgctcaggc

SEQ ID NO: 3124 - DNA, 533 bp, Homo sapiens
ggcgaggcggaggcggcaaaacgggcggtcgagcagaacgtgtagccgcgtcccctccagtccgctccgggcagctgctgatgcaaggaatcccctgggctcccgtccactccactgctgaccagcccattcgcctgtgctgagtcttcctgcaggcctttccttgcctctgtgggaccctgtggggtccattccggctggagaagaaaagcctctcatgctaacgttgcagaccccagagggtgagagaaagggggacttcattcagtcttgaaacctgtgtgctcagcccccaaggcatcaggaattcttcctgcccagagaatcaaggcagcttcatttttttcgtaccttggtcagtggttctcaacctttttgttatcaaggcactttttgttgtacatatgtcctgttgccccctgcatttttatctgccaaactgtactgatggagtaaccattgacttttcccttcctaaattaaggaagacgtctatgatggagtgtacaataaaatcagtgtcccaatgaaaa

SEQ ID NO: 3125 - DNA, 608 bp, Homo sapiens
  misc_feature (1)...(608): n = a,t,c or g
tgcctcgctgccctttgtaatactccttatcatatcatgaggagctattttccgttctccacaaacttggtggtggatggaagaggatatcaagctcaccttgagtgggattgaggtaggaggcggggctcagacaccagaccagattgaggacaaactaaagcaaggtcagggccaaagcagctttccaacagataggaccaccagggtgccacgtcagtttaccgttgccatgtcaatacccagggagttaccgcccctttccgtggcagtaacccaataattaccaccccttccctagaaatttctgcataaaccgccccttaatctgtatgtgtttaanngtttaaagtagatataaatgactgcaaaactgccctgagctgctagtctctgccagagcctgctgtgcaggagtaatcagagttgtaacagggctggagctataacactgccccttcaataaagctgttttcttctacctctggcttgcccttgaattctttccgtggcaaagccaagaacctcatgggctaagtctcactttggggctcacttgtccaacattacttatgccaggaccacactgttctgattactgtagtttg

SEQ ID NO: 3126 - DNA, 562 bp, Homo sapiens
gaaaaaaaaatttttcatttgaggtattcttccagtagaaggttagtaagtttttaatgaaaccattaaaaataacacttcccagaaaatagatgacatcagtgccccttgctactttctcagtcctcactattgctttgagggcccaggtactgaaactggttgtcttgagttttgtgtcagctttttctccagtccattatccccctcccttgcttctgaagcagtctaggttaaactagccaggcaggtagttgtggactggtgattttcaaaagccccactttagagatcaggccacagctttttatatcgcacaggacacatcagcctgagctgctgcctcatgcctgtttccccaggaacctcactcctttggtagaaccttgggattttagaaattgtggcttttccataactcatttactccaacagttgaagttacacacattgctcccaaatttggaaatagaccacagtaccttacctttcattccccatctggcctttaccttctttgcttcagtggttgaaaacagttgccatattcaaagtatagtag

SEQ ID NO: 3127 - DNA, 908 bp, Homo sapiens
tttttttttttttttaaccttagtttaggtaaatttaatgactgtaaaagctgttcacatagcagctttaaagagacacgttttccactgacataaagttgcttcgccccttgcagcttatctccaccttcatgacctgtttcctcagtggcaggcaatgtctccccttcctgttggggaggattgcccaagtcagctctgaggccatcctctcaggtcagcaatatgcagaagagtccctcagagtggtcctgcagagaacatgtcccctaagtgtctgagaactggctgaggtgatcttcaccagcacatagtccccaggctgggctctgaccctgagcccagggttattgacatcctccatctctgcatcagggaagatcaccttaaggtttccatcattcctgccacacaggtcagtggcagagcgtttactgagcccttccactagcaccaactgggtacagcccacagaggtctgattggcttttgttgcttcttctcggaagatagtgatgagttcctccaaacgccttaattttacctcttccgggacatcatccttcagcctatgatatgcccgtgtcttctgtctcatgctgtaggcaaagaggaagcccatgttgtactgaacttcccggagcaaagagactgtctggacgtgatcttcctccgtctcaccacaaaagccagcaatgaaatcgctgctgaggctcacacctggaatagattctctaatatggtgaactaactccacataagcttctcttgaatatcccctccgcatggcctccaacacacggctgcttccactctgggctggcaggtggatctgtttacagatgttatctctctcatgaatcagctgcagaacctcatcacgaaaatccttggggtggggtgaggta

SEQ ID NO: 3128 - DNA, 726 bp, Homo sapiens
tatttcggcacgagaggaaggaagaggccaacatggtcagttttatatgaagagaagattttgttccaaaggaaatgatggggaaaagcccagcttggggaggggtcagggaacagtgggcaagtgggaaatgagtccaccttctgccaggaagcccaagggggcatgtctttgagctgcaaaagaacaggtccacaaatcatagctgagattggcccagcggtaggaaaagcaacacagaatcaatttagtgtggttgaagcttgtgcgatgactcgggctatcacgctcctcagggcctgaatcatgggacacaatggatccgccagcttattccggcatcctttaactcttgaggagcaaatgccctggcaaggaatccgtccagaatctccttcccctcctgctgctgcgtgcgagtgggccgtgccctggtgaggttcctgtgtcctctgtagaaggtaacagattagaaaagcagaagtcccttctctgtctagcatccttccaccttcttctcctcatctgcaaaatggggatgaaacacataaccccagggttgggagaaaggtctgacacagaggcaagtgtcagtgaacgtttgagaactctgaagcggtgatggaaatggggtattcctggtaaccagcaccctctctgacccacgtggtagttatccttttgccaaaatgtgtgactctcttaatacattttgagtctctaggg

SEQ ID NO: 3129 - DNA, 659 bp, Homo sapiens
  misc_feature (1)...(659): n = a,t,c or g
gggactccacagcgccagcaggagtgacttggccacaagacattccagccccagggactttgcaggcttcattccctgtctgtgtcttttccttctggtgtgttttacagacttctgatggggaagcttcaaacttgagcaggccagagatgtccttaccaaattggaaaggaaggtgaaactgttcctttctttagccaaagaacccttctcaaagacgcctccagaaatggacaaaatggccttcccttcgttcctttccaggcaataatgacatcattagtgatgcaattctatttgtctttctctttcctctctgtccttttttttttaaaaaaaaaaatgcatttatttcaaaactgngctattcttttaaaaggantggaggtgaccccttcgatgctgctgctatcgggagacaaggtgccataccaatacgtgggcttgactaatcccaggccaccatgggagagagcaaagcagggctgccaggagttcagntgcatcaagggcgtagagcacgcggngggctgggctcggaatagcagtacttttccactttgatgccttagaactctcacttctcatctccacagaccagactcagtaaaatctcaggccactagagaatggaaggcggtgaancaggatttaaatgc

SEQ ID NO: 3130 - DNA, 1068 bp, Homo sapiens
tttttttttttttttttaggtggttaaggagtttatttgggaaaggagaatcatatttgttcttccttggggaggggggttctttgaacaataccgaaggtttgggaaagggtaggggtctggaggggagaaggaggggccacagccagacaaaatggcaacacacgatcacaggcactactgacatcacagacatagcagagggtgcaggataggggctccagagccaggcctccaaccaccccagggacgggtggaggtgtggagggagggagggcgcaggggaagggggaagaggggtgggccagtcccacagacccgttggttctgtcctcctattaacctagctgtttcatcacgggagtggggaagggtgtgtgtggtggggtgcttctctctggatcccacgcctcaccctacaagccatatcactcgactcttctcaggccacttccgtcccaagtcgtagccagagccattctcccccacccctaacaaaacccatctggaagctcctatccaagtcccctctccactgcccaaacccagccattgtaaaacattttcttcactgcaccatggggaggggctgccctttctgaaaccaccatggaagccccattctaagccccaccctgtctggaaccctggcttggcccattcctgaatcccacttcttgccttgctcaagatctgtcccctttagaatcaagctcagtctcccaaatgttccaagccacaccctttccataggctctggtaccaatccaagacccacctactctggagcccaccattctgcctcgcttaaagcctcgccccttctagaaccctgccctcagcgcccttccaagccccaccccagaatgctctagcgcactcctctccttcagactccagatccactctgtctggaacccaacccccctgctgacccctccactccacacctcctctccaagaccaccttgggtcctaaactgtcctctctaccccaagcccccccaagcccccccaatctctggcctttctttaaccctggagttggatttccctaacggcctttgt

SEQ ID NO: 3131 - DNA, 435 bp, Homo sapiens
aaggagggttttaaatgaactacacatgcaaaatacactagaaaagctagatatttttaaaaacgtggtgaattatttggtaaagccaaaatattttaattcataagttactattcccccaatgcatctattttgtaaatgctgtttcacatatgaggtttgtaaaaaagcaaaatatatgtataaaatggcgtacataaagatgttctacaaatatagccagaagttattgttttactgtatgcaaagagtgatggcaatttttaattcaaatgtttttaaatatttcgaactgaaactaaatcttaccaatgtaaaattgccacaaagacggctggaaaagagaaaagttattaaaagctgctttattataaaataccattaaaacaagtatttcaaatgtattattttacatgtctaggaaaaggatagcac

SEQ ID NO: 3132 - DNA, 2440 bp, Homo sapiens
  misc_feature (1)...(2440): n = a,t,c or g
tttaaaaggtaaattctactgttgtaattccgatagtctttttccacaaatatcagaaatatatttatttaattctgtcagatgagctttctaccgatgccatgtcccaaagccatgttaaaataattcccacgttatcattgtgattctacttcctgccactaaaattgctggagaaacaaaataatgatggaacactatgaacaaaaaggagcatctgaactggtctggttatttagaatccaatgtgttcaaatccttttgttttcttattaagtcagatgctactgtaagtcagataaaattttgtttgcactctgcagtctttggctcaatgtatggaaatgtttgcacctatgtaaagtcacaagctaattacaaattgctacagaacaggagtaagctgaaaactgaatgccatgttttgtttataaggtggggaggggagggaaaataccaaaaaactctgttccaagtttggcatttgacattaatgtgaagcagtgggaccatgctgcctgctaaactactgtatgaatcgtaaatgttctgaagacgagcagctggaggctggaggatggcattccatacagcaaaggagaagcacccaccacttcatctgggaaaaggaaggaaattgcaggaggcctggagccatcatttgtaaaggggatgttgcggggtgtgatgctgttgaggagattcaccttcaattgcactgctccacagagccctcatataaggccaatcctaatgggctacctcggctttaaaagttaatttcagtaagtcctgtttcaaaagtttgtctttttttgcttctaccttcagtgccactattttccactgcagtgttttgacttcacaaactgcctcctccagagaggaacaatgtattgctgaagatggggcagtaggaaggcaaatgctgttgttacatttggacctattaaaggtatttcagagtgactgctagggtagggaaatttaaaacttaggctttcccaaatagctccttattttgcaccttataaaaagtatactaattgttaattagatgttgcttttgtttatacaagcattcccaaagaactagatttggattttgttttgagtttttggatttttaaaaattatcttatttagattgactaacagcatacttacaattttaaaagaagctgttgttcagttcatcttacccagatgtgtctggcgaagtattcagggtttgatggactgctttactttcgtttggaagtgatagctaagtttattatactctatattaaacaactttgttcatttcactgaggaccttatcttccttatatttcagaacaaagaagcaacaagcgtgaataaaaagacaaatgtatttgactccctcataatccccatctgtatgtgctacccttccttcaaatatataaatgtgcatctttttttttaaaaaaaaaaaaaaanaaggttcctcttctggccaaatttnatctatggtggtatgattcatactgttaaattgagagaggaaaccttgtggttaaaaattatatggctgctgttttctttttgcagtcagtggtcaaaactgatcatgtgcttaaatcgatttttatgcacagaactagttattgtgaacattactgctccctccaaagatttcctgataacttgggccagaggtggttactgagtaacaaggatctaattcaatgcctcaaaactcttccacccacaatgcaaatcttacctcacaagctctaacctaaatcacagagacatgcatgtttcatgcattaacactgatttcgctctgtggcccaccagaggggctgtcaatgtcccctgactcctcacatgagtgcctcagctctaagagccgtggaacggggggtagggaaggtttgcgatctggagctcagcaactggctcagcaacgttttctccatttcattagcactaaacaagtctcttgctctcaggaatttgtcagaaaaaagaataaaatcacctgagactccacataccagattataaactcttctcgtaggtttgaattgcttactcacatgtcataaattaaccacagcttcatttgaccaccaggtctaaagtctgttgacagtttcagcatgactgaatcgctcattttttttttttgctttcagaaattggcttggttctctttagagttggtgtaaacatgccatgtaataaatgatttccacttaatggtacaacagaattattgctttcttagatgtatgtgtagtaaaagtcaatatacacatttatataatttctttcttcaaaatcttatacctaatttgatatttctaaaaattgcacatgtaagtcatgtgtataacatgctaaagtactttaactgtgatcttaaaactgaataaaaatatttaataaaactttgaaatatttt

SEQ ID NO: 3133 - DNA, 1891 bp, Homo sapiens
tttttttctgaaaatcagccttttaatctagttgaacccaacgagtggggaaagaactaaaacatttttttcccttcagattttgattataagaataacgggtcagaggtgtctcttccataggaaactgacatcccctatgtcctcagagttggttttttttttattttttcttcaaaaaaatgcataaaagaatttcaactcatgtgcatgccacacatttccatccccacaccaccctgccccaccctctacagggcacacatattcacacaccaaagggactccttcctgtaactggggaacagaatgtaaaaaaatccatccaagtggccaccgataccagaaataacccaatggcatttacactcacaacatcagtcaactcacatgcacaaggagaagcgtctccaatcggagcttagagccaaaaattacaaatggcagagacttgagctatccataagataattttaaaaatccttccactggaacactccccttcattacaaaagtatgcaaacaatcttgctataaatggaaaacaggcgtgtggctctctccctgggggacatgaagggcattagcttaaaatttccctgggttgaaattaattgcctggaaccattgcttccttccttttcaggacaaaagggaaaggatgaagaggagcagcagggtagggacccacctcaggagcaggtggggcaccctggagctgcctcaggggctgggaacgtgttggcatgtgaccagctgatggaggagcacagtgtcaagtgggccacgatggctgtagagaaacccaagtgctctgcacccgtagggagtccagaaggtagaggtccacggacaggacaggcctggcctgctttgcttcctccacctaaggccttgggaccgatggcgtccgtctgagaggctgcatgattattttagggttgcaggaaggatgcttccccatctggacgtaagtgcacaaaccatgtctatctggatctcaaaagatgacttcccctttacacaacccccactcccctgccactgcagatcccagcagagtggtgggagatcttggcagtgggaaccagaatgctgttgccacacagcacacaggctgaggcacattggtggagggttcagaggaacgaggagaagagaggaagaggaatctgtgacccgccttgtgactggtgggcagattcaagtctctaccgctgctgctgagcaactgggcatctgcttcttggaagaacaagaaaggggtggggtaaagacttgaggcctgggttctaggttgggcaggaagggatggggcagaagtcagggttccatctatagtgacaaatcataggggcttgcttgggaagtaccatctttcgtggaaggtgccgggtgtataaaggagtacctttgggcagcctggtcccaaagctgaaagcccaggtctggtgcctctggggcaggttggctgcccaggggagaaaccaaatcattaatgtgtccacctagtgggggctgcgagattgtcgaagcctggctgagagctgatcgatatgcattctgggatgttcccctgagggaagagactgcagctctcctaggaggggtccccaagatccctggactccccaccccttgcctgactctgttcttggggctccccagggaaaggggaactgcaacttcaggcagtgtaatttgtctaaaaagaaacacggggaaaagaggtagctgcaaaacatcgagccatcctctactttccccccacttcccacacaccctttgggacacagccagatttgggaccagattgagggccaaaggagacagggcactggaggcaaggctgcgatgcccagggtcctcggccattaggctgggtgtggcg

SEQ ID NO: 3134 - DNA, 1916 bp, Homo sapiens
tttttttttttttttttgagcaaaatgtttacatttatattgaaatatacactaaaacagaatgagttctactagtcaatgaaactttgccaaagcaaaatcacaaacttccaatggggaggtccagtcagctagcagcagtgatccccaagcaggaacaccaagaaacctgggggacccctctccaaaaagcctcctttcaagaggccctaactcacttctcccacatgcacccacacggatttaggagcttggacatgctcctcatttccatatatttttagtttcttcttcactgcaataaatataaagttggcaatgctcatacaccacagcacagacaatatttcaggctttagcatacaattgtaaacagtgactaggttaaaaaaataaaataaagtaagttggactttttttttttttttttttttaaacagacaaaattcctaagagccgggcatgagctactcaagatttgttttgttgggttaaggtttctgacaaaagattctggtttaggcagatgcccctgacagttcaagtagcctcacggtggtagccagagcgctgtctacggcgaccgagaacacatggactggaagacagcctgccctagatcacccgtggcagtacatcttcaagctgccacattcaacatatgaccacagacatctttatagttccatcactggctgccatctagtatagcaggaatgcgtgggcgaaggaatacaaatttgctgggagaggaagagaatagtatctcctgctagctgcctggaaagttggccccttaatcacaatgacaactaggacatttcacttggacagtgcattaaatttatagattttttaaaaagtacaaagactaagcagtaagttctgtcactgacgcaaactaggatgtcaaagaaaaatagattaactatttttacctaaagtagtgcaaagaaatctggcaaaaaatgaaagtgaactcaatatctgcacatcagtaatggggcagaattttatttaaaaggctagtggttcaaatactattgcttgaatagctctggtagatataaaatgtagtaacatctgaggtttgtacacatgagcaaaggagctgagggccagctcacaaagggatatttgatcctcagtcaagagagaagctaaaagcgcatgctgcaggagtaacctaatggatttatttggaccatactcccaccttctgacaaacagaaaaagacgtggatagaaaactgtctttccacacacaaaaatctggcttaattcttcttgctatacaactatacctcagctaagaaaaaaatctcttgtgaaaaactcaacctgggctactaaaaataaaaaggaaatttttaatgtcgtaaacaagtttagtaaacaccatgtggattttctgttgttaatgaagacatgatacattcaaaaaagtatgtattttttaaaaagaacaaaaccaaaaaattttctagaaagagacttcacaagaaaaaaatgagcccaaggttcatccctcaatcagaaatcggtcttagcacgcatcagtaagccctcctccaacataacaaaagcactgaaatttgcctttcaagtacgttactgaatttaaacattaagcggaatcactgcagagcatattttgatgggttacttcaatacccacctggtccagttcaaaatatctatagatccagtttgtacatattccacaggtatactgataaaatcatctattatcccattttttttaatggcagttcttatatagctcgaacattaagatcaacaaattctcagatgaagtacattaataagacacctcagaagtgaaacaaacctagtttttactaaaatgatgggataaaggtagtgtctatgctgaagagcagcttcacttgttt

SEQ ID NO: 3135 - DNA, 426 bp, Homo sapiens
ggtattatagcttatatattacatatgcctataagtattggttgaataaatgaatgaatgaatgaattcagagagtccatgtgtttagaagcaggccacacagcatctcaaggtagaaaaacctctggatcaacaggatggcaaatctgtggtaaccatgcctgtgttcccactcctgcacccagggcagacatcactaatcaatcccagcattgtttccaatgagcagcactcagagtccttgctccccgctgaagatctgtatctagagaggagcatgccatggtccctggcaacacccctgatctcagcccttccctgtaacttcccacagcctcaatcctggtcctctggatgctccaaggctcccaggcagctctctacatccagaagattccagagcagcctcaaaagaaccaggacctt

SEQ ID NO: 3136 - DNA, 706 bp, Homo sapiens
aggcgttgtgaggtgagctttttcagaagcgcgatcccaggacacgtcgggaagcaagcatccccagagctgcttggaaagaggaccaaagacgtctaaaaagtcatttggaaatatctctaaatatttgttaccatgtataagctgctaaagagaaattgggcccaacaaaactaattgaataattgaggcagatttgtgtgtatcatcaaattctatccagaagttgaagaatctgaatttaaagattgtgtgcatttaataagaggatgacctttcagtttaatttcactatagaagaccatctggaaaatgaattaacacccattagagatggagctttgaccctggattcctcaaaagagctgtcagtctcagaaagtcaaaaaggagaagagagggacagaaaatgttctgcagaacaatttgacttgcctcaggatcacttgtgggaacataagtcaatggaaaatgcagctccctctcaagacacagacagttccactcagtggcagccagcagttcaaggaacttgggagccacatgggaaaacagccctccttgagagctgccaaagagcatggctatgcctaaagatttaaagaagatgttagaaaataaagtcatagaaacattaccaggtttccagcatgttaagttatcagtagtgaaaaccatcttgttgaaagagaacttccctggagaa

SEQ ID NO: 3137 - DNA, 361 bp, Homo sapiens
caagtacccaaaatttatctcagctggtcataaaccttagtgccttttgatggttttgttttatagagttacttattaaagttctatgtaaatcattactgttatccttttaagtttctgtatttaactattaccattttttattttatagtcattacatattggatattatgtagaatgtagttatgtatagagtgttttatctaattagttgttgctgcccttttctgagagttatttaatacagtttgagatggaatttagcatttttgggccttccctcactgtttgtaaataattgattttgtaaaaagaaagtgatgtcagacagatacttgagggcaatgcaggctagacagaa

SEQ ID NO: 3138 - DNA, 661 bp, Homo sapiens
ttttttacttttaaattgatcggtgaaccgtggcattaagataacttccacttctttcaataaagacattttgttgcatgctatttatttgtttaaatcatctgtcatgccttaacaaaaacctcctaagaatgttcgaatttggatttgtttgcacgtgcaactgagatcttattaacattagttgtcactttattggtttgacctaagtgacaatatgctggtacctgccaggcattgaccaactatgataacaaacagttaaacagcaataattagagatttatccctttatttcccccaactaccctacctggagaatgttctgttacatcatgaaggcacaacacattaaatattttgtggctatggtctaataacacttgtgttacaacaaccttattggtatatgaggatcaacacagactctggccatttcaacaaagttgtagacacacatttgcccaattgaaactatttttgaatagtgatttttcttccatatatgctaattttgatacattagttttacatgagtgacaagtacaggatattatatcacttttgatggataacagttttccattactctctcacttaatggtactaattaagtgattttgcttttgcctactttgaaaataagatgataaaaaatagg

SEQ ID NO: 3139 - DNA, 387 bp, Homo sapiens
agctgtcaaggtgcacaaatggataataaatctgaagttcagttgtggctgttaaagagaattcaggtacccattgaagatatacttccttcaaaagaagaaaaaagcaagaccccacccatgttcctgtgcatcaaagtgggaaaaccaatgagaaaatcctttgccactcacactgcagccatggtccagcagtacggcaaacggagaaagcagccagagtactggtttgctgttcctcgggagagggtggatcatttgtacacattctttgttcagtggtctcccgatgtctatggaaaagatgccaaagagcaaggctttgtggtggtggagaaggaagaactgaacatgattgacaacttcttcagtgagccaacaaccaag

SEQ ID NO: 3140 - DNA, 462 bp, Homo sapiens
gcatttctcttccctcaggtgaagaagtcaaaggaatcttttgaagtgaagaaagtgggtttggacgtgcccttatgctgatgaatcattggagtaatatctggggtttagccgcatccttggtggcaaggcggtggggaaagcccctgagggtgaggccagcctgagccccaagggaaaggggctgctgggacctcctgacctcaactcatctccaggagcgcacagggcctcgcacagatgcctcagtctgtaccgctgggagttcgtgccatctcagacctaccctccctacctgggctgtacctaaagagatactgctaggctttctctagaatgtttcatgagccagcactgtgagacattttcaagctaaaaacatacagttcaggagactgtaatctgtggtagaaagtgttcaccattttgcttgcttagtaaagacggtttagccctgttgtt

SEQ ID NO: 3141 - DNA, 3815 bp, Homo sapiens
  misc_feature (1)...(3815): n = a,t,c or g
ggggggggggggggggggagaggcttccctggctggtgcctgagcccggcgtccctcgccccccgccctccccgcatccctctcctccctcgcgcctggccctgtggctcttcctccctccctccttccccccccccccacccctcgcccgctgcctccctcggcccagccagctgtgccggcgtttgttggctgccctgcgcccggccctccagccagccttctgccggccccgccgcgatggaggtgccccagccggagcccgcgccaggctcggctctcagtccagcaggcgtgtgcggtggcgcccagcgtccgggccacctcccgggcctcctgctgggatctcatggcctcctggggtccccggtgcgggcggccgcttcctcgccggtcaccaccctcacccagaccatgcacgacctcgccgggctcggcagccgcagccgcctgacgcacctatccctgtctcgacgggcatccgaatcctccctgtcgtctgaatcctccgaatcttctgatgcaggtctctgcatggattcccccagccctatggacccccacatgggcggagcagacgtttgaacaggccatccaggcagccagccggatcattcgaaacgagcagtttgccatcagacgcttccagtctatgccggtgaggctgctgggccacagccccgtgcttcggaacatcaccaactcccagggngcccgacggccggaggaagagcgaggcgggcagtgggagctgccagcagctctggggaagacaaggagaatgatggatttgtcttcaagatgccatggaagcccacacatcccagctccacccatgctctggcagagtgggccagccgcagggaagcctttgcccagagacccagctcggcccccgacctgatgtgtctcagtcctgaccggaagatggaagtggaggagctcagccccctggccctaggtcgcttctctctgacccctgcagagggggatactgaggaagatgatggatttgtggacatcctagagagtgacttaaaggatgatgatgcagttcccccaggcatggagagtctcattagtgccccactggtcaagaccttggaaaaggaagaggaaaaggacctcgtcatgtacagcaagtgccagcggctcttccgctctccgtccatgccctgcagcgtgatccggcccatcctcaagaggctggagcggccccaggacagggacacgcccgtgcagaataagcggaggcggagcgtgacccctcctgaggagcagcaggaggctgaggaacctaaagcccgcgtcctccgctcaaaatcactgtgtcacgatgagatcgagaacctcctggacagtgaccaccgagagctgattggagattactctaaggccttcctcctacagacagtagacggaaagcaccaagacctcaagtacatctcaccagaaacgatggtggccctattgacgggcaagttcagcaacatcgtggataagtttgtgattgtagactgcagatacccctatgaatatgaaggcggggcacatcaagactgcggtgaacttgcccctggaacgcgacgccgagagcttcctactgaagagccccatcgcgccctgtagcctggacaagagagtcatcctcattttccactgtgaattctcatctgagcgtgggccccgcatgtgccgtttcatcagggaacgagaccgtgctgtcaacgactaccccagcctctactaccctgagatgtatatcctgaaaggcggctacaaggagttcttccctcagcacccgaacttctgtgaaccccagggactaccggcccatgaaccacgaggccttcaaggatgagctaaagaccttccgcctcaagactcgcagctgggctggggagcggagccggcgggagctctgtgaccggctgcaggaccagtgaggggcctgcgccagtcctgctacctcccttgcctttcgaggcctgaagccagctgccctatgggcctgccgggctgagggcctgctggaggcctcaggtgctgtccatgggaaagatggtgtggtgtcctgcctgtctgccccagcccagattcccctgtgtcatcccatcattttccatatcctggtgccccccacccctggaagagcccagtctgttgagttagttaagttgggttaataccagcttaaaggcagtattttgtgtcctccaggagcttcttgtttccttgttagggttaacccttcatcttcctgtgtcctgaaacgctcctttgtgtgtgtgtcagctgaggctgggggagagccgtggtccctgaggatgggtcagagctaaactccttcctggcctgagagtcagctctctgccctgtgtacttcccgggccagggctgcccctaatctctgtaggaaccgtggtatgtctgccatgttgcccctttctcttttcccctttcctgtcccaccatacggagcacctccagcctgaacagaagctcttactctttcctatttcagtgttacctgtgtgcttggtctgtttgactttacgcccatctcaggacacttccgtagactgtttaggttcccctgtcaaatatcagttacccactcggtcccagttttgttgccccagaaagggatgttattatccttgggggctcccagggcaagggttaaggcctgaatcatgagcctgctggaagcccagcccctactgctgtgaaccctggggcctgactgctcagaacttgctgctgtcttgttgcggatggatggaaggttggatggatgggtggatggccgtggatggccgtggatgcgcagtgccttgcatacccaaaccagggcctagtctggggcctgaatctctgtcctgtatcagggccccagttctctttgggctgtccctggnctgccatcactgcccattccagtcagccaggatggatgggggtatgagattttgggggttggccagctggtgccagacttttggtgctaaggcctgcaaggggcctgggggcagtgcgtattctcttccctctgacctgtgctcagggctggctctttagcaatgcgctcagcccaatttgagaaccgccttctgattcaagaggctgaattcagaggtcacctcttcatcccatcagctcccagactgatgccagcaccaggactggagggagaagcgcctcaccccttcccttccttctttccaggcccttagtcttgccaaaccccagctggtggcctttcagtgccattgacactgcccaagaatgtccaggggcaaaggagggatgatacagagttcagcccgttctgcctccatagctgctgggcaccccagtgcctaccttagaaaggggcttcaggaagggatgtgctgtttccctctacgtgcccagtcctagcctcgctctaggacccagggctggcttctaagtttccgtccagtcttcaggcaagttctgtgttagtcatgcacacacatacctatgaaaccttggagtttacaaagaattgccccagctctgggcaccctggccaccctggtccttggatccccttcgtcccacctggtccaccccagatgctgaggatgggggagctcaggcggggcctctgctttggggatgggaatgtgtttttctcccaaacttgtttttatagctctgcttgaagggctgggagatgaggtgggtctggatcttttctcagagcgtctccatgctatggttgcatttctcagagcgtctccatgctatggttgcatttccgttttctatgaatgaatttgcattca

SEQ ID NO: 3142 - DNA, 667 bp, Homo sapiens
ggaaattcaatgaccagctttttccctgtgacgtgtgtgggaaagtgtttggccgacagcagacattgtcccgacacctctcgctgcacacagaggaaagaaaatacaaatgccacttgtgcccctatgctgctaagtgccgtgcaaatctgaaccagcacttgaccgtccattccgtgaagctggtgagtacagacaccgaggacattgtcagcgccgtcacctctgaaggcagtgatgggaagaaacatccttattattacagttgtcacgtgtgtggatttgagaccgagctcaatgtccagtttgtcagccacatgtcactccacgtggacaaggagcagtggatgttttcgatctgctgcactgcctgcgacttcgtcaccatggaggaagcagagataaagactcacattggcaccaagcacacaggggaagacaggaagacccccagcgaatcaaatagcccctcttcatcctccctctcagctctgagtgattcagccaacagcaaagatgattcagatggctcccagaaaaacaagggcgggaacaatctgctggtcatctctgtcatgcctgggagccagccctcactggaacagtgagggaaaagccagagaaagggttcgaatgtgtttttttggcaactttgtctggcaagacg

SEQ ID NO: 3143 - DNA, 431 bp, Homo sapiens
  misc_feature (1)...(431): n = a,t,c or g
ttgacccccctttggacncantnnnnnnnnnnnnnnnnnnnnnnnnnnnnnnnnnnnnnnnnnnnnnnnnnnnnnnnnnnnnnnnnnnnggcacgaggaagttagaagcactttccagtataagggaggagcaatcccatatttaggttctttgcccaggcttttgcgtggcctctgcccacctttcccagcctcaacccacttcatgtccatggggactctgttactggacggtgctgagccagatcttgccatggcacgattccagtagggctgaggtgtgggaaggatagctacagtgctggtggcttcgttgccaaggatactaaagtagcatttaatggaatttgtgctgctttgatgaatggatgtaattgtttaagaagctagatggtgttggcgcctgccaagattacggcccatagaccatt

SEQ ID NO: 3144 - DNA, 693 bp, Homo sapiens
ggcagtggttggtgagcttggacttctcgctgaagctcttctcgcactcggggcacttgaagggccgctcgcctgtgtgagtccgctggtggcgcacaggtgcgaggggcggctgaagctcttgccgcacaggctgcagatgaaggagacctcatgcttgcccgcgtgcacgcgctgatggatcaccaagctgatgtgcaggcggaagctctgtcttgcactcggggcacgtgtagggccgctcacccgtgtgcgtgatctggtgtttggtcaggctggacttgtgggctgaagctgctgtcgcactcggggcacttgtagggcttagggccaccgccgccgctaccagagctgggtgacttgggacgcggcttgagcgcgtgcttggggttgaacgtgggcccgcgttcgggtgagacgcagcctccgcgcacgcggtggatgcgctggtgcagcgtgagctgttgcttgtgccggaagctgatctcgcattcggcgcactcgtagggcccctccttgatgtggttgcgctggtggatgatgaggttgatcttcaggcggaagctcttgccgcactccatgcatgtgaagggccctcgccgcgccggttccgctgctgctggctcgaggccccgcggttctcgctcaggtgccgctcaccgttcacggaaggccccaaccttttcactgggc

SEQ ID NO: 3145 - DNA, 534 bp, Homo sapiens
  misc_feature (1)...(534): n = a,t,c or g
ttggatncctncntactttgattccctctatgacnnnnnnnnnnnnnnnnnnnnnnnnnnnnnnnnnnnnnnnnnnnnnnnnnnnnnnnnnnggcacgaggggtgttgaaggtgggaccgagagaagagcccacagaccccactcagggagacttctctggggacagtggcacagagcctgctaacctgctggagcggctggagcaacggcccagtccctctgcacactgtgaatcctggcagccagggcagagatgtggaccaaagggaagtctgattaccgactatgtggcctcagagtgcccttctcctctgacgagctcccagtgctttcgtggacgtgacctcatgaggccctcacactcattccataggtattttctcaggcaagtcacagacggcatcccagcacacagggagagctgagagcctcagttctctctaaaacatgaggaagcatgcacccatcccanggtgtcggcaaagaggccatcctagacgctgcgcttctcacagctgttctggctagcaaca

SEQ ID NO: 3146 - DNA, 355 bp, Homo sapiens
gctctacctcatccttgagtgcctcagtggtggcgagctcttcacgcatctggagcgagagggcatcttcctggaagatacggcctgcttctacctggctgagatcacgctggccctgggccatctccactcccagggcatcatctaccgggacctcaagcccgagaacatcatgctcagcagccagggccacatcaaactgaccgactttggactctgcaaggagtctatccatgagggcgccgtcactcacaccttctgcggcaccattgagtacatggcccctgagattctggtgcgcagtggccacaaccgggctgtggactggtggagcctgggggccctgatgtacgac

SEQ ID NO: 3147 - DNA, 513 bp, Homo sapiens
  misc_feature (1)...(513): n = a,t,c or g
tgaanctcntnaatcccttnnnnnnnnnnnnnnnnnnnnnnnnnnnnnnnnnnnnnnnnnnnnnnnnnnnnnnnnnnnnnnnnnnnnggcacgagctggagctgtgaaggctgcccatttccccagaaatatctgcagattagattccacctggagctcccaggactcccggaacctccagtggacctgagatgccccctctctacactgccacatcctgccaggactgtggccgcccaccactggcctctggggcggcctggccagggccacttccattacaggatttgaaggctcccttcacctcgtttacccctcagtgcttactctgtacccaaaatcctgcagtcaagatgcactctgagatctaaagggtttttctcanacttgtagtgaancaggagggaccaccctncaaagctggctgcttaggccaagcatggaaagttctggtacccagaaattggctcttgnagtgtggtgtcctgaggngggntgcggctgangctgaag

SEQ ID NO: 3148 - DNA, 348 bp, Homo sapiens
gctttcttcaaattagagaaggttaaacagagctttgacctagaggagtacagcctctcacagtctaccctggagcaggttttcctggagctctccaaggagcaggagctgggtgattttgaggaggattttgatccctcagtgaagtggaagctcctcccccaggaagagccttaaaaccccaaattctgtgttcctgtttaaacccgtggtttgtttttaaatacagtttagtttttagtagcagcatatgttctagtttttagaaactatagttataaggtacaggaaattggttgctccgtggtggatgggaaggaggggggtatgcggggtgctggcggtaag

SEQ ID NO: 3149 - DNA, 354 bp, Homo sapiens
  misc_feature (1)...(354): n = a,t,c or g
gggagcttcaataccctgtaaactcctgatgcaaggaccaggcctgtgtccaccactaatacaaccccagcacctggcatggtgcctgacacatagcagattctgtcagtatatgttgagtgaataaatttacttgcatactatgtagcagtggattgtgataccctactccactcccacctccagaacatctgttttcctcccagttgaccacggaccaatggttctcaaagtgcagtccccaaccagcagcatcagcatcaccnnnnnnnnnnnnnnnnnnnnnnnnnnnnnnnnnnnnnnnnnnnnnnnnnnnnnnnnnnnnnnagggtaaaagcccatcaatctgtattt

SEQ ID NO: 3150 - DNA, 444 bp, Homo sapiens
  misc_feature (1)...(444): n = a,t,c or g
tgtnnnnnnnnnnnnnnnnnnnnnnnnnnnnnnnnnnnnnnnnnnnnnnnnnnnnnnnnnnnnggcacgaggcattcaacaggacagtttcttcttccaaaagggactttactgtcttctgtaaattggtcacctgttgtttttatttgactgctgtctcttcctttgggaaattatccatcctccactccatgtgttccaaacaagctgctgggaaaggaatgagataagctgggttagagtctctcctgagagataggctcttgcgcaagctacacaagctaaagggccactgtagcaggtcgcctggatggccgcgttgagtccacaagcttctgctgctgagctcctcagaagtgtcctcgttcctgcgccccattcttcagctctgccctcaattctgtgacctaccagcacctttccagtggtcagtttcctagggtt

SEQ ID NO: 3151 - DNA, 416 bp, Homo sapiens
  misc_feature (1)...(416): n = a,t,c or g
aattcggcacgannnnnnnnnnnnnnnnnnnnnnnnnnnnnnnnnnnnnnnnnnnnnnnnnnnnnnnnnnnnnnnnnnnnnnnnnnnnnnnnnnnnnnnnnnnnnnnnnnnnnnnnnnnnnnngggcgacacagccagattctgtctcaaaaaaacaaatgaaaaaaaagaaacaagattaattattgagattttaagtgctaaaagaataaaagaacgatgaaggtaatggtgatggctgctctagattggaagtanaggaaagcctttgtgaggagtcaagatccagtgaggaatantcatgctatggagaacagctacacaacncacataaccagaggactcaaacacagcagctaatggctttgtttccagcattaagcctaaatcaaantagggtgccatggctcatgcct

SEQ ID NO: 3152 - DNA, 472 bp, Homo sapiens
tccctggacacacagcctgagcagctggccctgaggccaaggagtttttccgagcctatggcatcgaggagctcaccgaggctcaggtggtcacagtggacgtgagaactaagaaggtcgtgttcaaggatggcttcaagctggagtacagcaagcagcagcggcaccagggagcagccccaagactctgagctgcaaaggcaaagaagtggagaacgtgttcactatccggacgccagaggatgccaatcgcgtggtgaggctggctcgaggccgcaacgtggtcgtcgtgggagccggcttcctggggatggaggtggccgcttacctgacggagaaggcccactctgtgtctgtggtggagctggaggagacgcccttcaggaggttcctgggggagcgcgtgggtcgtgccctcatgaagatgtttgagaacaaccgggtgaagttctacatgcagacggaggtgtct

SEQ ID NO: 3153 - DNA, 1167 bp, Homo sapiens
gaggtttgacccagagaagccaatccttgcattccaggagtggcctgtgcctcccacctcttccttcccactgccaaaggcctgtgttgagaaagatgtcatgcaaaaggacgacggtggccaactaaagcaagtcttccttccaccctgtggcctgcacttgagccacaaagtgtgtgtgtgtgtgtgtgcgtgtgtggtacgtgtgtgtgtgtgtggctatgaggctgattcctgtttggatttttgtcctcacgtgtatcattaagctggcctttgggccttttcctttatacctcccctgtgacctttcctagcctcagatctgttaattcttttggccccagccctgtccctcactgtcctctgtccttggaccagaaccctgggggtcagacccatctcctgtagctgtccatcacactgacaggcttcttcctgagatatcctcaggttttctcagccagagagctggcctttagagtccaactgttgtacgtatgtcaccttcactagaaatgtcccatcatcgtgggaggggagcagggcacaggggatggtgtgcattcagagcattgggttggggggcttccctgttccctcagccccagtcgagagggaaagagaatcggggccactgccagaaagagagtcaagcaaacctggaaggggcaaatctgagagtgggaagggccaaagcccgaggccccagatttagtattcactagcagcgccttcgggtagcaggatgattccttttcctgcctgtctgctgctggctctcttccctaaggtacaggttggcaggaccacctccgcctacttctccaccatccctagcatgccagcccgttcccagatcaacctgccagtggagtcaggcagtgcactcctggagccaagagggaagggcagggtagagagggtatgtccagtagcctggagctccatggtggcttcatgcctcccttctcccagctcaggtggccctgagggctccctcggaacagtgcctcaaatcctgacccaagggccagcatggggaagagatggttgcaggcaaaatgcactttatagagattttctattgctgggaaggtgtgtttctcccacaatttgtttgtgaatattcacttgttttataaatgtctgacctgtcttgagtaa

SEQ ID NO: 3154 - DNA, 481 bp, Homo sapiens
agcgtccccgtcagctgagagcatcctcactcggtcagttcttcgggcgagttacggggacgacctgcgggagcacgcgggcagtggccggacgctgaagcccaggagagcgatggagacgtatgcggaggttgggaaggagggcaagccttcctgtgcatcggtggatctgcagggagacagctccttacaggtggagatttctgacgcagtgagtgagcgggacaaggtgaaattcactgttcaaacaaagagctgcctccctcacttcgcccagaccgagttctcagtcgtgcggcagcacgaggagttcatctggctgcatgatgcctacgtggagaatgaggagtacgccggcctcatcatccccccagcccctccgaggccagactttgaggcttcgagggaaaagctacagaaattgggcgagggggacagctctgtcactcgggaagagtttgccaagatgaagcaggagctg

SEQ ID NO: 3155 - DNA, 426 bp, Homo sapiens
  misc_feature (1)...(426): n = a,t,c or g
ggacaaatatgacttatttatttttagtgtggcacagctgaactacatttcaaatgagaagtaacattgatagggagcagtaatgtgaaactatgttcaaaaaaagaaagcccaagtttcaaaagtcttattctgaatattgttctctgtatagtattgtttaattttaaaagtgttttcagatccaactaaagttcaatttaaaaatatagtttatattttttcttctcaaatcgaagctttaagcatatgtttctaataattcagttaaatatgctgagttgtatattttttgaagagaatctgttttgaaaagattccaaaatatttgtttgaacaggcactcagcatctcgatgaaaactgttggaaaagaaaaactttcagagtcattctgcctcanagtagtcaaagccaactaactggt

SEQ ID NO: 3156 - DNA, 101 bp, Homo sapiens
gctcttgtatccacaactgattaacaaagggggttgttctaacatgtgtgctggttgacatttttgtttatggtaatgagtaagatgagaagacatttgtc

SEQ ID NO: 3157 - DNA, 1604 bp, Homo sapiens
ctcatgcagttgcttagaataatcattactgttatatgagaaacattttagtaatttaataaaaggataatgtttatttaaaaaacctgacttttccagagtaattttgtttttgcacattcatgtttattgaagtggactaatttctataatgcaaatcagagttaaatattaaaaattgtgtaaatacaattgacataggaattacattaaaatattaggaagaaacaaggacaaatttagaccttgaatccgaagagataaagcttacttgactttcaaatggagagatgatgaaaacccactcattcagtctttcagaacaaaaagacagtcatctgataagagtatgacatggatgaaatgccctacaggggccttggacatctttaatttctgcgattatgtgaaagaggtggactttacagataatggagcagaagccaacattagtaaaaggaatcccaacttcttcccatagaattagaaacatgtgaaagtacaataaacttcttgttcaaattaccagcatcagagagcttcccatttgcatctagaccttgaatttatatttattgatcaagttctaatttgtatgtatattttgtgcatattcaccaataacagttaaaattaattatgtgttatagttaatatatgcacctaccttcttccgttagtgcatcagtaaatgtgttattttgtcatttttccaaagagagtgttgtaggttttccctgtagttcttcctttatagcttttcttctgataaccatgacttcaggagctttaaaactatctatcttgcatttgtgtctggcggagaactagccatcagcctcctgaagcctgccatcattgttaatttgaggactgggctgtcttggggctcagaaggtaaagaactatttgagcagatgtgtgtgggtggcactggattccacccaactgccaagttagtattgttagagatttcattttacaacacaaaaataagcctgtgtcaaagattttaaaatcatggaaagttaaaatctagaaagaccttagagaaccagccaaccaactctctcattttaaaagtgaaggattcatagcacagattacttgcctaagatcatccaggaacgaagacaagaatccaaatgtacttggggacaagaattagtccccaaattcagtgttcttcctagtattaaacattgcccctttcgacaaattttggatttcattcttgttatatttcagtactcttgctgatttattttaggtttaactggtaaagaatgaacatttcagaagtgttaggattagtcagtgtcatcgcttatgtatatgaatcacttgccaaagacactggctctcctcagctgtaaccagcatgtcaaatgtgaagattattgtgtgggatcctttggtttcattgttatgatgtattttataaatgtactagttatatccttgtttatgtatttttgctgatctttcataaagcagaatggtatgtatcggattgttttaatgttatatattggattgtattcgttgttacaaaaccaatattctatggagaatgaaaaaaataaaggactaaattaactgga

SEQ ID NO: 3158 - DNA, 852 bp, Homo sapiens
aaacccaagaagccttctttacccctcccagcgtcaatgggaagaggggtgtttagtggaggttcttttgctttttaataaatttcatctttatcaaaacatgcagtatccacagctgcacttaagcatgcctgtcactggagaatttcattttttggagtaaacttcagaaatgacacagcaagactgccaacatcatcctgtcttcaaaggcatttttgggatatgagatccgaagctgttatgggaagggaggaatactgacatcagaatttagccctggatgaggaactatgaggagattcttgagcatgagggcatcaagaaaacagaattcccatgaatagcgaaggagaacagagatttctgaaagggtcataggataggtatagacgatgacgatgatgatggtgatgatgatgatgacaaggacaatagcagctaccgtttatttagcacttagtgcatgccaagctctcagctaagagccccacatgaagctttcattcaattcagtggccttcaggacgcagggattattatctttatccccaacttaacaagatgaggaaagcgaaggcttgaaaaggctgaaagagatggatgtggggccctaacccaggcatctctgacaccatggcccacagcctcagcaggtggccccttctccctcaaggtgaaggactgacttcccttctccaccttcaactcccacgacagtgaagacggaatattcttgttgcaaaactttcccaagaatggagccaaggagggtgacttgattcctccttctcttggggtcccctcatccagctgagtgtgtcacttatctgtgacatagcacaggaaagc

SEQ ID NO: 3159 - DNA, 412 bp, Homo sapiens
  misc_feature (1)...(412): n = a,t,c or g
tttgganacnnnnnnnnnnnnnnnnnnnnnnnnnnnnnnnnnnnnnnnnnnnnnnnnnnnnnnnnnnnnnnnnnnnnnggcacgagacaannnnnnnnnnnnnnnnnnnnnnnnnnnnnnnnnnnnnnnnnnnnngaaagaatatgagaagtgggggaagtctggcctgtgcatgcttcaaagagctgggtggagcttgaagaatggagcattgccaaaggttattcaggccgtggnaaacnttgtgaaccnagcccattaaggcnggngnatttggggtaatnggcaaaccnaccctgaacttaaaatgnggggaggattattaaaggagtaatacnctnttgggtattggcttctattatggaccagcccttnattcccacttganggttataacactttttgagggatt

SEQ ID NO: 3160 - DNA, 351 bp, Homo sapiens
gtaatatcctctgcttataatatgcttccccttaaacctctactctcttcctagctagctttgactcctctgtcacttgtccgctttggcatcacctcctcatagaagacttctatgactcccgagattctcaggagcatggcaggtgaagtgctcctcccatgaatggatggagattaagggtgtgtgtgttattcatgcttaattcaccagtgcttagctgagtacctggcataaaatagttactgtggtggccaaagtaataacccccaccgcaccaattgctcatgtcctatgttacacagcacaattacataggaagggggaattaatagtgcagataaaattaat

SEQ ID NO: 3161 - DNA, 942 bp, Homo sapiens
gggtggcggcgggtcggggcgagaggctgaggggatctggcggtggagcgctaggatcagacgcccccgcgatgaccagctcccccgtctccagagtcgtgtacaacggcaagaggaccagcagcccccgctccccacccagcagcagcgagatcttcaccccagcccacgaggagaacgtccgcttcatttacgaagcctggcagggtgtggagcgagacctgcgaggccaggtgccgggtggcgagcggggcctggtggaggagtatgtggagaaggtccctaaccccagcctgaagaccttcaagcccatcgacctgagtgacctgaagcgccggagcacgcaggatgccaagaagtcctagagcgcccggtgcccctccccggcctccggaagatcagggtgcgaggtgtcggttccctcctggccactgcaggatcaggaggggagaagaaggagcctctgctgcctcccaggctgctgggactgggctggttttgtccttgaagtggtcaggatacaggacaagggcagccccaccccatccagcctgggctccccgcagacccttgctgctcccgtggcctggacacgctggggagcttctcacacctacccctaccgtccagcctggcctcttccctgaatcagcttcaagatggcaccagctctttgggcctaggatactgccgggccccccaagggggtccccagcaaccaggcctggcctcctggtgtctgcggtcacagtggcccctgggcaggggcacccaggctgaccctgaggtgctgctgctgggtctgtcttggctctggggtgtgctgggagggtcaccaggtcccttttccttcctgtgccctctgaaagctaagtgtctgtgtggctgtggagctcgagggtctgtgaataaaggcggcggcactgggaaaaaaaaaaaaaa

SEQ ID NO: 3162 - DNA, 575 bp, Homo sapiens
gccattggattgtgccccgaagtggcctttacccttgagccgtccccagccatggtgctcacacataggcttttgagctccttggagctatccagatcctgctcacttttccttcctgagatcagaacaaatcacccccttactcccactccaaacaaggccttgatgataaactaatccttcctaaaatgctggtaggtaaacaagcaatgatgaagcattgaacacaggttaactcctgacttttgtaccattgtctattccattacacattaacatgactctgaatgccagatccaaacctttgcccaccatctgcttgtcgtgcaacagttgaggcagtaaccaggggagattcacttcctgtcttgtccttccccagggatcacccccctgctgccctctagcagccaaactcagatgagttccattgttaccctaggtgtgcccatctctttggtagggaaggagaaaggtaagaatagccatcaatgaaggaaggattcttgggagcgaggagccactgtggtttttcctgctatttaagatggttgagaccggataactttagaaag

SEQ ID NO: 3163 - DNA, 2100 bp, Homo sapiens
ccgcgggtcgggctctgtgtcagcagccgggcgggcgctcgggcgggacatggcagcctgtacagcccggcgggccctggccgtgggcagccgctggtggtcccggtcgctgactggggcccggtggccaaggccgctctgtgcggcggccggagctggagccttctcgccagcgtcgaccacgacgacgcggaggcacctctcgtcccgaaaccgaccagagggcaaagtgttggagacagttggtgtgtttgaggtgccaaaacagaatggaaaatatgagaccgggcagcttttccttcatagcatttttggctaccgaggtgtcgtcctgtttccctggcaggccagactgtatgaccgggatgtggcttctgcagctccagaaaaagcagagaaccctgctggccatggctccaaggaggtgaaaggcaaaactcacacttactatcaggtgctgattgatgctcgtgactgcccacatatatctcagagatctcagacagaagctgtgaccttcttggctaaccatgatgacagtcgggccctctatgccatcccaggcttggactatgtcagccatgaagacatcctcccctacacctccactgatcaggttcccatccaacatgaactctttgaaagatttcttctgtatgaccagacaaaagcacctccttttgtggctcgggagacgctaagggcctgggcaagagaagaatcacccctggctggagctctccgatgttcatcggggaaacaactgagaacatacgtgtcactgtcatccccttctacatgggcatgagggaagcccagaattcccacgtgtactggtggcgctactgtatccgtttggagaaccttgacagtgatgttggtacaggctccgggagcggcactggaggatattcagtctctctgggcaccttggagacagtgcgaggccgaggggtagtgggcagggaaccagtgttatccaaggagcagcctgcgttccagtatagcagccacgtctcgctgcaggcttccagtgggcacatgtggggcacgttccgctttgaaagacctgatggctcccactttgatgttcggattcctcccttctccctggaaagcaataaagatgagaagacaccaccctcaggccttcactggtaggccagctgaggccccaagtgcccaggcttggtcaccgggaagaacaactctcatcccacaattgctgcagaactcttctctccccatcatgggccacagtgggtctcttaatttgattgtggggttctttttgtggggaggggtggtataacttttcttcagaagacccatgtgggacacctccaaggctggcctcctcataagccctgcctacaccatgttccagtaaacctctccaccaaggaactgtgttcagctgccacaggcctggaggagtttcctggcctgtcacgtgaggtttgatcagtaaaccagtgcacgcttggccacccttgccatttctgctcccagagtctcaggctccccttctgacccagtgtgcgcccttgactgctttctttgctgcccttccagggagctgcccccctgggtagggcatgtgcctggtttccctctcagcctggaggctggctggacatctcctagggtcactgtgcctctcagctagttggcgggggtgctggactggactcttgttcactttaccttctgccaaatgcagagagggaggccagtgtcagggtcggagtggcctggctcttagcactgaccgaccattgccatttctggcctcgctaggcccaggagaggagggaggcaagccagtcgggtttcctggagcaatgggtgtgccagccctcagcatgactctgccaagcatccagaccacaaatgcaggaatttggctgaggagcagctttaggtatggattgatgactaagtcaagctacttcctgagcttctctcagatttccaagagccagagatgaattgtgctgcatcttgccccaattcttaggatttcttttcctccgccactgcagtgattgttagaggtagttttcttgaattaatattaaatcacagttccagcccttg

SEQ ID NO: 3164 - DNA, 501 bp, Homo sapiens
gctcaatttggattgcacatttaaaaactgggacatttaaaaattgcctgggtctcacttgtatcccatctccactctcccccgagatatttatttaatggttaagaataaggcctgaccattagaacttttaaaatctcataaggtgattataatttgcaacaagtttaaacaagtttaaaaaccagtgcacttaaacaagttctcaaagtgtggccccagaccaatggcatcagtatcacctggggaactgagaaaggccaggctctcaggccccagtccagcctagtgaatcagaaactctgagtggcagggcctctccaggtaatttgggatgctagttaaagtttaataggccactgctctaaattatctccaagggccaggaatctccaaattctctttcactcatgcaactacttgctcaactcacaaatatgtaatgagaacattctatatgccagattccggtactgggaaacagtattaggatgaccaaga

SEQ ID NO: 3165 - DNA, 352 bp, Homo sapiens
gcattttacacagccctggcagggaaaaatagtctaaacagagtcgtcctgaaaactttttgaaaatggagtatttccaagcattttttgaagacaagagtccattatggtgataactttcaagtccttatattaacaaacacgagtataagttttcagtcagttcacgtgaagtgcactaataaggaagcatggccatttctcatctctctccaaaaatgtcactcatccaaaaccacagaaaaagaggagaacactaaatggtgcccgttccataacaacttaacctgcttctttccctggaatgcagaccatttctggggaaagctgcctgttcagatttttttttaag

SEQ ID NO: 3166 - DNA, 312 bp, Homo sapiens
cagcaatggaaaagatcagaatagaggataatccaataaagtgaaatcatttgggacctcttatgtaattttatcttgaagtagagcttccatcttaatttgctttgcttacgctaatttcatgtgagggcctcaactggaaacatatctatgaccacatcagcttattaattttgtgtgaggtacctcaaacatctctttatcttcccaggctaactttggccagtaatccagctcagctctgagtcactcagctcacataatgtggaacgtgctaagagtttataaagtaggaaagcatatgttctcatc

SEQ ID NO: 3167 - DNA, 1239 bp, Homo sapiens
gggcattttaagcagattgtggccggctgaggacatgccttttactgagagtgggatggtcccagacattctgttcaatccccatggttttccatcccgcatgaccattgggatgttaattgagagtatggccgggaagtctgcagctttgcatggtctctgccatgatgctacacccttcatcttctcagaggagaactcggccttagaatactttggtgagatgttaaaggctgctggctacaatttctatggcaccgagaggttatatagtggcatcagtgggctagaactggaagcagacatcttcataggagtggtttattatcagcgcttacgccatatggtctcagacaaatttcaagtaaggacaactggagcccgagacagagtcaccaaccagcctattgggggaagaaatgtccagggtggaatccgttttggggagatggaacgggatgcgcttttagctcatggtacatcttttctccttcatgaccgcctcttcaactgctcagatcggtcggtagcccatgtgtgtgtgaagtgtggcagtttactctctccactgttggagaagccacccccttcttggtctgccatgcgcaacagaaaatacaactgtactctgtgtagtcgcagtgacactatcgatactgtttctgtgccttatgtttttcggtattttgtagctgaactggcagctatgaacatcaaagtgaaactggatgttgtttaacttgatgttgaccttttggattaagaggactatcagattaaagcaaaatgtaattttaattcaatgaagatatcattaccaggttactcttgagatttttcaacggtgttagaactctcaaccaagacctgaaaaccaagtatgcaaggtttctgaatctctctggtagattaactattgacaatgattttctgttatctttgttcaaaaagttcatgtcttctcaaaatatgaaatattgataaatggaagagcatacggtgacaagtctcctttccaaccccaggttccctacaccctgctctcagcaggcagtgagtgtcacacacctgttaatccatcttgagcaggacagtactatacaaatagaatgcaagctgtaatgtaattttatattttcttatagccacgttgaagtaaaaacaaacaggtacagtgttttttaccagctttatagaagtacagttgttacatatttaatgaatacaatttgatgggtc

SEQ ID NO: 3168 - DNA, 403 bp, Homo sapiens
  misc_feature (1)...(403): n = a,t,c or g
ggcacgaggagagagctagcaccatgagcttaataccctgaatgttatgtttctgcctatgttctgtcattctttcaagtgatcatgacttcaactttcaaatggtttcaggcaagattttagaacaaacaatatactgctagagagaaaataaaaaccagcaaaaataaaccaaaaaggcaattgataattattttgggagaaataatttatttttcaattttgaccatcttttgttattttgcttttcatcagcacttctaacagagctaagagttcagatcagatgcctctaattttaatgtgagctaaaatctgtgttaaaatgtanactgccagcctccactccagacatcggattacactggctagggtacagcctaggaatctgcattttatcaac

SEQ ID NO: 3169 - DNA, 305 bp, Homo sapiens
gctcgacgaaacaaaagatttttgagggtgttcatgagcataagtgtatcatatagtcacttatggttgttgtgttcctagtacttagtacaaggtatcggaattgttctttagttaatcttttatcttgagaagttaaatcttggtgtaatcttatcctcatgttcatataaagatatgtggagtttgtagtgaggacttagagccgggtacaatttcatggttaaattagaaatgcttttggcagtgttaacagctcttttagaatttgtctagcaggcttttcagtttttgccagaaagccc

SEQ ID NO: 3170 - DNA, 677 bp, Homo sapiens
gctgttctaagaacttcggacatgttatctcacttgtataagtacttaggtgcctacaacataaacagcacctggtaaattaagtattgaaaaaatgctatggggcagaggaagaaatgctaagcttctgtgagaagagaagacagcttgttacacaggtgaaaagaacaagctgcagctgagagaagaaaagtataagagttgctaggtgtgacaatctcaagacttttcaaccactacaaatttaaacagccaccctaaatcaccccaaaggacagactcgagttgttctttttgtctttaatgtttgcgcctctccgaatcagagaagaagctgccaggattccagtacataccaaaacatgatgacaataccctcaactgtgcaaacttttgtgcatctaccgctatgtaaaggaagctgatgtcagtagactggggggaacagtaaggcatgtttgtgaccgaagctcaatttgccatcacagtgtggccacacctacctcactaatattctaatagtgggataaataattcaatagggataaagcctggattttcctcttattctctcttagtgcttacattcttggcatgatatcgatgtgccatagacaagccaatatgtgagtgtactctatctgaataaagtatagcctttctacattgaaaaaaaa

SEQ ID NO: 3171 - DNA, 2964 bp, Homo sapiens
tttttttttttttttttttgtttttcttgtatttatttttagttactttccatctatgttaagtgtaaaatttcacttaaaaatccatttaaacttaaaaggtttgtttttaaaaatattaagtaactcaagtactagaagtacagaagcctggcaaacattatgaaggtaaggaaggtaatacatagacaactgaactggaggggcactggtctgagtgaggactttgggcacagtaactccacctcatgctttgtgctttctgggttttgtctaatttgctgttgttgttccctaatatagactatttttttagaaaacccaaccttattttggctaaggggaaagggatttactttcatttgggttaaggtagggcagaccaaaggcccctagaagttagtggttcaggttctaactacacaacactggcaagtggaaagggagatgtggggagaagtgaaaaaccctgggcataagattccagaacagcagagtgtgcttcccttcccaccaagctgtcaaatacaaatctggagattcaataaaaaaaatcattccatgatagagaagacagaaagctgtaattctttttaatgtttaacttttctttgtaaaaaacttattaaaaaacttaaatggtcagttaaagttaaaaatctattgctgcacaatttaactgattaaaagatttccagatctcttgactccaagagtcatttctttcatttcttacagatctcacacttccagatttctctttagcaaacatgatctgaaatcatttgtaggtaatcagcacttcaagcatatggaggctctggctgaggcagcagagtcctgggagactgaacactgggagattcaatgtcccccacagaaacctagacctggggctcagcccaccactgctaggggtccctgcacaggacccatgcgggctcctgcacgggatctatgtggcgaacctgagctcgatcttcgctgtcagtcctcctggtgtctcttgagggccgccgacccgccacagtgtgggttctccttccaaaagccagagcttcattccactttgattctcatcagctcccatcttcctcctccacagagtttcagaaccaaggaatgaaacttctcaaggctctgccccatgtcccacactgatgaacgtcatcccccagctgctgggccgatgcgatagagctcgctctccacttcctctgtcagggcactggtggcttcatcaagcactgcgtacttcggctgcaggtagaagagtcgggcaaaggagagccgttgcatctcccccggggacagaacatcataccagttccagtccacctgctggtccagaccctctgtccttgccaccaagttggacaggcctgccaattccaagaacctcaagatcctctcatcatcggcagaacctgagtcggggtagacctccttcaggggatatatcacctgctcccgaagggtcccgtcagtgaagaatggcttttgtggcaggaatagcaccccatggggcccaaagtccgtcagcatctgcactgagccccgtgtactcgtccagaggccacctagaacccggagcaaggaggtcttgccagtgcccgtgttgcctgtgatgagcaggctctgtccctcggagatctttaggctcagatccttgattaggggtttgtcagaggagggggcagagatggagacccgctcaaggagaaatgctgtgtctgctggctctgccgctggccaccctgggggtgtgtccaagccccactcgctctcgcccaggatctcgcagtcctgtgacttcagggacatgtccagaagcgtctcccgaagctgcccaattctgtgcgtgtagccagccacatctgagagcgtcgtggacaggtcgatgagctgggtgaagcagctgatgaggtagatgcacacaaaggcattcttgctgaccagggtgctaagctctgccggaactcagttctccatagaccccgctgaaaatggggattgcgatgacaacgtaactcaggatgctgcccagatagtcaaaggtgttgatgccgatgtacagccagagctccttggacatcagctccctctgggtctgaaggagtctctgcagcctgcggtctgtcctcatgtgctccacatgcccagctctgacaaggaaaggctgggatgtccacagggctgtagaaagcagcaggccgcattcacccgaatctgcatgtgcttgaacctaaaatctccctccagcttctcctgatgcaccagcttcatcacaatggggcccatcaaagttttgttcaccacggtccccaggatgaaatacccgaagatgctcacaggcccgagccagcctgtgctttggaagcactggtaagtgtagtagacgagggtgaacggggagatgatgagcttgctggccatgctgctgagctgccggcagaatcgctccacgtcctggctgatgcgctggtccgggttatcgatgtcatcccgcagcacgttgagggtgtagtacgcacggccccggaagtagaggcggtgaaggtgctcagtgaggtccttcctccagctcacatacagcaggttgcaggtgaactgatcaaagctcttcagcgtggagttcagaacaatgagcatgacagccaggaatgtcagagtcttaaacccttccaagtctttgtttcccaggaccccatagtactgactggggatcaagccaacctggtagatcacaaattgctccagtagggtcaggcacaaaagggtcaggaacatcaaggcattttgtgatgaccaagaaggaaacaaaaccttcagtatctgcaggaaccgctggagaaattgcagatctaacctgggcctggcgccagctccgggcgcgggccccgcgaccgccatgacctgagaccgagggactctggagcccagctgcccctagttcagtactgg

SEQ ID NO: 3172 - DNA, 1452 bp, Homo sapiens
  misc_feature (1)...(1452): n = a,t,c or g
ctttttttttttttttcagtatttcacatggttttattacaaaacaagccacaaaacagttttagaaaatttttgctacataccaattaggagatcacataaaatgagaagcgtaacagtttccatgcactcagcctagagcttacagcgagtgcatttcacagctgaaacatcactgctttaaaacacagaatcatgctaccccttcataagcagagggggaggaggtcaaacagtatgtttttgccaaacgtttgctttatctgaactctatctagtatgaaggactggctgccgcaggcaataacacagagaggaaaaggaacaaaggaagaaaagggtgctggcagacaagatttaacaaacctgtccacttccgacattttgaaagtttataaacaaagctcacttggggacactcaatttccaaaatgctgtgacctccacatgttatctaatttatactgaaaacaaacctactaaactccactcctcaactactgaacctgctatttattcatggggtctttttagcccatataagagtatatttatattcagaaatataaaagaaaaaaaatttgcttcaagtagactaagaagctggaccttaaaactactttctttctcgtgggagctgagtattcaactcagaaatagatgtataactccaatattctgacctgacatcaatctccataatgtatacctcaatacccttatgatgtctcacttaacactaaaggccaaattatttttaccaaccatcagctgacattgagtaagcaagtcttttgaagatttcaaaagtaatagatgnnnnnnnnnnnnnnnnnnnnnnnnnnnnnnnnnnnnnnnnnnnnnnnnnnnnnnnnnnnnnnnnnnnnnnnnnnnnnnnnnnnnnnnnnnnnnnnnnnnnnnnnnnnnnnnnnnnnnnnnnnnnnnnnnnnnnnnnnnnnnnnnnnnnnnnnnnnnnnnnnnnnnnnnnnnnaatggatggcattattcagccatggggaggaccacctgaaatactgttacacacagtgggtcaagaccacttcaaaagccttatgaaaatagcacaactcaggcaagggcttttattccacaaagaaaatgcagtacattttttagttcctttaaaaaaaaaaaaactcagatttactccagagcctatgcacttagtcactaatctatactgcatccccaacctattttttccatttggttcaattttatacatttaaaactaactgctttggtcaaatacgtaccatctttggttcacattaaaagattatggtccaaaactggccagaagttaagaaatatcaacaaaataggaagtttgaaatacaatttaggaatggaatgcttttagagcttgtttcattgaagataataatttatctcatattgaactacattaacgatgttctgggtaggtgc

SEQ ID NO: 3173 - DNA, 1204 bp, Homo sapiens
catctggtgtattgactgtggccagtcttaaagctagtttttgctatgtggaacatgctgctctaattcagatttaaagagtttcttcctgttaattcgaagctcactgtgcctcttgtttccgagggaagaaggactgattaagtcatctaaatggatgcaatactgaattacaggtcagaagatactgaagattactacacattactgggatgtgatgaactatcttcggttgaacaaatcctggcagaatttaaagtcagagctctggaatgtcacccagacaagcatcctgaaaaccccaaagctgtggagacttttcagaaactgcagaaggcaaaggagattctgaccaatgaagagagtcgagcccgctatgaccactggcgaaggagccagatgtcgatgccattccagcagtgggaagctttgaatgactcagtgaagacgtcaatgcactgggttgtcagaggtaaaaaagacctgatgctggaagaatctgacaagactcataccaccaagatggaaaatgaggaatgtagtgagcaaagagaaagaaagaaagaggagctggcttcaaccgcagagaaaacggagcagaaagaacccaagcccctagagaagtcagtctccccgcaaaattcagattcttcaggttttgcagatgtgaatggttggcaccttcgtttccgctggtccaaggatgctccctcagaactcctgaggaagttcagaaactatgaaatatgaaatatctctgcttcaaaaaatgaggaagagcaagactgtcccctatgctgccaacatgcagtctttgtttatgtcttaaaaatgtcatgtttatgtcatgtctgtgaattgctgagtactaattgattcctccatccttgaatcagttctcataatgctttttaaataagaaaaattcagaagatgaatttcttccaatatttgaataaattaaagctcttagatacagagtagattgtattatatgctttttcctattaatactacttatagaaatccattaaaaagcaatctctgtacagtgtatttaaatatttcattgacatactgtgatctctattagtgatggatgtacaaaaaatgttttcttacccttgacttacaatgaaatgtgaaattacttgtctgaaccccgtggggagaaataaataattttcccaaagttcaaaaaaaa

SEQ ID NO: 3174 - DNA, 848 bp, Homo sapiens
ctgatgaacagtttctggtgcaggatcagttcccagtgacgcccgtgagcacgctgtgtgcagaggccagggaaacggcgcggcggctgctgacccactacgtgaaggtgcagggcctggtcatatcacagatgctgcgcaagagcgtggagactcgcgactggctcagcactctggagccccggaatgtgcgggccgtcatgaagcgggtggtggaggataccaccgccatcgacgtgcaggtggggctcctgtacgaagagggtgttcgcaaggcccagagcagcgactccagcaagaggactttctccgtgtacagcagctctcggcagcagggccgctacgcccccagctatacccccagtgccccgatggacaccaacctcttgagcaatatccagaagctattctctgaacgtattgatgtgttcagccctgtggagttcaacaaggtgtcggtgctgaccggcatcatcaagatcagcctgaagacgctgctggagtgtgtgcggctgcgcacctttgggcgcttcgggctgcagcaggtgcaagtggactgccactttctgcagctctacctgtggcgttttgtggccgacgaagaactcgtgcacttgctgctggacgaagtggtggcctctgctgccctgcgctgcccagaccctgtgcccatggagcccagtgtggttgaggtcatctgcgagcgcggctaggcgcagccgctgccatgcaccggtctgtccctgcaccccatggcacccaggatctggtctcggtggtccttccccgcaggcaggtgtcaggaccggcctaataaacatgtgtggcctcctcaaaaaaaaaaaaaa

SEQ ID NO: 3175 - DNA, 658 bp, Homo sapiens
caccgcagacggcgcggatcgcagggagccggtccgccgccggaacgggagcctgggtgtgcgtgtggagtccggactcgtgggagacgatcgcgatgaacacggtgctgtcgcgggcgaactcactgttcgccttctcgctgagcgtgatggcggcgctcaccttcggctgcttcatcaccaccgccttcaaagacaggagccgtcccggtgcggctgcacgtctcgcggatcatgctaaaaaatgtagaagatttcactggacctagagaaagaagtgatctgggatttatcacatttgatataactgctgatctagagaatatatttgattggaatgttaagcagttgtttctttatttatcagcagaatattcaacaaaaaataatgctctgaaccaagttgtcctatgggacaagattgttttgagaggtgataatccgaagctgctgctgaaagatatgaaaacaaaatattttttctttgacgatggaaatggtctcaagggaaacaggaatgtcactttgaccctgtcttggaacgtcgtaccaaatgctggaattctacctcttgtgacaggatcaggacacgtatctgtcccatttccagatacatatgaaataacgaagagttattaaattattctgaatttgaaac

SEQ ID NO: 3176 - DNA, 202 bp, Homo sapiens
ggattcaacacaccattggaattttgcagacagaaagagatttttgttttctggtttatgactttttgaaaaagcttctgggagttctgatttcctcagtcctttaggttaaagcagcgccagggaggaagctgacagaagcagcgttcctgaagtggccgaggttaaacggaatcacagaatggtccagcacttttgcttt

SEQ ID NO: 3177 - DNA, 1332 bp, Homo sapiens
aggtgggggactaggagaggcaggtgctactagctccgcactactagttttgtgaccttgggcaagctagttaatctctgcaatggacctcatcatgaccgttgctgtacttacaatgaaaacaacttggtggatggccaccaagccatgcattattcaagcccatcttgagtgctggaccatcaataatggagagacatgatccttgctctcatggaacttatgctgtagtggaagacaacatgtaaacagctgcaatacagttaaatatttgctgtaatgaagttatatatgtagtgtaaaaagggacaggaaaaatctttaattcaaggaaatctttatgaggacgtagaacttgaacagaaatgtgaagccatctttttctcaggacatttgggaaagggaattcaaggcagccactttcatctctttaagttcataatttgctacttaacttcagatccagggaccaaaggcctgaattccagttgtgcctcaagatggtgctttccctcatttttgtagctcaagacgtacattcaactcaagagtccagctctacagcagctatatttggaaatacacatattttatgaattctaccaaatatctggctgggtagctgccctcgtcaggtggaacatgtaaccatcaaactgaagcatgaattggggattacagctgtaatgaatttccagactgaatgggatattgtacagaattcctcaggctgtaaccgctacccagagcccatgactccagacactatgattaaactatatagggaagaaggcttggcctacatctggatgccaacaccagatatgagcaccgaaggccgagtacagatgctgccccaggcggtgtgcctgctgcatgcgctgctggagaagggacacatcgtgtacgtgcactgcaacgctggggtgggccgctccaccgcggctgtctgcggctggctccagtatgtgatgggctggaatctgaggaaggtgcagtatttcctcatggccaagaggctggctgtctacattgacgaagaggccttggcccgggcacaagaagattttttccagaaatttgggaaggttcgttcttctgtgtgtagcctgtagctggtcagcctgcttctgccccctcctgatttccctaaggagcctgggatgatgttggtcaaatgacctagaaacaaggattctacctgaactgaaaggactgtgtgacctcccccaagccaaccactttcacctgggatgactttcgattatgctttgttttggggctgtatttttgaaatactctacaagaaagctgtggctcaacacatgagaa

SEQ ID NO: 3178 - DNA, 1013 bp, Homo sapiens
  misc_feature (1)...(1013): n = a,t,c or g
tttttttttttttgcaacatctaagtctttattaaggtgagtttttacaaacaagcatctatcccagtgtgggggatgaggatgggagaggaaagcggggcaggaagatgaggattctcatctattgataataaagctccaggttcatcccatcgtggatttcatagtcccccagagacacgtggtccttaaaaatcgtgtaccacttcttcaggacaatcttgttccaacgggtaccagtttgggctgcaatcagcttcttaaggtccccgatggtatcatccgtgctgggcgcagagcagttaaggcaaatggaagcggtagaacgaggaagaggacattctagggcagaataccatctgccaggaccccatccgccccctctcccgggtttaactaaaaccatccgacaacacagattgagttgcctgcctcacgccaatgcacctgcgggtaccactgtctcggctgccagtggatacttgcatttaacgcggaccttcttccccagacggtcgttgcaaacaacctcgatcatcctagctggagcgngaatcgcctcgaacctgccgacgccaccagctcctcacccgagcgctgaaccccggtcgcagttcgaggcgattcgagctccagctaggatgatcgaggttgtttgcaacgaccgtctggggaagaaggtccgcgttaaatgcaacacggatgataccatcggggaccttaagaagctgattgcagcccaaactggtacccgttggaacaagattgtcctgaagaagtgaaatgtctctttttcttaggtacacgatttttaaggaccacgtgtctctgggggactatgaaatccacgatgggatgaacctggagctttattatcaatagatgagaatcctcatcttcctgccccgctttcctctcccatcctcatcccccacactgggatagatgcttgtttgtaaaaactcaccttaataaagacttagatgttgaaaaaaaaaaaaaaaaaaagtttt

SEQ ID NO: 3179 - DNA, 192 bp, Homo sapiens
gaagagcagaccatgtcaataccctgctgctcgtaactcttctctgtgccaggatccctgtgacaatggttctgtacccaccacccggtcattccaccatcaaggagcactcacttctccaaatgaagcaaccagtcatctaagatgaaggccaaaaatgaaaccctctgacctgtccaaggtcctcgtgcc

SEQ ID NO: 3180 - DNA, 834 bp, Homo sapiens
tctgcttcttctgtagccgcttttctcccgtgcctggtaagaaaattatttttccattagaacagcttgttagggtaatcttagaaactgggagacaaattatggcatatcaactatatttcttataaattataatattcactaagactaataacaagttagaataagtcttttccattgatttcattggtgtctattgatagataaacccgctgtgtcctcacggctatcgttattcccgtttgcagcctggggaacctaagggtctcactgggcagaaagtgggagcagccggggatcctgaatgcgggaacctgtgttcctttcttagccaggacgccggggcttcccatacacgtggctccttcaaatgacatatttacttatttacgtaccgagtaactgagtaattcttcaacacaggatgacatcacaacttcaccaaagttaactcaccctcatctcagcatctgtagctctgccatctattttagcaaatccctcaaaaattgttttgtagagaatgttcctgcgtgtgttgctgtcgtctggaggaaggtactccaggatggaagcctggtgctgtctgtacatgtccaaaataattcgaaccgccgtctcgcggacctcatacactctatgctccagggcactcactgaaaacttcatcacgttgtcaatggtgaagcccgagctgccagtgcccaggtctttcagcagccgggccaggaggcccatctgactcattgccaggtgaactgaagagtttgctttcaatggctgcaccaggtaggatggaataatttggagagacttaacttctttaaacaaggc

SEQ ID NO: 3181 - DNA, 505 bp, Homo sapiens
ccatacactgtgtgctatttgtgttaacatggaagaggattcattgtttttatttttatttttttaattttttcttttttattaagctagcatctgccccagttggtgttcaaatagcacttgactctgcctgtgatatctgtatcttttctctaatcagagatacagaggttgagtataaaataaacctgctcagataggacaattaagtgcactgtacaattttcccagtttacaggtctatacttaagggaaaagttgcaagaatgctgaaaaaaaattgaacacaatctcattgaggagcattttttaaaaactaaaaaaaaaaaaactttgccagccatttacttgactattgagcttacttacttggacgcaacattgcaagcgctgtgaatggaaacagaatacacttaacatagaaatgaatgattctttcgcttctacagtgcaaggatttttttgtacaaaacttttttaaatataaatgttaagaaaaaaaaaa

SEQ ID NO: 3182 - DNA, 1320 bp, Homo sapiens
  misc_feature (1)...(1320): n = a,t,c or g
ggtcatacacacctccaacctcatccatgctgactggcaccagaaaactcaaggaatatggttgagccccttatacccacgaattgctgatggaacccacaaatctggagagtcgccaacacattttaaagctgatctcatcagttacttgatggcttataatgccccttctctcaaggagtggatagatgtcattcacaagcacgatctctctgaaacaaatgtttatcttattggttcaaccccaggacgctttcaaggaagtcaaaaagataattggggacattttagacttaagaagcttctgaaagaccatgcctcatccatgcctaacgcagagtcctggcctgtcgtaggtcagttttcaagcgttggctccttgggagcgagtgaatcaaagtggttatgttctgagtttaaagagagcatgctgacactggggaaggaaagcaagactccaggaaaaagctctgttcctctttacttgatctatccttctgtggaaaatgtgcggaccagtttagaaggatatcctgctgggggctgctctgtncgcgcgtggaanttaggggggcccaaatcagacagctgaaaaacagaattggctgcattcctattttcacaaatggtcagctgagacttctggccgcagcaatgccatgccacatattaagacatatatgaggccttctccagacttcagtaaaattgcttggttccttgtcacaagcgcaaatctgtccaaggctgcctggggagcattggagaagaatggcacccagctgatgatccgctcctacgagctcggggtccttttcctcccttcagcatttggtctagacagtttcaaagtgaaacagaagttcttcgctggcagccaggagccaatggccacctttcctgtgccatatgatttgcctccagaactgtatggaagtaaagatcggccatggatatggaacattccttatgtcaaagcaccggatacgcatgggaacatgtgggtgccctcctgagaatcttgaggcactgtgaaatttaagtgtaagacattgagccacaaacatggaatctcttctttgtactggatgtccacttcccttaaagtcttatttgcacccttacaaaatctttccaaaggtcactcttatgaatggatgttggttatacttttaatggacattaacattcctaataaagtattagtttcttaattcacttttatatgttttggaaagaaaattagtgaacttctctatgttaaaaatacgtactgcttgagtatcccctgtctgaaatgcttggggaccagaagtgttc

SEQ ID NO: 3183 - DNA, 1501 bp, Homo sapiens
tttttcttttttttaaatatacatacagttctttattaaacaactgtaaacacttcactgtaaaaatccataaaactttataaacaaacattttgtaaatagaatctatgctacagtaaaataattaacacaattatttacatgcaatactgacaaatttggcactttttgaaaagaaatgtacaaaacacttgctttaaaagaaatttaaaattataaaaactccgagcattactatcatgcactttgcaaatacctcacaagcacttatggcacagctatcagagagcatcaggctctctggtaatatttatgtaacttttaatgtgcttccataagtttgttgtaaaaccacctggacattgtcaagaataaagtcaaatgccatattccaaaccgattccaccgattgctgcatcagccttttcatgtattttataactagatccagtttttccaaatctttttcttctattagatcagtacagtatttcacaacttggagaatgtcttcttccattggatctaggaagggggaaaaacttcaaatgaggaccagtctttttgaaggagaaagtcagagatctgcatggataaaggaaaactgcatttctacaactatgtcactaacagctatcaaaggaatgggctttgttacttttcaaagcaagtcccagaatttaaaagatttgggggtagctgctttaagcttatcagagttagagaaatgggttaaatctgcatagtttagtctgtttatgttctcaaatcatgagacgactacatctcagccttgggccatcttaacacaggccaagccaacctgaaattgtagttatccattctctgagcaaggtcttcacatcattgaattcaacagctccagctagattgggtgctggaggtctcacacagccagctggggtcaagactgcaaactagaaagggccctgggcacacctgaagtagaagcagagagttccttccaggggtttctctgcaggaggtccttcatgttttagaaacccatcaattaacttctggggactgccacaggcccctggcagagtttttgcaggactgttaagcagcttgttattcaaaggactctgaatcctttttggtgaaccaatggtttttttcttcttgtttcttttcttttctttcactgctgcctttagatgaagtaaaggattctttggcactaagagcagatggatataagatcctcaacaaaatgatagtatggatagtctggatgacagtattgggttctcttttctcctcccaaatacaacaggctccctagcctacacctcccctcctgccccaagtgagaggcagtgaatggcaatggcccaaagtacaggctctccaattctctctttgctttgcccacttactaattttgacctttggcatgttgcctcatctatgatgggtagtactaaaatgtgggtttgatgttttgtgatgcattttgaaccaacatcctttaatg

SEQ ID NO: 3184 - DNA, 1034 bp, Homo sapiens
  misc_feature (1)...(1034): n = a,t,c or g
ggcttgttatagaaatctgtttaatggtttaggaatgtgtacactctggctctgccaagtttccataaaggcaacttttccatgttttaaaaaatagatttggtataaagatttatatattcataaataggtggcatgaaaaattaccaaatgcaaatggaatacttgcgctgactgaagccctgttcaccccaagtccaggccctgcaggggtccgagggtctctgctggaggaggccccaactccggcagcctcttagggaagagaaactgaattaaatgtgtattaggaacccctccagctccttaagccagcgtcgcactggccccaccgaggcctcagcccacctccctctgcttccccccgccacctccaccattgccccctcccctgcactctggcccctgaccccacctgttcccactctttggcaatttatcaacaaaggaagagatgacactgttctccttccgccccagagcccgggctgccgggagagcttagcctgccaaggggaggaaacaagccggctttgttttgtctcacacacttccccgtcttcactcccagcccagttttaagggccggaagggcagtggggccccctcctggtgggatacagcaggcaggagcccctgcaaccccaggtacaggtcttgagtccctggacaccggcttttgtgcctgagagggggtgggaacgcttctctgtaggaaatggcttcagtccaggatccaggggtaggggaacctcgaccatggggtgggttgctcctgccagggggtaacttagcaaggccccagggtggagccagttctgggagtgtgtccagctaggcatctgtgaccccaaatngcatgaataaaaggncaggttgctaagagccaggggaggncatggggcagggagaccaggttggcccagacaggacagaggtgctccagggacagggtgctggagtgaagccaggtggagcggtggagctgtggagcctttgaaacatcctgatggcccaggcctttgttcccaaga

SEQ ID NO: 3185 - DNA, 471 bp, Homo sapiens
  misc_feature (1)...(471): n = a,t,c or g
cctatcannttngannccctatnnnnnnnnnnnnnnnnnnnnnnnnnnnnnnnnnnnnnnnnnnnnnnnnnnnnnnnnnnnnnnnnnnnnnggcacgagaccatatctttatttctactattagttataattaattatatgtgaataactgagctacagtataaacaaaactgtcactgatagatcaaagacctctataataataatggtacggaaaattagagctaatttgtcattagcacattcttttccattgactttaaatttccaccgttctccaataaaagttggtatagattaaatgttaatttcaggacaattaaaacttcaaattaaaaaaaaatataaaatgatttcccagtccataattttacaacgactgctacatttcttggttgaataaactaagtattatataattaaataaatacaagttttcatctatgtactcctgttttgagacagagtttc

SEQ ID NO: 3186 - DNA, 1202 bp, Homo sapiens
tttttttttttttgattaagaaataactttatttttcatgtgtcaatcccatgattgaaaagacatgttgctctcaagtagataagaggcataatcttaaacaaaattctttctgaaaatttagcttatgaactcattacactgcaaaccagagaaggagcacaaaaagctgcagcccacattgaaacctggcaaacactctccgccaaaattagtagcaggaatgttaaagctttatcaaaaacatgtcagcaacggaatagcaacaatacagccattaactgttgtgccttcaacttaagaaaagcatttaaagaatcaccccatttcttataaaaatcatttctcagaaaagaattgttaatcaaaagactattagaactggaactctcttctttcacttcagttctagattttctttaatcaacaatatctctagttaatacttggacagaatttggcttctcagaagagtctttgtcatttaagcacagtgtggaatgggaaaaagtgtatagttacaaggaaactagaagagtacaaaaaaatagtcacttctgaaactcgctgatgcctcaagaaatcagagacccttcattaaggtgggtctcatatgcctgagagctttgtgcttgaggaagtatgacttagaggtagctctggttctggtaatttatatttaattataatttgctgtatcctgtcacaagagagttctaatattttcagcaaagtaaaagcattcaacattttttccttacccaccctatagcttccccatagaaaaagataagaaaaagcttaatgtgactccacatagaatagcagctaattcagcaattcgcactgtatggttgttgacaggactaggaaaggcagcctagtgccccaagctgtaggagctggatctgcagaagtgtgcaggtctgctgtgttcacagcactcagggaaagaggggaggaggtggctgatgagggtgcacgttcggagaagtctgtatgtgtttcatggcatattctgccacagcaacaaaacaaccaaatcagcagtagatttgactgtacccttcgatttcaaagaagtctgcgcccctcgcccactcgccacctacacttcatgcaggaaagatagatcactatcatctatttgaatacagggcctcagaagaggtgggctggtatgggtacaaacagcgtatttt

SEQ ID NO: 3187 - DNA, 304 bp, Homo sapiens
gcacagactatggtctctgttttgataaggaaactgccagctgtcgaaagttaaccagcagagaggggaagatggcccaggagccagcccctcctgagttttaaactacactgttttctgtccagatattccaatggagacagttggaaaacctgtacttcagagaaaagaagttttccgtggaagttcatgacccacgcagggcttcagtgacaaggaggacgtttgggcacagcggcattgcagtgcacacgtggtatgcatgtccggcattgatcaagtccatctgggctatggccataag

SEQ ID NO: 3188 - DNA, 340 bp, Homo sapiens
ttcttagtgaacatgttgaggatgtacatttccccgtgtattgaagggcggtgcccctcaccttaaatattgttaccagagctcattttcctttgcccagagtgcctggaacattgaggcccaaggtcaaagggatgggggtgtctgaaagctggcagagagccctgggcactagatggggtacaggcactctcacagcctgacatgatggaaggaacagatcacctgctacagagagtcagcagatcttcatttgtttgtttgtttttattagcttctcaaccagctcctcaaagtgggttccatgggaccactgcatttccatgagattcagctgagt

SEQ ID NO: 3189 - DNA, 3519 bp, Homo sapiens
cgaagcgggtcctgccccgctgtcagctgcggcccccggcgccgggcgggggtggccgcgaccattggcggagaggcgaaaggggcggggccgccgccagccgctgcgggcaaggctgaacaggcggaggtgggcagccggccagggaagcacggtccaggcggctacattcggcccggccatggcagcggcgcccctgaaagtgtgcatcgtgggctcggggaactggggttcagctgttgcaaaaataattggtaataacgtcaagaaacttcagaaatttgcctccacagtcaagatgtgggtctttgaagaaacagtgaatggcagaaaactgacagacatcataaataatgaccatgaaaatgtaaaatatcttcctggacacaagctgccagaaaatgtggttgccatgtcaaatcttagcgaggctgtgcaggatgcagacctgctggtgtttgtcattccccaccagttcattcacagaatctgtgatgagatcactgggagagtgcccaagaaagcgctgggaatcaccctcatcaagggcatagacgagggccccgaggggctgaaactcatttctgacatcatccgtgagaagatgggtattgacatcagtgtgctgatgggagccaacattgccaatgaggtggctgcagagaagttctgtgagaccaccatcggcagcaaagtaatggagaacggccttctcttcaaagaacttctgcagactccaaattttcgaattacggtggttgatgatgcagacactgttgaactctgtggtgcgcttaagaacatcgtagctgtgggagctgggttctgcgacggcctccgctgtggagacaacaccaaagcggccgtcatccgcctgggactcatggaaatgattgcttttgccaggatcttctgcaaaggccaagtgtctacagccaccttcctagagagctgcggggtggccgacctgatcaccacctgttacggagggcggaaccgcagggtggccgaggccttcgccagaactgggaagaccattgaagagttggagaaggagatgctgaatgggcaaaagctccaaggaccgcagacttctgctgaagtgtaccgcatcctcaaacagaagggactactggacaagtttccattgtttactgcagtgtatcagatctgctacgaaagcagaccagttcaagagatgttgtcttgtcttcagagccatccagagcatacataaagtgaatcatgcaacgtgttgggggaagttctgcctttctgatcaatcttttgggttcacgtggaaaccaggacttggcaacatgatgtttgactgtaatctcatcacggatatgtatgaatttttacaggttcgtttttgaattgtgagaggcagttcattagcaaagatgtactgggcagtaactaaacacacatgcaaacatgtgaatggtggtttattcctcattctgtggatgtttctatgagccaaaatttgatgtctttttttcaaaattgcttatgaaatttccacacaatcgtagcttataagattggaacgatctcagccaaatattttaggtgtaattcatatgtatttgagtggaggattttttttctcatttttctagtgttaaattttaaccagcattaacatggtagagtggaggagtgagtgtgttcaaagatcaacatatttaacttttaaacactatctcaaagccagcataattaactactttgattgtgggctgacctttgtttttttaacaatcaggcatttttaattagataatccactcatgtatttccccctcactgcagttgtctgcatttttagcctcttttctcttcgttagttgtcagaatatgcctttgtcaaggctcagaggtaacaagacagaaaattcatctgggattttcctgctgtggctggcacattcttctgattaacagacacttgtatgatgctttaggctagttagtgcattttttagcaaacatttatcttaaacatcacagatccactggggggtgcaaggggctactgttagtcctcttgttagatgcagtcactcctcctggtcacctagtgagcagggacagagccaggagtcaagtgcagtgccaaggtgcatgaccctctgagaagtcactgggctgatttgacctccgactcattggttgtgtaaatgccatgtgcagcctttcctgaggccataggagggcttcctgcagctgagatctatgcaggccatcctctcaacaggtgccactccaagggcggtcctcggtgcagcagcatcagcttcacttgtgggggggtgggggaaggggcggtctcagaaatgcaggttcccaggtcccaccctggacttctgaaggggtgtggcatctgtgtttctgatgcttactacaatatgtgaaccactactttagaaaatctgctttaacttggcattcctctaattgtgttccctaggaaatgactgtcccaagagccagtgattattccaggtgttccctggaaaggtcaagtgagtctgggaaacactatgtctgtacacctcttgaaggtgtcgaatgtatgtttatacatcagtggaacccatttttctagcctagcaagtcccaaacacattacactgaagagattttggtgaggaaacttgctggagttttcagggaacactgttctaggcttaggtgaccttaggatcactcaagtagacccttcactccctgcgagaaattaggatgaataactacctgtggcattgttggttctgaacttttacagttcaggcctgctgtgaatctttgatgaagctttaaggtgacactgttgtacaagatgtcagctttgctgaaacgcacattacctggaataagtgctttaattgtagaattagaatgggatttactgtactgttttaaatgagattggcttcagaatccattacagttaccttacatagcacttgatacgtgttaaatgaacatatgaatgtaatttatatattcctagaatttaagttactttgtgagatttgggcctgtccctcaatgccagtttaggatttctttttttctataccttgaaatgattataaaatagattttcatgggaattttaaaaactctatccaaaacatttttggagcattttaaagccccatacacagaagtatacgaaagcacacaaaacactccaagtttcagcagttttagcgccaccattaacccactttgcttgtctcatgaaaaatctttgttaaagtttgtacacaggtaacaaaaagttactttaaaagatatataaagggctgtaagctaaattgtgggtgtctaggtaaggtaggcataatgaggatgtgagggagttggggaactttgcgtgttttgcggtattttcatctggcattcagcttcttactctgggggttgtactcgagtgttatttctttacaaatgcccttgtaattaccactctggagtctgctgactgtgtcctcttggaac

SEQ ID NO: 3190 - DNA, 491 bp, Homo sapiens
  misc_feature (1)...(491): n = a,t,c or g
cttggcccccctagnnnnnnnnnnnnnnnnnnnnnnnnnnnnnnnnnnnnnnnnnnnnnnnnnnnnnnnnnnnnnnnnnnnnnggcacgagatatcaatttcaatttcctgaaaagacacacattagacaattatgctattaccaatctttgagtggctagatggattttgctgcatggttgaagacttacaaagagcctgtacatagcacattcacaagacaggtagggttaaaaactaactaaaaagaattcctttcgataccaataatctgccaagccttccttccccatgcgtagatgtaaacattatctggttttctcagattcctgtaagaggaagaagtttgaagaattcactggcttttgtatcacagtacaacttgggaacactaattttcaaatgttctaacagttcttcatagcnggaagccccacacaattatgngaattatccctttatnnnaacagntgccggaannnctggcattg

SEQ ID NO: 3191 - DNA, 898 bp, Homo sapiens
gacagcagctggagggcagaggaggcggcgcgggcgtgtcctgtcctcgccatgaggccgcagcaggcgccggtgtccggaaaggtgttcattcagcgagactacagcagtggcacacgctgccagttccagaccaagttccctgcggacgtggagaaccggattgataggcagcagtttgaagaaacagttcgaactctaaataacctttatgcagaagcagagaagctcggcggccagtcatatctcgaaggttgtttggcttgtttaacagcatataccatcttcctatggcatgggaaactcattattgagaaggttctgaagaaagtctccaaatacattcaagagcagaatgagaagatctatgctccacaaggcctcctcctgacagaccctattgagcgaggactgcgagttattgaaattaccatttatgaagacagaggcatgagcagtggaagataaaccgaagaattaaagatcccacttccagccgggcccctcatgtatccactggccgaccgcagagtgtccctacctcctctccagagcatcattcctttctatctgctgccagagccacggtgccatttactccaaggactcactttctaaaattccacacctggagtgacctctagtcgctcagcatccactttgtgtctccaaattgtgtaggactctgtaatcttttgattagtttctgagaaaacacaatgaagcacttcacttttttttattcaaagccatttaataaaacacagttggtcagcccagtgcaaagcttgttatctgccaccagtacataccattgggttctcttcattccttggggccagctttcttcaggtgggcttttaggaccttcaacaagccgtatttttcaccagtggtt

SEQ ID NO: 3192 - DNA, 336 bp, Homo sapiens
  misc_feature (1)...(336): n = a,t,c or g
tgataccctttnnnnnnnnnnnnnnnnnnnnnnnnnnnnnnnnnnnnnnnnnnnnnnnnnnnnnnnnnnnnnnnggcacgagagcttcaatccctgcaaatctcatgtcaaannnnnnnnnnnnnnnnnnnnnnnnnnnnnnnnnnnnnnnnnnnnnnnnnnnnaggtggtttnnnnnnnnnnnnnnnnnnnnnnnnnnnnnnnnnnnnnnnnnnnnnnnnnnnnnnnnnnnnnnnnnnnnnnnnnnnnnnnnnnnnnnnnnnnnnnnnnactcttgcccctgctccggccatgtcacctgccttgttcccccttcaccttctaccatgattgtat

SEQ ID NO: 3193 - DNA, 1226 bp, Homo sapiens
cctggccctcccaaagtgctgggattaccaggcgtgagccactgtccccagcaaattaacctcaatttttacacaaaatgtcctgaatggaagaccatgaaactatctggtttaaacaaaatatgggccctaaaacctaagctcagtcacaagcccaggtaaaagagatgctattctgtgaccttttttttcttactttaagaatatgttatatgccgaacagttttaaaatgtgattagttgccttggtgacagaacaaatagcagcaactctgttctaattataagatgatttttaaatttatttttattttaagactaagcatcctctttgacaatccaaaaacataatccttgctcactctggacacacacacctaaaacagttaaaagtgattcctcaatttgcaataacaaagtaggaaaaaaagaatacgttctcaagctgtagttcaatttttctgtcctcttttccaaaaaatgttactttgctaccaagcctcccaccaatgataaggaaagacaatttttcaaaaagccaacaaaacccagaaaaaggaacaggtatcaattcaaaattatcacccagaacactgctgttgcaaagaaagagtatgaagccaaattcccatagcttgttagagaagatctttaaaaataattcagaaagttaggactggaactactgtagtatagacaggttatactgtcactatatgcatatacagtggtaaatgcagatataattcaagaacattcagcttgggaatatattaagctttctcctattccagcagaggaaataaaaacatgtgttcctggaattaatattaaaatcatccttacaaacagaaggtagggcaaaggtaaagagagagaatgtggaacaaaagtagcaaagacaagccattttgaatctaggttctaacacccaggaaagctgaatagaacttaaattcttctgagccagtatcactaaattctagatttggcctgaaaccagtggaccatatacaccactaataaatatcaagtgccccacagtgtttgtggtattaaaacatatatttatattataaatttccattctgaaaagcagatcaaaatgacactggaccatccagtcagttatggagtaatgggcttcctccaaagagaactgacttggcagaaatttaggttggtaggaatgtgattaacatggagtaaacgagcggacgcgtggg

SEQ ID NO: 3194 - DNA, 1113 bp, Homo sapiens
tttcctgaagtgatgtttaaattttatttaataaaaatacagttttctttttaaatcaacaaataacattgtttttcagaaatctactcaaatgctgctccttagttatggcttaagagctacccaaagacttcagtgggtaggctgaggggaatagaaatgcagaatccttctttcagtagcctatatacagttatctcctacactcactacacacgtttgggcatgtagaacttgccccagtatttccccttgtgggtcaagtcatatgggctcagtactttccgtatgcccagcatgttggcagtggctattcgctcaaatgtccaggggttctggttgttacgttctctttcctcttgatcttttcgcatcttctctagagtcccgcggctcacagcctttgctgcgaagggcaacttgtgggcaacctggtcaaggaaaccttgcacttcttcaaattcacaacgcccacccatctctacaacaaggcggccagccttcacaggtgtcacgtagtggtcaatagcacctttgcctccccccatgcgatgcccaacacttttgcgagtgatgggcttgaaaggggctggtactcgccatatggcaaacatgttcttggggtccatagagcggttgattgtcaggcgcatcatttcaaagtggccccaatgcaggtagccaccacccaatgccaagattgcaaaaattgcccttctgtaaaactccgtaggcttcaagtgggaacgggtccccgtatgtcacttaaatttttaggttctcttcttactttttggcacaagtgggtgccctttcaataaatctaagcttgggtttttcaggaatggaaacatcttcaaaacttggtactgggagcagtgtctttacgccagcactggcggggaggagtgcccaggaatctgacaagggcacccgcaggagcggcgcactagcgcgagccagcagcctccacatggtcacgggcgtccggcggcgcggagctcccccagcgactccggctgtctcctgcacccaggtaagcagcggcgctccactacctagctgtaatcggctcaggacaccgctcagtggggccggaagttgtgttcaccc

SEQ ID NO: 3195 - DNA, 367 bp, Homo sapiens
catggcaaatcaccattttatgaataatgttgataccagagaggctaagtgacttgtctaagtcaatatagtaagtattttgactcctggcccagtgcagaggtattagaaatgaggatagaggagtgtgcgagaaattttggaaggaaatcaatagaccaaatcaataggccttggtgattaactagtcacaaagcttgaagaaggattattcaaaaaggacttgagggcttgaagctccactggctgggcaaacggtggcacccatgagaagagcaaggaaggctggaggctggggaagtcagaaagaacgtggagaaagaagtttgtttcccaaatgcaaacttaactgacttattatgaatat

SEQ ID NO: 3196 - DNA, 660 bp, Homo sapiens
tctacctgtacttcgggggcaccctggctgtgtgcgtctggaagtgctcctgacactctgtcccctgcttcctgaatctcctgggtgtgtcttaactgccagtcccagcacctcctgaaagccccactctcctccagtggtcacagtggaaggatcatgggagaaacagaagggaagaaagatgaggctgattataagcgactgcagaccttccctctggtcaggcactcggacatgccagaggagatgcgcgtggagaccatggagctatgtgtcacagcctgtgagaaattctccaacaacaacgagagcgccgccaagatgattcaaagagacaatggacaagaagttcggctcctcctggcacgtggtgatcggcgagggctttgggtttgagatcacccacgaggtgaagaacctcctctacctgtacttcgggggcaccctggctgtgtgcgtctggaagtgctcctgacactctgtcccctgccccgtcccctgcagggccttttcctgccactcatctggggtggggagcagccctaggcaggtcctggtttttccaaggagagttggggtcttttctttttgtctttgtgtaccagtttcctgagccacgcccagtgtgtgaacttgacatctccatccccagggtctcaa

SEQ ID NO: 3197 - DNA, 700 bp, Homo sapiens
gttcaggttttgccctggctttaggaaacatagttcatgggttgtctgtgtgtggacatggaaaagctgaagacttgggcagcaaactactccctgcctggatcagaattgttctaacagagggcactcccacaatgctttgtctggcagctcttcatggcatggtggccttggtaggctctgaaggggatgtaatgcagctgaaatcagaagccatccagacctctcattttcaaggcagacttaatgaagtcattagaaccttaactcaggtcattagtgtctctggggtgattggtctccagtcaaatgcagtctggcttcttggacatcttcatctatctactctatcctcaagtcaaagtagagcctctgttcctactgactatagctacttgcctgaaagcagttttattggagcagctattggcttcttcattacaggaggaaaaaaaggtcctgaatctgtgcctccttcccttcttaaagtagtgatgaaacccatagcaactgttggagaaagctaccaatatcctcctgtgaactgggctgcacttctctctccacttatgaggctaaattttggtgaagagatccagcaactgtgccttgaaattatggtgacccaggcacagtcatcccagaatgcagctgcactattgggcttggtgggtgacaccaccactggatccacagtctg

SEQ ID NO: 3198 - DNA, 566 bp, Homo sapiens
ggacgtgagccacagcaccagaccaggggctatttttgtgacccacataggtggcccattcagcctcaaggggaaatccagggtaggaagcagcagctctgctggaactgggctcagcagtcccatttgggatgtaagcctctattgcctctaagatgacccttttcctgtgggttgactgactctgagggcgatttcggaaatgttttcagcagaaatgaaggataagcatcgcacatgtccagcaatgtctttgagaatgcagtcatttgcacgtgagttctcatctttgttttctgaaacagacgtttcttttagtaagtcacaatacatgctaattttcatttctagaatggtcactggcagttctcacttttaactataagaagtcacgtgggaacttagtgatttttaacaaatactaaattcatcctcactttatgttgatcttccagcaacgtttatatatttagtaattttaaaaattcctatttgatacaattaaattttatataatgtgttttgcttgaataaaatgttacatttatctttgagactctgaccaa

SEQ ID NO: 3199 - DNA, 832 bp, Homo sapiens
caaaagcatgacgacttcggtctgcgccggaagtgcatgagctgccgatgtggtgcttagtgattgcggtttcggtcgctctcccgtgtttcccgggctgggtatttgcctcgcaccatggcgcccaagggcaaagtgggcacgagagggaagaagcagatatttgaagagaacagagagactctgaagttctacctgcggatcatactgggggccaatgccatttactgccttgtgacgttggtcttcttttactcatctgcctcattttgggcctggttggccctgggctttagtctggcagtgtatggggccagctaccactctatgagctcgatggcacgagcagcgttctctgaggatggggccctgatggatggtggcatggacctcaacatggagcagggcatggcagagtgagtgtcccccaccgccagcccaggcaccttaaggatgtgatcctactgacagccatcgtgcaggtgctcagctgcttctctctctaatgtctggtccttctggcttctggctccaggccgggccctttacctcctgtgggtgaatgtgctgggcccctggttcactgcagacagtggcaccccagcaccagagcacaatgagaaacggcagcgccgacaggagcggcggcagatgaagcggttatagccattgacattgtggccacaggccactggccctgggtggctctgtcagggtgcacagcccctcatgcctggagcaatgagggtctagtccaggggccaaaagcagtctgaggtattgggtatacttatactctatagggtcgttgaataaatggcttagaatgtga

SEQ ID NO: 3200 - DNA, 465 bp, Homo sapiens
  misc_feature (1)...(465): n = a,t,c or g
tttggaaanctgttgacnnnnnnnnnnnnnnnnnnnnnnnnnnnnnnnnnnnnnnnnnnnnnnnnnnnnnnnnnnggcacgagggacattttcatacaaaatatttcggtacacttttgtttatatctgaaaggtaaattcctagcagtagaattattatagcaaacggaatttaacattttggtgtgaattgccaaattgccctcccaagtggtttagtcagcttacccttgccaacaatagatctatccttgccagccttggnnnnnacatttaccngtttaatagatagtaaaaccatatcttaantgnctaccctgaagccaccatacnggagaggctgcgtacagngtttcacgtanagagagggatncccangaggcccacctgntncaaccccagctgcatgagtcttccagcccaggcncagacatgtggataaganttaaacattttcagccccac

SEQ ID NO: 3201 - DNA, 608 bp, Homo sapiens
  misc_feature (1)...(608): n = a,t,c or g
ttcttttgtggttcttccctggagcgactctggggagtcctggatatcccgcctgccccttcccctcagccgcatgcttgttccaacagtctccacagcaaaatgtgatgctttgatttttttgttgttgtttttgtttttgtattgtttttgtgtttttgttttgaattttttcctttcctactaagattatgcccagaaaaaagttttgcatgtttcctgctgtttcttcacaccttcgtatatatcaccttcacctctctgttttctatagtttgtgcaaaaactgatcgatttaaaagggtttcaaagaagctgttttaaattgttgtagggttgattatttttttcaagattgtattgtttaattttgaagtggcaactttctcctctattgcccttagagcgtttgcctgtgcacttagactgtcacttcgtgtggcctccaggtcttaccggggcttccgggaggctgggctggcnttgctcagagagggtgggaagggggcctggagagacacgagaagcagagggtagagcctagaaggtggcagcaggtgggtaagaaggcctaatttagcacattaggggcagtgagcacctggagg

SEQ ID NO: 3202 - DNA, 192 bp, Homo sapiens
gaaaaaaagaaaaccaagaagatgggaaaaccatgcagaattgatttgacgaggaaagccttggtctctaatacatgcaatgactagaacagtatttggtcaaagaaccacataagctctgtaccctggaggaaatgtatgcaggcaaggactagtaaaataaaaaataataataattaaaaaaaaaaaaaa

SEQ ID NO: 3203 - DNA, 1193 bp, Homo sapiens
cctcgtcgccagcagcagatgaccagctcgcagaaggccctgatgctcgagctgaaatccctgcaggaggaaccggtggagggcttccggatcaccctggtggacgagtccgacctctacaactgggaggtggccatcttcggaccccccaacaccctctacgaaggcggctacttcaaggcgcatattaaatttcctattgactacccctattcaccacctaccttcagattcttgaccaaaatgtggcaccccaacatttatgagaatggagatgtatgcatttcgattcttcatccgcctgtagatgacccacagagtggagaactgccttctgaaaggtggaatcctactcagaatgtgaggactatcctattaagtgtaatctcactgcttaatgagcccaacaccttctccccagccaatgtcgatgcttcagttatgttcaggaaatggagagacagtaaaggaaaagacaaagaatatgctgaaattattaggaaacaagtttcagccactaaggccgaaggcaggaaaaggatggagtgaaggtccccacaaccctggcggaatactgcatcaaaactaaagtgccttccaatgacaacagctcagatttgctttacggacgacttgtatgatgacgacattgatgatgaagatgaggaggaggaagatgccgactgttatgatgatggatgattctgggaatgaggagtcgtgacgtgctccttcagtgcccctgtactgccctgcccatctcaggccaaagggaggggagcaagtggggacctggccatggcccctcagcaaaaacctattcacagcgggtggggaaacacacacagctcctgctgactcccccttatggatctcagtttgctcctttttatggacctttaatgggagagagagtaaccctccacagaatgtctgaattcttgcattctttacccttccatcactatattgattctttttttaaaaaatatgaacccaaactcccgcctcacttcgtctctacagaatgttcacagcaaaacacgtttggtctgtttttagattcttgaagaattcaatagtctttcaagatgtttaatgtgtttaaagctgggaacctgttgggagttcacaagtgctgcatatactgggtagcaaaagaaaatggaaaaaaacccacaaaacaaacttta

SEQ ID NO: 3204 - DNA, 690 bp, Homo sapiens
  misc_feature (1)...(690): n = a,t,c or g
caccgccccaaacccctaccctcctgaataggcgtgagcacngtgntggggtgaatattcctaaaacacagcacatgcaggagtcttatttgtatccttcacaatttaattcaatttcaatacaccgcgngatcaaacacctattgggtgttggggtactgggcaagtattagaaaattctgaaatggagactagtttctcaaaatgcttttaagggaacaattattagacactatctaacaaggagggtgaaagagagaaaacagttgacccaactggacactgggttatacatatcaccttttctgaatgaacatcagaaaataaaatccggcaagtgtaataagagtattaacaattagagctctcctggaattgcaagcagcggggcttgtcccctttgtgggaacacattctaggcaagagggcagaaaggcaggaagaaagggatggagatgagccagccgcctaaatcttcagggcaangctanatttccccattgcaagggatgtggaatcagcccttcaaatggngctgcaatgctttcatcacgggaaagcttaccncctggngcaaggaacacangnaccgtcagcatcccancgggangggaaacaaatcnanggggncnaaaaatccctttgtccccganggaaagttcccgttgcagtgggtccccaatgtctggg

SEQ ID NO: 3205 - DNA, 473 bp, Homo sapiens
  misc_feature (1)...(473): n = a,t,c or g
ggaaactgcctgtaaatctccctcctggagttggcaaggccctgagaagtgctgtatcgagaatcctgttgaccttgtttaacgaagcacttcctaggctcgtttgcccaggagccccttaacatcccatgaatgagcattctagagggtgaaccctgggaaatgctgacccagcctttctaacactgacatttgaagttctgtgcctttctaaatgtggagcctgtcaccactgtgtgatgatgggtgcctcctggggagttccatggaacccagaacagatgaggctagggcagggagagaaccacggcgagagcctaattccttgattgccccccaggaggagggttaggcaggaagggcaggcaaantcttccccatgttttggaaaagttcacaacntggaaccattttaatggggattgttacctttggggccagggnacttgtttgaggcttttttaacanttttt

SEQ ID NO: 3206 - DNA, 545 bp, Homo sapiens
agtcatacctctcaagtgcagctgtccaacagagccatggaactgctaagagtaaaaggtcaaagatcctggtctgttggactatcagtagctgacatggttgacagtattgtaaacaataagaagaaagtgcattctgtatcagctttagcaaagggatattatgatataaatagtgaagtgtttttaagtttgccttgcatccttggaaccaatggagtatctgaagttatcaaaaccacactgaaagaagatacagttactgagaaactccaaagcagtgcatcctcaatccacagtctccaacaacagttaaaactttgattctcaaatgcaatttgagaggctggacttctacctaaagggaaaagtcatttaattttacctatatataggtttgaggatttctgtatcctgctacttacttttacaaactgcttggttaaagtagagggtttcttgattagctttgtgatgtaaatccttaaggagttatacaaggaggggaaaaattaattttatttggggttcttgagaatctatgc

SEQ ID NO: 3207 - DNA, 543 bp, Homo sapiens
gcgtcgactttctttctcgtacttcttttctctttattccctttcatagcttctgccgggatccaggcagagagagcactaatgggggaaagggagcgagcgcttcccgctttccccagcgtgggccctcggagttgggtgtgggggcagcagggccagaggaaaggcacaggtggcgatttgccccagccctcccccctaagatgcagaccctcagaacacgtcgcggaaggtgagctccctgctccgagaggcagactcgggtgtaacgcaaagacggtttctttcatcaataaggtccccactgcctcacagcccctaaggccacccgctggttctggcattctagacgggggtgcccttggcccttcctttgtcttcctgttttgcagggtaatcccagggttccatgcgtatcctctgcacattcagcatgggctcctcggtgcttgtgtctccatttttctgtcgttctgcgataatcatggcccggaggagaggcgggtacggcacggaggccaggctgtcttccggcgccggcgc

SEQ ID NO: 3208 - DNA, 1058 bp, Homo sapiens
  misc_feature (1)...(1058): n = a,t,c or g
catttctgtattatattctcaactcgttatctaaagcatcagaacatgtgttttcagagatgagtcctttactataaggttaatatttattttcattttctgtattatatatgaaaagtaaattaatgtgaaacctggcccagcttgctggaaagcaggttttaaattgtaaatattccttagaggagcaaatggattgtttaataccatagtctcagtaatctagcttatataaggtcattacattttttaactgaaaaacctagttacctgattattgcacattataaaattgtttttctaatactttatagggcccaacttcagaaaatacttcgcttttttctttttatgctttcgtttgtttaccagcaagcaacttccctgggggaaggccaaacacatattcataaaaaaaatcaagtagctgatgtgcagttgagaaaactagaggactgaaaaaacaaattttaactaggcaaatgctgtgaattactcttcctccccttctctgaaatgggtaaaggacaaattgtgtaaaaaaacctatgcactatagaagggaatagtaaccatttcttttgtctctctgtttctgttctgactgagaacctgcagccatttcttgttacatgaaaacaaaatgctacttgttacctctattttttgttactatacaattatgaaatgtaatgtaagacaccaacagaaatgatatacctgtaactgtacctatcaggactatacctcatttacagtcaggaaagcttactggggatgtcagggaaatgatacagggttggttctcatttcgtgccgaaatgaggacaggaaatttcaggtggacggagggtgccgttgtaggggtattgatgtgccccgggtagtgccagcagagtaggggaaaactgcttttgccttaaaactactcttgacctgattgttcattttaccaaaaaattcccttattaccaggcctcacccngccctgtgtgatagggttttgtagggaggaacttgattttccaatattttttaatgtatcncttgcccaaggt

SEQ ID NO: 3209 - DNA, 487 bp, Homo sapiens
  misc_feature (1)...(487): n = a,t,c or g
gtctatcccctaagtctaaaatgaaagttgaaaaaaataaaaattatataagaaaaaaattatcacagtgttttataaaataagaaagcagannnnnnnnnnnnnnnnnnnnnnnnnnnnnnnnnnnnnnnnnnnnnnnnnnnnnnnnnnnnnnnnnnnnnnnnnnnnnnnnnnnnnnnnnnnnnnnnnnnnnnnnnnnnnnnnnnnnnnnnnnnnnnnnnnnnnnnnnnnnnnnnnnnnnnnnnnnnnnnnnnnnnnnnnnnnnnnnnnnnnnnnnnnnnnnnaaatgaagattgcaagtgtgagccactgtgcctaattgatttttttattggaaattttgatactgttacgttgtcactgaggcagacaacttaaaaataatcttgagtatcattctgtgncgatgttagaatttaatatgctgttcgtaggccaggctcagtggctcacgcctgnaatctcancctttgggacgccaaaagcg

SEQ ID NO: 3210 - DNA, 1675 bp, Homo sapiens
actctgtccttgagctcccacccccgggcccggggaatgccccaccttggggtgacttgcactgtagcttgcaaggcgtgttcttgcacgaaagtttgaatcttatggccctgcgagaggtgctcatcatcatgcccattttctgctgtttctgatgggtcagctacctcacggcggggccagctctgctgtcctggcaagtgtcattgactctctaaacttgaagtccttcaggagccctgagcccaacatccatgagacaccccgagttgtgcttcatgagagttggattctctgcccactctttcagggatgtccaaggtccatgttagggggcaggcccccagctccactcactgcacaagcaccctaaatgttggaagcacaaaatggttgtgatttgagcacaatggcagggtcccgcaggcagacttgacaggcccaggcccgggaggatccccccacgttggctctgtccaaagtgagattgggggtgcctgtgtctgggacagggggctgcccttgctcagaccaggccttggctcatggcttgtcctaattctgggactcgtcatcttacttcttgcccttctgtgcccatcttaagactggaggctgagccttgtcaggcccagccacatctttacgccatgggaccaggagtaaagcgctctctaaaccccgcaccccaaatctctaaacgcctgagttcaggctgagtcctagccctagtgagcctgaagagcttgggactgattcccagtctccggggtcaagccccactttgtgctttcgaagcttatgagcggtttccctggatagaaggagtcttccatccccactgcccttggggcttctttcagcattagttcctgttgccaggggccctgttccttcaattattcagttcagtatttgctttcacgtgagtgacggactcttctgaagcagccagaactctcaaaggcagcgcatgggagttgccttgcgagatttccaaggaaggaggaaagattaacaggcggacggccaacacccaagcctttgaggtggtcagagtgccacctttcagccccttggggaaggggacagcggtgggtctgggagtggcctcaccctggattcagcctaggaatctcttcaccctcagctgtccagccctgctgcctgtctggggatgtgtggcctgggcagagggcagtttaaagcacaaaaccacatggggaaaacacaaggttgcggggactttctcatgtgcctgatgtggtggagggagacaccagcaggtggctgcagtgacgttagggaacataacacttctttgccctgctagctctcagctctggggggcatcccccgatgtggtctgggctgggagcaggcatatcccctggttgttgcctgtgcctggtctgttcaccatcgtgtttgtgtgggcagagcctgccctgcaggagcagtgactttcttcccactgtgtgtcccggacctgtggtatgtgtccctttgccatcccaaacaggcaactgcttgctgctctccttgcttggcataacctcctggtcagtggccaatgccccacaggccttcctgggcctggccctcctctcctgactcccagatccttccctgccctcttgtgtgcaaggacagattttgcagggaaaagttctgt

SEQ ID NO: 3211 - DNA, 489 bp, Homo sapiens
  misc_feature (1)...(489): n = a,t,c or g
tttgaancccgttnnnnnnnnnnnnnnnnnnnnnnnnnnnnnnnnnnnnnnnnnnnnnnnnnnnnnnnnnnnnnnnnnnnnnnnggcacgagagaaaatgcagtgtggcaaagggcagagtgggaaaggtgggagggagctgccaggtctcaaccacctgggggagaccatgacaaagtaagagacacttatgaggtatttccagaaagctttgttagaataataattaaagaaaagggtatgtcactagggcaaaagattagaaagaaggcaaaagagatggatctgtacaggctaactgcagcagtctatgcaggtctggactgaactgagaagcaatgggtgcagcatagtgtgtaggacatcgaggaaagctgggcagtgagtgccaaaataagcaatacacacctacctggaaaatcgtgttgagtctgtgggaatgctgtacaaatggtgggagggagtttttctctaggacaaattcagaag

SEQ ID NO: 3212 - DNA, 381 bp, Homo sapiens
gtttgcgtggtggttaagagctgggtttgagtcctgactctgcaatcacatgatattggccatgtgatactgtgtggctttcattcaacactgggaatctcagtttcctcaattatgagaataacctgaggtcctatgggtttgtggtggaaatcaacaaagcttacaaacttaacatgcttactagtccctagtgcacagtaggcactcaataaatgttcgctgaatgtcatgatactaaatcatgatgaacatactaaataagaagcatgcccaaagtggttaaaagaccaatgtttcctagtaaatattcatctactgatagttactaactgctgaaaacaacaaaactggctttgaatatttttactgattggcctc

SEQ ID NO: 3213 - DNA, 1104 bp, Homo sapiens
ttttttttttcatttgcattttacttttatttatttttgctttaataatgcatattctgttcacgcaaaaggtgcaaaggacagaaagcaggggtttaacttggctgatgaaaaatcaagcaggatgacatttctagtttcatgaacaacctaaaactaggagaaatagaaaagtcacagctggtaccacagagcacgcccaacttcacagctgtctcctcttaggacctttggctagggtgagagaagctttgaagacagtggcctctagtggacttggataagtggcagattttttttttttaatttttaatttttttgaatcatggtagctgcatcacaaaagctccaatcaagagggtggtaaaaagaaggcacagatcattgcaaataccagattttctctttctctttttgtaaatataccgtcatatataagctaaaatttctcttagggtggtggggtttgctggcagggaaagggacaggttgaacctacaattgcatatgtaatagaatcctaatggggggacaaagagcgaggcagctcttagcctgaagcaaaagaaaaggacactcgcttctgactacgtgtagtacaaacactagggaagtctgtgacaaaacacgattaaaaaatcataaaattataaagcttgtaaacgaataatctgaaattacattttattaatggaaaatatcatcaaaatagtaccactatggactaaactgcctgagttttcatttcgcattgagatctcagagtagaaaagcctttagcacaattttgctctgtgtaagtcacaacgagtgccagccccaggactaaaccctggggaagattctcctcttggatggaatttgtgttgtgctatcaagacttttgtgctaatctttcaaacagggacattttgaggcaaacctttaatcttttggcacaagattattttggctggggcagaaaatttgagtctcggactcaggatgaataatgtgacatttcattgatcaagtattcattttgattgtagagctttctttatgtcgttcacttccatctgcaactgaagccggattttcttctcttcatccaactcagacaat

SEQ ID NO: 3214 - DNA, 1847 bp, Homo sapiens
gccgcctgcggagcccgtgagcttctacacgcagcccttctcgcactatggccaggccctgtgcgtgtccttcccgcagccctgccgcgccgccgagcgcctccaggtgctgctcacctaccgcgtcggggagggacccggggtttgctggttggctcccgagcagacagcaggaaagaagaagcccttcgtgtacacccagggccaggctgtcctaaaccgggccttcttcccttgcttcgacacgcctgctgttaaatacaagtattcagctcttattgaggtcccagatggcttcacagctgtaatgagtgctagcacctgggaagaagagaggtccaaataagttcttcttccagatgtgtcagcccatcccctcctatctgatagctttggccatcggagatctggtttcggctgaagttggacccaggagccgggtgtgggctgagccctgcctgattgatgctgccaaggaggagtacaaacggggtgatagaagaattttttggcaacaggagagaagctttttggaccttatgtttggggaaggcgctgcgtacacctgcttggaggctgcaacggggcgggctctgctgcgtcaacacatggacatcactggagaggaaaacccactcaacaaggttccgcgtgaagattgaaccaggcgttgacccggacgacacctataatgagaccccctacgagaaaggtttctgctttgtctcatacctgggcccacttggtgggtgatcaggatcagtttgacagttttctcaaggcctatgtgcatgaattcaaattccgaagcatcttagccgatgactttctggacttctacttgggaatatttccctgagcttaagaaaaagagagtggatatcattccaggttttgagtttgatcgatggctgaatacccccggctgggcccccgtacctccctgatctctcccctggggactcactcatgaagcctgctgaagagctagcccaactgtgggcagccgaggagctggacatgaaggccattgaagccgtggccatctctccctggaagacctaccagctggtctacttcctggataagatcctccagaaatcccctctccctcctgggaatgtgaaaaaacttggagacacatacccaagtatctcaaatgcccggaatgcagagctccggctgcgatggggccaaatcgtccttaagaacgaccaccaggaagatttctggaaagtgaaggagttcctgcataaccaggggaagcagaagtatacacttccgctgtaccacgcaatgatgggtggcagtgaggtggcccagaccctcgccaaggagacttttgcatccaccgcctcccagctccacagcaatgttgtcaactatgtccagcagatcgtggcacccaagggcagttagaggctcgtgtgcatggcccctgcctcttcaggctctccaggctttcagaataattgtttgttcccaaattcctgttccctgatcaacttcctggagtttatatcccctcaggataatctattctctagcttaggtatctgtgactcttgggcctctgctctggtgggaacttacttctctatagcccactgagccccgagacagagaacctgcccacagctctccccgctacaggctgcaggcactgcagggcagcgggtattctcctccccacctaagtctctgggaagaagtggagaggactgatgctcttcttttttctctttctgtcctttttcttgctgattttatgcaaagggctggcattctgattgttcttttttcaggtttaatccttattttaataaagttttcaagcaaaaattaaa

SEQ ID NO: 3215 - DNA, 487 bp, Homo sapiens
gcggcacgagtgaagaggattgaagggtgagttgctaagtgacttagggtttattcacttcaggaatcacagctggggtggaccccaggagcagagtactgcatgcagctgtgcccatgcatggttgccccagcgtagtgagatgggacctgccgcagcatgcccactcctgagctgccaggctgagccatggaggactgaaaggaggtcgcccggcatcacctcccgaggtgagacctgctgcaaaagccaagccagcagcattgacgccctttgatatcttcgccatttttgctgctgaaagacttggcttttcagtctgaccctggccctctgtgaccatgtgtctgtaaagccagtgggtcaggcccttccatgcagggccagaggaaaagcgggcccagggctgcagtgagagcggggcaggggaccagcctaccagatggggttgggaaacatgggcttcagaaggaccaacttacccctt

SEQ ID NO: 3216 - DNA, 619 bp, Homo sapiens
  misc_feature (1)...(619): n = a,t,c or g
acgaggggcttccgcaagaacgacatcatcacaatcgtgtctcagaaggacgagcactgctgggtgggggagctcaacggcctgcgaggctggtttccagccaagttcgtggaagtcctggatgagcgcagcaaagagtactccatcgcgggggatgactcggtgacggagggggtcacagacctcgtgcgagggaccctctgcccggcccttaaggccctgttcgaacatggactgaagaagccatccctgcttgggggcgcctgccacccctggctgtttatcgaggaggctgcaggccgggaggtcgagagagactttgcctccgtgtattcccgtctggtgctctgtaagaccttcaggttggatgaagatggcaaagtcctgaccccggaggagctgctctaccgggctgtgcagtctgtgaacgtgaccacgatgcatgcatgcacaaatggatgtgaactccgctcactgatctgcgtgggccaatagcaagtgctgcactgtgctgagtgctctgctcaacctccacctgganaaatgnacancctggccttctgcgaaccggnngtcaaataatntacnccatccccgggtttccttacnnccagatgga

SEQ ID NO: 3217 - DNA, 1093 bp, Homo sapiens
  misc_feature (1)...(1093): n = a,t,c or g
ctgataaaattatgttttaattgcctatgcgatatattacataatggctcaaaattaatagtctggctgaaattaagaaaaacagctgatgatgacttagtaaatccttaattttaagtaagcttttggccaaaagtcaggggtagaattgactcaaaattaacagccttcaccatcttttattcattctgctgtgatacaactaaaatggccagtaaattctcccctgggtctcaggtaacagttttccaaaagtgaagtatcactttctctgcacagtggtgaaagccggcatttggatgggctggatcgggtggacaggctgaaacactggcttctttctcacttcagagtgtgttttcactgcagggagcagctgattccttttgatgatctgtaaggccagctgagtattaccattctgcagttcaaggtagactgccagcaagatggcctcagggggcacctctttaggatggatcattgaagccgcctggtggagacactttcgggctttgtcatattcgctcctcaggcagtaagcgctgccaaggttgaacagcatcacagtcctggcagagttgacggaactggggtagcactgaggggcccgcttaccagaggattccattgcttcattttcacctttgtctgatccttggtcctgctcatttgaagagatccctaaggagacatcagtgacattctccgggttcaagtgagtaatggcatcagatattctgtcgagagagatgagggcttctgcagcatataaatgtcccaaaaacttaagagatcctgacagcttgggctgctgaagaagtttatctgcatgattcaaagccatgaggttatcacccaaagccagagccacgtaggcactgcaagcaagtatggagcactttaagttttctaattcctgttttctcaatggagaagaaggtggagctggaatgaatttatctccatcatggcttttactgctgcaagtttcactgctttcgctgctcctcgtgccnnnnnnnnnnnnnnnnnnnnnnnnnnnnnnnnnnnnnnnnnnnnnnnnnnnnnnnnnnnnnnnnnnnggtntcca

SEQ ID NO: 3218 - DNA, 1787 bp, Homo sapiens
gagacttccaaaaattataaatcagaaataatgagaaactcatggttttcccccttctagctgatttttttaaaatgaaaacgaatgcctcagcgctcacatctgcggaggagcctcctgtcacaacaccctggggagctacaagtgcatgtgtcccgccggcttccagtatgaacagttcagtggaggatgccaagacatcaatgaatgtggctctgcggcaggccccctgcagctatggctgttccaataccgagggcggttacctgtgtggctgtccacctggttacttccgcataggccaagggcactgtgtttctggaatgggcatgggccgaggaaacccagagccacctgtcagtggtgaaatggatgacaattcactctccccagaggcttgttacgagtgtaagatcaatggctaccccaaacggggcaggaaacggagaagcacaaacgaaactgatgcctccaatatcgaggatcagtctgagacagaagccaatgtgagtcttgcaagttgggatgttgagaagacagccatctttgctttcaatatttcccacgtcagtaacaaggttcgaatcctagaactccttccagctcttacaactctgacgaatcacaacagatacttgatcgaatctggaaatgaagatggcttctttaaaatcaaccaaaaggaagggatcagctacctccacttcacaaagaagaagccagtggctggaacctattcattacaaatcagtagtactccactttataaaaagaaagaacttaaccaactagaagacaaatatgacaaagactacctcagtggtgaactgggtgataatctgaagatgaaaatccaggttttgcttcattaattcaccatccagaaccaaataattaaaagaaaaacaaatatagataggtagaactatattttcccccaatcagaatcatcatatcataggtacaatctttcaccaagtaaatttgtataaataagcactattctttgtattaccaaagcaaggtacaggtgactaccctagttcaaaacaaccactttctcaggcttctcatgtgtgtagctaagctaccttgtcatatgtgttgattcttgaaaactgggacgtgtatttccattgggggttggccatttatgctgacatgccatccttccagcaaacgtagggaatgtgctttcaattgatggactactctattttttgcaaatttgtaaactttgcttctccaaatacaagtactaggttgtccatttatggtacctatttggtgctagtaaattttcaaactagatttataaatgcactgtaatatgtacacaacttagaaaccaaattacaagtattcagttccaatacttcattaatttcaatcaaccaaagttagttcagtagcttatctcagttatgagtataatacattacatgtaaattaagtgtgtgtatactgtaatcgtgctattttttatcattgaaacatttataaactagaataataatgcccttaatgtgagggtttgtaatggtgcttattaagaccaaagacttgttaaatgtatacaccaagtggtaatgaaatttcgtgactggcccacacgtgcatagaggtctgggaggaccaggaaacagcctcagtggccagaggatcaccagtgcatccttcatcacagcatgtggcaatatgccaagattaccctcgggtcattcctgtcaacaaggggtcaatgtcataaatgtcacaataaaacaatctcttcttttttttagttt

SEQ ID NO: 3219 - DNA, 490 bp, Homo sapiens
  misc_feature (1)...(490): n = a,t,c or g
tatntgatacctntgaanccnnnnnnnnnnnnnnnnnnnnnnnnnnnnnnnnnnnnnnnnnnnnnnnnnnnnnnnnggcacgagttaaatcggaaccacaatcagcatataaaggtcctaatcctgaccttaatccctttggaatattggttttataaatcatcaatcaacagtgttccactatgaaagcatattctgtcttcttcttttcatgtattccttcactgctggtgcttaatgtctttccttcctcttctgccatttctctttccatgaattataattgccttttgaattcagaaattaaaaccactccacagaattaatttggaaggggaagaaaagacctttgtcttaacgaaccatgaagaggcatatttccatgcttctgtcttgattactggaagtttttaaagtacaatttggtatttntagttttngttttcagagaggctaccatgctaacttaaaaacattaagcttancttaa

SEQ ID NO: 3220 - DNA, 562 bp, Homo sapiens
atttggacaaccagcggcaactcgtgtccaaccccttatcacccaaaggcacgctggtgctgcttggccgtctctccccgccatctctgttcttgctgctccgcccagaggctgggccacctgttcggtttggggactgatcgtacacgaggttccggcaggaagcgagtttggactccagtgccccgactttccgcagtaggtctcccacaatgttgagggctgatatccgggccgcaggtgtgaggggggtccccccggtggagtcgtccaggccacgtctgaagctcccaggtgtgtttaaacttgagctgggtcctcggtgagcaatgggcgtggacggcacggagcccgtggcctgcacagctgtgtctgtcctctcagcttccactgagctgggcatgggggtcctgggtttctcctgcttctgctgcacggccagttcctgccgcaaatctctggcttcatccttcagtctctgaacagattccaggagattctctttttcatcaagttcactttacaggaaggcatctctttcgatggcctgattcaagcgctg

SEQ ID NO: 3221 - DNA, 502 bp, Homo sapiens
tgcaagaagagggaatataactagactgttattttaggttaaaatagccaagagacagacgccttcgcctcaaaaatattctgagacacataaaagtagaaggaaacaagtctcttcagtcacaaaatgtcgtacatcccgcatatactagattcaattaatttaataaaatagaatatacatagaaattctgcacaaacgtattgctttctcccaacagcttctggtgtcgggaacctcagctgcaccgggcctctccttctgcctggagccagagttgccggggctgctgcttttaactctctttggaagttctgcttgcaggtacccagagccactgaggcagggaggagcgcctccgcctccttggtgtctatatggaacttttgtcaggaatatagcccgggagggagggagctaggacttggcacccagtggagaaaggtgagtgggaaagtggggcaggactcaggggtccaggtctgctgggtcagaggataaa

SEQ ID NO: 3222 - DNA, 1132 bp, Homo sapiens
  misc_feature (1)...(1132): n = a,t,c or g
ttttttttttttttccttttttgcaacacgtttattgagaggcagttgtgctccagccttccaggaggtcacagtcttaggggaagcagtgcaatggaggttggaagcaggggaaccctttactgaaggctgagcgctggctggcacactaggcctggcagcactggagggcaggcagggaaagtagggtgggtaacccagcctggcaaatgcatggcagctagaaaacctcttcaggttctggggtggctgggccatgagaggggaggccaggcagggctgtcaaggtaaccggggtcagatcatggagttgcctgccaggctccacaggagtcggggacagaagcagagcaacccagctaccagccgggccctgagctccctcagggtgaccagggaggagctgtgactggctggggaggcagggctggggcccgaggttccccaggacgacaggagggagccaaggcactctaagaggtggaagaagaggaccagaagctggtgagtgcatcactggagcccataggagggctcctgactgtcctcaaaagcctcagacctcagtgtccactttctccatccaagaaatggggctgtgatctctgcttatgacagcacaagcttgcacagaagtggaggcgggaaataagcacaagtgtgccttcccagcccggcctgggtccaggcagaacagctgatactggccccagtctgcccacccacccctgctggccaggaggctggcagaaccccagccccacctgcctggagcgcgtttgatttggactcgactgttgtggtgatggaggggggctggatctgtagctaaaaatacctcggagccaagccagctgctcagagcttcctcggaggctgggccgcgctgggcccactgaggaatgggcatgccacccaggaggtagcaccttacctgctagaggttgagggctgagntatccccttcagtcaccaggaattcttagtgggagatgncagagnaaataggctgccctgcgttgacagaaggaaagattgtcatcggggggtccgaatgccctttcggccagacttttgnataaccnagttgtcttcatttnaattcaggttggagaaaaggctctaagnttta

SEQ ID NO: 3223 - DNA, 305 bp, Homo sapiens
taaatctggaagctgtagtaacatatttatgaagttaaatatttttagttcagcaaaaatggaaataattgtcattacaagattacttaagtcttttctgtcttttatgatcctatcatgatcaactttaaatttagagaagtcatttgagatatgcttaagttgaactaaagacttattatttgtctaatttctgtatatatggaaattagattcacattgggatatctaaaatttcgaggtttttttgtagaaaaaaattaacaaccctaaaaataggaaattattaaattacatttttaatt

SEQ ID NO: 3224 - DNA, 1701 bp, Homo sapiens
gcatcccggcatctgcacgtggttatgctgccggagtttgggccgccactgtaggaaaagtaacttcagctgcagccccaaagcgagtgagccgagccggagccatggagggccagagcgtggaggagctgctcgcaaaggcagagcaggacgaggcagagaagttgcaacgcatcacggtgcacaaggagctggagctgcagtttgacctgggcaacctgctggcgtcggaccggaacccccccgaccgggcctgcggtgcgccggacccacgccggaggccgagcctacaggccctggcgcgggacaacacgcaactgctcatcaaccagctgtggcagctgcccacggagcgcgtggaagaggcgatagtggccgcggctgccggagcccaccacacgcctgccgcgagagaagcctctgccccgaccgcgggccacttacacgctggcagcagttcgcgcgcctcaagggcatccgtcccaagaagaagaccaacctggtgtgggacgaggtgagtggccagtggcggcggcgctggggctaccagcgcgcccgggacgacaccaaagaatggctgattgaggtgcccggcaatgccgaccccttggaggaccagttcgccaagcggattcaggccaagaaggaaagggtggccaagaacgagctgaaccggctgcgtaacctggcccgcgcgcacaagatgcagctgcccagcgcggccggcttgcaccctaccggacaccagagtaaggaggagctgggccgcgccatgcaagtggccaaggtctccaccgcctctgtggggcgctttcaggagcgcctccccaaggagaaggtgccccggggctccggcaagaaaaggaagtttcaaccccttttcggggactttgcagccgagaaaaagaaccagttggagctgcttcgtgtcatgaacagcaagaagcctcagctggatgtgactagggccaccaataagcagatgagggaggaggaccaggaggaggccgccaagaggaggaaaatgagccagaagggcaagagaaagggaggccggcaggggcctgggggcaagaggaaagggggcccgcccagccagggagggaagaggaaagggggcttgggaggcaagatgaattctgggccgcctggcttgggtggcaagagaaaaggaggacagcgcccaggaggaaagaggaggaagtaatagtttctaactgtcggacccgtctgtaaaccaaggactatgaatactaaatgttaagttctaggcaattatacggggactcagaaggacctggccgctgccttcattgagtttaaagggacaggattgcccttccgtcaagaaagtatgtaagtgttggactgcacaaattaatgtttttcccacaaccgagactttggagattaagaacttatttgaggatttaagaattagggaaataatttggtggaaaccgggaatgagttctattcttaaacagcctttttttttctttttaatgttggatatacggcgaggtagagttggccatatttcagagacttagattgacgtatatgtttctgcattatttttacaacaagtttgtgtatcagagcgggagtgcgggggagggaaagaaaacaaacagtttcagaattgaataggcaagtgactgttttaaagattaagtaataaagatgtcttatctagtg

SEQ ID NO: 3225 - DNA, 443 bp, Homo sapiens
ggaggcttcggtacactgggcaatgagggtctaaccttccatcaaggggttttgttaacctgccttttctgggagtgtcaaaagtggctctcagtgtgttatgaagggactcatcggccataacctattagtgggctactaatggtaattctccagctcacaagttcaagatagaaaatcttccccacttttttctgcttttctattcctgaagatggctgtgctcttccaccatctattcgaccctggagctgaaggtgtgtttggtggcctgtgatgttgcccaggacttgttgttcatcaggacttggacgagctcctgggccccagcctgtcttttcaccttagtgatttcttcactccgtacctgagacccagggtgttcaggctccctctactttttcctcgtcacctttcctaccctccctcaggccccaccacag

SEQ ID NO: 3226 - DNA, 598 bp, Homo sapiens
  misc_feature (1)...(598): n = a,t,c or g
ggcgantttttatgnnncccttacnaaaaanaatacgangcnggcccaaggaanttgnccnncgaggccaanaattcngcacgagaaaatctataacagcagtnnnnnnnnnnnnnnnnnnnnnnnnnnnnnnnnnnnnnnnnnnnnnnnnnnnnnnnnnnnnnnnnnnnnnnnnnnnnnnnnnnnnnnttcacctcagatcatcagacattacnnnnnnnnnnnnnnnnnnnnnnnnnnnnnnnnnnnnnnnnnnnnnnnnnnnnnnnnnnnnnnnnnnnnnnnnnnnnnnnnnnnnnnnnnnnnnnnnnnnnnnnnnnnnnnnnnnnnnnnnnnnntgcttgnnnnnnnnnnnnnnnnnnnnnnnnnnnnnnnnnnnnnnnnnnnnnnnnnnnnnnnnnnnnnnnnnnnnnnnnnnnnnnnnnnngtgctgtataangtgaaaatgaagttgcagacccacaaatanttggcatgtgtgtacaaacacgtaaacaganatggacttgtaggccgggtgtggnattcacaagtgtatcccaagannttggaaggctaccnnannaanttnccgatggcnggntnanncagnccggcc

SEQ ID NO: 3227 - DNA, 432 bp, Homo sapiens
gtggaaatttgtatgtgctttataattgcacatgtggatactaatatagggataactatatatggatatccatatataaataatatatggataataaattggagttattaaataggtgcaaaatatacatttatttcatgggaaagcttcctggcagctatagaaaaagaaatttaagcatttttagaaattttagaattggctgtgagagattgatatccagaaaaaaacattgtttctatcacattggtagcttaaaatcagccatggtgggtgtcttcataccacaaaaatttgcagatgctacaaaccaggcctttccttgtttcgagagctggttgttaaacgtttaccagaatgctactggtagtccaggctctcccacagctttacagtgaagaaccaaggtcctgtcgtcattaatattccctg

SEQ ID NO: 3228 - DNA, 342 bp, Homo sapiens
gagagctgcctcgtcagtgggactcaggtgttactcaccttgctggaaaccaggcgggttgggacagagggcttggtggactccttttctcagggactggaaaggtcatacgctgtcagcagcagcgtactacacggcatcgagcctcggctgaaggacttccaccagctcctgctcaacccgcccaagaagaaagcgatcctgaccaccattggtgtgctggaggagcccctggggaatgcccgtctgcatggcgcccgcctcatggcagcactgctgcacacaaacacacccagcatcaaccaggagctctgccggctcaacacgatggacttactgctg

SEQ ID NO: 3229 - DNA, 618 bp, Homo sapiens
  misc_feature (1)...(618): n = a,t,c or g
ctaattcgggtacccattccccaagtaaccagagagcacagagaaatgctggtgaaactggccaaacagaacaccaacaaggccaaagactctttacggaaggttcgcaccaactcaatgaaagtccactggggccagcaatactccagagcccagtttctgctggatcccatgggtggcacattgggacttctctccctcccccatctacacagaagactgtcaccatgctgacagaacctgtccttgtaaaggccagccttccangggaacactcagacatgttcaatctcttcctgcttctgcctgggccggttgggtggtcncanaaatacttgctgctggnaaaggctgtcncaggatttgcttncttgagttncaaggacgaggcattggaaggttatacactgccccanctaggntccctttcaanaatagcncgtccatttaacncgaattgctcactgnncngancttcaaggcatttccaacataaacaataattggaganacacccaggaaaaaaaaaaaaanttttttangngcacttncctngnggnattncngancggcnnttaancgnnnnggnnngnnncntantncctgngngccnggggt

SEQ ID NO: 3230 - DNA, 1393 bp, Homo sapiens
caagctttgtacttagatcttttacttagatctgctttttgtcttattctttttagtggatgtttccaaggattgtcttcagtcatggccttgggattaaagtgcttccgcatggtccaccctacctttcgcaattatcttgcagcctctatcagacccgtttcagaagttacactgaagacagtgcatgaaagacaacatggccataggcaatacatggcctattcagctgtaccagtccgccattttgctaccaagaaagccaaagccaaagggaaaggacagtcccaaaccagagtgaatattaatgctgccttggttgaggatataatcaacttggaagaggtgaatgaagaaatgaagtctgtgatagaagctctcaaggataatttcaataagactctcaatataaggacctcaccaggatcccttgacaagattgctgtggtaactgcctgacgggaagccttgctttaaaccagattagccagatctccatgaagtcgccacagctgattttggtgaatatggccagcttcccagagtgtacagctgcagctatcaaggctataagagaaagtggaatgaatctgaacccagaagtgggaagggacgctaattcgggtaccccattccccaagtaaccagagagcacagagaaatgctggtgaaactggccaaacagaacaccaacaaggccaaagactctttacggaaggttccgcaccaactcaatgaacaagctgaagaaatccaaggatacagtctcagaggacaccattaggctaatagagaaacagatcagccaaatggccgatgacacagtggcagaactggacaggcatctggcagtgaagaccaaagaactccttggatgaaagtccactggggccagcaatactccagagcccagtttctgctggatcccatgggtggcacattgggacttctctccctcccccatctacacagaagactgtcaccatgctgacagaagcctgtccttgtaaggcccagccttccaggggaacactcagacatgttcattctcttcctgcttctgctctgggccggtgggtggctctcagaaaatacttgctgctggcaaaaggcctgtactcaggcatttgctttgacttgatgttgccaagggactgaggccattggcaggcttagtaccacctgctcctcatcttaggagtctccttttcaaataattaggctctgttcccattttaaaactctgatattggccttcacctgtgactggacactttactagaggcccattttcactaaacaataaaatctaaataaattggaaggaataacaaccacaaaggaaagaatagagttgggtctgggattgatgatcactgagggatctgtatgt

SEQ ID NO: 3231 - DNA, 421 bp, Homo sapiens
ggggaaggaatgtggctttgggaagcaagaggcctgagcttgaattctggccctgccactcggaagctgtgaccctgtgcaagtcgcttcacctccttgggctgatcctgagaagaataagcatttattgagcgcccactacctgccaaagactgcatatcttttatttcattcttaagaggcaagggtcccccattttacacagaagagaaacagattcacagttgcctaagatcacatagctggccaggaacagaacgtggttcaaacacaggcctctctctagccagagcccaatgctctgtttaccatgcaactgaaacggcttgagtctccatccaaaatcattgagggctttaacgttgtagggagcctgttaaaggtttccattcttacctgccccactccctgggtgcccaga

SEQ ID NO: 3232 - DNA, 1004 bp, Homo sapiens
  misc_feature (1)...(1004): n = a,t,c or g
taagaaattatgtattaatacatatggctcatcgttgaatacagcattcctaacattatcccacattcccccactcccaccgcgcccggccatatctcagttttctaatctgtaaaatgagtaggttagaccagctaatcactctggtaccttccaacttgaaaaaagttttttccccattctttggtaaattttagatgtggcctgaacattctcctggaagtcagaggtcaaattatctttccattttcttttattttagtaagaatttcgcaaatgacaagtgataacaaaggcagcaggatttttcatttctctgtaaataatgtataaaatatgtgaacagaactatatctttcatctaaggccagttcaatttattaaaaataaaactaatgccttttaaaattgatcagacctttgatacttgaactaaattttgcattagagactttttaaaaattgttcgcttttgctgaataaattgcaaatagagaagcttcattgacagtcagtccctctctgcttaatgcagttatgggtcctttcgtttatggcaaatgacttacctgacaagagttaattttgcctccattgtatccaagtttggaatattttcccaggaaatctgatttatttggcagactctgagagagagaacagattaagtgccgttttaaaactctgtattttcatttataataataaaatatttgccaaaatacagctgttttgtaaaattatctgcaccctcatccaagctttatatttaatagccttaatcacattttatgaagaatgttaaaganaattttttttttactacatcgaaatgagataattaatttctntttttgttttttggaaatggagtctccctctgtcacccagggctgggagtgcagtagcaaggatcttgggctcgctacagcctctgcctccngggttncaagcaatttntcctgcctcagcctcccaagttaggangggtatttacagggtgc

SEQ ID NO: 3233 - DNA, 390 bp, Homo sapiens
atttggatatccctagaacgttgagggcacgagtcgggtcctgagaccaggtcctcagccagcagagccacgttccttatgagcaccgtgggtttatttcattttcctacaccactgctttccttggatgagaatgaactcgaagagcagtttgtgaaaggacacggtccagggggccaggcaaccaacaaaaccagcaactgcgtggtgctgaagcacatcccctcaggcatcgttgtaaagtgccatcagacaagatcagttgatcagaacagaaagctagctcggaaaatcctacaagagaaagtagatgttttctacaatggtgaaaacagtcctgttcacaaagaaaaacgagaagcggcgaagaaaaaacaagaaaggaaaaaa

SEQ ID NO: 3234 - DNA, 319 bp, Homo sapiens
tccagaagctgatagtgttgatcaacaaaatgagacaatttgtactataatccctggtttcagtagtttcttggttttgtctttctcatacctagactacctccttgtaactggaagtcacagacatgctatctaatgttccagcataatttttccttttggagtgaccctgagactagtgactgcagcccagactggctgaagtctgagcttggcccagtgtcaagatctgtcctaacattctcttgtattttcattttaggctagtacaggtaggcagtaacaaagggaattgtttcattaactttttttttttttt

SEQ ID NO: 3235 - DNA, 1001 bp, Homo sapiens
tttttttttttttttttctgagaaaaatgtgaaaacttttactgttacattaagaacaggtggtagaagcaacctattccgcacttctcaaaagatacagaggggcacatatgccacactggaataaagaatacagaatcaaacatgtacaaaggtaccacagcaggttatggttcatacaggactttaaatgacccatgttgacaatacaatttgcaaaaaatatgagaaaagcaatacatatttctgaaacaaaaacatacctgttgtaaaaaacaacacgcgtagtatcagaatagaacagttaacagagcagcagttactgaagacagacggcaacaggcagctgcgccagccatgggtctgccatgcggctacacccatgaggccctattgtgaacaacgcaacgttctccatcagcggggaagcacacagactgcttggccaccaagctttccgcctggtctgttcatactgagatttagcagtaacagcccagaagggaatgcagctccccgctccctatgacatcaatgtcttcaacacatgtgtaagattctttctggagcccctagctcctccactcttcaaaactaacaacgcagagaaagagaaataagaaagcaaagacatcacattgccttagaaaagctgtcctcaactcatcttctctacatgttttcagatcacgtcctgacggaatggaaggagcagctccacctccccgaggcttccgtggactccgcacacacacgaccaccagtcttcagtcatgtgccatggagactttggtcccaaccagtgtctgccttttctagaaactggagaccctgattcaaatggcaagatgtgttagttcccatttgccttgcaataaccctatgcttcacaaagattccagactaggggttattcctcacccaatttcatgcatctggaacacagagtaccagaatactctcacattttatttcaaggcactctccagcagaaagtataa

SEQ ID NO: 3236 - DNA, 509 bp, Homo sapiens
  misc_feature (1)...(509): n = a,t,c or g
ttgaaatttgaaanccgtttgacnnnnnnnnnnnnnnnnnnnnnnnnnnnnnnnnnnnnnnnnnnnnnnnnnnnnnnnnnnggcacgagccggagcaacctcaacctccctagagctgaccgagcttttgcttcttatcacagggaatgacggacgctggggatttgatgggcatcgggtgaaatgggcagagtggcgcttacctgtgatggcagtgaagtgggacggggaggtcattgtcacaaggggcggcatgaggtacttggccttgacgccctccctggccagatggtccaggttgggggtgttcacatcctgatcctagtcccagcggaagccctggaaggagatcagcagcagttgtgagtgctcttcttccctgcgagggggtggccgcccagcaggacaggcggtggcagcagcagctggagggcgccgagtcatgtcatcccacaagcacctgtcatgcactcctcacagtgttcatgggcttctccctctttagtccg

SEQ ID NO: 3237 - DNA, 1623 bp, Homo sapiens
  misc_feature (1)...(1623): n = a,t,c or g
ggtttttttgagagtaaaataactttatttttatttttgcaaatcatcctctgctcaaactactataaactggcagctgtaatttctagaaatatgggttgaaaaaactcccagagatggaaggacctgatgnnnnnnnnnnnnnnnnnnnnnnnnnnnnnnnnnnnnnnnnnnnnnnnnnnnngcatgagtcaaaattacttcatgaagtatgagatgtcaacattatgtaaataaaatttaatattgaaaaagtgatctggaagccctgtgaatttttaccctacacattttggaggacatcacatgggttaaagaaaacaccacaaaatctcatttgttcagataatcatttgaatgtttacatacatttttggttatttatttataactaatttaatttacatttcctcatattaacatatcctcttatttagtatgtaatcaaattatgtcagtgagaaaaatcctcatagtaccttgagttgctgattctgagaaaacactaaacatgaacatgtacaaaagaggcatttgaataaaacagcatgtgcatttttttaatatttgcacagtttgatctttgcatttctgtctggagaaaatatgaacaaaacccaggtttaccatgctaagataatggttcatatgactgccataaaagtagtacatacaaacaatgaaaacaaatcacatccttaggttccatgattaccgagatgatttcccctgccctaagtgctttattatatttccttaaaaaataataggagcagcagcttatccacaagtctcccacaagtgcatttaatgatggaatcaaaacaacacaacagattcataaggatgagagaactgcagaacaaccagaagtcagttttatgcttcttcttgttctggataattcagaattttgcggtgtgcctgtcgtaaatattgctgctgtttgaaagtaaactttaaatgctccttttatggcaacaaacgcaattccacccaagattgtcctttgtaaattagagttaacactactgaacatcaatttaccaactattgtagcaatagtaggaaagacaagggctccacacaagattcgagtagcagagacatgatctgctaaaggattggcctcagctggaattcgaggaacaggacaacctatccctggaaatatactatttaaaatttgtagtttattcgagtatttgcgccacagtctaagcacatagtcctcccagcgaatcatcttgcctaatatcagcatgacaggaatagtaggaagtcccaattaaaaggaataaaggatcagctctctccataacatccagaccttctttatgacctacaacctgcatcactgtcactgctccataagtcacagctgtccaatagatagagccgaccattattcctgctgcagcaaatggacaggcttttgagatcagtctatctgcaagatccaagacgtaaaccactggacccaattttggaaaaactattaggtattcagcattgcactgaggacatgccactctggctgtactgtttcctgtttgcttttcatccacccagcgttgtagacaggcctggtgaacccattttgtagatcctctgcatgccatg

SEQ ID NO: 3238 - DNA, 572 bp, Homo sapiens
gtgaaccgaagtccttatattcccgggcttctttctcctctgggtaccagctccttactgccctgcagacaagcgtgccgtgcgtgcttgtggccaagggaaggaagagctggttgatccacagatagctccttcctccccgccccttcctttttgtttggaggtcccaggatctgtgttcacagacatctgggggaagaaaaggagcaggaaactaccccgcacagagttaagcaggaaacaacaacaacatcatgcaaaaaccctgcaaagaaaacgaaggaaagccaaagtgcagcgtgccaaagagggaggaaaaacgcccgtatggagaatttgaacgccagcaaacagaagggaattttagacagaggctgcttcagtctctcgaagaatttaaagaggacatagactataggcattttaaagatgaagaaatgacaagggagggagatgagatggaaaggtgtttggaagagataaggggtctgagaaagaaatttagggctctgcattctaaccataggcattctcgggaccgtccttatcccatttaattaatttctctgaca

SEQ ID NO: 3239 - DNA, 860 bp, Homo sapiens
gaaagaggctgcaggtggagcaagcgccccacagtagccccggggccaaactggtgaagctggcagacaagctgtacaatctgagggacctgaatcgctgcaccccagagggatggtcagaacatcgagtccaggaatacttcgagtgggcagcgcaggtggtgaaggggcttcagggaacaaaccggcaactggaagaggctctaaagcatctgttcaagcagcgggggctgacaatctgatcagtgcttgaagctatccagaggcacaactccagcctcgttcaggccggacaggattcatacgccatcttttctgtgtctcctgagctccctccatccttcccagatattagaggccaaaaaaagacttgcattttttctcagtctgaaggtctcctgctaactaagctgagccccgcgtggtgggaatcagatgtacccatccatttctgatgcactcaccgcctctccccaagtcttgggtctgtttgctattttgcatggtgggatctctggcccctcagggacttgagattatttaagtactagttcctaacacgttctggaaaataaaaataactctgggttaaggtttaagctgctgctgctcccttctcccaagcctcccgactggtgggctgcaatatctttcccttcaagcaaaagcaggactaattgtgtgtccccgaagtcaccctcccctcaggttgcgggcctcaaccccctccgaaccctggcttcccttgtcagtgacatgggttgtgtaattatcaggttagactgtgacgtgcctgatggagcctgacacataggtgctcaagaaatggtagcagcctttcccgttaagaaagttggaag

SEQ ID NO: 3240 - DNA, 450 bp, Homo sapiens
atcaatgtcagggtccgtggtgtgtttcttggggcgggcatggtctccctgctcttcagagtctgtgtcagagcactcagagcttccaatatcttctgaatcagaacaagtcctttcctccacttgattttctaggagtgcagggaccttctgaactcctgacaaatctttcttcaatcctgtaacagtctggtatagaatattatcttgttgggcattcatggccatgtcctcttccttcaatttcataattatgtccatatccctctcataatttttcacttcattcaaggttctaggaatatatgctcgcttaaacacctcttcatccacatgatcttggctagaccgttcttccttggtcctttgagatgctatttccatggcctttgagagataagcatccatgttctcatggtgtaatggatggatctgtgacaaattcaaaga

SEQ ID NO: 3241 - DNA, 487 bp, Homo sapiens
  misc_feature (1)...(487): n = a,t,c or g
taaatttgaanccttgtatgnnnnnnnnnnnnnnnnnnnnnnnnnnnnnnnnnnnnnnnnnnnnnnnnnnnnnnnnnnnnggcacgagcagaaattcgtgattagtatggctctgcttttagtttttggtggatatgggtatgtataaattttcagtacttaaattgattttagcactttgaatagaataggctctcaaaagtttgttaaaacagctgagtgaatttcaaagcattatgactttgcatttgaagacactgctgagagccaggaaaaaggagtgggttctgacattggcttgacaggattgatccaacaggtttgtaattaatttatctggtaattggttggagtatacatgttatacatcacatctttaagtgtaagtgttgcattatttcctttctgttatttaaaccagtattttttctgtgtagggctagatagtaaatattttaagcaagtcatatgctcactttttgttttg

SEQ ID NO: 3242 - DNA, 4521 bp, Homo sapiens
atggaattcagcagcatctgtattgaatttaaaagtaccttgagacaggaggcgcctccgccatcccgtgccgcagaacctagatcgagctgtacagttcaccacctccctgtcacctttccaggcaggtcccttatgatgaaatctctgctgttcatcagcatagttatcatccgtcaggaaggcaaacctaagagtcagcagacgtctttccagtcctctccttgtaataaatcgcccaagagccatggccttcagaatcaaccttggcagaaattgaggaatgagaagcaccatatcagagtcaagaaagcacagagtcttgctgagcagacctcagatacagctggattagagagctcgaccagatcagagagtgggacagacctcagagagcatagtccttctgagagtgagaaggaagttgtgggtgcagatcccaggggagcaaaacccaaaaaagcaacacagtttgtatacagctatgctagaggaccaaaagtcaaggagaaactcaaatgtgaatggagtaaccgaacaactccaaaaccggagatgctggacccgaaagtaccaaacctgtgggggttttccaccctgactcttcagaggcatcctctagaaaaggagtattggatgggtatggagccagacgaaatgagcagagaagatacccacagaaaaggcctccctgggaagtggagggggccaggccacgaccaggcagaaatccaccaaaacaggagggccaccgacatacaaacgcaggacacagaaacaacatgggccccattccaaagtgatgacctcaatgaaagaccagcaaaatctacctgtgacagtgagaacttggcagtcatcaacaagtcttccaggagggttgacccagagaaatgcactgtacggaggcaggatcctcaagtagtatctcctttctcccgaggcaaacagaaccatgtgctaaagaatgtggaaacgcacacaggttctctaattgaacaactaacaacagaaaaatacgagtgcatggtgtgctgtgaattggttcgtgtcacggccccagtgtggagttgtcagagctgttaccatgtgtttcatttgaactgcataaagaaatgggcaaggtctccagcatctcaagcagatggccagagtggttggaggtgccctgcctgtcagaatgtttctgcacatgttcctaataccttctcttgtttctgtggcaaggtaaagaatcctgagtggagcagaaatgaaattccacatagctgtggtgaggtttgtagaaagaaacagcctggccaggactgcccacattcctgtaaccttctctgccatccaggaccctgcccaccctgccctgcctttatgacaaaaacatgtgaatgtggacgaaccaggcacacagttcgctgtggtcaggctgtctcagtccactgttctaacccatgtgagaatattttgaactgtggtcagcaccagtgtgctgagctgtgccatgggggtcagtgccagccttgccagatcattttgaaccaggtatgctattgcggcagcacctcccgagatgtgttatgtggaaccgatgtaggaaagtctgatggatttggggatttcagctgtttaaagacatgtggcaaggacttgaaatgcggtaaccatacatgttcgcaagtgtgccaccctcagccctgccagcaatgcccacggctcccccagctggtgcgctgttgcccctgtggccaaactcctctcagccaattgctagaacttggaagtagtagtcggaaaacatgcatggaccctgtgccttcatgtggaaaagtgtgcggcaagcctctgccttgtggttccttagatttcattcatacctgtgaaaagctctgccatgaaggagactgtggaccagtctctcgcacatcagttatttcctgcagatgctctttcagaacaaaggagcttccatgtaccagtctcaaaagtgaagatgctacatttatgtgtgacaagcggtgtaacaagaaacggttgtgtggacggcataaatgtaatgagatatgctgtgtggataaggagcacaagtgtcctttgaattgtgggaggaaactccgttgtggccttcataggtgtgaagaaccttgtcatcgtggaaactgccagacatgctggcaagccagttttgatgaattaacctgccattgtggtgcatcagtgatttaccctccagttccctgtggtactaggccccctgaatgtacccaaacctgcgctagagtccatgagtgtgaccatccagtatatcattctggtcatagtgaggagaagtgtcccccttgcactttcctaactcagaagtggtgcatgggcaagcatgagtttcggagcaacatcccctgtcacctggttgatatctcttgcggattaccctgcagtgccacgctaccatgtgggatgcacaaatgtcagagactctgtcacaaaggggagtgtcttgtggatgagccctgcaagcagccctgcaccacccccagagctgactgtgggcacccctgtatggcaccctgccataccagctcaccctgccctgtgactgcttgtaaagctaaggtagagctacagtgtgaatgtggacgaagaaaagagatggtgatttgctctgaagcatctagtacttatcaaagaatagctgcaatctccatggcctctaagataacagacatgcagcttggaggttcagtggagatcagcaagttaattaccaaaaaggaagttcatcaagccaggctggagtgtgatgaggagtgttcagccttggaaaggaaaaagagattagcagaggcatttcatatcagtgaggattctgatcctttcaatatacgttcttcagggtcaaaattcagtgatagtttgaaagaagatgccaggaaggacttaaagtttgtcagtgacgttgagaaggaaatggaaaccctcgtggaggccgtgaataagggaaagaatagtaagaaaagccacagcttccctcccatgaacagagaccaccgccggatcatccatgacttggcccaagtttatggcctggagagcgtgagctatgacagtgaaccgaagcgcaatgtggtggtcactgccatcagggggaagtccgtttgtcctcctaccacgctgacaggtgtgcttgaaagggaaatgcaggcacggcctccaccaccgattcctcatcacagacatcagtcagacaagaatcctgggagcagtaatttacagaaaataaccaaggagccaataattgactattttgacgtccaggactaagaagatcatgatgcacttagataaaagaatgattaggtatagtggagacttatttgccagcagataaatcatgcccgttcccctctgcctggcagaatcacagtctcacatactgtcttgtactgacacatccaaagcatgagtgtgtcagaaatcccttgtctattcctgtctgtataaagtgtttcattatgaccagatctctgattggtatggtcactaggtatgcaatcacgcattcaaagaggctctttacaccatccactgtgattgctctgagagttgagggactattgggctttatttggacaaaccaaacttttagcctgaaaccaactttatgccactaagtcatagcctcagttgtcccagttatttgtcctcctgaaaatgcctgaaacatcagacagacattgcttgctttacccaaactgatcaaaatctttaggagcacaaatgaattttttagtctgaaataccaaataatgaattggtataccatatccgggaatcacacatgtttatctttaaacccagccatcatacctaagtcttttgccaaaacctctcataggtatatctagctgaacttattttggcattttcaatgtgatcagttctagacctagaagggggtcaggctgctttacagaattctatttccttaagtccctggcacttctcataccacatcactgaacctgttcagtaacaatcagtttggccgtcccccatgatggtaggaaatatagagagcaagttcttctgccagggtcacactgtggtctctgaactgaccagtatatccctaactcctctttgatagagaaagagtctcaaatggacaactgtcctgtgttgctttccctaggccttcagcagcctattggctctccctgcctctgagctctggactctgtttgaatattccaagtagtatatggacagtccagggcttatgcccagcagcccactggaggcattcttcaggctcctttaaggcaggtgcattgatagttccattagtgtgacccttgcattggcacccctccagcctggaggccaggcttccagcaacttccttctgccctagagcaagccatgagccccagagcagtagcaggagacttgagaagtagagtgacaaaaacaagcacttaattaaattataaaatttaactttaaaaaaaaaaaaaaaaaaaaaaa

SEQ ID NO: 3243 - DNA, 346 bp, Homo sapiens
ggcaacaaaactctgcctttggcttttgctggctgagcagggaaagacctatagacacagggcattgggcaggagctagaacagccctccctagagcactacataaagcagccaatattttgcaaagcatagggaagagtgaaagtcatccggggcatttgcagacacagcactaagaacttggtgacaacagccctgaagcaaaacagcagcatgtactggggcagggcttggggagataaggacagggacatctgaagctaaacatgggatcccctctgaaagctacaatcaaagtgtcatccacaaaatcttatctcaagccttgactagagaaggacccact

SEQ ID NO: 3244 - DNA, 1567 bp, Homo sapiens
  misc_feature (1)...(1567): n = a,t,c or g
gactcttttcagagctggccacgaccaggtggtggtcctgctccatgatgtccgtgatgtgagcgtggaggaggagaaggtccggtacttcgggaaaggctacatggtggtgctccggcttgcgacgggcttctcccaccccctcacgcagagtgcagtcatgggccaccgcagtgatgtggaagccatcgccaagctcatcaccagcttcctgggagctgcactgccttgagagccccacagagctgtctcagagcagcgacagtgaggccggtgaccctgcaagccagagctgacagccccacttgtgcctgagcccgtgcaccgcccacaggacccgtgggcacattcccggtgtgcctgagcccgttgcaccgcccacaggacccgtgggcacattcccggtgtgcctgagcccgtgcaccgcccacaggacccgtggccttggcttcagttggtgcctccagccgagttggcctattgcctgctcatgctgctgcttgcacactgcatgaaacagcaggccagaccaggacatccagactttctccatcgtgaggcctgggcctgcctttctgcagccggaggtctcgccagccctggactcctgctttgggccacagcaagacctcgggcgagtggagaggcggggccaggccgggcccttgtgggtgctgatgctgcatgttgtccccgacacagcgtcctctccctggtggacatccccagcggtcaggtgcttccccaagggcagtgaggggtgaacatccagggcctacctggctgtgcacgctgcagccacactgtggaagctgcccctccccgaggacccgcctcccttgctgatgccaggatctcggcgcatagaccactctgccccagcggtcgtcacagaaaggtctctctgttcctcacactcagcttcagcataagctgtgaggccagaaaaaaggtcagctcttctagtatcgtgcagtgcttaaaaaccgggagctccnnnnnnnnnnnnnnnnnnnnnnnnnnnnnnnnnnnnnnnnnnnnnnnnnnnnnnnnnnnnnnnnnnnnnnnnnnnnnnnnnnnnnnnnnnnnnnnnnnnnnnnnnnnnnnnnnnnnnnnnnnnnnnnnnnccaaacaggaaaaactgggagattttctgcagaaattgagttccagcctctctcgaacctgggaagacctggcaggagggggctgggctctcggctacagacttctccccaccccgtaggagctgaacgccaaccatcctgacccgccagtgctcttggtctcctgagtgtacccaggtcctcccaggtgcggtgtgcaccaagcgcgcctggcctgatgccctggcctgtgagctggggactcctgggccctgtgagcccctaggcggcaggcccaggaatggctgggtaggacagggaacacctttgccccacgtctggctgtgacctcggtgaaagccgacaggagagagatgggaccctcctcctcagtagtggctgccagtccctcgttgcaggacagggtcatcataaccataaataacccttcacgtgtcaaa

SEQ ID NO: 3245 - DNA, 370 bp, Homo sapiens
gcccccagcgactcttcttggcctgatgtttgtcctcacaggcatgccacgtggcctgagatgattcagaacaaatcatgctaactttgaatccatccagccacttgcaaaatggataatcagaagtcagcttgttcactgttagaaagaaactaacaaaagagaacccagagcaatctagaatctttgagtgcttggctttccaaggatactgcggagactctggccaaggttgatgaccttctgaagtgtcactggcaccatatgcaacaagaaccaccattcacttgagtagctaatgggtttggggcctgggacattccatctgaggtccttcctggaacatgtcaattccacagcagaggaccgg

SEQ ID NO: 3246 - DNA, 435 bp, Homo sapiens
taattactataaatatcaatagttacatgtagctagtggcttccatgttggatagcacagttcttgagtctaaatgtctagttcagggccttctcctcctaaatgacatggcctccaaaaggggggtattgtttccaaattcagaattagcataaggaaaaaaataaaaatgtaggaactctgagaactgtgaggttgacaactaccaaggatggaattttagtgtacttaacagaaattcatcattctgtttggttttcccttagttccttaggaaaaagttccttttggaaaacaccacaggatttctggttttcaaatgatatctaacttgtaggaccctaattgcagcctcacttcaggctcctgatttcaaaaactggggattcaactgttcatcccattcaccccaaatttgggacggggctttttacc

SEQ ID NO: 3247 - DNA, 1302 bp, Homo sapiens
ttgattttagcccagagacagatggcagagctatctctctcatagcttttatgcccttatttttattcaactggtattaatgtttttctcctgaaactactttttttgatgtgggcaagagatttgaagtgttggcttttgctatgtgcatattgaattgaagagtgagtaggtgaaggtggtgctggtgggttcactttccaaggccagactaaaacagttattttctattaaaaatctgggaaggcaaagaatgggggatggggagagctacgtggtagtatgtttttattaggagaataatgcaataaaatatgtaatgtcttttttataaagcaaaaaagacaataattgcatttatgagctcggcaggatctgttcttgtcatagccattgactatacatttgctactggtgattcagtttttaattttttagtcacaggaaatttttaactctactgtagatgcatgtccatgcattttctgtgttatggaaatccactgatttttttttttttttcaaatggtggtacttgcaatctgttttataattagtgctccatttaaatctaatttataatttttattttaagcagcaaatgaaacaaaaatggccagttttaagattgtgttgcctgtaacacaaaatgttacgaaggtttaggaaagcctctttgatttttgtttggccttgcattgccttggtaaagtaaaaggaaacagtacacttggagctaggaaaccaaagcaagctttgtgaaactggcacagtgatagagaattgctgtggagagttatagagcaaagggatgggtccttgaggcctgccagtgtgtaaaggtgttcaaataaagggctgtttctacaggtaacattaaatgtgaactcaacacttccagagtctttaaagggtttctatgtgtatcagtgtaatagtgttttaccaccaactgcctttctttgttcctagttactgtaacaaatatttgatgatagaggtttattaattttgtttatccagaccattaattttatttgtttttgttctatgtaatcaaataaaatttgagtaacatgtaatggtaaggattaatgcatggttatttggaccagaaaaaagtgccatagaagaccaataactgtttagttgaggctagtctggaacctttcattagagcaatatttggttattgcacttcatttttatttactaagaaatgcaatttgggaatttttaatctgttatgctttgtttatcaaccttgattttaattaagacttttataagactagcttaaaa

SEQ ID NO: 3248 - DNA, 519 bp, Homo sapiens
  misc_feature (1)...(519): n = a,t,c or g
tttgccttcagagagctcagtcttcacagtaaaggcagacactaaataagaagtcacagcagaacagaggttgctaaactgtggcctggagctaagaatgggttctgcatttttaaagggatataagaaaaaggagagtgatagcgtgtgacccacagagtgcagaatacttgctgtgtggcccttcaccgaaaaaatttgcctattcttgtgacagtgttatgaggaaaataacaaaatccattctctgttatacactcattctgcagaaacactcgatgtatgtgatcctatattttctggtcaccagcactcttcccagtccagtctcttaccattaccatttctcacgtccttgaacctcagccaccttgatctacttccagatctacagattcgtcactctttctcgcggccagggagtggatgtgctgcancctgaaaagcactaattcttccctggncccttgatnctnaccngatngcccccnggtaccttccttaccagcngggggacct

SEQ ID NO: 3249 - DNA, 612 bp, Homo sapiens
cgtgtagatagaaaagaggactggtcttgggaacatctttggaaaaaccaacaaacaatagttctagggagatgagaaaaaaattcaccttacagtgctaagaaagtgcattagaatggaattgccctttccttaaggagacagtttgggctctccccttgccaccggctctggtgttttggcttatgcgttccttcaggttgagctgagcagtgtgttatgggaagctgctcaatttcctttcattcaattccacctccttcctgaactctaatagaggttaaaagggaaaaaaaaaattctgtagatagcaaattgtgtgtgtgggggggggtgggggtgtgggtgcatggaggacaacctgcaactctgagctccctacttcctgcctcatttcatgcagtcttttctgaacagcctatgctgctgccctgctggccccttgtgcacggcagctggccgtgtccgtagctgtcagtatgacttagatctagctcctacctactggttgatgtgttttttccttttgccaagtgattgagtctgtttagtagtttccatcattctagtctttaagtaaaaatgacactattgaggaaagtcagtctactc

SEQ ID NO: 3250 - DNA, 282 bp, Homo sapiens
caccccacacttccagtggcaccttgcacaagattgaagagcgggattcaggaaaagaacaagggcatactcgtagacatgactggggccatgaaaaacaaagaaaacataatcttggccatggcattaaacatgaacgtgaccaagggcatgggcaccaaagaggacatggccttggccatggactacgaacaacagcatggtcttggtcatggacataagttcaaacttgatgatgatcttgaacaccaagggggccatgtcctttgaccatgggacata

SEQ ID NO: 3251 - DNA, 765 bp, Homo sapiens
tggcccggacgccagaaaatgttccacgtgggataccctgcgtggggttcactgtagtagctgcactaggtgattcttggagcgggcctgagagacaaggacatgtggatcccagtggtcgggcttcctcggcggctgaggctctccgccttggcgggcgctggtcgcttttgcattttagggtctgaagcggcgacgcgaaagcatttgccggcgaggaaccactgtgggctctctgactcctctccgcagctgtggcccgaaccggatttcaggaatccgccaaggaaggcgtctaaggccagcttagactttaagcgttacgtaaccgatcggagattggctgagaccctggcgcaaatctatttgggaaaaccaagtagacctccacacctactgctggagtgcaatccaggtcctgggaatcctgactcaggcattacttgaagctggtgccaaagtggttgcgctcgaaagtgacaaaacttttattccacatttggagtccttaggaaaaaatctggatggaaaactacgagtgattcactgtgacttctttaaactagatcctagaagtggtggagtaataaaaccacctgctatgtcttctcgagggctctttaagaatttgggaatagaagcagttccttggacagcagacatccctttaaaagtagttggaatgttcccaagtagaggtgagaaaagggcactttggaaactcgcatatgacttgtattcctgtacttctatatataaatttgg

SEQ ID NO: 3252 - DNA, 687 bp, Homo sapiens
ctatctgctttgaccatgtgaaaaagtgatagtctgcttctctctggtaacttgtctgccacccatctgatagtaagattagccaaggccctttagccctctgtcctttctggttattgactgtccctggttcctaggaagacagagttgttctccagctaaagcgtctcctctctataaagtagttttactattcttttcatagcaggagccaaaatagtagaggaggggagagaggcacctggcactctgcgggcctgcacaggaaaaacagagccaaagacagaatcattgtataagatatttattaaaggagagcctctaagtccacatcctgagcccatgtgagtggacacaggtaggtaaaacggtgggtccagctgctgtcatctgaaagccttcaggagatgaagctatcagtatccagctgaaggctgctgggttctgttccaccaccaccttagcaccagggccctctctggtcccagaggcctcatctctccttgggctttgacaatgtggagcagcacatcagcagggactggtctagaccctccctttcctgtcacttagctggagctaagctccagataacccctaggttcccactggctcctagtagaaatagtttctgtactttagcagaacaggaaggatatttgttcattaaaggtggcttggtcttac

SEQ ID NO: 3253 - DNA, 1647 bp, Homo sapiens
gcaatcataaaataactttattggtcaggttagccaccactcatgcttttcctgtaataaggatcctttataaaggcatgatggtgttcacatgcagatgctttctgaagagccctggggcagggggcagccttgcccctcacatcggagctcctttgttgaaatgagctggtttggcttttgtggattccaggtctggagccaagaacgtagtccaaagatcccctcttcccttctcagggaaggtgcttcaaagcatacacagtatcagggatgtgatggcatctggggcagagcctatacttgggctaactctcctccaacagtccttgcccctgactgcccagatgggctttgtcccaaccttggcccaaagggcaggtgggttaagccccaggggaacattaccttttgaaatgggaagaattaagtgctccccagccaaactataaagcaaaagccaccttcactaatgaggatatagctcagagatgtgaaagcagagggttgtatgcccagcacaggccaagatttggctgccctggccctgggcttcacggacccccagccagagctgggtactttttaactatggccttaggacaaaccaggtgaaacagattaaccacatcctccttctttgggctagcaagtcccagggctgcctggagtctgtctctaccatcaggatatagaatcttcctgcttggataaaaggagaggacaaactgtgtttctcatactttaaaaaccatgtggccgctacctttgtggataaaaaccccaggtaggatgctgtttggaatgcagaaagtgctgggcaagaatggaactactggggctgctttctcaactcagccaatttgaggtgtgtttggcccattgcagatgctgatggtaagcaaagtctggcctttcctcttctgaagtcttatccaccttcaaagagctacccagctgccaaaatatagccctatacattgatctaagcctgaggttggctgtctcctcccacatcaggtcatgaatattatcatcatgctggtgacctccaatctggtggctttccaggggtgaggttagggaggtatagaagtgactcctggtgtcctttcaccctcagaccacagtgtgggttgtctccacaggttgcctgggcagatgcctcacatgccttggggtctcctgactctgcttaaggcacagaagaggcatctgtggaggaaagtggagtgggtgaagtggatttcagaagaggcagctgggcaagaggtatattttgagaagcaacaaatgggagcccagagtaactgcacgaccagcccagcacagagggagagctgtcaagtgctgctcacagacagccagggattgttagaaaagtatggttatatactattgcccatgccacttttgaagttccatgacctcagatcattgggaagaacttaagagccgtgagatttatggggttggaacatccagggatccttccatctaccaccacttctgtccctggaaaagagtgagcttctgcctatgtcctcagcagaaggctgcctgtccctgatcgccccccctaaccccacctacaggaaagaagactacagagggtgcccgtggacttctgtcacatggtccatcctg

SEQ ID NO: 3254 - DNA, 406 bp, Homo sapiens
ctatagtaagtataaaattacacaataaacacctgttttaacaccacaaagcaacatacattctactatccaaaccaactttttataaaggctctcttgtctgattttaaaattggttaaggagtgccattatcggtcatctgcttactgaccttccataagttcactgaaagaagggactgggcccttagcttgcaactggggtatgtgatttgaatgagatgaaggtgaagactgaacatgactcggtgaacatgagacacatggtgattctccccctagagatgaagcagagcagacccaaagagaacattagagctgcaaagaacgaggatgcagagtgattaactgattccactttctggtgaaggaacaagctcacttaccactatctttatcttttcgg

SEQ ID NO: 3255 - DNA, 939 bp, Homo sapiens
tctggggcacgtgttgaggatgtgtccagtttgtgctctacgggtgatgtgattctgcaggtaaaagaccatcaggttgtttttttccacatctgggacacagttgtttgtgtaggaacataacaagggtgtacggcttttcttgagcccattttaaacaacccttgtttccagataagtgtattttaaatgtgacctttcgtaaatttgggctggaacatgtaaaagggtgaaagttagtcgtttttggtcttgttttcatttttgattagaggaacttctgaacttggaaaggggaagttggcagcaactctcctgggccatgtatcaacaatcttcctgacagcaggagcagtgatagttggggaattgtgagatgaatggagaggccccatcgtgaattaaagatgctgacctggggattgttaagtgctgccttagttgctagtttagtagccttactgtgaaggaataattaagattgtttcagacttttgtttgtgtgcttgcgttgatgacttttttaacttcaagataaatcaaagtaataagtttaacgtatattaaacctgttgaaatgataattatgtaaagataaatattctaggttagtcaagatttctcttaagatttaagtgcataaagaatagtaatttagaagtatccgtgaaaagttgataatgaaagaaatttgatgaaggtgaatattttataaattagaatctccactacttatccaatggtgttttatttcattaaggtagaacttgagaactcaagtttaaattgtcccccaccaccttcttctataaatgcaaacttaagaggaaaataatgacatgtatagtatactcttgccttcctaaattatgactgctgaatcatcatatctactatatatgactagaagaagtggttcttcaagtcaaccctcttact

SEQ ID NO: 3256 - DNA, 1212 bp, Homo sapiens
cagcttttgtagattttaaatgggttgtgcaagcattaaaatgcaggtctttcagaatctagaactaggcataaccttacataatactaggaaaattatgagaaaggggaaatttttggttaaataagagtaaggttcaaacacaagcagtacatgttctgtttcattatgctcgatagaaggcttttttttcacttataaggcctgattggtcctacccagcttaacggggtggggtttttttgtttgttcagacagtctgttcttttgtaaacatttttagttggaaaaacagcatctgcattttccccatcctctacgttttagagaggaatcttgtttttgtgtgcaacataagaaaattatgaaaactaatagccaaaaaacctttgagattgcattaaagagaagggataaaggaccagcaataataccttgtaagttgcttttgtttgtaaaatctgagcttatagttttccttagtgagtaaattcataaggatgggaacatttaaattaagttaatgggcctttaaaaaaaaaaaaaggaaacactcatacctgtagttggaggatgaatactggagacgggttaccaatgtcaggttatactaaaactaaatcagaaagtctgaatgtagcacataatggttctcttctgttgtccaaggctgtaaaatggacagccttgtcacacctccccggtgctgttttacaacgtgagggtagacgctgtcagtaacccagagggaccaggccttcctaggttttctaggcagtcagctgttaaccactcacttagtaaatgtcataactacacctgctccaggaccaatcagtgaaacctgctcggaattaaaggcttcctctgggtgcctgctgaacaactgagctcatgtcatgggcatgtggtggtttctctgttgcctgaaagagccattaaagtcagtcgtgcgtgaagcatctctcttctaaaggatgtgtatttccataaatgctttctgaggatccggtacaaaatgatttcccaaagttctgaagtgccttgagaacatgtgggtccgagtgttataacagactcctcccccgggtcaccttttgcctggtcatcctgttagagtacatctttgggaaatccagggtaatattctctttcagagatgctcattgtgtaactctgtgtagggagatagtcactttaaacagctccaaa

SEQ ID NO: 3257 - DNA, 830 bp, Homo sapiens
atggattactagctttgatgcaccacagtaatcatgtggacagtagtcgctgctaccagtgtgtcaaatttcttgtcactcttgctcaaaagtgtcctgcagctaaggagtacttcaaggagaattcccaccactggagctgggctgtgcagtggctacagaagaagatgtcagaacattactggacaccacagagtaatgtctctaatgaaacatcaactggaaaaacctttcagcgaaccatttcagctcaggacacgttagcgtatgccacagctttgttgaatgaaaaagagcaatcaggaagcagtaatgggtcggagagtagtcctgccaatgaggaacggagacaggcatctacagcaggtataacggtcagcatgtccttgtgtgcaaagggcagccttgctcttaagctttccaaaaagaatttccacagctgagggaaaacaagatgcttcctctggaatgtgagtccaaagagttaccagcgctgccctctagtgatctcagctcagcatatgcactaaccgtgtgtttacagggctgagtagtgctgcagtgtgaagtgaatggaaggcctcgaggtgtttgtggctggccaccctgatcagcctgcaggtagtcccgatgaagccagggcacagggggattcgttccagcttgtttcactttattctgccttgcccaggttactgaaagtccctcgtttgctctcaccagccttcctggaaatgtggactcttgaaagaaaagctcccgtgctcttgaagtatacctgcttgccaggggagtccaagaaaattttgacatgtatttttaaaaaaaaa

SEQ ID NO: 3258 - DNA, 553 bp, Homo sapiens
gaaaccccgcccttttggcacggccccccacgtcttttggagccgcgaggcccccttccccttgcccccggtgtgacttcagcccccggctttcccctatttgcccacagccaaccccacagggcctggggaaccgggcccgccgggcgcagtggaggtgatccgggagtcccagcagcaccacgggcatggtggtgggcattgtggcggcggcggcgctctgcatcctcatcctcctctacgccatgtataagtaccgcaatcgtgatgagggctcctaccaggtggaccagagccgaaactacatcagtaactcggcccagagcaatggggcggtggtgaaagagaaggccccggctgcccccaagacgcccagcaaggccaagaagaacaaagacaaggagtattatgtctgagcccccggcactgcgccccactgccagctgcccctcctgggagggcccgggaggagggtgccaccctctccctgccaggggcctggggaccctctccctggctgcctcaggcttctcttacgaagaggaaacgcaaa

SEQ ID NO: 3259 - DNA, 1122 bp, Homo sapiens
gctcgacttttttttttttttttgcatgcctgccagctcgtgcatcctcctttttatttcaagaggtgccagctccaaacaaagttacaaggttaagtgcaactccaagttcctgacacagctaatccctgctcggtcttcaaaaaatagaggtctgtaattcctttttgaacatgccttcgaagtggaggtctttggccatgagctcttcttcgacatcatctagtgcccactggtgatccgtcagctccaaagcttcccactctgtcttgaaagctttgtttgtgtctgcgggcatggccatggctgctcccgtcatctgctcctgcatcattcgtgattggtcagcggcattatcttggccccagaatcagagagtaaatgctccgaagcccaaatacattgagggaagtaccaggatgcagaactcacccagggatgcatctaatgtgagtagctcgattccttgctgtaacataggcttaaaacggagggtcagtggaaatgggaccttggttgtgacaaagcctgagaatgtcatgttgatccatccaccaataagaatcatagggaggacatttgttacattccctttcatcatgtctgtcaacatagtaggatcagtcataggagaaggtggcactaccttccgtttagtttttttgaaaaatccatcctctgggttgttgaaataatattttcgtgtcaagaaagactgtttgggaatgtattttcccattttccctgaggactctgcttcgaattaggacttgactgtccagatacttgttccctgggtgagcttcttgtcgctctgcaagcaggatggaacacgtagtggcggatcaatgccctacgaagaaagtgatgataacgatgggtaggaccacccagaggcggatgttggagtcgagcaacagctactggccctgccatcttcactgaaagctggttcccagtctggaatgggcgagcttctcttctccggggcacagttgcttctacatatgttcgcctccgggccttctcaagcccctttgcccgtgtaccccagaactctcctgcgactgtgagccgagcttactgccttcagctgggctgcctggtcttcccctcgtgcca

SEQ ID NO: 3260 - DNA, 463 bp, Homo sapiens
gaaaagatttttaaaaagaacagtattttgtgccacatgaaaatgatatgagattcagattttagtattcataaataaagttttactggaacacacccatgcccatttgtttggtctctggttgcttttgcacagcaatggcagagttgagtcatggtgacagagaccatgtggccctcaaacctgagaatatttatcctctaaccttttgcagaaagtttgctgacccctggtttatatcattagggtaggcatgttgtgcctttatcctatgttttttaagaaaattctaaaatctaaaatgtattcatttcatgtatattataatgtgaaattcttattttgatagcatttttataccccctatgcaaaactgaaaatgctagacaatgaaagaaatgtgtaaactgttgaatacaaggagccaggcattcataatagagccagctgatgctttgagaga

SEQ ID NO: 3261 - DNA, 537 bp, Homo sapiens
tgaaaataccaaatcagttatttgaatatgcctaggattctaaaaccacagaaaataggcacattaatttccttagcctattactccctatggccagttggtacctcccaggtatcttcttattcttgcctgaccagcttaaccagttccatcatctgttcacatttgttcctcttcttagagcaacagagttaggtatacaagtaattaaataaagactaagcactaatgccctaatcccagctaattttaacaaggacactcaggaggataaagaatcaagaagagaaatattttttaaaaaagaatagaagtattatataacttttgttcttctaaacatcaaaatccagtcagaatggttatagaaaacattcaggaacagtgtctaagcaggaatagtagcaatttagtgagctgactaccagtgttctttttcataataattcccttaaacaactttgcattaaggggagatgctgcaaaagcaaaatgatctttttacttagagtaggtaagtcctattggaatttaaga

SEQ ID NO: 3262 - DNA, 1493 bp, Homo sapiens
gtggcttcgtggtctttatagctgttactcttttatactttgtctttttcttttattttcttttgagcgattgtgcgaacatagcatagcacgcactatgccttctgtgttgtagctgcctggccagggcgactggcggataaggtcttgtgcgtggcctcgaggcttaaaagtagcagtggggctttgtgaaggacaaaatggcgatggcgggccgtgtaggtcccccttcctatgatgaggaccttttcacagacctgtactgagctccgtgagattaaataactctgaggagatgggccctgcaagcctcttgcttagcccgtctgttcagaaaatagcgttttcgaaatgccctgagttgacctaatgtcttattgggctcctgtctgcaggatttacgcgcacgttggaaccgaagagagctctgttgttgcaatgttcagcccacaagagcttactggtgaaggaatgggacaagacccatctttatgcaaagccagcgttacagtaatgttccagcatctcataatctatcctggggaattcagctgcctcccagggtgaatacaggtattcctggatgacagtctgcctctatcttacagagcagcttgttgctatataccattgaaaagccttcagagctgagaggtactactaaccaataacctgcttggctcaaagggccagcaccttctctctaaagcccaagaggagtttgaggaaaactaggtgtctgtgttcactccaggctgaagttacaggtctgagcaaataaggtgtataaaaaatggaatctgtcttggaggacatcagaaggtgaattttccaagttcttggacaacctagctgttgaaaagctttctgggtttggggggtatttcagatgtaccttaaagtgttagcagacacagattaagacactgggagccaatgaaacagcagttgagggtttgctgtgtatcacatttctgtattttatcacccccttcctgcaacattatttatctggaatctacctgcccttttgttttttagatacaagggcttggttttgttacccaggctggtttcaagggccatagctttaagagatcctctcaccacagatttcccaaagtgctggggattgcaggtgtgattcatggcaccccagactttgctgcctttcttacatgatccaggcccagaacccaaactcaggcactgtatagatgaccactttcgtaaactactgacctagcttgttgccaattgttgattgaacttcccataactccacttcgtgtctgttcctctgtatacagccaccttctgttcccgtcatgagcctttaggtctccatttgcatattgcaaatactatgttccatgtaggtagctcattcagggccttgctcttcacttcaaaaaaggttcccttgaggactggctgtcaatttgtgttgctgtgttggttgttgatgaaaataataaaatgattgattacat

SEQ ID NO: 3263 - DNA, 256 bp, Homo sapiens
tccccacataactaccacccagtgaagacacagacatttccatcaacgtagagtttccttccttcctttttccagtctatctcactccatactgcctcaaaggtggttgcctctgtttttatttctgtaatgttacataaagagaaccacatagtatgttctccgtgtttgttctttcactcaacataaagtttctgaaatgcatccatgttgttccacatataggcagcttgttccttttatcattgagtggtac

SEQ ID NO: 3264 - DNA, 1141 bp, Homo sapiens
ttttttttttttcaaaataaaaggggtttatgtaacaaaaaacaaaaaaacaaacaaacaaaaaaacacagtaaaagataccacccagctagcagaaaggactcagcactgccttcagccttcacttactcagaaataactcatatctcaacctcagcaagccccaagcagtagaatgaggcttccctggaaagaggctgagactcacaggctggggatttaagaccctctcaccgtccaccttccttccttctttggtcttggaagatgaaaggctccatttttaaagggtggagaacagcagatcccctgctactgtgagacaagccagaaaagtgagtcaaggccagactcactatggggtcacccccaaacagcttcagatcaaaaagcctgccttgctgtgatgcccattgacagtggctgcaaatataaagggggggccacagggtctctggctttatttccacagggtagggagaagaccctgcagaaggctaggcagaggggcccagccgggaatttccccagcttttctggttctcagcagaccaacgtggtctctaatcagaaagacgaagaggcaggagagcactggcctcagatatcccccatcttgtcctcttgcactgtgggccagggctgctgtgagctaggagaccagggttccagaggggctcactaggtcctgcgggaggctttcccgggcctcctgcatgcggcgccgggctcgacggaaggcctctagcacattgtgaatggaactctgctggctgaacccttccagacggtccaacacactccgcatccttttctgaagggagctcgattccatgaaggccctgcagggaggccagccacatggttacggctgtctccacccctcagggttaaggtgccctgaggcagagggccaagtcactcacctggactgctgcagacagtgcaagcggaaggtgacagtgcctgtggtctctgtgcggagtccaaagcgggctcaggcgttccccctgtggcatgccattgggacagcctcaggtttctgctctctctagacacccccgcaccatgctggcctcacccccattcttattcccattcttgggaagcgcagttctgttggggaaaccttattccatcc

SEQ ID NO: 3265 - DNA, 1615 bp, Homo sapiens
cttagtgataacattatgaacaattctaaaagccctgtgatttgaaaaatatagaatcattaatggcccaagataggccttcacacccttcacaggtgcgaaaggaaaggccttcacaccctcacagaggcatcatgcaaaggacagcggctttggcttttccaattttccatctttaggccctggtgagaggcacacttatgcactaaaatgcacatatatgcacatgcattcaaaaataggcatttggtacaatggtgatcttgtacctgatgggctgaaaccagcttaagaacaaatttgttcttcctgatatgataactaggtctccaagagaaaatagaaaggctgctttagtgccttacgcttactaaatttaaatctttatttacctgggtttgagcctacagtctatttatgattacatatcaaaattgattaaaacacttccatttctaaaagttcaaatatacttgttaataaaaggattatcggcattaatactttaatttaaagaaaagttgtgttctgttttcctttctgtgtcttactccccccacactctccctcccccatcaccatcttcaattctaataaataatgctgatgttcaacagttgcagaaattgtgctattatgtaactgtgggccttgcccctgtctggccctctagatgatttgtagcagtgttattctacactttttaaaagaagcgtcctccttttgtccatgaatcatgtttaccccatacccagtggcagaggtgttctttaaagacttgaatatatgaatgtgtgtgtgtagttacttaaaggttattcctctttgtaataggaaactatatgggatgaacacttttaaactttccgacacaacttccattactaactttctaacagaacttccataactagaaggtggaaaccaaaaccctcatggtagtatttcctctggcagctggtgctgtgggcaactgttttgttcaatcgggtttcttttctttttgcctctaatgcagaaatcaacagaatcactcacacatacaagtacactcacatacataaactaattatttctctggatatctttctgtgttccatgtaaatttatttaccaacatctattgtcaacatgtacatctaccttagtatggtctgcattctttttctgagagtacctcatagggctcctgcctgatctttgtagtttgttcattcatccatccacctgttcatttgttcatccatgtattctaacatttctatgtagtgtgcaactctaatgtcatgcttttgaagaagagaatagctgcccatagcagccatccgtctggataatagcaaaacactctagataagttattttgcactttcttatgtataaagttggtagaaacttatttttgctttgtatcatttaaatacattttgttttggtaaatgaactgtgtataaaatatttatgccgttaaaactgtttttagaaagtatttttaatttcagcaagtttggttacttgttgcatgactcttaacacagctgactttttgtgtcagtgcaatgtatattttttgtcctgttattaacttgtaagccctagtaatggccaattattt

SEQ ID NO: 3266 - DNA, 810 bp, Homo sapiens
tttctgcttttgttagataaggcttttaagatcatgaacctccagctttagcaactcatatatcagtctctcacatggccacaattctagacaaaaaccaaagacccagaggccagagcaaagtaggaccttctgaagattcactactggtgtatccttggaccttcacattttactttaggattaatttattgaattttactgttacacatagtttttgacttgaattaaaatactagacaaagcagaaatgtacaatttctggtctgtgttttccaggaaattcatagagaagagactagagtggatgatgtgacttgaagtttttgcagcttattttttcccccactgtcagggcagaggcccattttaatgaatgtttttgcatgatctgttcttatgttaaccacatattttttttcccaattccacacagcaggtgatttcccgtgtgacatattttcttcatagtccctaatatagtcatcctctacagagttggcgtgctgtgtgcactgtggattaggaacagagtggagctgtaaccagtctcttctctggccctttgcctttatgtcagcttgcacttttgcctcacttattcctagtccagctcccaactgcctgacttaatgggaccagaacgggagatttgggtattaaggtgcagaggggggaggggaaggggatgggtagagatagacagctttcccctactaggttgggtcatttcccctaataactatagagggactgtgtttcaactctcttttcattgctgtttccagaagagtggagagtgtggtttca

SEQ ID NO: 3267 - DNA, 1415 bp, Homo sapiens
ggacgccgtgcagctgactgcgctggtcatgggcagcgaggccctgcagcagcagctgctggccaatgctggtgaactacgtcaccaaggagctgcgggccgagatccagtatgatgactaggccgcacctccggggaggtggggtggcccctttaaatgactctgtgattctgaagaggtggcttgggagttgggagaagcccagcggatgccccctggggaatctccacatcatcagtgtattactagtaatgtcccgctggagaggccaccgctgtgcagtgttcatgttccagaaatttactgatgaagcagcatgtgttggtgggcattgttgcactgggcctgccatgacagccctctgactgggccccccagtgaagagtaaaggcctgcctgccgcaggcttcggaggcgtctgctgagtcctctcacccgcatgggtctggggaagtgatcacgctcagcccgacggtctgaccacacttcatcctccccccggggccttctcatcttgggagatgactcctcttcagagcacctgctgcaggactggatcccacccccctgcaggtcctggggtctcagggccttggagcagcccatgctggaatcatgtttacctcctagtgcaaccgtcccctacccagggactgtcgaatggccccacggaggggacgggcggcctgctgagtgaagccacaaataccgagtggacttgaccccggcccccactaggctgcacacctagactcgccctgccagggcctcgctcttcccatctgaaaagtcctggtagttcttgaggtttacttctcaaatgaaatatttttagtaaaaagtaccagggtatatcctcggagatattgtgggttccagttcccagacccacctcggtaaagccaacatcacaataaagcaaggaagcgcattgttttagtttcccagtgcatctaagtcatgtttactgcatattgcagtccactaaatgtgcaatcgcattatgtctaacaaatatacaaaccttaatttaaaaatatttactgttcaaaatgcttgacacaggaaacggcaaagttgaggcacatgcttgtttggtgccaaatagacttgcctgatgccaggctgctacaaaccttcaatttaaaaaaaaaaaacagtattcacaaagcatagtagaatgaggtatgcctgtattgctctttctgaagtggtgtgatataaaccatctctaagaaatgtttctaccctaaagatttccccagtacagtcagctctccgtaactgtggtctccacatttagatccaaccagccttggataggaaatatttgaaaaaagaaattgcattggtactggaacacgtacagacctttttttcttgccattattccctaaacaatatgggtgtagca

SEQ ID NO: 3268 - DNA, 1235 bp, Homo sapiens
  misc_feature (1)...(1235): n = a,t,c or g
gtggagctgtccttccgcaagggagagcacatctgcctgatccgcaaggtgaacgagaactggtacgagggacgcatcacgggcacggggcgccaaggcatattccctgccagctacgtgcaggtgtctcgtgaaccccggctccggctctgtgacgacggcccccagctccccacgtctccccgcctgaccgctgccgcccgctcagcccgtcaccctacgtccccctcagccctgcgcacccagctgaccccaccgacttggggggacagacctccccccgttgcactggcttctccttccccgcccaggagcctagaccccagacccagaatcttggcacccctggtccagctctgtcccactctcgaggtcccagccatcccctggacctggggacctcctctcctaacacctctcagatacactggaccccgtaccggcngatgtaccagtacaggccccagaacgaagacgagctggagctgcgcangggggacagggtggatgtcatgcagcagtgtgacgatggctggtttgtgggtgtctcccggagagcccagaaattcggaacgttccctggaaattacgttgccccggtgtgagtggtctccatggcaacttggagccagccaggatggggtggggagcggtggcactcgtgggagggagaggacccccgcccacatcctccttccccagggacctgagctcccagcatctgcagacgacccccgcagcctttccctcggacccccctcgaagccccctgggactgattcccacccacgactcacaggcattcctcccacagccctttcatttcctccccaccccactccccaaatacagaggtctgctttgaagcggagaccatttccaggccttattgagaccagaccccaagtcccccacccccatcctgctccagcgtttcctctaacagggaccagctctccgctttgcccccacggggttcctctaaccagaaccagcttcctagcctcgtagagaccaaaggccgcccccgcctgctggggttcctcccagcaccccagcttgctggctgccctctttgccttctggcctccagctgggtgtggggggggcggagcaaggcgggggacagacgcagcaccttcttagcgatctaggcctggcaagagctctggccccaaggcctcctcttcccaggggctgccaagtcctggccctggccctggcatatcaccccg

SEQ ID NO: 3269 - DNA, 1555 bp, Homo sapiens
cgtacaagtacttcccttcctcgctctcaccagtgacgccctcagagtccctgccaaggccccgcgaccactgcccacccaacagcagccacagccatcacagaagttagggcgcatccgtgaagatgagggggcagtggcgtcatcaacagtcaaggagcctcctgaggctacagccacacctgagccactctcagatgaggacctacctctggatcctgacctgtatcaggacttctgtgcaggggcctttgatgaccatggcctgccctgggatgagcgacacagaagagtccccattcctgggaccccgcgctgcggaagagggcagtgaaagtgaagcatgtgaagcgttcgggagaagaagtctgagaagaagaaggaggagcgttacaagcggcttcggcagaagcaggaagcacaaggttaattggaaacacccagagagggctgatgccaaggaccctgcgtcactgccccagtgcctggggcccggctgtgtgcgccccgcccagcccagctccaagtattgctcagatgactgtggcatgaagctggcagccaaccgcatctacgagatcctcccccagcgcatccagcagtggcagcagagcccttgcattgctgaagagcacggcaagaagctgctcgaacgcattcgccgagagcagcagagtgcccgcacccgccttcaggaaatggaacgccgattccatgagcttgaggccatcattctacgtgccaagcagcaggctgtgcgcgaggatgaggagagcaacgagggtgacagtgatgacacagacctgcagatcttctgtgtttcctgtgggcaccccatcaacccacgtgttgccttgcgccacatggagcgctgctacgccaagtatgagagccagacgtcctttgggtccatgtaccccacacgcattgaaggggccacacgactcttctgtgatgtgtataatcctcagagcaaaacatactgtaagcggctccaggtgctgtgccccgagcactcacgggaccccaaagtgccagctgacgaggtatgcgggtgcccccttgtacgtgatgtctttgagctcacgggtgacttctgccgcctgcccaagcgccagtgcaatcgccattactgctgggagaagctgcggcgtgcggaagtggacttggagcgcgtgcgtgtgtggtacaagctggacgagctgtttgagcaggagcgcaatgtgcgcacagccatgcaaaactgcgcgggattgctggccttgatgctgcaccagacgatccagcacgatcccctcactaccgacctgcgctccagtgccgaccgctgagcctcctggcccggaccccttaaaccctgcattccagatgggggagccgcccggtgcccgtgtgtccgttcctccactcatctgtttctccggttctccctgtgcccatccaccggttgaccgcccatctgcctttatcagagggactgtccccgtcgacatgttcagtgcctggtggggctgcggagtccactcatccttgcctcctctccctgggttttgtt

SEQ ID NO: 3270 - DNA, 279 bp, Homo sapiens
  misc_feature (1)...(279): n = a,t,c or g
tgaatgaggaggtgatgtgcataagttaatagctgaagcgttccttgtgtcctctactgaaataaactctggcctttagttattcagagaggaagangggggaacctgtctccctctagacacagccatagcagttactgagtttaacttgaagccacttccaatgcccctgtttacaatctgagcactgcccctcccgggtccgngatanggcatcatcccncctttgcctgtctgcctgggtctttttttnaaccccttgcncttggggcatgttct

SEQ ID NO: 3271 - DNA, 722 bp, Homo sapiens
atgaaacttccggtctcattgtccgggaagtgagcattgagatttcgcgccagcaacgtcggaagaactctttggacctgaagattactggtgccagtgtgtggcctggagctcagcgggtaccacaaagagccggaaggcgtatgtgcgcattgcataggaactcatgacctgacatccattagcagagtcatcagagtcatctggctgctgtgttgagaatggaccatgctgggcaaggggagaagcaggaagaccagtgatgagactgcagctatgagagatgttaagctactgtagattggaagcagtggaggtggtgaggccaggatttcagatatatttaaaagttagagataacagcttttgttgagaccttggatgtgtgatgtgagagaaagaagagaaaggatgatttgaaagggcctaagccttatcaaggatttctttcaaatgtctttagtgaagccattcctgcctcacagagggaggaggctgggcattcctttctcaatactttcagagcagtttgtccatacccctaatatagtgcttgtctcatttcaattatattcactcgtaaaatttgtgtttcatgccagtgagttccatgagatcaagaattctattgtacttaattttatatctctcctgcttagcacaatacctagagtatcacagatgtttaacaattttcttgaattaaaactgttataaagaaa

SEQ ID NO: 3272 - DNA, 1609 bp, Homo sapiens
  misc_feature (1)...(1609): n = a,t,c or g
tgactttgagccgctgtttggagatgatttttacctgtttggagatgattggagcaagagtagtttatttcttaagcatttaaactgttgttatagctgaaatatttcttcatctaagtggtcttttcctgaaatcaggtcattatactgaatctatatgttgagtcttttttttttttcctttttatcttttcctaaagatgagtcctgcattaggaattgtctagataaagccattgctatgaccagtgtctgggngtagggggctgggggctatgactaaggagtgataggcaacccttcttgcgtctgtttcttcaagggcaaacggaatgcacgtgcagttgtccaccagccggcttagggactgcgcccggggatggggagaccagagccggctgctattcggtgcggggaaagagggggcactggtccaaagagtgtccgatagatcgttcaggccgcgtggcagacttgaccgagcaatataatgagcaatacggagcagtgcgtacgccttacaccatgagctatggggattcattgtattacaacaacgcgtacggagcgctcgatgcctactacaagcgctgccgtgctgcccggtcctatgaggncagtggcagctgcagctgcctccgtgtataattacgcagagcagaccatgtcccatctgcctcaagtccaaagcacaactgtgaccagccacctcaactctacttctgttgatccctatgacagacacctattgccaaactctggcgctgctgccacagctgctgctgcacacaccgctgctgctgttaactgcagcttccacttcatattacgggcgggatcggagccccctggcgtcgcgctacagccccagtccccactgttgggagagggctacggttatgggccagagagtgaattatctcaagcttccgcagctacacggaattctctgtatgacatggcccggtatgaacgggagcagtatgtggaccgagcccggtactcagccttttaaaaactggaggtaggataattgcggactgaaccctcgggctgcggtcatatatgagaacttgctccgcgcggtcccctttgccgggatgtttccattgcttcatgtttcagtaaacaaaaggagtttgtgaccaactatgttttctttcttaattcttctaagttgacttttctttcctcctgaaactagtctctgtagcctttcactctgttccttatattctcagcctctgagcagccctaggtaaggattatgctggcatcccctttttcctgtgcagtggaacccctcttatcttgctttccctaggagttgaatccttctccctgcctacctgcagcatctcctttccctttaaaatgaccatgtagtggcaagcagccttttactcttctgttagctctggactcttaacacttaagttactcttctgaaattgctaggaccattgggggttttgttgttttgtttgttttttatgtccgacctgtgatcgtggtacagcattagctgaaatttacccttgttttactccactcctcccttttttaaaaaaattttttgacaaataaatgtttctaacacttaaaaaaa

SEQ ID NO: 3273 - DNA, 2211 bp, Homo sapiens
ccgcggtttgtcgccagaaggaagatggcggatctggaggagcagttgtctgatgaagagaaggtgcgtatagcagcaaaattcatcattcatgcccctcctggagaatttaatgaggttttcaatgatgttcggttactgcttaataatgacaatcttctcagggaaggagcagcccatgcatttgcacagtataacttggaccagtttactccagtaaaaattgaaggttatgaagatcaggtattgataacagaacatggcgacttgggaaatggaaagtttttggatccaaagaacagaatctgttttaaatttgatcacttaaggaaggaggcaactgatccaagaccctgtgaagtatgaaaatgcagttgaatcatggagaacttcagtagaaactgctctgagagcttacgtaaaagaacattacccgaatggagtctgcactgtgtatggcaaaaaaatagatggacagcaaaccattattgcatgcatagaaagccatcagttccaagcaaaaaatttttggaatggtcgttggaggtcagaatggaagtttacaatcactccttcaaccactcaagtggttggcatcttgaaaattcaggttcattattatgaagatggtaatgttcagctagtgagtcataaagatatacaagattccctaacagtgtctaatgaagtgcaaacagcaaaagaatttataaagattgtagaagctgcagaaaatgaataccagactgccatcagtgagaattatcagacaatgtcggacactactttcaaagccttacgtcgacagttgccagttacacgcactaagattgattggaacaagatccttagctacaagattggcaaagagatgcagaatgcataagatgaacattgcatgaccggatcattttagtgtctttgcgttaaaaaatcattgcaaaagtattctgaactgtcaagctgcccagtcagatgggctgttgccatttaaaatcactgtaattaattagtttgattagagcacaaagcttagctaatcaaccattatttttcattttgtttgttctaagaggattgaaaatcagtttagtttaaatgtctttctgttaggcctttctttcttacaatgaagagatgattcttctagtttatggttaaaagtttttgaagtgtctcaaaaatattttactaactgtaaccctaaaattgatgtcttttggtttatgaaatcagtaatttttgatatttccccagttctttttaatggggtcaataatggacattctagtttaaggtggttgatggatttagccatatatgctgctaaagaaattgtctaccttttcttcctcacctgttccatttatgtaaagttgagattagagggaaagcattttctatatcaattgtgtttaaacctttcaagaaggttatttagctagcttagtgttgaactaaattttttttaaacaaggcaaggtctaatgctgttttgagattctgaaattaatgaaaatacttatttcagaaatgcatttaatgctttttttcttgtgacagttacgcaaatcagcttgaattccatatgtccctgagttatttttatcataaagccacaaatgtattataacaaggcaaattgtaatatatataatcctgaactcatgaccatgtctcggtttattttttttttcttggattgaaaagtactgaaattcaatgtgacattaaaatgcaaattttcctatttatttgagtagaaaatcacttaccagtgagcatatatattttaaaatactttctttggatattgtaattcttaactggttgtaaattagaaaagctgggattacatatggtgtgcggttacagtctaaattttttcatcctcctatgcatcataagcatgtttgtaatattttcaaaaatagttctactgatgctacaggaatttcaagcctgtggtgaatgttagtatttaccatagggagtgaagtggagttatggtttcattcaatagagtattgctgattatacttgagtggaatcctttcctcacgtactcccacagacgtctgggcctggaaattttttttttattttattttattgtttttttttttagaaaaacaccacttttattatgtacaataaaatatttcattagcttgaattgtatagatttttaaaaattcaaaaaaaaaaaaa

SEQ ID NO: 3274 - DNA, 1075 bp, Homo sapiens
  misc_feature (1)...(1075): n = a,t,c or g
cgatgtcttattgtgatgagtctcgactgtcaaatcttcttcggaggatcacccgggaagacgacagagactgaagattggtcactgtaaagcagttgaaagaatttattcagcaaccagaaaataagctggtactagttaaacaattggataatatcttggctgctgcacatgatgtgcttaatgaaagtagcaaattgcttcaggagttgagacaggagggagcttgctgtcttggccttctttgtgcttctctgagctatgaggctgagaagatcttcaagtggatttttagcaaatttagctcatctgcaaaagatgaagttaaactcctctacttatgtgccacctacaaagcactagagactgtaggagaaaagaaagccttttcatctgtaatgcagcttgtaatgaccagcctgcagtcaattcttgaaaatgtggatacaccagaattgctttgcaaatgtgttaagtgcattcttttggtggctcgatgttaccctcatattttcagcgctaattttagggatacagttgatatattagttggatggcatagagatcatactcagaaaccttcgctcacgcagcaggtatctgggtggttgcagagtttggagccattttgggtagctgatcttgcatttcctacgactcttcttggtcagtttctagaagacatggaagcatatgctgaggacctcagccatgtggcctctggggaatcagtggatgaagacgtccctcctccatcagtgtcatcaccaaagctggctgcgcttctccgggtatttagtactgtgctgaggagcattgggggaacgctttcagcccaattcgggccctccaattactgaggcatacgtaacagatgttctgtacagagtaatgagatgtgtgacggctgcaaaccaggtgtttttttctgaggctgtgttgacagctgctaatgagcgtgttggtgttttgctcggcagcttggatcctagcatgactatacattgngacatggncattacatatggattanacccactggagaattgcnaacttggggnaccgattttntcat

SEQ ID NO: 3275 - DNA, 1056 bp, Homo sapiens
  misc_feature (1)...(1056): n = a,t,c or g
aatatttttaacattgtgtcttttaaaagaaatgttttacacagttcatccaaagagcagagaactgaacttctcactattgccttggccctgacagctgttaccagcacccttttcccaagaaaagtcaattcccaggtgcttattggacatccttcgagggggaagaggagggaagcggccagctcacccttccgggaccctagtgtggggcgaatctcacggacctgacctcagaggtgcaccagtgccgcccaggtagataagagctgcagcattgactgtgcttccgttcttccctcggggattgctcatggcatgggcctcttacgtgctgtcagcttgatgtgaagatcaagttcagtgctgtgggatttttaggaacaaaaaactgtgacgtctggatttggggttgatttttgtgctggggtgggattatgggtcaatgttgaagaatttttaagtctgtattatgtttaaaacatgaatgatttgaaagtttaaatttttaatttttatatgtggaaattcttcctgttggctaaaggggaagctcaagtggtgtcgtcttttgtgctgttaaatatatattctattctttggaagaaggcagagagaggagtcttattatttttaaatgctcctagttgtatagtctgtctgttgtacatagagttcagcttgttttttggctccagtaggaaaaaaaatccatccatctgagatggggtcctgttgtttattatcactctagaagttatacattgatatttattctttctgtccccacgttgtggcacctgaagacatcttcaaaattggcagaaaagataatagttataaaaattttagttcatttatttttaaactcctttcagattattttaccattaggaggaggtagattgtttcggccttccctggtccggatttttggtttggtagtatntaaantttggaattccccnggcggttttangaaacaggggtttnccttcgggttgcngggaacatgggcnttaggagaatgggtaataaaaccgggggccccttttg

SEQ ID NO: 3276 - DNA, 1368 bp, Homo sapiens
cttgtctttaaatatataaatagtgctaaattgcaaagtcatatggagctttggatttagtttgacttcttactactgctttgtctgctatattcaaacccaaaggcattcccaagctagggagataaaaattaattttctaaaatgtccacatcctatacattttgcttattcatggcatctttcaaattttattttagtttcctttatttgccaagaatacatatggatttgaatttttaaggagagaaggaaagggtaggaaaccagggccttgggtttagtaacaggcattggatgtctattaaccaactattcttacgctaatgggctttgcagctcctattctcccatttgatcctcaaacaattctattagagtggtatttttatccaatttcacagattaaaatataagcactcaataaaatataacctttagaagcttaaaaagctagtaagtgatgaactgaggatttgaacccatgtttgtcaccaaggagctttccagggcacatgtcataaaattagagccaactgcagagctgtaagggaacttttagagatgaacttcttcagcctccatattttacagaaggaaactgaatcccagaaggagaaattgccgttctcaaggctccctggatgggtaataacacagatatgagtaggtcacataaagtatatcttttttaaaaaaaagaaattcaattatgtcttatttggggggtatatttcccagaagatatttttctggcatgtggtcgtaaacacagcatgattcatattttttatgtttcatgctactcattttgtttaattaccaacaaacatggggactttggctttttgacttatttgcaacaagcatgaaattgttaaatttaccttttatcaattgtaatcatcctatgccaacatattatcataaattcatagaaatatttttaaaaataaataacagacattgaaatccaattcttagataatactcccagaacagccaatggtaaatgccctatacttgagtcttacttagatgctgtggtaatgcaccattttagaagatgaatgatactgctatttctcttcagggaaacaataatggataaagaaatgtaactgccgggcagcaaagcttctaagtgaaacctgtagtagcagtagtagtagggagaaaatgtgtagtcatcaagtgaaaataggaaaggatctatgatttatgatgtcttaatagaccctaaattgttctttaattacaagagtggcagtctctgaagtcatttgtgagcttgtatgacttttgtatttagcaatgttgcatgctcacataattgaaaattaaaagtaacacatttttctgaaatgt

SEQ ID NO: 3277 - DNA, 844 bp, Homo sapiens
tttttttgcaaattatctagtcatctttattagctataatttggaatttgcaaatgacagaaaaggagaaaggcttcagacgcaaaggacttttaataagttaccttttgaagatgagacaagacaggttctaagctaatcagacgtgtccaccaggtggacctgcgctcttttcacaggtagcggttcctgatgtactctcggtacatggaggagtcctcttttcctaggggctgcatgataccttggctggcctggatgtgggcttggaagatctctgtagattttctgtctactcttgggggctgaacttcatagatgttatcttgcgagaaagctgagatgggtgttagttttataactccatctgagcacctagaacagggctgctggctattcttgtcttgtttatgttgactctgccccagctgaacaaatcttgaataaatggagaaatcttcttctgagaggccatctgagaggttaattccatatagctccttcatgggttggaccacattctcggtcactttggcactgtctcctgcatcagtcatcttcacgggagtggagcgctgagacacagagccctcttcttcccgatcagtcccagagtcatcctcagagctgctggacacagcctcctcgctggggggcggcggggcgctggctgccgttttccgctgtaatacagcttcttctctattgcttttgtttcccaatactgattttccagtttcatctggtttacgcacagtaaatggacttggatcaattccaacggtcttaggcataaagtcacgtgctgagcttgtcatagccaagcaaaaggtatcatcaaagc

SEQ ID NO: 3278 - DNA, 362 bp, Homo sapiens
gccttgtctcagctgctgaagctggagccatgaccctctgcattacaaacccattatgggtaacaaaaactcgccttatgttacagtatgatgctgttgttaactccccacaccgacaatataaaggaatgtttgatacacttgtgaaaatatataagtatgaaggtgtgcgtggattatataagggatttgttcctgggctgtttggaacatcgcatggtgcccttcagtttatggcatatgaattgctgaagttgaagtacaaccagcatatcaatagattaccagaagcccagttgagcacagtagaatatatatctgttgcagcactatccaaaatatttgctgtcgcagcaacatac

SEQ ID NO: 3279 - DNA, 1250 bp, Homo sapiens
gagagatagctcctcagcgaattccttccctgggagttcaaggtgtcatgcacctgactctttactgctcggccttacgcttcctgaatgaaggagtaatgaatgcagtggctgcgtctttgcctcctagagtggcacactgtcgaagtaaagatgttgccaagattctgtggtcatttggaactctgaattataagccacccaatgcagaagaattttactccagcctgataagtgagattcacagaaagatgcctgaattcaaccagtacccagaacacctgcccacctgcctgctgggcctggcatttttggagtactttccagtagagttaattgatttcgctctcagtccagggtttgtcaggttagctcaggagagaactaagtttgacctccttaaggaactatataccctcgatggtacagttggcattgagtgtccagattacagaggcaatcgtcttagtactcaccttcagcaagaggggtctgaattgctgtggtatttagcagagaaggatatgaattcaaagcctgaattcttagaaactgtctttttactggagaccatgctgggggggccccagtacgtcaagcaccatatgattttgcctcatacccgatcttctgacttagaggtccagcttgatgttaacctgaagccattaccatttaatagagaagccacgccggctgaaaatgtagccaaattaaggcttgagcatgtgggagtcagccttacagatgatttgatgaataagttactaaaagggaaagcaagaggacatttccaggggcaaaactgagtcagagcctggggcagcagccattgggagttgggagaattaaggcagctgttacctcttgggggcttcctttgcaatgtagcagataaatcagggggccatggagatggctggcctgtgccccgcagcctgcatgcagaccccaagaatgaagctggctgttcagttcacaaacaggaaccagtattgctatggccccccaggatctccttggactgcacaatatgaagaggcggcagctggcctcggccttggcctaccgtgtggtagagttatcctactgggaatggctcccactactgaaacgaactcgcttagaaaagttggcgtttcttcatgagaaagtattcacctctgctctctgaagggcatttaggggcatttctatggcaaagcctataggtgtatactgtaccaggtgttgcaaatgattataaaagc

SEQ ID NO: 3280 - DNA, 708 bp, Homo sapiens
tcgacgcaagcaggaagtgaactgagggccaccctgggaggaagccgactaggcgaattcacttactgaccggcctgggctgctctgagacatggaggaagccagtgaaggtggaggaaatgatcgtgtgcggaacctgcaaagtgaggtggagggagttaagaatattatgacccagaatgtggagcggatcctggcccggggggaaaacttggaacatctccgcaacaagacagaggatctggaagccacatctgagcacttcaagacgacatcgcagaaggtggctcggaaattctggtggaagaacgtgaagatgattgtccttatctgcgtgattgtttttatcatcatcctcttcattgtgctctttgccactggtgccttctcttaagtaacagggaacctctcccacctgcccttcttttcagggacaaccctccataaatgtgtgccaagagggtctcctttcctgtcttcctctacagagaatgctgctcggtcctcctacccctcttcccgaggccctgctgccacgttgtatgccccagaaggtaccttggtcccccggaaggagagaaaaaagagagatggactgtggctgcatttcttgggtccttagagtgggctggagagacctagagggcccagcatgtggctgggaaactgttggtggccagtgggtaataaagacctttcagtatccct

SEQ ID NO: 3281 - DNA, 524 bp, Homo sapiens
  misc_feature (1)...(524): n = a,t,c or g
gggattctgttgcccggnnnnnnnnnnnnnnnnnnnnnnnnnnnnnnnnnnnnnnnnnnnnnnnnnnnnnnnnnnnnnnnnnnnnnnnnnttattttatttatagtagaagtaagtgataaccttaaaaactttgacagtttgcagtggtgtttctgtgcatggttatggtctgggtgaaaaaattatgtttattagcgtcccaaatctaaagatctgtgaaaatgagtttggaggtagtaggtgaaaaaccaagggcctagtctggaggagagagtctaattctggcactaanaatctggggtagagtcaanatttttccatgaactttgagaggaaatggttttggggananccagcantgtgggaaaatgcagcacggcacagtanaaaagcatggactttggaataanttaaatctggctgangccaggcgcggnggcgnacatctgtatnccagantttgggangccgaggtggccgntcnnctgtggcaagatttncgacaanctggcnnnntatgga

SEQ ID NO: 3282 - DNA, 923 bp, Homo sapiens
ttttttttatcagtgaaaaatacttatttcatgtgtttaaaaatacattcttagggtgggccctgcaggaggagacaggccgtccacatctccttcccaatagtgtgtccaggtcgtttccaaaatctgtgggtccctcacagcttctgatgacagctgctaatgccatttgctgaggaacaaggatggggaggatggcgagggcctggcccccagggcggccacaccagaaggtcggaaaaaggcccaagacggatgccacgcccagcagtggtgactgcccccccactccttttcctgagtctatcagcattgtttggttttcttcttgttgcttttaaatcctcgagcggcaccctgaccaaagcagatggtagagggtattctatgtctgtagatccgcctttcacctgccggtgcaggggaggctgccacaggctcagagcagatttccatggcctccccttctgaccgctctccactgtcccctggggcttctgctgaggctgggcttctgcttttctttggcttatcaaaccggaagtccgcggggtacaggtgcatcctcaccatgtgatccttccggtctctgctggtcttgaacttcctctgtgcagccttctaccaagcactgatacatgtcctgcctctcagacaggatctggaagagcgaatcgtgccactccaggatgtgggcgtccagcaggtgtccggaagggaaggcccgcttgcaaaaggagcaaaaatttccgtgcagcgtgtggtagtggtgctcgtagtcgtccagggcatcgaacacctggcagcagccggccacctggcaggcaaaagcgggcaccctgggcttctcaggcacgtcggccacctgcatgatcacgtcctggaggtagaggtggcgctgcacgtccccatcctcgaagaac

SEQ ID NO: 3283 - DNA, 987 bp, Homo sapiens
gcatctttttgtttttttaacatgatttttctctaagcttaaataccacaaggccaaagagaaatggtcataatttaaaccattattatattgttgaggtatccctagctattattatagcaaagtgggaaaaaagtgtttattctattgaagttatgtaatgatccgacattaatgggaatatagaggagtcctaattaattggtataatttcacaaagcggaatggtattccttggagagttaaagacattctctttagtaagtgtaaacccaaagggcattttctttattcctgcttctaattccttctagcccagtgaattatttctcttttcactggtaatgtgatgaatgggaattgtttattacattgaagtgacttgcaagtgaccttttgtgctttaggtgcaggttgacactgaaaaaaaaacaaaacgctgaatttttcacacctatgtctgcattaaaggctgttttactaccggaagttacatagacttcctgcagtcagctgctgtgccccagtgccttactggtcctttgtagatttgccttaatgatttgtacaaatgactgggaggcggggatgctgcctgtgtcctggtgaaccttaatgaaggggccgtcttaggcacagtgcaaaacaagcatttgtcctgtactgttagagccaaaattgtgatgagcaatactgataattgtccagtttatgtcatctttcccagattttaaaatctgttctagatattcttagcttgaaccacttttgattgtgaaatgtattaggtgttgtcccattattactgtaaaatgaagttttgaatcttcttgttaataaactgtggatttcccctctcaatttcttaaacaacaacaaaaaaatgcttgaagattgtctttgagtgtaagatctgccttttcagaaagggagtgttagtttgtaatgttaaaaaataaagacctcattcaataaaagttgaagtac

SEQ ID NO: 3284 - DNA, 754 bp, Homo sapiens
aagcaagcaacccagtgatagcagcccagctctgctctaaaacaaatccagaagtccataattaccagcctcaatatcatcctaatatccatcccagcccagccccggtggcatcctcactctccaaatgtcaggccatcctttcaggatgacaggtcgcattggaaagcatcggccagtggagatgacagccattttgattatgtccacgaccagaaccagaagaacttaggagggatgcaaagtatgatgtatcgagataaactcatgactgcactttgagagactgaagcatctctcttccattcaccttcatagtttcattgcattccatgaaaagtgtcttggcctcagatggatggatgtgtttggacgagtgtctttaaggagtagtcctgaaaggtgtttttggtgtccatgtaaatatttgaagataaaaccactatagcttgtcataatttactgttgactgcattctcattaaaatgaaggtaaaggctcaggaatcatattgatgttctgattttaaaattggagtcaaagtctatgtttatcattttactatgttcctgatgttctttgttatttaattaatgggagcaaataaaaccagaagagcttgggaagattgctcagcatatattcctgtcgtagaagttgagattgctagggtccagtttccctagtgtggcctggacgagtcatttccccttcattgacctcattttccccatctgaaaagagagggttggac

SEQ ID NO: 3285 - DNA, 732 bp, Homo sapiens
gacacatttatatatagcaaaagcctgagctgtttttaaacagctaaaaacagtagtatttattacaatctccacaatgaaaacaaatagtgcaatgtaagaaatattatgtatcttactgttgatgtgtgatcagggagcagagctatctgcatttgtatttagtgtgagagtcctaaatgttcttcaccaactttttcttcctcatagaagcaacatggcatagttaagggtgtggactctgggctcctgctgcctgggccccgattccagcatggggcatgctacttaatatctctgtgcctcagttcccatcccataaaagagtagtgatagtgacaacatcttaggattgctttgaggtctaaatgagttaacattttcaaagcacttagaatagtgtctgagacacaagagctatatgttagaggttatcatcattatttgtattttgtgaattacgctgcaaaaaaaaaaaaaatgttggctacccaacattcattccccaccttcttgctgccagtgccttgatttggttgtttgttgtttgtttgttttcctacaagtgatttaggggcagatcctgactacactaagtcagggtttgacaaatgacagtccatcagacagatctggcccactacccatttttgtatcctgcaagctaagaatggttttatatttctaaatggttgaaagaatcaaagaatattgtgacacatgaaaattata

SEQ ID NO: 3286 - DNA, 2388 bp, Homo sapiens
  misc_feature (1)...(2388): n = a,t,c or g
ttttcaatttaagcttctttaatgttgatgaaaggtatttgtagttcatataaactatacttatgtgaaggatagcagatgcttcatataaattatcattttgatatacatatcttatggtttatgagaaaagagaaaaaataatacatcggttttgctacactttaatgggttttttttttaagggattttttttcaggtcttgtcagcaacatcaaacaaaaggtactgagtactccacagggtacagagtgctgccaagcaccttagaaaaattacatgacacggagaaaatgcgcctcttgctccttgaagagcttacagtctagggatttgacaactcacagtcttaggaactgggcaaagtaagggcaaattcttcatcccctagagctattgtggactgaatcattttagaatttggaattaatccaatcaagatgagagacaagactaaatttggctgagaattcattcagggctcgcatagtttttattaacatccgtctagtaaacagaatggacctaacagacaactgaaagtaaagactagatctcttgaagtgcaagggctacaacaacttaattgtggttacttattttaaaaagcaaacatactgaatggtatgactagggtgattacactagtttaaaaataggccaggtactgacactgcattcccctcatgcattgctcatttaaaatagtgaatattaaaatatgtgggctttacatctaacccacagaaagcccaccgcaaatgttctgtgtatcaaatatccacctcatgtgtactatgaaagttttatttatgccccattaagtcaaaagtaaattatagtaagctaatgacctgcatattttcatatggatgaatgtcagtatatctaaataggaaataaatggcgatcctatctacctatataaaaaaaatagaatatctttccagattttgcatactcctcactgtaagaagaggtatgcaggttttaaggtttcacaatcagttgtcagaaaaacagcagttatgcctgcagtatctcgttagcatctgactcaattatttttagattacattgtttagaagacattgtaaacccatctaaaactttgtaattattttgagatggttccaatgttaaccctagaatcatcgatcagaaagagtaacaatgtgatgtagaagaacagctaatcgacatgacgtaaaaatatgctcattttcagaaanacaatctggtcatctggaaacaatcacagctacaacctagggaacactcccatgtgggatactgatctggccaaggcacactttttaagcaggaaaactatcagatcagggtgaatttaggccacttcagaggtgctgcctataaacatcccagacagaccttcttaggcagcagaactggtcccattcctctcaaagcagtttgacactaccctacccacatcaacccaaagcttgacgttaagtcaaaagagcatattggagcaaaagtgaacagatgtgtaaactctagcacattcttattgctgtattaagtctgaagatgagcacatcctacccacaacagtattgttcccaggaagcagggtaggagtagtggtaaattagaaaatagactattaattgcacaattaatagaaaagtaaaaacatgtttcaaaatctacaataaacctgtatcccaaggagtcctatacgtcagtgtgatgtgctggactctgaattctgtggtacagctttgccatttgactccgtccggcctactggtctgggtacggcttgcttcctgcctgttgaagggtgaatatgctacacagagctatgatggtttctactgagtggtaaaattcacagaagttccaggttcatcatgtcaggatcattccttgtgcaaagtttgatgtagatgaagataaagtggtttcttggtcaataattgcaatttctttcttttaaagtcagtgggtttcttgtatagttctattacaattggcccaggtttaatttcatccatctccatgaaagcaaaacacttggtgctggtaaacctttttttaggcttgtagtgtttgaattcaaagaagatagctgcacctttggttaatttttcaacatgcttctggagctcaatgtccacattaaaatgaacatatgtatcttcttttcttgaagccacaggagtatcttgcacaggagttaagtctatgccattcagatcctttacactaactgtaatatagggatcgatgcactgcccagcatctttcaaaccaattttctcaattctgatagtgagtaatgtcattcctggttccgatggcaaccttggtaataaagtaccgggaactctagcaggaaaagaatcaggagaccctgct

SEQ ID NO: 3287 - DNA, 665 bp, Homo sapiens
gcggcacgagggcgagagtttgtgcggcgacatgaaactgcttacccacaatctgctgagctcgcatgtgcggggggtggggtcccgtggcttccccctgcgcctccaggccaccgaggtccgtatctgccctgtggaattcaaccccaacttcgtggcgcgtatgatacctaaagtggagtggtcggcgttcctggaggcggccgataacttgcgtctgatccaggtgccgaaagggccggttgagggatatgaggagaatgaggagtttctgaggaccatgcaccacctgctgctggaggtgagaagcggcccatcacttgcttcccgggccacctgcctcccgcactgaggctgccagtgctcagctctgtccctccctgcccgcaggtggaagtgatagagggcaccctgcagtgcccggaatctggacgtatgttccccatcagccgcgggatccccaacatgctgctgagtgaagaggaaactgagagttgattgtgccaggcgccagtttttcttgttatgactgtgtatttttgttgatctataccctgtttccgaattctgccgtgtgtatccccaacccttgacccaatgacaccaaacacagtgtttttgagctcggtattatatatttttttctcattaaaggtttaaaacca

SEQ ID NO: 3288 - DNA, 828 bp, Homo sapiens
  misc_feature (1)...(828): n = a,t,c or g
aatttgtttctgatggttgatctaacccctgtctatttgattaaacatgtcctacttcatttaaccaagcctggggagggaagctttagtctggcacaaacgaaacctactcctgactttagacacctctcagagacagaatgggttccaaaccagagcacctggctgggccaactgtcctagaaactgcatgggtcccagatttgctatggcagctcacacatgcttcataaacaattttctgatggtaattcactgatgcaagaggaagaaaggcctagtgtacgaattcagtaatcagcctagtaattgattgaaatcagtagaaatcaaacatattctagaatttctgaaacgtcagtgaaaccatgtgtaagtttattagaaagttggattttttaacgacgaaaagagaaggacccacacaccttaattttgtacctataagcttgcggtctgtctgcataacatagatttagcccagtcttagccttcagcgtctaacactttcctaactattcattttaagtctataagcatgggttaaatgattacctcgtgcctggccttgtgttgggggctctgaggaactctgcaatctttttattttcattttttgagacagggatcttgctctgtcacacagggctgggagtgcagtgggtacccatcacaggctcacctacagccctcaaccctcgtgggggggctcaattgatccctccccaccctcaggcctcttcaagtaggctgaggttacagggcacatgncaccatgccggggggtaattttttgtaggtttttgtaggagacaggntttcaccaag

SEQ ID NO: 3289 - DNA, 1528 bp, Homo sapiens
acactttagttgggagctgcgcccgctacacgtttactggagagctggccgcgcgccgccgcctcccgcacgcttgcacgcgggcccggcttcggggttttgggttcttactccaagcggcggggaggagggggagccccggacacactgtggggaggaggaggaagaagaggaggagggaggaagaaaaaagacgaggaggacaggggcggggggcgggaggcttgccaccttcagcccccccgcgaacgccccaaggttgcacacatctttgaccaactcagcagcaaggtggattttctttgtgtttaaagaaaaaaaatgtccctgtgtctgtagagatgattttgcagttcagcccggctgaagctgaccgaattgagactatgggctgtgcctccgccaagcatgttgccactgttcaaaatgaagaggaagcccagaaagggaaaaactaccagaacggagatgtgtttggcgatgagtataggatcaaaccagtggaagaggtcaaatacatgaaaaatggggcagaagaagagcagaaaatagcagccaggaaccaagaaaacttggaaaaaagtgccagctcaaatgtaagacttaaaactaataaagaggttccgggattagttcatcaacccagagcaaacatgcacatctctgaaagccaacaagaattcttcagaatgctggatgaaaaaattgaaaagggtcgggattactgttcggaagaagaggatatcacatagcaccaattttaccactcaaaccaggagctactactgtgtaaataggttacaccccagttgaaatctttgcaaaggtcggttctattcagcgaacagcactatagcaaaagaagatcgttccatattgtacgccccattaaattacagtgtttcttaatgaacttgcaaaggaatattgctaaaaacaaacaaaaaaaactgttatcgaactttctttgttgctgctagttaaaacttgttgcaacttttcacttctcttgtgtccaggtatgcagcaaaattctgcaatttcaccttaaagatactgttggttttacagatgctctccaacctattttctataagatgaggtagtggtgaactcagataacaaacttctcttctaaactggttctgcttctaagacaagcatctcctgccctctctccttcctccccatctctcgcacgcagtctagagatggactgagccttgcttctcactggcagtgttgagctttggagatgggatggttgctatgccaagccttgtttctctgctcagaagaagtagagaagctattatcaattaaaagcatgctgtgatgtgactcctggaagtgacgtaggagtgagtggcaggttgtttgatttaataggtatcttaatcaagaattaagcttgcaacattggctttgctcagatgcagatggaagtgtgatcacaatcattttgaatccctcttcctcacttttttttctaagaaaataaacattttactgtttttatggaaaaaaa

SEQ ID NO: 3290 - DNA, 438 bp, Homo sapiens
  misc_feature (1)...(438): n = a,t,c or g
ggaaaaccttggccgaaagggttgtagacatggcggccatcaggatgggaaaactgacaaccatgcctgcaggtctgatatatgcatctgtaagtgtacatgcagccaaacaagaggaatccaaaaagcagctagtgaaaccagagcagctccccatatatactgcaccaccgctccagtctaaatatgttgaagagcagcctggtcatttacaaatgggctttgcttccatccgcactgcaactggttgttacattggctggtgcaagggtgtttatgtctttgtgaaaaatgggataatggatacagtacaatttggaaaaggttccaagtttaagaaaattacttatcctctgggactggccactttaggagcaactgtttgctacccagttcagtccgtaataattgctaaggtaacagcaaaaaaggnatatg

SEQ ID NO: 3291 - DNA, 452 bp, Homo sapiens
  misc_feature (1)...(452): n = a,t,c or g
aataccctgtctctgaaaagattaaaaataaacataacaaaaataaaatatgaaggggaacagaactcagtctgaagtttggaccattgctaaattcagagaaaacagcagaatgtcagtgcctatagtaatagaggaatagcaaggtcaagcctttatcctggctcagaggagaagagaacctcctcttgcacccattcattcaacagctatacttaagagcaaggttttctggaaatggcctatgcacagtcactgaaaatcccagccaaggtcacttcatgacttgcaaatcttgggcagagtcatcaggaatatgcccaggcatattcatagctccctgcagcctcgacctcctgggttcaagcgaccttctgcccagctctcagnatctgggattacnggnatgaccccatgcctggccccaatttttanangnggaatattttatt

SEQ ID NO: 3292 - DNA, 499 bp, Homo sapiens
  misc_feature (1)...(499): n = a,t,c or g
ccttgannanccgnnnnnnnnnnnnnnnnnnnnnnnnnnnnnnnnnnnnnnnnnnnnnnnnnnnnnnnnnnnnnnnnnnggcacgagcatggcttggtgcttcctttagttcaagaagatcggggcagggaaggctttgggaggacatatggggaaggtagctgaaatgacgttagctnnnnnnnnnnnnnnnnnnnnnnnnnnnnnnnnnnnnnnnnnnnnnnnnnnnnnnnnnnnnnnnnnnnnnnnnnnnnnnnnnnnnnnnnnnnnnnnnnnnnnnnnnnnnnnnnnnnnnnnnnnnnncgtaaataagagaaataaccaagctaaaatgatgttagttgatctttcttcagagtcacagcgaaaatacccagtaccgcctggtaaaaacagtaggaatgagagggactacttaaggagaatctctgaattccaaaatggcaggagcacacttctcaaatggatgagtcatttcaatcagcgccattcttgcggg

SEQ ID NO: 3293 - DNA, 444 bp, Homo sapiens
ccccatctcaaaaaaaaaaaaaagcgggtgggggggagttgggctgtgttggaatgggcctgcagcccaacaaacaagggaactaggaccgacagtgacttcaccagcttgctaggtcagaatgagagactggtgggtctgtctacctgtttcttctacaagatccctatttgactgtaaaagtagctaatactcacatgttctccaatcccaggtagccatggtagagttgggtagagttgagcagctgccccaggatccaaatgtggtgtctgaaatggaaagaactaaggcaaccaggaaggcactgatctgccttataagcacagtcatctgaaagtcaggcctgctgcaggacaggatcccccagagaccccatttgcctctcaacactcagaccttcaactgttttttaataaatctactttttaaaaaaaaaaaata

SEQ ID NO: 3294 - DNA, 825 bp, Homo sapiens
tttttttttcagcccaaactcatgttctcaactttattccccatcccagtggtggctcttctgtacagtggagaaagaagggggaccccaccagggctatggagagacagtagaggcaggactgaaccgtcagcaaagattaaaaggatgacctgaggctggcaaccacaaaaccaagaagccagcgggggctgccccttccaagtctcaccaatgacccagagcaggttccagagcccaaaggcccaaaagtgcaattcccaaaagccaaggtctgggagccatcaaggagctcccagagatccagcgacgctcagagggcaagggtgtctttgatgagcctgcgcatggtggtggtgactgaggtgcccagggcatcagtgatctggaaggagatcttgtacaggtagggctgcacgtcccgcaagcctgtgtcaaacacgttatccacctccgactgtgtgggcatcttgggcaagtactcatgccgattcatcacctccacgatgttgatgatcttctcgcagagtttctcacccaccttctcccggcagatctgccgctcctgctccgtggccagggctaccacatgcaccttgaccgtccacacttcccatgggatgcactcgtctgagaatggccagcgagacttcttcttctggtagaactccaaggacatctgccccagcccatcgccaccagagttgcgcagtgcatccttgaactccccaacaaccttgcgcagggcacgatcaagttcctcagaagagacacgcacataagtgaagtcgatgaagtcacagtcaacatcctgggtgcccacgg

SEQ ID NO: 3295 - DNA, 920 bp, Homo sapiens
tttttgttagataactaactttatctctatcacatctgtttacaagcaaagtattactttgtctggacttatttcatcttcagtgtctgggatcgtgggcaacagagcagatcgcgttaagccccaaaatttttgaggtgacatgtcttttttggtggccgtaaacttccatccaatatggcttgcacagatcttacactgggcaacagtccaggcatacctaagaaattaaggaaagatatcagctaaggaaacatttctgtactccaagcctatcatataaacctatcatgaagacagactttagaggcaaattctaaggattagagattctaagttgagatttgatccatacagttccctgaaacctaaaaacatttctaaaaacattttctaattttgtaatatgtatgacttttatgctcttaagccatgtttacatttttcttctactgcatagaaataaagagtaatcttaagaatttctttatagaaattgctggttgccaagaccacattctaacttgtactggcaccacattctaacttgtactggcttttcctttgttgtattgcagtcaagttagaaaacagcaattacctgcagaaataatgcacttctgtctgagttaaactggatgggccaggaaggacacgtctcaaaaagtaaatatttatattctaaaataagaacgattgtcagataatgcaaccagaaatacaaaccatggtattttgttcttaagataaaccatgtaattgcaactgtttccttatttttttccctaggtataccatgccacatttatttatagtaacaaatgtattctagttttagtcctcacatagggtgccaagtaagatagggcaatccaagagacatagtcctaaccccagagtagcatgtaatcccttcttag

SEQ ID NO: 3296 - DNA, 594 bp, Homo sapiens
ggcacgagcccagtgctatctgcaggctggccagcttcctctgcgctccggaaagctgcggcccagcgcggactagtgaggacctccacagctcctgacattgccaggagtcctgtcggcgttttctcccagcctccgccatgccggcggtgctgggttttgaaggcagcgccaataagattggcgtgggcgtggtgcgggatggcaaggtgctggcgaacccgcggcggacttacgtcacgcctcctggcacaggattccttccaggtgatacagccaggcatcaccgagctgttatcctagacctgctgcaggaggcactaacagagtctggattaacctcccaggatatcgactgcattgcatacaccaagggccctggcatgggtgccccactggtttctgtggctgttgtggcccgtactgtggcccagctgtggaataagccattggtgggtgtgaaccactgtataggccacattgagatgggccgcctcatcactggagccaccagcccaaccgtgttgtatgtgagtggaggaaatacgcaggtatttagagggctctacccactccattttcaatttctgaggg

SEQ ID NO: 3297 - DNA, 911 bp, Homo sapiens
tttttttttgtgatgcagcatcaggtgcttttacttcagtgaatgaaaaataatggtcacaactcaaatgaatgggaatttaatatgaatatatgcaccttaccagagatgtttgctaccaatgatatcttagcaattccatattccttacaaagtcagtataattgttgtaaaaaaatcaactgtggttctgaatacccattcacagttgacctcaacaatgtatctgatgtaggagactgagtatccgtgacagggcagaagcatgtgatgggtcctcagtcccaagtgggaaggaggctaatgggttaaagttcatattcaggaagggctttcacatccatagtttctgataaaggacttttttgtatggaatcctgttcactcaaagtatgatcctctgcactggagtctagagttttatctgcaccagaatggacttttgttttgtgcttctttaaatttttaatatctgtgtaagaatttccacataattcgcagataaatggtctttctcctgtatgttttcgagaatgagtgataagagaactagagacagcaaatgccttcccacaggtatcacatacataaggcttttctcccagtaatgccctacggacatgataggtcagtgtgctggcttgagcaaatctctgtccacacctatcacagacatatggcttctctccactatgcttccttgcatgaatcttgagattgctagaagttgcaaactgtaagttgcatacatcacatttatagggtttttcttcaccatgatgcatgcgactatggaagactagctgacatttctgagcaaatcctttatcacacaattcacatttgtatggcttctcacctgtatgagttcttacatgcgttttcagctggttacattgggtaaatgcctt

SEQ ID NO: 3298 - DNA, 1475 bp, Homo sapiens
gatcatttaaaagtgtttattttctaaatgggagtaacacagagggaacttttggcaccttctttccagtccatcacccccatcatgtcctcccaaacacaaagcaatggcaggagaaaccacaggacagtcacaaagtcagtcacagagagatctcgtacaatcccggatagctggaattcaagagtctgtcccagctatcttgtcctggagtggggttacagctcaggggcatagggctcctcagtaggtgaagggtacccgcagctcagcatcatgccttaccacggtgaagagtcccaccactgccaggcaggagccatcaccatgacaggcagagcaaatgctggaacatattccgagtgcctgtttttccgatcactgtcatggaggacaaggagccctaggggaaggccagtgagtgcagagggtacccggaaccagttggagtacaccagcctgctctgtctcagggatcacctttctccgtagaaagctcatgcttgggaaagtatatccacaagccaactcaataagtagaaaggctatgaaggactccaccggactctcctggcctgggctggtagagaaagtcaacatgaagagagagaagacgacgatgagcacagcaaggaccagcaggtgcatgggctgaaggtggtacctcttggaggtggcgatacggtacagggaagagccaagcaggctggctgccatgaagctggagaagataatgcccagaggggccccgtgtgggtccagcacaggtgtccagaggaagacaaagatgaagatgacactctcaaatagagcttgtatggtgcccaacagcagcacgcggcggtccgacaggaggcagcgcaggcctccagcacaggtccttgagaaggcacgctgccggtcatagttctccccccagtttcgaagggccaaggcccctgccagagccaggagagggatggcagccacaaagggcgctacaggccccagcccctatccagctggctacagcctcagctgccacacctgccactacagcccagcacatggttccagaaggcagctcgagcaaaggtagctgggatccactcagcagggaagtcatgcccgttccacgtgctcatggatataccaggcctcgaaggctgagaagagcagggctgtggacagcccaccaagtgctcgccccactagcagcacaaagtagtcttgagagagtttggttaagcagcatagtgagtaagtcagggagaagaggacacaagaattcttgcgacccagccaatccacaagggaggaggccactaggccaaagaggactgtagaggcaaggccacagacatagaggatggcaatttgaccttccaggaagtagtaatgctggtagagtttatagaggtagggggcctgaagccaatcagctgccagggccaggaagtagacctgatagaagtccagttgaaaccgaaggaagg

SEQ ID NO: 3299 - DNA, 658 bp, Homo sapiens
gggaggtgctgctctcggccacgatagttcctctttccaggtgagtccacctgtaggtggaagagccagtccagagaggagggccaggcatccacctggcctgacccatcactccagatccccaggccccagcatcttcctagcatggatttaggaataaaattgacctgagatcactggggccacttcaccttcccccaaatggagccacattcccaggatcatctcagccacttcagctgacctggtagttttttcttgtttttaatctcagatgtcttcaagtttccctaattccctaatttttcttcttcttgcctcaggttggtcttgttttttctttgttaaagtgattttccttgtagtggtgtaggttctattgacagcattgctatcctgagtgtcttttcttctctttaggagtcagcattggtaatagtgctgtgctgcggaagagtggagtctaaactttttcattgccagtgccccgaacctggagtgtgaaggaccgagacaagatgaagactgtgctcatggttgctgaaaagccgtccttggcacagtcaattgccaaaatcctctctagagggagcctgtcctcacacaaagggctgaacggggcctgctcagtccacgagtacactgggacctttgctgg

SEQ ID NO: 3300 - DNA, 1198 bp, Homo sapiens
ttttttttttgattgttatcttttattttcatatgaaaaatagattttaagcaaaattcaaaaataactcgacactataaataaagagggccttaagtacattctttttgttaataagatttaccagtttgtaggttcaaatatgcagttaaaatcactgtttttttttaaacatgttacgaagattaaaaaaaaaaaggctcagccacatgttggtttaaattcccatatgcaactattcccatatgtactatgtacaagtgatttataaaaacattggcattaatggtacaggcaaagtaaactacagtggagtttcagaatctcagttcactgcatcttgattaaaaaaaccatgtgacattccaattatgaagtcagtgaggtagtggaggtgttttccttgaatatatttacacaagacagtattcctcatctggctgaggcattcttttcctgattttgtccaagttgagagtcctctgtgagggaagactccagctgagacagactgggtgatgacgctgaatctgcagaggtgctggtgaccaattcccctaaagcatctacttgtctcctcaaactgtgtaaagtgccctctgtctgccgctttcctttaattaatacttctgcttgcttggacatacagtgtcggagttgggccttgagtcggtcttcccggtgacgcagtttctcccggagtgcttctccacgccagtgttcatccattatgtgaacttgggaaaagttcagtttttcttcaaaaggtccctcattcatggtaaatggaaggttctctttcaagctttccaattctccttctaggttttcgtttctttccataatagcttctagatctgctggtagttctggaagaaactgattaagattcttcaagctggttctgatttcatccttcacctcagatttaagtgtcctcattgcatcactgatttccatttgtcttctctccaaatctttttggtttgccatctgtttcttgagctccgtgtactcatactgcatctggttgagctccttcatcaggcgcctggcccgctcatggttgtcctgggctaccagttcaattgttgccatttccttttgtatgcagctgttctcctgtttttgctcaagaaggtttttctccagctggctccgctggatcttaagtgcttccttcaggctggccacctgc

SEQ ID NO: 3301 - DNA, 543 bp, Homo sapiens
  misc_feature (1)...(543): n = a,t,c or g
gcggcacgaggcaacacttgctaccagatttccaggcatccttccagagagactgtataaataaacatatagaggataaggaatgctggacagttgcttcttttctccttttctgtaccatgtttgtttccacttgctggtataccttgtagatcctcccatatcaggacacaaaaaccatctcatcgtttttaacagctacagaatattccactgtatggaattcctaccattaatttagccaaccccctatctggacatgtgattgctacattctgttgttatcttacaaacagccattaattgaaaatccataggtgcaagaatatctgtaggataaaatcctacatataaagttcaggggtcattttttctatatacattttccaacaactatttgatgatgggctataatctataatctgcttttgctagttcatgacttttattagattaaaaaatcagccggccgctgtgnnnnnnnnnnnnnnnnnnnnnnnnnnnnnnnnnnnnnnnnnnnnnnnnnnnnngccggagttgaga

SEQ ID NO: 3302 - DNA, 177 bp, Homo sapiens
gccttgtcctctattgcagagatgactcaggctgctgagctctttcctgaaggtctcaatgttcttcaaattatttagcagattattataactggttcagtgacatttttaatttatagtgttggtgctcacatttgccacagtagagaaatgggaggctactggttttagcttttg

SEQ ID NO: 3303 - DNA, 878 bp, Homo sapiens
ggagcgtgagcagctggaggcaacttgtccccagtgtcaccagaccttctgtgtgcgctgcaagcgccagtgggaggagcagcaccgaggtcggagctgtgaggacttccagaactggaaacgcatgaacgacccagaataccaggcccagggcctagcaatgtatcttcaggaaaacggcattgactgccccaaatgcaagttctcgtacgccctggcccgaggaggctgcatgcactttcactgtacccagtgccgccaccagttctgcagcggctgctacaatgccttttacgccaagaataaatgtccagagcctaactgcagggtgaaaaagtccctgcacggccaccaccctcgagactgcctcttctacctgcgggactggactgctctccggcttcagaagctgctacaggacaataacgtcatgtttaatacagagcctccagctggggcccgggcagtccctggaggcggctgcggagtgatagagcagaaggaggttcccaatgggctcagggacgaagcttgtggcaaggaaactccagctggctatgccggcctgtgccaggcacactacaaagagtatcttgtgagcctcatcaatgcccactcgctggacccagccaccttgtatgaggtggaagagctggagacggccactgagcgctacctgcacgtacgcccccagcctttggtaaggagggatccccctgcttaccaggcccgcttgttacagaagctgacagaagaggtacccttgggacagagtatcccccgcaggcggaaagtagctgagggcaagggtcccgatgagggtcccatggcctgctccctcaggaacagctccagcaccaataaagaggcatttacca

SEQ ID NO: 3304 - DNA, 374 bp, Homo sapiens
aatgcttcaaaatctgaaacttttgagtactgacatgacccacaaagtggaaaatcccacacctgatctcatgtgatgagtccaaactgttgtatgcacaaaattatttaaaatattgcataaaatgaccttcaggctatgtgtataaggtgtatatgaaacataaattaatttcatgtttagacttgggtcccatccccaagttatctcattttatatatatgcaaatattccaaaatctggaaaaatacaaaatatgaaacactctggtcacaagcatttcagataaaggacactaaacctgcatcactttgccaactttgaccctttctttctattaccaaacaccacctcatgaaccaaaagaatttcca

SEQ ID NO: 3305 - DNA, 1664 bp, Homo sapiens
gggaaggtacgcagccttcccgcacagaaaatcgcgatccactacccaatccatgggcaccaccgccagctacccagagttctgcaactaccagcacgaccacaagcactggtagtgggtctggcaatagttccagcaatgctactgggaacaccgttgctgccgctaattatgtcgccagcatctttagtaccccaggcatgcagagcctgctgcaacagataactgaaaacccccagctgattcagaatatgctgtcggcgccctacatgagaagcatgatgcagtcgctgagccagaatccagatttggctgcacagatgatgctgaatagccccgctgtttactgcaaatcctcagctgcaggagcagatgcgggccacagctcccagccttcctgcagcagatgcagaatccagacacactatcagccatgtcaaacccaagaggcaatgcaggctttaatgcagatccaggcaggggctacagacattagccactgaagcacctggcctgattccgagcttcactccaggtgtgggggtgggggtgctgggaaccgctataggccctgtaggcccagtcacccccataggccccataggccctatagtcccttttacccccatagggccccattgggcccataggacccactggccctgcagccccccctggctccaccggctctggtggccccacggggcctactgtgtccagcgctgcacctagtgaaaccacgagtcctacatcagaatctggacccaaccagcagttcattcagcaaatggtgcaggccctggctggagcaaatgctccacagctgccgaatccagaagtcagatttcagcaacaactggaacagctcaacgcaatggggttcttaaaccgtgaagcaaacttgcaggccctaatagcaacaggaggcgacatcaatgcagccattgaaaggctgctgggctcccagccatcgtaatcacatttctgtacctggaaaaaaaatgtatcttatttttgataatggctcttaaatctttaaacacacacacaaaatcgttctttactttcattttgattcttttaaatctgtctagttgtaagtctaatatgatgcattttaagatgggagtccctccctcctacttccctcactccctttctcctttgcttatttttcctaccttcccttcctcttgtctccccactccctccctctttgtttccttccttccttatttcctttagtttccttccttagccgttttgagtggtgggaatcaatgctgtttcactcaaaagtgttgcatgcaaacacttctctttattctgcatttattgtgatttttggaaacaggtatcaaccttcacagttgggtgaacaagtgttgtcctacagatgtccaatttatttgcatttttaaacattagcctatgatagtaatttaatgtagaatgaagatattaaaaacagaagcaaattatttgaagctctctaatttgtggtacgatattgcttattgtgactttggcatgtatttttgctagctaaatgctgtaagatttataccattgatcttttttgctatatttgtatacagtacagtaagcacaattggcactgtacatctaaaaatattacagtagaatctgagtgtaatatgtgt

SEQ ID NO: 3306 - DNA, 1055 bp, Homo sapiens
tataatggcaaattaaattttaatttgacactcatacccgaactcagaaaagcttgtttgatcttctctaaattctgtatgtagtactttttttaattgtcacatttctttgttacatctttgtgtccaacaaaacctgtggaaatctgtgttcatttttgtggtgagggatgggggtgaaaaaggggagacttgctctaattatgcatatacatttgactatgtaaaggtagttgtagactatatgtataaataacaagttaacacttaatattctaaattgttctaaggaacagtggcctgaagccatgactagttttgtggagctgctggctcttttaacagtagctgacctattggatttaaactgagactgaaattgacatttgtggttaggttatctagctgaggcttttaacaatggagcagataatgtctgttcctgtagtggatccatttaatttcctatttgagtactctcacttaacaagtattatctattctgaacctttgtgttgggaatttaaggactattgtcaaaggctattaatggtaaacaagtatatgcaaaacaattcacatatgggtaaaaatttcaaattgtgggtttttgtttttgctttttagtttcaaagattagttatgtagcagcaatatcataaccaaagcaagtaggaagttgactggtttggagaatcttcaagtagttttaaatactgtaatgtatcagattgttaaccaggatttttttttcctgtattactgctaaatatattactatattaatgcactttttgtatatataactgtcttctgtacattctgtacttactacagtgtatataaagcctgttttccctgaagctgtgagggaataacaatagttgtatcataagtccgtttctattttgagttccttcttgtacttgaaagtagttcagtagtgaaatctaaatgagtgtggtatgggttggtaattaaaactgggcaatgtgggcagagctggcctttggaaactgaataccaggaatgaaaagtgttgttttgggttaaga

SEQ ID NO: 3307 - DNA, 496 bp, Homo sapiens
gggacattatggagtggcccatgatcagagcccaaaacaccacatcccagctcctcccgctccatgcagcctcctagctctgccccccttcccagccaggcctttgacaaatgagtggtctgcacttaacttctcccttcctctcctcttcatgtccagatattcctcccacagctctaacacattgctcccaacaaggccactaacaacctctgtgctgtcagagaagtcataaacatcgtcttatcttacccaagctgtcagcgggccttcacaatcgttgaaccctacctccaacttgacatgttctctgctcttggcttctgagacaccatgttctctggacatctcttgccagttctttttttttttcttttggggagggagtggtagggacagacagactcctatccctctgcataacttctcaaagttagggttctttagcacttagaacctggctcttttcattagccaggtgtggtggtccatgctt

SEQ ID NO: 3308 - DNA, 485 bp, Homo sapiens
ttttttttttttttggcttttaaaaagtaaatttattaccacacataataagtccagagagtagagagattccatcatgtcatcaagacccatgataaatctttaaatattttgatttttttgaactttacactctgttactctcaatatatgggtctcatactttggccggttcctctgcagtgcctcaaactctgtcccctgagcagaaagccggggctgtatttacccaagtggctctgcgctgcacttttcataattgtctcacatttaggacaaagctgcaggtagaaacagggagaaaagagcagttgtatatgtcccttggtttcacagctcctcaaagaaacagagaattaattacatggtagatctacactatactgaatgccaagagggagccatcaccagccctctattattgctggctcctacgtcttggaaccaaagcagcatcctgttctcagacactaacttggggtttg

SEQ ID NO: 3309 - DNA, 2180 bp, Homo sapiens
gcggcggatgcagtacaaccggcgctttgtcaacgttgtgcccacctttggcaagaagaagggcaccacgttcaccaagatcttcgtgggcggcctgccgtaccacactaccgacgcctcgctcaggaagtacttcgagggcttcggcgacatcgaggaggccgtggtcatcaccgaccgccagacgggcaagtcccgcggctacggcttcgtgaccatggccgaccgggcggcagctgagagggcttgcaaagaccctaaccccatcatcgacggccgcaaggccaacgtgaacctggcatatctgggcgccaagccttggtgtctccagacgggctttgccattggcgtgcagcagctgcaccccaccttgatccagcggacttacgggctgaccccgcactacatctacccaccagccatcgtgcagcccagcgtggtgatcccagccgcccctgtcccgtcgctgtcctcgccctacattgagtacacgccggccagcccggtctacgcccagtacccaccggccacctatgaccagtacccatacgccgcctcgcctgccacggctgacagcttcgtgggctacagctaccctgccgccgtgcaccaggccctctcagccgcagcacccgcgggcaccactttcgtgcagtaccaggcgccgcagctgcagcctgacaggatgcagtgaggggcgttcctgccccgaggactgtggcattgtcaccttcacagcagacagagctgccaggccatgatgggctggcgacagcccggctgagcttcagtgaggtgccaccagcacccgtgacctccgaagaccgctcgggcattccgcctgcgccctgggacagcggagagacggcttctctttaatctaggtcccattgtgtcttgagggaggactttaagaatgactgagaactatttaaagacgcaatcccaggttccttgcacaccatggcagcctctccttgcaccttctcctgcctctccacactccaggttccctcaggcttgtgtccccactgctgcatcgtggcggggtgtcacagaccctctgcagcccctggctgccctggactgtgcagagatgcctgactccagggaaacctgaaagcaagaagttaatggactgtttattgtaacttgatcctcccgagctgtgagcgcagtctgaggtgtgaggacacggcctcctgttggagtcccattttctccatcagggcacgtgggcggcttcctcaagcccggaggagcttcccagggcgcacaggggccgccggtaacagggggccgccggccaaaggcccctttccagtcatagcactgaagttgcaacttttttcttgtaattgttttgctactaagataatttcagaagttcagtctattttttcagcggatactgccgccaccaagaatccaaaacctatttttgacttggagagacttgcttttgttggttccgcccgtgggagacgacgatagtgtttctgtataataaagtgtctgccggctcgcgggccaggatcctctcggtgggatgggcaccacagacaggaggcccctcaggcccgtgcgggccactgtctgctgccgcctgccggggtggcagagtgagttgtctcaggaccccgtcactgcgacgttgacactcctctcccttcccttcctccccaactccccaaacactgtggaaggggagaaggaagtgatccacagcattcaggccacttggggtctagaccatggtggtgccagcctggggggggcagtggccctcagctctgcccgctggagcggttgagtgcagaagggtgcgcctcttccctctacccccgcaccacctgctgtgtgccagcctgagacggttcctgcctgtcttgggggttggtggagggtggaggcagttctgccagccgtggcagggctgctatggggcatccagggctgtgggggtctggaggaggggacatgaggtgagaggtatcctggccgagggcggggggacagcggggggtctccctccggacctacctcagggagctgagcgtgcaggcgctccagggcaggcctgggacagagtcaaggctcagagaataaaggtagctaatctcatcataatatttttattagaatgttctgatgataaaaataaaacttgttttctttaa

SEQ ID NO: 3310 - DNA, 201 bp, Homo sapiens
gaaacacgagaaagcacacaaggcagctcttggaagtagatgcctcacactgacaggggccacagctgggcagagggtcccagagaaggagcgtctctctcatgggctcagcactttctgcagctgccctaagacctcatggtcttcgggttctttataggaaagacgcctcttttcagcatctggtcccagagaaagtgt

SEQ ID NO: 3311 - DNA, 471 bp, Homo sapiens
taaagcaggcgatggagaaagggtggttctcctgccatttggttgtgtgattagaagacagccctttgtcacacagttgtcggcctgcctgtgatattcccggctatggccaagatgtgtgaggtaagccccgggttcctcccacttccgtgtattcctgaggactctgctttcccacactgagttttgcatcttctcacagggaatttctatggcttctctgtactttgctaattatatgcacattaatcatggtgacctggttataggctatggtttcaaagagaaagataaagttcccaattggtatctgatgggcaaaacaggtacagatggaccccctgggctttgacctcgttgagctcatgatcactactaaccaccccccagatgctgggccactggcactctatcagctgccctatacatgggtctgggctgctagaggtacctggtcttccagtggtccct

SEQ ID NO: 3312 - DNA, 436 bp, Homo sapiens
gcggtgcataagaaaatgattcctatttgttgcaggtgaaaatgtttgatgtgccggctcctttacctcatagttacagtaagaagaaatttaaaaattgggatcaaagatgcagccgccttcccatttaagcagcacagacagcccaaagtgacagttttcctgtacagttactcttctgttatctgtaactgatctatgacattttgggaaaaaacagccaaaaaaaattagtactgaggtaggtgtgcctgattccttccccaattctgctcatgactgaaccaacagaacacaaacacaggtgaaacctgcacagctgtgagagcctacaaaagttcacatgcaagatactgaaaggaatttctgctcaatagagtctgtgggaccacactgacaaacgagaatgagggctctctgggagcctggctttgga

SEQ ID NO: 3313 - DNA, 1027 bp, Homo sapiens
  misc_feature (1)...(1027): n = a,t,c or g
gtgagtatcctgctgtggcccctggtggtttatcatgagctgatccagaggatcgtacactcgcctggagcccctgctcatgcagcttggactacagcatgaaggcagaagccaatgccctgcatcacaaacacgacaagaggaagcgtcaggggaagaatgcacccccaggaggtgatgagccactggcagagacagagagtgaaagcgaggcagagctggctggcttctccccagtggtggatgtgaagaaaacagcattggccttggccattacagactcagagctgtcagatgaggaggcttctatcttggagagtggtggcttctccgtatcccgggccacaactccgcagctgactgatgtctccgaggatttggaccagcagagcctgccaagtgaaccagaggagaccctaagccgggacctaggggagggagaggagggagagctggcccctcccgaagacctactaggccatcctcaagctctgtcaaggcaagccctggactcggaggaagaggaagaggatgtggcagctaaggaaaccttgttgcggctctcatcccccctccactttgtgaacacgcacttcaatggggcaggggtccccccaagatgggagtgaaatgctcccctggaggaccagtggagacactgagccccgagacagtgagtggtggcctcactgctctgcccggcaccctgtcacctccactttgccttgttggaagtgacccagccccctccccttccattctcccacctgttccccaggactcaccccagcccctgcctgcccctgaggaagaagaggcactcaccactgaggactttgagttgctggatcagggggagctggagcagctgaatgcagagctgggcttgggagccagagacaccgccaaaaccccctgatgctccaccctggggcnccgacatccattctctggtacagtcagaccaagaagntcagggccttggcagagcattgaaggccagcccttttaagggaaggaatttgaa

SEQ ID NO: 3314 - DNA, 256 bp, Homo sapiens
gcaatgaagctaatgagatttcctgccacacagatgaatacagagcattaccttcataactgttataacctgttgtggcagatgacatctggagtatttgtcctggtctgagcaatacattataaaattggtttagaaaaatttgcagcagagattagtatggctagatctgcctggaaaatgacctgtgaaggaaagttaagaaaaaaatgtatgtttaacttgggaaaaaaaaaaattttggaagcagggcctg

SEQ ID NO: 3315 - DNA, 147 bp, Homo sapiens
cactgatgagacagacaaggtccctactcttgtggagtttacttctggtggaggagacagatgataagtaaacaaataaataatgtagtttgagatagtgattaagtgctatgaagaaaataaactagggtgatgattttagtgatg

SEQ ID NO: 3316 - DNA, 503 bp, Homo sapiens
  misc_feature (1)...(503): n = a,t,c or g
ttgnnnccattgannccannnnnnnnnnnnnnnnnnnnnnnnnnnnnnnnnnnnnnnnnnnnnnnnnnnnnnnnnnnnnnnnnnnnnnggcacgaggtcaaatgactactgaagctctgcattatgtcaggttattacagtaagcttttggtttgtgactgccaggccaggagttgaggcttaccctctcttttgttggctacaagcaaagtatgtcaactgcagcctccccatgcctttcctcactagctgcctcagatctgcttccttgttctttgttgtgctgtcttctgatggatgctttggtcgttctgttcatctactgtttgctgaaacccaaagcttttttgtacttctattaacagttaaccagttcaccctaaggagattgtacgcagaccagcctcccacatttgtgttaggggtatgttactactcatatgagatttgaagccttctttttccccaaaaaatggtcgatctcagattttaataaggngccc

SEQ ID NO: 3317 - DNA, 523 bp, Homo sapiens
  misc_feature (1)...(523): n = a,t,c or g
atttgaaatacngatacccttatgacnnnnnnnnnnnnnnnnnnnnnnnnnnnnnnnnnnnnnnnnnnnnnnnnnnnnnnnnnnggcacgagggaaatagcaggtgctttcctagtgacactggatccacttatcagtcagctgctcacatttcagcctttcatgcaggtggttttggacagtaaattagacctgccatgtgaactgcagtttccacaatgtcttcttctggttgttgtcatggataagctgccatctcagcctaaggaagtgcaaaccctgtggtgcacagacagccaggtctcagaaacgacaaccaggatatctctactcaaagccgttttctacagttttgagcagtgttctggtgaactctctctacctgttcatttacagggattaaagagtaaggggaaagctgaggtggctgtcaccttgtatcagcatgtttgtgttcatctgngtacatttattacttcctttcatcctcactgtttgctgaactggatgctgctctgctgaa

SEQ ID NO: 3318 - DNA, 924 bp, Homo sapiens
  misc_feature (1)...(924): n = a,t,c or g
tttttttttttttttttgcagtaagtaactcagaatgactttactcaggaaatatgaccatgactcactggctaggagtgccccatgcccagttcttagagacccttgatagctcctagaagacaggaggctgccgtggtcaagaagggccaagccttgaagtctcacggcaccccctgtggtggaggtataaggctcaggggccaactactgggtcttgcagtccccatcgttgctgtgggctgtcttcaccttctttagttccttctgtagctcagactcggccaccacaacctcctttggcttctggtaagagatgatcagggtgcagttggcgtgggcaaagctcagcaaggcgtcatccagaggtagctggtgtctatctagatcaggaatggagaacttcttgtagtacttcttgttggttgttctgacaatgatgcagcgctccttctggtccacagagacactatagacatccttaggataggggaggtttcgaatccgccactggaaactcatcttggtgtccttgcgcatgaagataggattggcattgctttccttgatgagttcaggccccaggttccctgctcctaggggcgctgggtctcctacttcaagctccactggcccatgggctcccagggcacttttcacacgccactttctcacaagtagttcactcgtcttctcgtcatattcttcagccatttccttgccgtctgggaataaatagtgaaccttccttctcccgtcctgcagcagcgcagtcttctgggctgtccgcagactctccaaccagcccgtcaccgccatcctcgtgccgctcgtgccnnnnnnnnnnnnnnnnnnnnnnnnnnnnnnnnnnnnnnnnnnnnnnnnnnnnnnnnnnnancatagnggtntcaaagggggncactc

SEQ ID NO: 3319 - DNA, 1487 bp, Homo sapiens
tttttttttttttttttaaaggtttcattttcttctgtttatttcaagagaacaaagattcaaccatcagttctgtacaaaaacatggtgtgagagccatgggatcctcgggccagcccccttcccgcacttgagccccgggcccccctaatttgccaaaaaaccaggagaagaccaaaaaattcaaactctggggaaaaaaaattactatgaaaaaaaatcaggggagaccttcctgggcctccctttctccctatccccaatctagaaatttagtggggggtcgcgggttcatggccatggcaggaggtggggcagatgggtgtcggcagatttagtgtttggcaaccagtggggctgggggtgggatctgggagggagccgaggggcctggggaagggaaaagatcttggaccctgccccggcccattaggacacttcaaaaacactttataaaaattggggccacagagtagaagaaaaacgagtcatcagaatcaaaaactaaagagtggaaagatttttttttcttgtctaaaaggcaaaaaactacaaacagcccaagtcctgagctccccaagacctggatcctccactgtccccctgaaacccggcaggaggcgggatggggagcacaagaggtgggttcttaaaaaagtcacccctggatgggaaagctcttcatcttctgccgccttcctctgcctcccgctgctgccgaggagagagatggagaggaccggggctatgccggcaaactcaacttcttcacctttaggactttggtgatatagaggtagaagaaatcgcagtagaggactgtatggaccaggccctgccacaatggccgatgaggtcgaagaagccctcgaaatggtagcgccagatccagttgaagagatagagcgtgcggtaaacgcctagccgcaaacaagtagtggctggtgatggtctccgccctcgcccggtcttgctcaccatgaacagctgcggcaagatggcccactgactccaggtagatggagaaggtcccagaggatctccagaggggtgaagtcatgattgaccaggaacgccagaatggctgtggaacgaccaggaactccactctgaacgtgtcatggttcccatcgtaagtagctttgaacttgctataaatcaaccagaccgtggtgaaggagcaggctatgtagaccaccttcatacacgtgttgtagagtgagatgtagttggtgaagaggtccagatatcgggcagtgaacaccacagcaaacaggacctggctcttccctgaaattccggcgcacgagcgggacttccagattttgagcagtagcaagatgatggcgaggaggtgggagaggtctcccaggaatcggaagagattcatggctggggaaccctggcagggctgagcgggagggaggcaggctggcggggggtgccccccgaggctgctggtctgaacgggtagctgggctgggggg

SEQ ID NO: 3320 - DNA, 413 bp, Homo sapiens
ggctcatttcctggccgctcctgggcttcgcggaaagaagagattactcacactccttctcaagcacagaaccagttgtactgagctttttgctaagctgtttcagccaagaatggctgtggaatctggagtgatttcaaccctgatacctcaggatcctccggaacaagaactaatactagtgaaagtagaagataacttttcctgggatgagaaatttaagcagaatgggagtactcaatcctgccaaggaattgtttcgtcagcaattcagaaaattttgctaccagggagacacctggggccccggggaggctctgagccgacttccaggaactttggctattcagtgggctaatgccagagttggcacacaaaggagcagatcttagaactgctggtactggagcagt

SEQ ID NO: 3321 - DNA, 1144 bp, Homo sapiens
  misc_feature (1)...(1144): n = a,t,c or g
ccaaagaagaagtgaagctggaagcgcagtatcagagtgccctcttccacagctggccgggtgatttggcaaaggtggcaaagaccgttgaaacgaactgcagaacttaaccagttgcagaagtcatcgtgcctcgtgaccaaacgccagatgaaaatgaggaagtgatcgtcagaattatcgggcacttctttgctagccagactgcacagcgcaagatcagggaaattgtacaacaggtgaagcagcaggagcagaaataccctcagggagtcgcctcacagcgcagcaagtgaggctcccacaggcaccagcaaaacaacggatgaatgtagcccttccaacacctgacagaatgagaccaaacgcagccagccagatcgggagcaaaccaaagaccatctgaggaatgagaagtctgcngaggcggccagggactctgccgaggccctgagaaccccaggggccgaggaggggcggggaaggtcagccaggtttgccagaaccaccgagccccgcctccgcgccccccagggtgtcttgcaggcttcagcattccacttcaccatccactcggatctctcctgaactcccacgacgctatcccttttagttgaactaacataggtgaacgtgttcaaagccaagcaaaatgcacaccctttttctgtggcaaatcgtctctgtacatgtgtgtacatattagaaagggaagatgttaagatatgtggcctgtgggttacacagggtgcctgcagcggtaatatattttagaaataatatatcaaataactcaactaactccaatttttaatcaattattaatttttttttctttttaaagagaaagcaggcttttctagactttaaagaataaagtctttgggaggtctcacggtgtagagaggagctttgaggccacccgcacaaaattcacccagagggaaatctcgtcggaaggacactcacggcagttctggatcacctgtgtatgtcaacagaagggataccgtctccttgaagaggaaactctgtcactcctcatgcctgtctagctcatacacccatttctctttgcttcacaggttttaaactggttttttgcatactgctatataattctctgtctctctctgtttatctc

SEQ ID NO: 3322 - DNA, 1516 bp, Homo sapiens
ttcttgtggctcattgactgaaagactactgagacaaaatgctgagctgacagggcatatcagtcaactgactgaagagaagaatgacttaaggaacatggttatgaagctggaagagcagatcaggtggtatcgacagacaggagctggtagagataattcttccaggttttcattgaatggtggtgccaacattgaagccatcattgcctctgaaaaagaagtatgggaacagagaaaaattgactctccagaaatctttgaaaagggcagaggctgaagtatacaaactgaaagctgaactaagaaatgactctttacttcaaactctgagccctgattctgaacatgtcactttaaagagaatttatggtaaatacttgagggcagaaagttttcgaaaggctctcatttaccagaagaaatacctgctgctgttactgggtgggttccaggaatgtgaagatgccaccttggccctgcttgcccggatgggggggcagccagctttcacggatctagaggtgatcaccaatcgcccaaagggcttcaccaggtttcggtcggccgtcagagtatccattgcaatttccagaatgaaatttttggttcgacggtggcatcgagtcacaggttctgtttccatcaatattaacagagatggctttggactgaatcaaggtgcagaaaagactgactcattttatcattcttctggtgggctggagttatatggagaaccaagacatactacgtatcgctcaagatcagatctggactatattaggtcccctttaccatttcagaataggtacccaggcactccagctgatttcaatcctggttctttagcatgttctcagcttcagaattacgatcctgacagagccctaacagattatatcactcggctagaggcactgcaaagacgacttggaactatacagtcaggttcaactactcaatttcatgctggcatgagaagataatcctttgaaacatcattaattgaagtgattttaaatagatttccttttgtaaatcaatggttcttttgtgcttttgtattgtgaatattcaatgggaccaatatgaacacagcttatgattgtatacaaatcccttgccagcacatgaaaacaaactggaatttgtatatataagcattgtgtatgtattcatgcacaataattattgaattacctgtatatttgtggaatgctaatttaaaacattaaattataaaccttgtgtatttatcaaatgggtgaaaagattaaacttttacgcattacaatactgctgaatgtgtagctcgaggtgtcctgcacttttcttataaggctactgaagttacatgttttgcctaatatattctactggtgatgaagacagataatatcacttgtagagacctatttttgtataatggtagaagttttgaattttatggggtattttgtcaagtactgaaataaaaatgacttcaccattttcaaaaaaaaaaaaaaaaaaa

SEQ ID NO: 3323 - DNA, 447 bp, Homo sapiens
  misc_feature (1)...(447): n = a,t,c or g
ggagnnnttgcttttgacttgagaacttttangactgncnnnnnnnnnnnnnnnnnnnnnnnnnnnnnnnnnnnnnnnnnnnnnnnnnnnnnggcacgagagctgttgtaattaacaggggtaaactttcagtgagattatttcacatcttaagtacattggttcattgtattttgttttttaatacttttcttgtcatcaaaaacaaatgcacacacagtagcatactgtttttctgggccagtcattataaattagtatctggtttgaaattttagttccttttacagattataggatttttttatggggagagacctcagagattaatactctataatttatagctgtggaaactgaggtatagagagaagctcatggttctgtcctagaaagtgatagagactctatgtggggtgttttctgtatgttttactgagtttgatg

SEQ ID NO: 3324 - DNA, 335 bp, Homo sapiens
gatagctgtagctcagctgttctacagcccactgcccttgctatctccagcagctcccgtgggaagtggccttccccaaaccctcagcagtgcaactcaggtgtttggatctctgtcagtttcacagcagaaaaatagaatctccttgttttaatttgcgtttcccttatgagaagggtttagcattatttccagtacctaagctattggaatttcctttcctgtgagctgtatgtttataagcctttgcctgttttcctaatggctgttggtttttcttactgatttaaaggacttcctttaagataattgaaaggagggtatcctttatatgg

SEQ ID NO: 3325 - DNA, 2386 bp, Homo sapiens
caaagcgggacaggtccagcggttgttctgtgtgaagtcgcgcggcttccacccacgcagtgttctaagtgaaggccagaaactcgctcgccatgtcggctgcagaggcggggggtgttttccacagagccaggggcaggaccctgcgcgcgtttcccgcagaaaaggaaagcgaatggaaaggcccattctacttcatcctgggcgcagacccacagtttgggctgatcaaggcctggtccactggggactgtgacaatggcggtgacgaatgggaacaggagatccgtctaactgagcaagccgtccaggccatcaacaagctgaaccccaaacccaaattcttcgttctgtgcggcgacctcatccacgccatgccagggaagccgtggcgtacggagcagacggaggacctgaagcgagtgcttagggcagtggacagggccatcccactggtccttgtcagcggcaaccatgacattggcaacacccccacggccgagaccgtcgaggagttctgccggacttggggagatgactacttcagcttctgggtcgggggcgtcctgttcctggtcctcaactcccagttctacgagaacccctccaaatgccccagcctgaagcaggctcaggaccagtggctggacgagcagctgagcatcgcgaggcagcggcactgccagcatgccatcgtcttccagcacatcccgctgttcctggagagcatcgacgaggacgacgactactacttcaacctcagcaagtccactcggaagaagttggcagacaagttcatccacgcaggtgtcagagtcgtgttctcaggccactaccacaggaatgccgggggtacctaccagaacctcgacatggtggtgtcatctgccattggatgcccagctgggcagagacccccacgggctccgagtcgtggtggtcaccgccgagaaaattgttcaccgatactacagtctagatgagctgagtgagaaaggaatagaagacgatctcatggatttgatcaagaaaaaatgacgctccttcccgttcccgttcacttttcacttgcactatttttttattttgccagaaacagcagctgcacacaacctcttgctgaaatataaaaatagcccaggcaggtttgtgaatttatgtccttttgcataaatcagagagctggggccctgtcctgaattatattcaaaatagaactgcatttcctttaaaatggagcgaatgatcctggaaatcagtttttaaaatattagactatctctgcatggatgtttgaataaattctcctaatgctgtgtttctcaactccacttttgaattggattgtattctggttagcatatggtcaaagtctgcctatcgacctcaattccaatctgacagccaagtatgatctttgataattccttaaacaaactacacctgattgtattaaattgtggtcacgattcccaaaacgctaggcaaaacaaagttcatctcctttcctttccagcggaacgaacagctgtctgccttgttgtgagagccatgcagacttattttgacaaggagcccagtaggcaccctttttactgtttcaattctgagacttctgatgatagggacagaatgcaagttgatacagctcgggagctttaaatttggccttcctggggtgcctagaaaagtcacctttgcacataaattggccatttctgaaaatctcctccaagagactgaaaccaaagctctaaaacgccgcttcttcagtctctggggagcacgttgagttggttcacatccacattctggctgtgtagccactccacagatgggtggtctcttgggatcagaatgcccctccactcatgagactcttcattttgtccactttgacaggaaaagtgggaatgtatgcagagctctcaaaagaaacaaaaaaggccaaaacggtgccttcagccacatcctctgaattggccctgacttggactaaatgcactaatgcaaaatcccttgacaaaagcgcataggttatttcaaaccagcattgttttttatgtaacctgttttaccgcatcttctcagcagcttctgaccactgctcaattttctcctttacagccattgttctggtggacaaataacctaggtactccaaatcctggcaggaaaaatatacagcattatgaaacagcactcagtaatcctaaaatgatttccaaagctggttacacatgacctgcaaagtctattaaattaaaagactttctcattacagagtttagtcaacgtagcaaaaccatgggaaattaaatggaaagataattaaatatgtaaattcataaggaacaaaagacgagaagttaattatacaataggc

SEQ ID NO: 3326 - DNA, 1291 bp, Homo sapiens
gtcattttaaaatccagtggtagatgtagcttagcgacggtagttttttgttttggctatactaagacttggaaattattctctccagtgtcagcgaatccagaagggtatcagattaaacaccgaattcagccactggacttttaaaagtacttaagatggtttatctcgggttttttcttcagttaacaaaatcataaatatggtgccttataacatgaaaggaaaattagttgtgtatttcacgacgaaagcgacggaccaaaagaaatttcctgccccaagaagcatgggatccaggaaggggcgcgtagatgcttaacggtctcttcggaaatcctgcaaatagaaagataattctagatccggaatacctgtatctggtggaaaccatggatttctacaagctcgaattattcctcattgtatagcctgctttgtaaactagtttacaatttgcaggctgatcttaagatttttttatatctaattgctgctgccttcattttaggttcagcagttacttttaactaccttaatttattgccagaaggtatgagcctaacattctgatgagtccagaaaactacgttttgtcagtagcaatacactaggaagtaaaatatatttagaatttaaacattgtgtgccagtggtcctcgcgcttgactgcacatcagttacttgaagagccacacctcagatcaatgcagtcagaacctgggaagtaggtcccagacatcaggacctttttaaaggctcccccaagtgattctacgttccccaagtttgaggaccacttttctgtgcattggcttgcacaatttgaaaataatgcttttcctgagctggatcccagtgttgccttaacagggtgtctgtcgtgccgcagtagagcactgctgcttcctccaaccccaaaatttatgttcctaagtaagtcaggtccctaagccccgtcccaagaagtgacacaagtggccaacatccacactgtaggcttgcaggctacccgccctgagatttggtaaagaacactgccttgttccccatcagtaaacaaggttacctacctcaggaggctgcttgtgagagagcaaatgcagtatcttcagaatgatttatttttttaattaattgtaaagacttgtgccattggctgctctttctagtcccctaaatttctgttctagttttaaatttctctagaacttgcaatagttgggggttttataatgatgttttacaatgtttatttcttaaataaaaacttaaaaattcaaaaaaaaaa

SEQ ID NO: 3327 - DNA, 860 bp, Homo sapiens
ttttatatatcattctctgaagagcatattttattaatcttcaagttcctcagcatattaataataaaaacttgatatatattatcaacaagtctgactgttatgcccaaagaaaatccagattattttaaggtgagtttgcttctttttcatctgattcatcatccataacctgttctacgccttctacctccggaatataaaactgcagcatgttctgaattccatttttcagagtaatgattgaactagggcagctggtacaagaaccctggagtttcagctgtacaatgccatcttcaaagcctttgtagattacatcccctccatcttcctgcacagttggccgtattctagtatctaacaattccttaatcattgccacaacttcatcatcttcttcagatcctgcttctcctgaaggtgtttcctcagtaaccaggggtaagccagatgcaaagaagtccatgattgttgcataaatatctggtttcagtaaattccagtctaattcttcattttcctttgtgacagtgatgaaatctggtccaaagaagacactttttactccttcaatcctaaataactgcctagccagaggggagcgaaatgctgcagctggggtgggaaaatccatggtccttgtctcaagaactggttttcctggtataaactttaagctgtttggatttggggtatcttgtgtttgaataaacatgtatctcactgggtgataaaaggctgcaggtagtgggaaaagtggtctttgtacaaactgatgcagaggctgtttcttaatggtgtatggattcttcaacttatgacagaaccgcctgcgcagccccgcggcaacagccgca

SEQ ID NO: 3328 - DNA, 811 bp, Homo sapiens
tttttttttttttttttcaattgcaaaacaggtttacttttttatcaaacaagattatcacataaaaaatagctacagtgctacggtagtatataaagtgctcaagtatcctgaatgtaaccatgagtcatgacaagtccctccctgaacgagagagagagggcgggacttctgcctggctgcttgaagaaaaatcttcgcttgggctgatgaacgtggcctgagcgggggctgacgaggcacccgggttgtcgtcctcagacaggggcgtgttcttgggtgctcccccagattctctgcaggcactgtcttgattgaaataccaccggctggggggcgccatgccctgggtctcttcccagacttcctggtttgccaaggctgcctctttgcttgcctctgcggagagttccagcacctggggcaaagctccttcggagctcaaggtcctttttcgccgtcacgtccttgagttcgctcagtaagtccagcacctgcacattttcttccgaatcaccaacatcaagttctcccaggaggcgctgagtggtcaccagttcatgctgcagggcgtctaagagctgctgcccatctccctccaggtggatggacctcacgggcagctcgtgcctggtagtgtccagggccgtggcgaatgtcctgtattgctccttgaagcgtgtggccactgcctcgaaggggctgagcatctcgatctgggcatccaggacatgccagctcccgcttcctctgagagaggagaagcctgcgcttcagctcgtgggcctttttctgtagcttctccttctcc

SEQ ID NO: 3329 - DNA, 692 bp, Homo sapiens
gaaggaatctgaggtcacttgttcaaattccctgatttacagatgaggaaacagaggctcagacagctcaaatgacttctctccaatacccaacattcgacaagtagcagctctgggactagtacccaaagcacctagctctccaatcactgcgcaagccacacaattctgtctgcttgtcagtggcttttctgattcaaaaaaagcttaggaatttccccaggaggcagcacgatgtagtgggaagggctctggatgtctctccaaggcttctggaattcatgcccacctccaccaagaagccactttcctgccagctacaggtgctcacctgaaaagcaaggccagaccatattaaccctgggcattgctggtacctgggaagactttctgattcaatgctttccacctcctcctacccctcaccacccccgtgggcatgaaatcctggggggctgctttagaaattgttttctttggctgctggtgggggtgctgctggtgggggtttgcacagctgggcacactgcaccagtctggtgggggtttgcacagctgggcacactgcacccagtctcctggcctggttgccaacaaggccatttttcccaagcattgggttttgggagaatttgggggttttgaagttgggaacacaagggttgccttttgcaggccaggtgttaaatttt

SEQ ID NO: 3330 - DNA, 854 bp, Homo sapiens
  misc_feature (1)...(854): n = a,t,c or g
gtgggagttctctctagttgatgtttattagtctgcatagtgacttatgttccaaacactggggatcccctcagcccctcctatcttacataggaatgcaagttaacttgtttcaatacctgttataaaaaaacaaataccccttttaaaaaatctgattcaacatattttttatttcacttttttccatttctttataaaacagtcatctcactagcagctctctcccctagagtaggggaagggggtggaggaggttgggcacctccaaaggagaaaaaggatagcagggaagggcccaaggttacctcctgaggttcttctgggcctgtttcaacaatgtgtcaaagtcaagagaatcaaatttgctctttacaggtgctgggtcaaagtcttcccggttggagtcaagatcagaatagctcctcttgcagaactgcccttcggcccccaaagcagagatcaaagggctgctcatctgcctgccgcagcttgtggccactctcaatggctgcaaatgcctcctcagcatagcgataagtgacgaagccgtagttgtccccttggacacggaagtggatggtgcactcctcaatctctccaaaaacggagaacctctgtttcagctctgatcgagtcatgcggccaggtatctttccaatgaagaccacccttctttcttctattgcacgctccttttgtagcactctttgcctttggtaatggtcatgtgaacgataagagctgtaccgccgcctcctgtcacctcgtgccnnnnnnnnnnnnnnnnnnnnnnnnnnnnnnnnnnnnnnnnnnnnnnnnnnnnnnnnnnnnnnnnnnnnnnnggnnnccaa

SEQ ID NO: 3331 - DNA, 638 bp, Homo sapiens
gcggcacgagcagaaggccagttccagctctggtgggtgctggtccaccatctcagctattgtgataacacatgagctctatatagacatgttttcagcaccaagcactaccaagtactttagaacaaggcctgtttcttttctgccatccaatgagagcagagaatctccaatgaaactgactagatttatgaatgttttttatatgtagagaggggcagaaacatgttcattttcccatgaaggaacaagtcccaagggtttatcatctgcctgaaggcactgctaacgaatttgtcaaatcctttatccagcacagctttaccaagcagctgcacagtcaggcctttgcacttctcattctcataggtccagtttaagatctcattcagtcctgaactgcttcggtcctttgcattcctgctgtcttggcctccacctagaccaagtcggcagtctccctaacattaaccctacattcagctgcatcctatggcttccaaggccttttcaccagggggccagaaatgctcccacaaccctcaatggtctcatgacaacagtttccgaatcttattccaaatggtattagtatctggaaacgggttcaccattaggggataatggtttcttccaac

SEQ ID NO: 3332 - DNA, 925 bp, Homo sapiens
gagttcttggaatgaatcccatgctttctgcagcctgtagttgttatgacccctcggaacaaccaccccgtggcttgtgtggggtctcgcagggaaaagggctggcttctaggtccccgagataagtgtgcagggggatgggccagggccaggctaagggtggctcagttccatcatctggaggtcagacacactgtccagaggcagaactgaagccctctcggcccctaccctaagccagccacccctcttcacagtgggtgagctgggctgggcttggctggcatgaggccaaggggtaggcctgagcgccagagtcgcccaggtttagcccacaggatttccttttttttgccatggaatgctgaaagatgggtgactggggacccttcttaaaacctttggcaaaggtgccatcggcagggcttggcctcatgaagtctcaggtccgtgttcccgcagggcgcacatgcttggagagtcctcagcagggtagccgaggccaggccacttctgctgaggatggggcaggctggggtgtgggtgtggcctggggtggctcaggtctggaactgctgcctgattcctgtgtggggagaagctcagtggccgtttgctgccactgacaaggatttcacatgcagaagagaaaggccccccatccaccccccgcattccctgccgagtgagagccagtgtttgctgcccttgctgggggcgggtaggaaaccctgagcttcctgatgcggagtcatgaagcagagtcctcgggaaggcatctccacagccccgggtcctctgtctaacgccctccatttcacgccctccatctcacagtcaagataaaggcctcgagaataaagagccagcccccttccatttagtctcctgccgtttcccaaacagttgtccaacagttagacat

SEQ ID NO: 3333 - DNA, 1387 bp, Homo sapiens
ttttttaaatcagatttgatttttttaattcaaattgacccatagcaaaacttacattaaaaaggaagaacaaaatacattatgatataacacactaggagttacatgaaagctaaatttgtgggcaaatggccttatcccaatcacattctgggctcatgagcactcctgcaggaaagttagaatctcaatttcgtatggtccacgccggtcattaaactacacattcttgtctcttggggtgtgcatctgacgagtcatgctagagtccctcatgctccagatgtgtactcttgctactgccagaacgctggattctctagtggaaatgctgttccaagcatgactgacaatgaattaaaaaatgagacagtcaagtcctccaaactaacaggcatggattactgtgtagtaaatagtttagaaatatgggaattaaataatctaaaaaacactcttactctgctgtacatttataaacacaaatatttacaaaaaaaaaaaaaacacaaaaccttgttttcgaaagatgaggtttgcagttcattaatgatcataatcttttgtaagctggtttctttggtgtatttgccaaatatatttttataaaggtttagtaataggcttaaataataaatttcaaaggaaacataaaagaatctgacaaatttgaaaatattctgaacattttctgttctgtttctggaaaaaacaatcggttgatttttctgaaaatatctgttctccctattcattatgtgaccatggaatgcttctctgtgaatccaattcaaatgcagacctgcaggtgtcaccactatcatctaccagtaacccacctggagacattttagttattgtgaaatgtgattgggattttattaacaacaaaaataaaacattctttttaagcttccagataaatcaaacctcaaacaataaataatggaattatacacttcttcattaaatagaaatttcaaaattccaggaagagctctcataattttttttttctgaagtcacagcagcaatacagaacaaagaatttaccttaatctgatctttttacgtggaattccctgactcaaactcagtggcttagtttggaaacctctgaatggctggggagagaaaatcttttgaaactaagtgaataaattaacacacacatacgtggaaatcagcccttgtgcaagtgtaacatgaacatcactgatgagagtgcagaaactccaggcacccctctgcctcctcctatccctgggcctggggttgtagggagaagtcacactcaattcatttctagccacaccatgtccctaacagtgctagtgtgaactagccctgacctgggtattgggtttaaagaatggagcctcgtgcc

SEQ ID NO: 3334 - DNA, 872 bp, Homo sapiens
cgaacgcccgcagcatggtcagaagggaggtggtcgccctccgtcgtggtctggcgtgtattccgagcgttggtgtctggcggtttccgagcgttggtgtcttggcggtttccgaccgttggtgtctggcggtttccgaccgttggtgtctggcacgcgccaccctctcttgctttggttgcgccatgccgatgtaccagacaagaagacaagaaaatgatttgaggacagcttcaatcgcggtgtgaagaagaaagcagcaaaacgaccactgaaaacaatgccggtggcaaaacatccaaagaaagggtcccaagtggtacatcgtcatagccggaaacagtcagagccaccagccaatgatcttttcaatgctgcgaaagctgccaaaagtgacatgcagggatgtccttcctgagatccgtgctatctgcattgaggaaattgggtgttggatgcaaagctacagcacgtctttcctcaccgacagctatttaaaatatattggttggactctgcatgataagcaccgagaagtccgcgtgaagtgcgtgaaggctctgaaagggctgtacggtaaccgggacctgaccgcacgcctggagctcttcactggccgcttcaaggactggatggtttccatgatcatggacagagagtacagtgtggcagtggaggccgtcagattactgatacttatccttaaacttttctaccctgagtgcgagataagaacgatgggtggaagagagcaacgccagagccccaggcgcccagaggactttcttccagcttctgctgtccttctttgtggagagcaaggtgacatacacagagataactctggctgttgtgcataggacctacaagtg

SEQ ID NO: 3335 - DNA, 486 bp, Homo sapiens
gggagggaaaatactgaagtgtaatattccagagttctctcttgtctgctctgactcctgccagctgccctgcacctagagggacaggaggctcttctccggggcattgcatggccgggagccaaatgagctggcaccagaacctgtgaaccacgaagggacgataccagaaaacaccctcaacccaaaggaaatagactacagccccaattggctgactttggctatagaaaaaagaaaggaacgaaaagagacagttttttttggaaagctaagtcttccctttatcgagtcaagaaacccccccttcttgagctatttacagcttttaacaattgagtaaagtacgctccggacacaattggagaaactggttatttaacaagggtttgactcgagtggcatgctttcaaatataaacagacttctttaaggaattaaagttgactaatagagccaataaaagcctcttggaaaaaaaaaaaa

SEQ ID NO: 3336 - DNA, 556 bp, Homo sapiens
  misc_feature (1)...(556): n = a,t,c or g
tttgnnnncttgganacccnnnnnnnnnnnnnnnnnnnnnnnnnnnnnnnnnnnnnnnnnnnnnnnnnnnnnnnnnnnnnnnnnnnggcacgagaatatcatgtatatatattttttcctagaaattagagctgcctcagtgatgctttattaacggtttatatttttgtagagcccttaacctaagaagaatattcttttacatttttaaagggttgagtttgaagagttggggggaagaaaaagaacatgctacagagaccatgtatggctcacaaagcctgaaatattttattctctggatctttacagaaaaagtttgctaatccctgctttatagtgacaaaatgaaaccaatcccggggtgttatattcttcttgatttggttaacaaaaggctctagtactttgagatagatagattttatttacaaacagaatgctgcttggaagtaacaagttgaaagcgaaaaaaagaaaaatccatcaaatttcttaatggcgtaatatagataagtaacgtatattaaaacttgctggcatggcggtcatgctg

SEQ ID NO: 3337 - DNA, 446 bp, Homo sapiens
gggaaattttattctcttcattctccctccctttcaaataagtaataaataaaaagtggctgatcttccacttggtgcggtaagaagcatttaaatacactcccggccctcataattggtggcttcttggagaaaggtacttattagaagaaaaacacttccctatgtgttgttgttcggccttctcgttgatgaaattacacggtgagttggtgagcgaatttaccttgcccctttttaaaggtatttgtggcagctcttgttgtaggaatcaggggagaggagccacttctcttttagtaagaaatgcgaagagtggcctctccatcttcagagtttcaaaatgagttcactctggtggtgagtaatgatgtcttaagctggcttactaaaggcggaggaataagatgttcttgctttacctcacgtaccaaatatagataagg

SEQ ID NO: 3338 - DNA, 351 bp, Homo sapiens
ttacagtttgcatgtgtgattcatgatctttgccatgatgtaactcttaaaaatgtcaaagaggtacgtcataaacagtagaaataaatattctgacagatcataaaaagggagggaggattgaagttttcctaggtgtagtataatttttaaaatagactttacttttgcaacagtttcagatttatagaaaaattaaagacagagcattcctgcactcagtttaccttgttatcagtatcttagtatgatctatttgttactattaatgaaccaatattgatactttattattagcttaaagtccatagtttatttaggtttccttagtttttactgttccaggatctc

SEQ ID NO: 3339 - DNA, 537 bp, Homo sapiens
gattatacacttgttttgcatattattcaatgatgttcacagcaataaattactaatatgagaaggtagtgcaaaaaatgcattattacattgcaagttgatgtttcaggaaaaattggttgcattacttgaataccttctaaaagaacgataaaaaattttgtagaagagaagaatatctttccaattagctttaatcagcaaaggcaaaaaatgcaaaacatcttttgtgatactttagttgatgaaaaaaaagccaagaagtggcctgggatttcagacatacagcaccttagaaatatgtataattcatagcaaatcaccactatctatggttgccaagtaattgttgtgtacaaaggaaatttagtggctttttatgacccagaaagtagaaggtataaaatgaaaatttaatatccattgcttcttttctagattttcattttttttaatttgccacattaaataattcacgagtcttttcttttcccccgtctcattcagtcttactcagggaaagccagttaaataaga

SEQ ID NO: 3340 - DNA, 906 bp, Homo sapiens
aaggctgcccagatgcaggggggtgtccatccccacggttcaattaacattggatccgtgcccccccgccatggatcaaacatctcaaccacagcagaagcggccctcctcggcaggcccagtgcaagggggagaagcccatgatcgtccctttgaggaaggggcaatggtcattgagctggaggtgggatggggcaaaggttttgattcctgaaaaactgataattacatactctctgggaaggcttaccttctctaggactttgattctcattcatgccagcaactcccaaagctgtccatttcagaccttcccctgagcttcaaaccaaaccaaccacctagatatctcaacaacctctataaaaaaatgtgttatcttcaccatatcccacatctcatttccttaggtggtagtgctcttccccgtggtttctcttgcaccccttctgcaacatctattggtcctttctgttttccaccacatcttatatgtccccctacttcagcacttgttgcactggattgtaaaaatctgttaatggactgtcttgtctgttagacctttaagtttcttgagggaatggattgacagcagctgttcagtgcatgttagtgggggagaagggtgtcttggagaaggcaggccacaacttatagaagagggaacaaacttactatttggctctggtactgaaactaacatctaaaaatggaatggaatttaaatgatgttttggaagggtttatgttgaaaaggagaaatgcttttgactactgatgaggtagataacaaaccaccatgcaaagcaggattcccctacttagcaatcctgtgcatagaaaacagaggaaatgagaatggctgttttgggattaaaactatacctgatttttttcttttcc

SEQ ID NO: 3341 - DNA, 491 bp, Homo sapiens
gaactggatattaaaaattattcataaagccatatttaatggctgcacatcttccactctatggctgcatcatgatttcctttatccccatgccccgtggttgaaatgattcaactcttccaatttcacattactgaaacctcctcctgacccctagggacatccaccctcccaaacacctctgccaggtcacagccactctgctgctgtgacaggagggaaggcagggcccctaacaagtcagtggacctcgcccctgccctctcttgatggactggagacaaaggggtttaggacagagaatggaagccaggatggggctagaaagcctgggcccaaggggctctgcaatgcagaggcacgtatcagtgtttctcaggccttgacttcccccttaaaagataaaaagcacagtggattttcacttcatacccaagaggatggctattatcaaaaaaagaaggagaaagaagaagaaaaagagaagaaag

SEQ ID NO: 3342 - DNA, 466 bp, Homo sapiens
  misc_feature (1)...(466): n = a,t,c or g
ttgganaccnntntgataccgntatgacnnnnnnnnnnnnnnnnnnnnnnnnnnnnnnnnnnnnnnnnnnnnnnnnnnnnnnnnnnggcacgaggcaatgtgtacccaaaagattaaaccaaccctaaatctaaatatagtgggaaagtgtccaggcagatcagagtatgaaatgttgcaggaattaagggaccannnnnnnnnnnnnnnnnnnnnnnnnnnnnnnnnnnnnnnnnnnnnnnnnnnnnnnnnnnnnnnnnnnnnnnnnnnnnnnnnnnnnnnnnnagggcttgacttttatacatacatctgaaaggggattggatggtttgaatagtgtggcacgaaactgagggcatgaaacctgtgaggccggacnnnnnnnnnnnnnnnnnnnnnnnnnnnnnnnnnnnnnnnnnnnnnnnnnnnnncgtaacttaagcatatcttgtgaccttgctgcaca

SEQ ID NO: 3343 - DNA, 4202 bp, Homo sapiens
tgacaacatggcggcgcccatggtccgtggcccggcagtgctcgcctaaaggtggagaacgaggagtagaggaggccgcagccagagcctgtgagcagatccagacctacagataaaaaacattatttaatctatctgggatttactccggcttatgatttgagggccttctcaccttctgaagaatggcttctgtttggcagagattgggtttttatgcctctcttctgaaaagacagctaaatggtgggccagatgtcatcaagtgggaaaggagagtaattcccggatgtaccagaagcatctacagtgccacgggaaagtggacaaaagagtatacattgcagacaagaaaggatgttgagaaatggtggcatcaacgaataaaagaacaggcctccaaaatttcagaagctgataaatcgaagccaaaattttacgtgctttccatgttcccttatccttctggtaagctgcacatgggccatgtgcgtgtctacaccatcagcgacaccatagcacggttccagaagatgagagggatgcaggtcatcaaccccatgggatgggatgcttttggattgcctgctgaaaatgccgcagtcgagaggaatctacatccacaaagttggacacaaagtaatattaaacacatgaggaaacagcttgatcgtctgggcctgtgtttcagctgggatagggaaataactacgtgtttgccagattactacaagtggactcagtatctctttattaaactgtatgaggctgggctggcctatcaaaaggaggccctggttaactgggacccagtggatcaaacagtgcttgccaatgagcaggtggatgaacatggctgttcatggcgttctggagcaaaggtggaacagaagtacctcagacaatggtttattaagacaaccgcttatgcaaaggccatgcaggacgcgttggcagaccttccagaatggtatggaataaaaggcatgcaagcccactggattggggactgtgtgggctgccacctggacttcacattaaaggttcatgggcaagccacgggcgaaaagctgactgcctatacggccacccctgaagccatttatggcacctcccacgtggccatctcgcccagccacagactcctacatgggcacagctctctgaaggaagccttgaggatggcccttgtccctggcaaagattgcctcacgcctgtaatggctgtgaacatgcttacccagcaggaggtccctgtcgttattttggccaaagctgacttggaaggctctctggattcaaaaataggaattcccagtactagctcagaggacaccatcttagcccaaaccctgggcctggcctactctgaagtcattgaaactttgccagatggcacagagagactgagcagctctgctgagttcacaggtatgacccggcaggatgcttttctagccctgactcagaaagcccgggggaagagagtgggtggagacgtgacaagtgataaactgaaagactggctgatttcacggcagcggtactggggcacaccaatccccattgtccactgcccagtctgtggccccacacctgtgcccctggaggacttgcctgtgaccctgcccaacatcgcgtctttcactggcaagggaggccccccactggccatggcttcagagtgggtgaactgctcctgcccaaggtgcaagggagcagccaagagagagacagacacgatggatacctttgttgattctgcttggtactacttcagatacactgaccctcataatccacacagcccttttaacacagcagtggccgattactggatgcctgtggatttgtacattggagggaaagaacatgccgtcatgcacttgttctatgcaagattctttagtcatttttgccatgatcaaaaaatggttaaacatagggagccttttcataagctgctggcccaaggccttatcaaggggcagacattccgcctaccatctggacagtatctacagagagaggaagtggatctcacaggttccgttcctgttcatgcaaaaacgaaagagaagttagaggtgacgtgggagaagatgagtaagtccaaacacaacggggtggacccagaggaagttgtggagcagtatgggatcgacacgattcggctctacatcctttttgctgcccctcctgagaaggatatcttgtgggatgtgaaaactgatgctctccctggggtgctgagatggcaacaacgactgtggaccttgacaactcggtttattgaggccagggcttctgggaagtctccccagcctcagctgctgagtaacaaggagaaagctgaggccaggaagctctgggagtacaagaactccgtcatctctcaggtgaccacccatttcacagaggacttctcactgaattctgcaatttctcagctgatgggactcagcaatgccctctcgcaagcctctcagagcgtcattctccacagccccgagtttgaggatgctttgtgtgccctgatggtaatggctgctccactggcccctcatgtaacctcagagatctgggcaggcctggcgctggtgccgaggaagctctgtgcccactacacttgggatgccagtgtgctgctccaggcatggcctgctgtggacccggagttcctgcagcagcctgaggttgtccagatggcagttctgatcaacaataaagcttgtggcaaaattcctgtgccccaacaagttgcccgggaccaggacaaagtccacgaatttgttcttcaaagcgagctgggtgtcaggcttttgcaaggacgaagcatcaagaagtccttcctttccccgagaactgccctcatcaacttcctggtgcaagattgacagccaggaggctgcagctaccacgagggcctctgaggaacctccttccaggcctgggatgagggggcgatgtctgctggcccaggggaagggaaaagacaaatgtcttgactgttgacctcggtcctgtggcagactgcagtcaacagtgtgcctctgtagtgtggcctggtgctggggtgaaggtgagctgggcaaaggagaaatatgagctactgaggagggggttggacatcctgcccctcaccccccacccacactgcaggttagaggaggccatcttgattcccatgggaagccatcagagacactgctggttgggagcaggaaggagcagtgcccttcgagcagccaggaagcctgcggatctgggaaatggctctgccttaggcacttctcgggaatttgaggccagcctgaggaactgcaggactcaggtgcaatgtgccagccacttggaactgctaactgagcctccagatggtagtgaatggtctctttgccttcaggctggatgaggaagtcatttaggaaatgttcaaataaccaatatgtggaaatggacacagggatcttctgaagttgctttgaatcaaaaggcaggcagtgctggttcctctgcctgtgtccccaccactccccagctctgtcatgcaggcctgtcctccccaaccccagctggacgtgcctcccaggcctggttgtggttctgacacacagggttcccagggcaaggcaccacttcctcacatgaatgaggagcagcaagtcataaccactcccttgggtatacaatttgctgtgtagtgaagtggaaccaggctcaggctgctggtcccaacctcagagccccaccgcagcccagtagggatgcagcacggcccagagggcctcatgtggggccccagatgggcaatgcccaccattgttgatgtgactcccagagccagttattaggaagagcaagctcaccacagaggagtggaacctgaggccccccagatgttgcctccggtgtccaagccacagcggtctggctgttgggaagatggccaggaatggactcataccattggcacattaggctaatcctggttttatgtgaagtcagcaattaagtgttcccactagaactgacctaagccactgattaatatttaatgagggaaggtaggggagaatctagccattttataatgccagaaatctatatatgttatctgatgccatttttctgaagtagcctcacatgtggtccccctgcagttcagcagttaacagatgacttttttagtgtaataaaat

SEQ ID NO: 3344 - DNA, 713 bp, Homo sapiens
ttttttttttattttctaggtaaaccaaatataaatttattaaagatcctaagattcagagaaatactatacttaattggaggtccaggttttgcctggcaacctggctctttaaccagcgtaaaggttaatagtgttgcactgcaacagccccgaagacttcacagtattcacaatgccgttaactggtgacattgagctaagggtcacatgaacacagctggatgttcattgcagtctgaagccttgaccgttccagtctctactgaactcagcctaacacataagagtaaagaaactccaattgagtgttgtttgttgggagaaaaatggaatgaactaagataaagacagaccagttacactaaaggcctaagcattccctcttcccccaacgttatgtttttttgaaaattttgatggaaaaatatccagcatggtggagtggtgtttcgaagatgggtttgatcacacatactttgtcgtacgtatctacccaagctgtcactattcgctaaagtttaaaatgttcttttcctttctccaaagtaatctacaatcttttcttccagcgtatctcttggtccactgtctggccattctgtcatgttctgctctgttggtcatatactgagtggcaatacttcccaccaaggggtcggctggaagaaaagaatgtagattactttggtgggaagtattgccactcagta

SEQ ID NO: 3345 - DNA, 1286 bp, Homo sapiens
ccagtttatttttatacactttttatttaaaaaataaaattataaacaaaatacagaaaaatattgacacctgtgataacaaggaaatgactcttaagggcagtttgttgtcctgggggaaaaaatcataagtgttataaagaaatattattgtgcaaaggaggaatgtaatatttaaggttcatttacaacgggcatttggcgtcgacagaaaaagtctttctatgtatacattcaacattttgcagcatatttacattcaagttacatttccaaattctatgccaaatacagtctaactcaccatcaacaatccctcagatattactaaaatcctgtttatttggtaggagtgcaatattatcttattaggaaataattttatgttcctactaagtcaactgcatttttactactttaacaaaattcactgacatttttatcccagttgaagtcaagcctcttttagacaaagtcaatactaactcaaatgttgccagttataaaattatataataatcttttcctccctccttagagacagtattacaactttcaatgaaaggacaccagctatgataaattattttcttttacaagagttaggatgtattacagatacaagttccaggaattttaacttgttttcaaaaagatgggccgaagcacttttccctttcagttgttaccgaattcctcagcaaaatacaacacattcagaaatctacatagcagttttctgaaaacttttctccattgtccccacacatttctcaaatcagagtgcttactcactagcaacttggagaatctcttgcttagtttttctaaattatactagagtagctatcctaatttcctgacaatcttcccatttcattttttaaattatgattttattaaaatcaacataaattacaaaggttccatctttgcctacggttcttttaaaaatttatcttaacttactgaagggtcaagaccccacagggcctgtctagaacaggcaaacaaaatgtcaagattagaaaattctcatgcctccaaaagactccaggcaaatcaaatctactcaattcttccttatttatctcaagttcaattttaagtctaagaagataattaatgacaaaataacagagattgatgaatttcatttagttgagctcttttttcctaattttcctcaggttgtaacttcgccttcagtacatgatgactggcagttggtagtaggttgctgagatgacaccacttctaagtcagattcacgaacaaaaaccact

SEQ ID NO: 3346 - DNA, 362 bp, Homo sapiens
caacagcccattattggtaccttttccaatgtttaggtgactcattcttatctacaatcactttgttgttctaggaaagtttttgacacagcaggcatttgatatatatttcttgattaaatgaaagattaaatgaataccatcttagatgtctgcatagtgctttaaagtttacaccactattctttcaaatagtacaagagagaactaagctgtgtactcaactgggaagaagcagaactgagagtgggagcacctggtattctgatttcttgtctagaactatactatattctgagatcactaaactacaacctcaggcgactctgcctacttttgtaaataaagttttattggaacac

SEQ ID NO: 3347 - DNA, 537 bp, Homo sapiens
  misc_feature (1)...(537): n = a,t,c or g
cctttganncccntttganancgnnnnnnnnnnnnnnnnnnnnnnnnnnnnnnnnnnnnnnnnnnnnnnnnnnnnnnnnnnnnnnnnnnggcacgagaacttggacttaaaggaagttactgtgctatgttaccagatctaaggagactgggaatcattagattggaatcagatcctcagtcaatggaaatataaggaggaaagaccattggttcttggccctaattgcacattagaataatctggggagctgtaaaaatgtacctatatccaggccttaccccatctattgaatcaaaacctctgagactgggatgtgagtgtttaaagtctccccaggtgattctaataggcggggtgaagaactactactgaagggaaattgagggcctcttccanagaattgcctttgaaagatcctgtcattatacaccgaaggcgcccacccgggcctgctcctgaagctagctgtttgcagtgctctcctgtggcacgcagacctctnggtctccctgngaattggggttccatttgggc

SEQ ID NO: 3348 - DNA, 499 bp, Homo sapiens
tggtgaaggcctgcccacacgtctggtttgagcgctcggaagtgaaggatcgccacctggtcgtaaaagagactgactgaacatgtgcaagataaaagcaagctgcctatcctcatcttcccagaaggaacctgcatcaataatacatcggtgatgatgttcaaaaagggaagttttgaaattggagccacagtttaccctgttgctatcaagtatgaccctcaatttggcgatgccttctggaacagcagcaaatacgggatggtgacgtacctgctgcgaatgatgaccagctgggccattgtctgcagcgtgtggtacctgcctcccatgactagagaggcagatgaagatgctgtccagtttgcgaatagggtgaaatctgcattgccaggcagggaggacttgtggacctgctgtgggatgggggcctgaagagggagaaggtgaaggacacgttcaaggaggagcacagaactgtacagcaagatgatcgtgg

SEQ ID NO: 3349 - DNA, 582 bp, Homo sapiens
  misc_feature (1)...(582): n = a,t,c or g
agctgaagagcaagtgggatgagtccatcttcacgaaaggctgcatccaggcgctggaaagctggctcccgcggaacatttacattgtggctggcgtcttcatcgccatctcgctgttgcagatatttggcatcttcctggcaaggacgctgatctcagacatcgaggcagtgaaggccggccatcacttctgaggagcagagttgagggagccgagctgagccacgctgggaggccagagcctttctctgccatcagccctacgtccagagggagaggagccgacacccccagagccagtgccccatcttaagcatcagcgtgacgtgacctctctgtttctgcttgctggtgctgaagaccaagggtcccccttgttacctgcccaaacttgtgactgcatccctctggagtctacccagagacagagaatgtgtctttatgtgggagtggtgactctgaaagacagagagggctcctgtgggttgccagggagggctttgacttcaggaccccctggcanctcaaggcntgttttgncagggacacctgggtcccttttccattggcttccagacnttt

SEQ ID NO: 3350 - DNA, 1353 bp, Homo sapiens
ttttacataatggtggaaatattccaaaattcaatattttgggatttatacacaaaagataaacaaattagaggccaagaggctgccggaaggggaaaaacggggcctggaatggccgacgtgaggaatgaggctggggcctaaagaggccactggcagggcaggagctggacctgccgaagtggccgaaagccaggagctttggactggggagaccgcagtgaggcgagagctagctgggcgtggagagtccgctgtgaggccgaggccaaggcggggcacgtgcaggccttcgagaggcaggaggccgggcctgcaaaggccgcctggagatcaagttctgcacctgaagaggctgccaaaagtcaaaagcggggcctgggaaggccgccaagagccatgagctgggctgggccgaaagaggccactgggaggcaggaggagctgggcctggagaggctgactcgaggaagttttgcacctggagaggccaagaggacggagctgggcccggggaggcccgaacttgctgctcttccaggcccacttccaggccgacttgaggacgacttgggcctgcagagactgccgggaggctggagctgggcctggagaggccgacttcaggacgatttggacctgcagaggccgccgggcaggcccaagctgggcctagaggagcccaccgaccggaggccatttggggccctgcagatgtcatcggagggccaggagctgagcctggagaggccaccgtgagcctgacctgggcctggggagcttggcttagggaagttgtgggcctaccagggccgctgggagctgggcaggagctgagtccaaagacgttgttgggacctggagtcgggccagagtccggcctggagatgcagccgggagagcccgacttcaggacgacttgggcctgcagaggtcgccaggaggcccaaccttggcgtggaggagcccaccgaccggagaccatttggggcctggagatgccatcggagggcaggagctcatcctggagaggccaccgtgaggcctgacctgggcctggggagcttggcttgaggaagctgtgggccgaccaaggccgccaggagcatgggcaggcgctgagtccaaagaggttgttgggaggcagcagtcgggcctggagacgcagccgggaggaagagctgatcctggagaggccaccgtgaggcctgacctgggcctggggagcttggcttgaggaagctgtgggccgaccaaggccgccaggagatcgcaggcgctgagtccaaagaggttgttgggaggcagcagtcgggcctggagacgcagccgggaggaagagctgggcccgga

SEQ ID NO: 3351 - DNA, 441 bp, Homo sapiens
  misc_feature (1)...(441): n = a,t,c or g
ccataaaaaagaacaaaatcatatcctttccagcaatatggatgcagctggaccattatcttgagcaaattgatgcagaaacnnnnnnnnnnnnnnnnnnnnnnnnnnnnnnnnnnnnnnnnnnnnnnnnnnnnnnnnnnnnnnnnnnnnnnnnnnnnnnnnnnnnnnnnnnnnaagatagggagggaggagggttgaaaaactccctattggatgctgtgctcactatctgggtgaggggttcaattatactccaaatctcagcatcagannnnnnnnnnnnnnnnnnnnnnnnnnnnnnnnnnnnnnnnnnnnnnnnnnnnnnnnnnnntgtaatacaaaacagaaaaaaaacctctttccctatgatataaaaccacttgtaattttttttacccctcanttacagatnaagtctgcctgatgcaactaaggacttat

SEQ ID NO: 3352 - DNA, 901 bp, Homo sapiens
tttttttttttttttttctcgggacaaggacacctctttattgctgttagaaaagggtggttacaagtttcctggacatggagagggacactatccctaaatccaagggaaccagaaaatttatagtatcaaacagaggaaagcgggggcagaacagagctgggcttaagatcagaaaattttcttcctgctcattacccaagcccagagttcttgccccagcttcaactgccaagataccacccttcaccccgacatcctcctaagctaccacaattcaacaaaggtgcaggtgcagaacttcagggtgggaatggggtgcagggaagcaggggctgtgccccagccccagtgccctctgctcaccctgaggtacccagtgcctttccctctgccagctgtacctcccggggaggggcctggacacatgtcaggctggggcagcagccactctgatcagcaccaggtcccgagctgggggcccctcttcagtccaccaccgccgagctggccatggtgttcacgccacaggccccggacccacgatgcaagtagtagtaacccttctcaccccagtcagtgccccagctgttcttgatggcccaaaagggaacgtcagagcggttgccgtagcccacaagcaacaccgcatggtcaatgagccaagggctgcagaggggccggagagggcgggagatcccgtggcggtaaaactcgcatccaaaggcattgatggccacggagattgggcctctcttggccagccaggctgccagcttctgctcgttctggctcagctccacggagtcattgatgtagaccttggtagctgtagtcatcctctgtctccagccctcccaaattctctatggccgagtaggcattggacggcaagccgccc

SEQ ID NO: 3353 - DNA, 2814 bp, Homo sapiens
aaagtcgtttaatcttagagccacaacgcctttgagttaagtgatttgctcaaaggctaaatggaaatagtaccacttatttcgagtagggctgggattcaaaggaggtacagctcttgaactagagttttctgtctccattggtgataagccttgtttagagatgaccaaagactggcactctttttcatcaaaagcagctagttttagcttctcgtgccctcagagctcgccctcctgcagtttgaaggaagtttccaaataatcttatttagaaagaatagcatttacactggccagttaggatatcttgggacacaccagagtagcaacatgaaacacccacttctgggggaaaaaaaagtgttataatttgaaataaaaaaaaaatacaagtcttgggaaattagagaccaaagtgatagaaatctggagggacttttcacaaatgccgacttctggtttgtgcctttcccatattttattaaattcgtgttttattttaaaaaattacagcaacattatcaaagacaacatatgtacaaacattttacaaaaaagaacattaccaatatcagtggcagtaagggcaagctgaagaataaatagactgagtttccgggcaatgtctgtcctcaaagacatccaaactgcgttcaggcagctgaaacaggcttctttcccagtgacaagcatatgtggtcagtaatacaaacgatggtaaatgaggctactacataggcccagttaacaaactcctcttctcctcgggtaggccatgatacaagtggaaactcatcaaataatttaaacccaaggcgataacaacgctatttcccatctaaactcatttaagccttcacaatgtcgcaatggattcagttacttgcaaacgatcccgggttgtcatacagatacttgttttttacacataacgctgtgccatcccttccttcactgccccagtcaggtttcctgttgttggaccgaaagggggatacattttagaaatgcttccgttcaagacagaagtgagaaagaaaggagaccctgaggccaggatctattaaacctggtgtgtgcgcaaaagggagggggaaggcaggaatttgaaaggataaacgtctcctttgcgccgaggaatcaggaagcgtgactcacttgggtctgggacgataccgaaatccggtaccccaccccatcccctgccccgccgggtacctacaagctcggttcctttctcaactcccccagttccttgatctccaccttcttgtacttccccgactttctccggttggtgatcaccaggacggccatgccggcgacgagggccaccacgaccaccacgatgacggcgatgaggccggcggtgaggcgcttcatggagaacttcgggggaatctcgtccaggtaatagatgagcgtgcgctccacctgcaggggttctccgcgcacgcgcaagtccaggccgccgcgggcctggaatagagactcgcccttgatgtccctctcgaagtagtaggcggcatcgccgatatccacgtcaccggcggccttctgagacgtgttctgccgcagctcgatctggatggtgggctgctcgtagtgcacggccgccacgaacttggggtgcagccgatagcgctcgcggaagagccgcctcagctcggcgtccaggtctgagtggttgaaggcgccggcggtggggcggtggcgcaggtcaatgaggatgtggtgggtgcgcacccaactcatcgcagcgtaggctcaggtcgcccttgctccgtgcggcgcacgccccaccgagttcacgcaccagcacaccgacgtctggtttgcactggcgcgccttgaagcggccctcggggtcgcagtcggggtcgtagaggccatcgttgtccacgagcgcgtgctcagctgcggccgcaccagcgtgcgggcgttcttgggggcgctcatgcgcgccttgagcagcagacacttggaggtcagcgtggagcagtcgaccgccatgcccgagcccagcgcgcggcactggcagcggccgccggggccgtcggggctgcacacggtcatcttgttggtgggacacgtgcagttgtcctgcgcggccgtgtggccggtcaccgccgccagcaccagcagcagcagcggcagccgcagcggtggcggcgcgaggccggggccccgagccatggtggggcggaggaacgcggaccggacgcgggcggatgaggcgcggggactcgtcggggctcgggctccggcgtctgggatggtctgcaggcgtctgcgccccggccgctccctccggctcttatactctacccgacctgcccggctggttccaccaccgaccgtccccactggtatttgggtgacacatcccgcccccctccccgtcccacggaaggccaagccggccctgcgccgcccgcgataggatcagaacagggaagctgctcccgcctcctccggaccgaaagccgggaaggggagaaccgatactcacctgtaggcttctggggacccgccctcgcggcctcctgctacagacctggcgcgtctgggccgctctcccggcagaaagtctaaagagtttcattgcaaagtgtggctcgcgactgtcgcctctcctctatacgcgactcccttttcgttctttcccagccccagccctcccttgatttctctcactccctctcttctttgttccagttctcacagtagcacacgtttatatatgtttacagttcacaaacattatctcatcctaacaccagtcctgacaggtagggactatcagacccg

SEQ ID NO: 3354 - DNA, 947 bp, Homo sapiens
ttttttttttttggagttccagtgggcttttattgagataaattaacaaaaaccaagattttaccatatttttggaaccttataaactcagcagactccggtccatatatgcgtacatacaacataacacatcccaacaaaaacagagcccccccgccccactggaacatctgccaattaagagaaagccaattttcccttcccccaatgtttctgaaattttgagttcccactgttcacttctcagtggaactggtcccttgtggctagggacattggaattctctaccatttttactgaacaaaaaataattttttttcctgtttcaaaaaagggaatagtgactttgttttctccaggctccccttcccccacaaccaatgtaaaatacagcagcctgtatcttaataacccagccctaccccctcccttacccagcattgtctactggagaatttaaatacacttctgttggaatctgtcagctgtggatgggcagagtccaggtgccaggctagctccctctgacctcatgaactgtgacaacctttggacacttaactctttaccccaaagatgagtttttagatcagaaaggagagcagattttctttgggagttttaaaaaactatctttagatttagagatacaaagtacaactacaatctcacagaagtccactaaagttcaccaaaaagctgacttacttcagctctcatgaggccaataattttgataaaggtatctggcaggaaaatgattccacaataacaaatttaaagatacctagaacattgaaaaaaatagcaaattaaaataaatggcttaatttccaagaacttatttcatttttttgttactcatctagaaggtcaggagtgtggctaaaggcagtttctgatgaggttatgagcttccaaagtgtttctaaatccttagtgcagc

SEQ ID NO: 3355 - DNA, 1008 bp, Homo sapiens
caatctctggctattaaaaaacatcaagatgagaattaaaggcatatcctgatatacttgcctgcttgcacatgaggctgggagatcccatgcctgttgaagttaactctagccctgacctctattgatcttttgggaatgagggctgatttgaaggtgctgttgcaggatttcatttagctgctgccagttcaagtgacctgtccccagggctgcagctgtatccacctgattgcagtaggtgagggctaacagcagaatttaaagtggaccctgggctgtggagcaaagtgactatccatttggacttttggataatgtggcaggagtcccagctgtttaatttctagtcacattttccagaaagttgttctaagttgagattactgacaagatttctcaagggcaggaccagatatgtgagagacttctagttcagagctgacccctctaagcctctgacacttaaacacgagtcctgctgtccccagcacacaactgcactgaagccttgttcctctcggctggtgtagagctcatctgcatgttgtgtgcagataccagtagcctccctgcttgaacaggcctctcctaggctaggcaggtgttcagaggcatgaaggtctgggcaggggaagggcgtcttctgaaatgggagttaccaggtttttaaatgctgctattgttttatttaccatttaaggtcttttctattatatctgagtaactagtcagtttttcttacagtgctcatagcagttgtatttgaattgtattttcagtgaaatttgttttacattgccatttaaaattggcctttaacagcttcccaactggcttataagatatttttttttaatgaaaacataacccatgaggctcagatgctgttgaagaaataaatggtatgttgctgctgacagtagtgcttgcctattgtaacagcattggttctgctgtagcctcggtgaccatttaagttgaataaatctgtcattttcacccaca

SEQ ID NO: 3356 - DNA, 2293 bp, Homo sapiens
gcgcgactgagccgggtggatggtactgctgcatccgggtgtctggaggctgtggccgttttgttttcttggctaaaatcgggggagtgaggcgggccggcgcggcgcgacaccgggctccggaaccactgcacgacggggctggactgacctgaaaaaaatgtctggatttctagagggcttgagatgctcagaatgcattgactggggggaaaagcgcaatactattgcttccattgctgctggtgtactattttttacaggctggtggattatcatagatgcagctgttaatttatcccaccatgaaagatttcaaccactcataccatgcctgtgggtgttataggcaaccatagccttcctaatgattaatgcagtatccgaatggacaagtccgaggtgatagttacagtgaaggttgtctgggtcaaacaggtgctcggcattgggcttttcgttggtttcatgttggcctttggatctctgattgcatctatgtggattctttttggaggttatgttgctaaagaaaaagacatagtataccctggaattgctgtatttttccagaatgccttcatcttttttggagggctggtttttaagtttggccgcactgaagacttatggcagtgaacacatctgatttcccacagcacaacagccctgcatgggtttgtttgtttttttactgctcactcccaaccttttgtaatgccattttctaaacttatttctgagtgtagtctcagcttaaagttgtgtaatactaaaatcacgagaacacctaaacaacaaccaaaaatctattgtggtatgcacttgattaacttataaaatgttagaggaaactttcacatgaataatttttgtcaaattttatcatggtataatttgtaaaaataaaaagaaattacaaaagaaattatggatttgtcaatgtaagtatttgtcatatctgaggtccaaaaccacaatgaaagtgctctgaagatttaatgtgtttattcaaatgtggtctcttctgtgtcaaatgttaaatgaaatataaacattttttagtttttaaaatattccgtggtcaaaattcttcctcactataattggtatttacttttaccaaaaattctgtgaacatgtaatgtaactggcttttgagggtctcccaaggggtgagtggacgtgttggaagagagaagcaccatggtccagccaccaggctccctgtgtcccttccatgggaaggtcttccgctgtgcctctcattccaagggcaggaagatgtgactcagccatgacacgtggttctggtgggatgcacagtcactccacatccaccattgaaggaaaggaaaaaagggcagagacttgacactccagtcttagacaggggacaatttctttgtagttgttctgataataaactgggttccatgttgcatttcatctgtgtactgaaccactagcctaatagaccagcacggtcaactagaatgacaaacattagctactgggaactcttgttgtctcttcctcttcagaactcttgtccccccaggctccccacctctgcaagatgggatacactcttcaggaccacagtttgaaatgtctttcataaaatgtgctacaattagccttcggaatatttgctgggtgatttaaatgtgtgggtctcatttccatgctagccatggtcatctgacagtctctacactgtgaatattgcctggtgatcaagactctcctcaaagaaatgacttgctgtcatcccacatgaactcctgatgttttttctacaaaagtccataaaatgtgaaaactggagaagatcttagaggttgaagcccaccttctcttttcacataggagggaacagaccatggaaatttaaacgacttcctcacggtcacagaactagttttttaatcctcaggcagtgcatccccccaccctacaactgagcacaacctctttccccacagtgcaattcagaatatgctcagggaatgccagccaccttgtaaaactgctgggagaaaagcatgattcccacaaggactaagtatcagtgatttgtaattttcctgttttgtattatctgctttgctgatgtagacaagagttaactgagtagcatgctttattaagcatgagaaagaatcttaagaattgtcaataaaattaacccaaaactttaataatgtgtctgtaaccaagaaaatattgatagcatcatcctaatgaaactaaacatttattttaaacttattaaattgactcttaaact

SEQ ID NO: 3357 - DNA, 916 bp, Homo sapiens
gcagcatatgacttgcgctggtcatccggtaaatggatgtgctgtagtcccagtgctaatcatttctctccttcacagtgggtggaagtttagggttaaatgtcctttgaatgtcacctggtgagtccttgacaccttaggctcttcagaaacaatggttttgttgaggatggggaacagggaatgccgattttatatacatggtacacagagaggggtgtcacttcagaaaatcttccagcatgttcttcagaatattaatttatatgcgaggtgaggttgggaatgaaaagaacaggtcagcacttttttttttcctagaacatacaaaagaacatggtggactttcagggagtgcaatggaaggtgaatatttccttaagggtccccgagaaatgggagtgaggggaggggacacaatggctttttgagcttacttttaccttctgatactagtcaaggtccagaaccagccaccagccaaatttctatctgggtgcgggccactgaaaatccttgttaaaaaccagatcacaaatctggggctcttggtcccattggagaaggaaggaagagcctcaaaataagtgtgcatccatgcacatattcaggaacagcttgtttagtctttacactttgcctgaaagttgcttctcctcgtccctttgtgtgcctgggtggcctcggccctgtgcgttggcaacgcaggatcaaatgtgctgcagcttttgcagaaaacaactcagaaacacaaaaccccccaacagctcaattattattttttcaatgttttcctacaagagccaagtagcaccatgtacagaagacgcctttttttttggaatattgaaatcgttctgcatgtaaaatatgggataatgacctgtttatattaaaattctgattaaattatctg

SEQ ID NO: 3358 - DNA, 468 bp, Homo sapiens
  misc_feature (1)...(468): n = a,t,c or g
tgaactttcccatcaactacttgcagcgtgcaggagtccttgtgcagaaggtggtcaccacgacagatattgttattcctggnctcaacagctccacagatgtacaggcaagaattaatgctggtgagagcatccacatcatccgtgggncaaaagggccgtacatccgtaccagtgatggacggatctttgctgtccgggcaactggcaaaccaaaggttcctgaagatggtcggatggctgcctcaggttcccagggaccttcttgcgagtccacaagcaacggcagacacagtgcctcatcacccaaagcccccgaccctgaggggctggccaggcccgtctctcctgacagcccagagatcatcagtgagcttcagcagtatgcagatgtggctgctgcccgggaatcccgtcagagctccccaagcaccaatgccgcctgctggccccccggccaacttatgg

SEQ ID NO: 3359 - DNA, 481 bp, Homo sapiens
ggtccaggcctgcaagacttgcctagtgagaagatataggaatgggaacccaggtaacagtctggccacttttccatagggctgctgcagtatgcccagggcccgctccagtctctagtagcctcagattttccagtacctggagttatcatcagtgaagcctgtgaaacagcaaagatggcagcctaccgctccctttggaagctttgccctagggaggtatgaatgaacttgttgctggcccaaacacacctgtaggaggtggctggagaccccagtttggaggttctgcccagtgaggaggaatggcattgggaaagtgcttaaaaaagcagtctgggcctcatttttatagagcagctgtgctatgctgagggtccacatcagcccctggtctccttggacactccaaagactgaaggttgaagtggctaagttgcaaaaacagcaaagatggcggcccgcccctccatcagggagc

SEQ ID NO: 3360 - DNA, 424 bp, Homo sapiens
gcctgggcgtctctcgcctccattacacatttcctacctccacatcttcatccatgttgtgtcctctggctggaccgcccttcccttcaattccacagttcacaatcttagccagactttcaaggccctgctcacccatcctctcctccatcacactgttcttcagttccccacttgcagaaaattataatcataattgcaacatgagctaatgcatgtaacagttagttctgtgccagggcacagaggcagatcccatatatgctaaaaattatagtcaacattgtttcatttaaccctcactggggacgtactgccaaacccactttatgggataaggggatctgagggctcctggggaagttaaggtggactttcccgataattacacaggggaaggaggcaaaatggggatgtggagggc

SEQ ID NO: 3361 - DNA, 889 bp, Homo sapiens
ttttttttttaacttgatcaataccacagtttatttgtaaacatgttatatgtgtcaataatcaaattgacaacactttatagatttcattgtataatattaacatcctaacagaaaacgatccactgtactcagttacagtttggtattttaaaatccttaaatacaaattgtatttgaaacactgaacacaaaaaagaaacatgaatggcagagaaaactgaaaacaacaagtaaaagaaaccaatattccgctcccctgaaaaaaaaacataaaatcatctgattacataatttaaaaaagaaacaaaggaaatcagatgacattttttgatataaagttgcatttcttcaaatccattttagaggtgaaattgtatcaatattaaattctatgtcttttttgatatttgttctttctttcctcttggtttctaaagaatgtttgccagggtttaaattacattaaggaagcgggaaaaagaaaggaaggaacatggtaaaaagccaaatgaaattaactatttgcaaaataattggacgtaaatttttcatgaatcttctttggcaaataacaaagtctgcattttaaatttacctttttgttgaaatggatcaatgcttgtaagatttaagagattacatgagttaatgtataagtaaaacaaagccaaattcacaaagcaaggcgcaaacatcagcttttcacattttgctaaaagctctaaaaatgcactctccctccttaagaggaccagaggtcttcagctcggaatcagatgattacccttgcctcattcaacacaagaaaccagaggggaccccatggttcttcggtactttccctaaaattcatgatcactattaggttctatttcttcctcctttc

SEQ ID NO: 3362 - DNA, 1259 bp, Homo sapiens
tttttttttttaaatacaattaacattccattttattcagttttggtctcccaacttagaaggcaacaaatgaccacattaaaaagggagcattttcagaatatatatacataaaattggtctgggtaccctaaggtgtttgcgttgatagaaaattgacaccccaaactaagtgttctacttagcttctacaatagttattcctagaccttagattagtcattacatttttatttaaggtactatgttactttcatgactacaaaatgaggcactcgtacaaaacaggaatgaaaacatacatatactgtcttgtctttatgtcgtattaatgccaaagatattgtcagggattattttaaagaagcccttactcatgatggctatttttaaaaatggcacaggacagtaacaggctgaaaagaaaacacctggttgaggggacaaattaagtaaatacaagacagcttaaccaaggaagtcagcgaatctccacaaatgaggcttttaataatactttactggtaagacattttagttgggtttttttttgatggctgaataacatcctaaagaagtattttaaatataatcttttaattttacaatgtagaaaacttctcacagtaagtagagagcttagagtactcaaccctgaaaatgaaaataagtagctagcttggaaagttttaaaaagcgccagtgttcttatggcactacattctcctgcacgtgtgcgtgtgttcacgcacattcgcaaacgcaatacaatgtagaactgtccagtgtttgttttgttttaaaaagtcatcaattcaacctaaattcaagaattacactttaatagtggcattttgccaatacagaaatgacgtatcttggatcaaatcattttaaggaaagttattctatattacttgaataagggaaagaaaatacacaagacaagaatccacaataatagcagttacattaaatgttgaaataaaaattactttttgtttacatctggaattgagatggcccatcttcattgtttctccagagtactaagagggggaaaaaagtcacctaaaaacatgggaagttttttaaggctagctatacacaaacgtcacattggcatttttcttcagttttcatctcaactattagtactaaatagtttaaaaatcaaacataatttactaataatgaacaactgcacacttcatactatgaccgtttgataactggtcatgtaaaactatcaccaaatg

SEQ ID NO: 3363 - DNA, 5442 bp, Homo sapiens
  misc_feature (1)...(5442): n = a,t,c or g
cggagacagcaatatgttcgggaaggtcaagtttgcctccttggaattttcccctggatccaagaagttggttgtagccacagagaagaatgtgattgcagcattaaattcccgaactggggagatcttgtggcgccatgttgacaagggcacggcagaaggggctgtggatgcccatgctgctgcacggacaggatgtgatcactgtgtccaatggaggccgaatcatgcgttcctgggagactaacatcgggggcctgaactgggagataaccctggacagtggcagtttccaggcacttgggctggttggcctgcaggagtctgtaaggtacatcgcagtcctgaagaagactacacttgccctccatcacctctccagtgggcacctcaagtgggtggaacatctcccagaaagtgacagcatccactaccagatggtgtattcttacggctctggggtggtgtgggccctcggagttgttcccttcagccatgtgaacattgtcaagtttaatgtggaagatggagagattgttcagcaggttagggtttcaactccgtggctgcagcacctgtctggagcctgtggtgtggtggatgaggctgtcctggtgtgtcctgacccgagctcacgttccctccaaactttggctctggagacggaatgggagttgagacagatcccactgcagtctctcgacttagaatttggaagtggattccaaccccgggtcctgcctacccagcccaacccagtggacgcttcccgggcccagttcttcctgcacttgtccccaagccactatgctctgctgcagtaccattatggaacgctgagtttgcttaaaaacttcccacagactgccctagtgagctttgccaccactggggagaagacggtggctgcagtcatggcctgtcggaatgaagtgcagaaaagtagcagttctgaagatgggtcaatggggagcttttcggagaagtctagttcaaaggactctctggcttgcttcaatcagacctacaccattaacctatacctcgtggagacaggtcggcggctgctggacaccacgataacatttagcctggaacagagcggcactcggcctgagcggctgtatatccaggtgttcttgaagaaggatgactcagtgggctaccgggctttggtgcagacagaggatcatctgctacttttcctgcagcagttggcagggaaggtggtgctgtggagccgtgaggagtccctggcagaagtggtgtgcctagagatggtggacctccccctgactggggcacaggccgagctggaaggagaatttggcaaaaaggcagatggcttgctggggatgttcctgaaacgcctctcgtctcagcttatcctgctgcaagcatggacttcccacctctggaaaatgttttatgatgctcggaagccccggagtcagattaagaatgagatcaacattgacaccctggccagagatgaattcaacctccagaagatgatggtgatggtaacagcctcaggcaagctttttggcattgagagcagctctggcaccatcctgtggaaacagtatctacccaatgtcaagccagactcctcctttaaactgatggtccagagaactactgctcatttcccccatcccccacagtgcaccctgctggtgaaggacaaggagtcgggaatgagttctctgtatgtcttcaatcccatttttgggaagtggagtcaggtagctcccccagtgctgaagcgccccatcttgcagtccttgcttctcccagtcatgggatcaagactacgccaaggtgttgctgttgatagatgatgaatacaaggtcacagcttttccagccactcggaatgtcttgcgacagctacatgagcttgccccttccatcttcttctatttggtggatgcagagcagggacggctgtgtggatatcggcttcgaaaggatctcaccactgagctgagttgggagctgaccattcccccagaagtacagcggatcgtcaaggtgaaggggaaacgcagcagtgagcacgttcattcccagggccgtgtgatgggggaccgcagtgtgctctacaagagcctgaaccccaacctgctggccgtggtgacagagagcacagacgcgcaccatgagcgcacctttattggcatcttcctcattgatggcgtcactgggcgtatcattcactcctctgtgcagaagaaagccaaaggccctgtccatatcgtgcattcagagaactgggtggtgtaccagtactggaacaccaaggctcggcgcaacgagtttaccgtactggagctctatgagggcactgagcaatacaacgccaccgccttcagctccctggaccgcccccagctgccccaggtcctccagcagtcctatatcttcccgtcctccatcagtgccatggaggccaccatcaccgaacggggcatcaccagccgacacctgctgattggactaccttctggagcaattctttcccttcctaaggctttgctggatccccgccgccccgagatcccaacagaacaaagcagagaggagaacttaatcccgtattctccagatgtacagatacacgcagagcgattcatcaactataaccagacagtttctcgaatgcgaggtatctacacagctccctcgggtctggagtccacttgtttggttgtggcctatggtttggacatttaccaaactcgagtctacccatccaagcagtttgacgttctgaaggatgactatgactacgtgttaatcagcagcgtcctctttggcctggtttttgccaccatgatcactaagagactggcacaggtgaagctcctgaatcgggcctggcgataaagaacaaagactgtgcctaaaagtggagagccaggggagtgtgggtcagataagcagctacagctgcagtttggtggattggtggagtatgtgtgtgtgtcagtgctcagctaagaactgtagggaagatggatgaccttcacgcagaactccttttgggatatacatgatgcagaaaggatcctacatggagagagacagaactctctcagctgacactctcagagattcctgatgggctttctcttgaagtccaaaggcgtctgcattgtttcctttctttgcccatccatgaatgttctgttttgttttgttttttttaataagaattccggctgatttttgtgaggcctgtttaaattgactttactttgccttttgtgtttctcaattttatctaggaaatctttctgactttttccatctcttgcttcaaagtaagaggggaactctccttgccgactccaccttatagggtacatttgggtgttttgcactgggggaagaaataggatccatccttaggctgaggcttgaggactgatccagcctctcatggcttccctccaaagtaacttagggttgagggatctatatgtgatgtcaaaacttactttaaacctctagttttcgtcgctgtcatttattaggctgggccaccaaatctttgtttcaatttatcagaagccaagtgcatactagcgtcttgtttgttgcccattgcctatacttttcacctgagatgtgtgagttggggccttttaaaaactactgaattgtctgagccttgaagacatttccagggagaagagataatctctcatttcacccacaggctggtctaatcataacctagttaaagatgtccttgtttaagaaccccattatttatttttagtttttaatataaattaacatgtgggtcattatatttctccttaaatgaggaaattttaaattttattgatctaacctttgaagctttaaaaaaggagaaagagggtaggggtgggaaactggcatactgtgtgtatagcactgccgattggctaggccactgtgtctctgctacaaattaaagaaatcctaaaagttttccttggtcatagagttggggaatgacagaatttttctttgttgtgaaatgtatgtacagagtagaccatctctagccctgtggtgaaagaggtacactcgaatgtttgcataaagcaagtgacaaatgacactgtttaagtcctcttttgtgtcttagaagatcattttgaggctattttcacattagaggggataaaagcagtgaagacatggagtaagtgtattttattttagtaaggaaaggtcagtttaatcatatatgggttggttaggttatctaaaaatttgtcatctttctatggtcatatgctgatggtagattatggcagagaaggaagaggaaatgacaaccattttattaattgtcagtttgatattgagtgactgaatgtctaagaatctccagaaaaaaacaggcatctatcatcctgacccaaggcatattttaacataacctgggagaagagagttaagtacaagttaaaaaaaattctgccctagttttgagaaagcctggctggaattctgactgtcttacatacatatgtgcaaggttagcctgcaagattctagtttttatttaccagtgtgccagaatctgaaacaagctactgggagggaaggtatttgtcctttagtaaaattccctgtatttcagctgtaatcaaagttacctcaaagcaggtgctttttttttttttnnnnnnnnnnnnnnnnnnnnnnnnnnnnnnctagtttgttttagtattcattaattacgtatatgagcactggtagtctagtgtttgttcttgtatacagtgttttcttaaatgagatgatgctatttaattctgttacttgttttttcaactaatggatcttttaaagttttttatttaaatnnnnnnnnnnnnnnnnnnnnnnnnnnnnnnnnnnnnnnnnnnnnnnnnnnnnnnnnnnnnnntcagctaatgtatcttgaatatcatgtattcataaagatgactgaaatagtttctggaacaaagtctgatagaaaaaatactcaattcctaatttaagtgttagagactttaatgtaagctatctaatctgaactagtttcattatttgtgtgtgggtacatgttatgtgctccgtaaggcatctttcaatttgaaaatttcataattgtaatttcactgcctttataaattgctttttttttggaggcagggnnnnnnnnnnnnnnnnnnnnnnnnnnnnnnnnnnnnnnnnnnnnnnnnnnnnnnngaacacctggggctgaagtgatcctccctcccttaggcctcccaaagtgccngggattacaggcatgagctactgcacctggggccattaaaattgtcatacttttaaagagcctattacacaaagtatcatcagaatcatcccaagactcatttcctgattcctaattatttaaaattttgcttttaggcgaggcat

SEQ ID NO: 3364 - DNA, 523 bp, Homo sapiens
  misc_feature (1)...(523): n = a,t,c or g
atgagaagcccaattaaaattaaaaatgtggcaaagacttccaattctagtcagttcttaatgtaattcctactgaagaaaacacctggaaatacaaaaaatgtggcaaaacttgtaaccaatgcttagcatttttgcacatgatagtatttatatgtgagactacttgtacaaacataaaaatatacaaaagctattgtctacttgaaatttatagttaataaaagcattataaatgtaatttctgttgaaagaccttttagaaaatataggccattaaagtgaagaatagtcttaagacagagaatacaaagataaagagggctctagtacctgtacttgtatcccagaacttactatatgcattttgtactagaggaaaactctgaagcagttgcttaaactttgttcaacatcagagaatttatattggagagaaatcctacaaatgtaataaatgtggaaaaacctctgtncagaaactgcaggttaagaaaccagaggccaggcgcggtggctcacg

SEQ ID NO: 3365 - DNA, 159 bp, Homo sapiens
gggcgggaggggggtgggggcgagatcaggctccgaccccccgccgaggggatgaggggatcatgggtgccaaggagtcacggatcggattcctcagctacgaggaggcgctgaggagagttacagatgtagagctaaaacgactgaaggatgctttcg

SEQ ID NO: 3366 - DNA, 667 bp, Homo sapiens
ttttttaaaagcctaatctcctttaatccatccacaaagcttttgccatagacctttttaaatatcacaaaacactggccagaactctgctttacagactaccatcttccattatcaccatatctttagttaaaatagtagccatattcacaggagagacaagtgaaaaggggtgaggttctgacaaccacaataaatacagaccttaataggactaaaccagcaaagcacacttcttgcctgctcagtaaaatattatgaattttctgacgtggagagggatggataacatgatttgggcctttggcaggcctctgaaatgggtaagcaaactttcgtgtttacctgagataattatgctcaaatggcatgtacttcaaccaggatataaaatgaaggagccaaactagtagaagcttccacattttaatttaagatttgcaggctttcaatggaacctccaccacagtagcaagctgcaagctgcacataaagctattacagaagagattgtttttaagaaacaaattggcaggtgatggctatgtacttaatgtatctttggtttaggaagacgagaatatcgattagaggccaaacaatccccagaatgcaaattgccatttggattctgcatgatttcttttcgttgtgttagtggccttgg

SEQ ID NO: 3367 - DNA, 728 bp, Homo sapiens
cccgttcacgtccccctggccgtgctgctttacgggccctcagttcctgctcagtaggacgctgggcaaatgtccaggagccatctgggcgagcagggtccccatcggccgcaagaaagcgttgtccccgttccacactttgaagatagaagtcggtctcacgcttggcttgagcaacctccgctctcaacggctgcctcgcacctggcgctcaaaggcgaggtgctcgctgaggtgggaccaggtgaaacggtgcaaagtacttgaggttccaaagatcataacggaaaggggctgcgctgcgggcacccataggcgtgttgtgtagactggccgccacgcgcttggctatgcgcttgtcacggaactccacccatccctcggtgtagtccttggtgtaggaccgctttttcccctccgagctgctgctgccttcttcttgcgtctcacgaaccggtcctcagcctgaaagaagacgcgtccgacctcgccataggcgctgagaaggttgcggacgtgcaggggccggaagcgcggcgggatatggcccaggtacacaatacctggcactacccgtttcttgctgccacaggccgcttcttcggattcctcctgctcctcctccgcatctagtgtctgttctgtcccttccagcggctcttgctccgttgcggccttctccgattcctctgcctccatgttgactgacacgagcggcctcgtgccgc

SEQ ID NO: 3368 - DNA, 559 bp, Homo sapiens
aaataaagaacctgcgagtgagttcccacacgttttcctaatgggctgctgctttcctaggagtctctcgctcatagaaaaggcacacactgaaagaggaagcagatcccattgctgtggaagtcccattgttaggaagctctgcttttctggagttcaaattcgcattcatgatgctttaaaccgtcagagctgggtgggtcctcctacaacaaaatagtttgctctctctctcctagttaacaggctttcaaatattagaagatcaatgttctgaccccattaaaatttctcttttgtggaatgaaaagctctgatttaacccatcttcaaggctggtttgatggaggaataggggctgagtcacctgcatttcccctccctgcacaaagtcctgggcccagatctggggtctgtctctgctgagggtggggtgaaccaggaagcacttccttcttcatctccttgatgaatgggtataatggttgccatggaactgggggcttgtttgatgacctggggctgggtgggcctctgagagcctttatagctgattgcc

SEQ ID NO: 3369 - DNA, 416 bp, Homo sapiens
agcagattaaggactttgtgaaataagtgcttaacttagctgagcacgcatatatcaaagtaataaaagaaactaacatcagagtctccactgagctacacatttgtgaaaggtgcccactgcagttacagacacctcaggtacccagaggcggcagcactggacacttaggacgttagtatttaaggagatttttattaaagaagagttccctgctgcataagccaatggctattgtgagggaaatgtccctttgcctttaatttatttacgtactgggtatagatgaatgtctcagttgcatctgaaattgaatcattctaaagagaagaaaataagaaccaggtaaaaactgactagatgctgccaaatcaaacccaaggtctcctaaccgaaccttaatgggcctgcttctc

SEQ ID NO: 3370 - DNA, 726 bp, Homo sapiens
gaattaaggcgagggtgtggcactgttctggcttcagtctatcaccaggcagagtccacgcattcttcccagggagaaagaagcagtgacagctcttgggctttgagggaaatgattcagcgggagaaagaaggtggagaggggctaatatgcagataccattgctgcaggtggctctgcccctaagcactgaggagggcactggtccctctggccccacccagccttcaccccaaggtgaagtacgctttctcaggtccccaaggatgggtggccaggtcccccactgggagtggaggtctcactcccttccttgggttctgacctccacattatctggctgtgagggtgacctgcctggctttccccaccaagtgcagctccccgcagctgaaagccacactctcaacacaggactcctgagatctgacactggccaattcacaccctgcttgaagctggcatttgagaggccttcaggttgacaacagcagcaacaagtttgctgttcaaagtaggccaagtcacggctttgagcggcatcatttgaaaagtgctgggatcagccaggcgcagtgttgcctttttgagatacttttttcaaagctaccctggaacggtaatacaataaaactagtacctgtgcataaattgttaactgacctgcccagcatgggtacctaactggggtttagggtagggggacagagggctttttaagattgg

SEQ ID NO: 3371 - DNA, 342 bp, Homo sapiens
gcagaacacgctgtggaccctgagttagagacaatgcaaatgttggattgggtgtaattctttttgaatcccagatccagtctgtacttgaatatgagcagaggatctacaagaatgctgacagggaaccgtgttaagacccagcacccctattcccaggagcttctggcctgaccatctgcagccaaagcactaacagggacagatatgggaatgtccacctttgatccgcatcctgcacaatagtggtcccaccatggctgcacttttttatactatttggagaaaagaccttgtataaattcgaggcccgaatgaaaaaaaaaagtcgacgcggcgcga

SEQ ID NO: 3372 - DNA, 1405 bp, Homo sapiens
gagactaaggggcagctcctgaccaaagacgatacagcttggcactttaaagcattaacagcaggtgtgaccctgagggctcctccatggtgctgcattgagtccagctttccttctgcccttcctccaggagaaggggcccaaggtccccgtggatggtctccacctgtgcttggaaccagtgtaactggctgctccctgctcccagggactgacacggggatcatctctgtgaccgccctccgtcgggcccctgcctgccttctcccctccacgcaaggctgtgctcttcctctggtttctgtgtgtccgtttgagtgtctgcgccccgcctccccatacttcctgggatgatgtgtgaaacctgacacctagatttatttggaaatattctatgaccactttacagatgaggaaactgaggcctcaagcgtggaggggtagagtgaagagtagaacccaggtctgatgccaaagctgctttcttctctgcctcctcctcacgcaactcacacctccttttcttctagctttgttgtcctcccaggaaccaaaaaaccccagctattttctgaccaaaatgtgtttcataacaaaccatctggtgcctttccacacagaactggcaggagcctcgtgtcctgctagctgtctctcttgttgatttccgtgaaaatgcaagtgtttgaagtctgctcattccgagggtgaaacaaaatccaaccctgtcagaatcatgctgttctctttgctgacactgtgaccctgggtcgggacagaccagcagcaatctgtctttagaatcgctttgccttcctccccttttgcccccgtggggctcccggcatcctgaaagccagcaaagcctccagcatcttttccatcctgaggtgcctcccagtggcctggcttgtcggagcaagtttcatcagccctagggaaaacacggccctcctgggaacctccttacctggagtaaccggacaccttagacggaggtgcctgagggtggggtgggatttgcagggtcattatcagaacatgaggataacttccttgcccctgctctgtagccacctccttggcaccggcctctatttgtcataaggcggcgtgggcgaggcctgacacaggccagccttggcacgaggggggccaggggttctgagaagcgctgccctgtgagagccatgctggccttcgtctccatctctggttgacgggctgtccgtgtgcctcctgtgtgtctgcagacacacaggagccacgctggccttcgtctccatctctggttgacgggctgtccgtgtgcctcctgtgtgtctgcagacaagtcttgctgtgctttatttgtgaaactttaatgaggaaaaaacaaataataaatgttctcgttttgaaactc

SEQ ID NO: 3373 - DNA, 561 bp, Homo sapiens
  misc_feature (1)...(561): n = a,t,c or g
tttganaccgctatgacnnnnnnnnnnnnnnnnnnnnnnnnnnnnnnnnnnnnnnnnnnnnnnnnnnnnnnnnnnggcacgagaaaacttcacagcaacgctgaagtggctattatcatcttcattttatacatgaggaaattgaggctcacagagagtatgtaccttattcaaagtcacccagcccacatgaggcagagccaggattcatgcccaagcagtccagaacccaagcacgctgtcttgggactggattttctttccccatgaagaatgtaaatttcttaatcacaggccctgtttattttacacacagtcagcatctacaagtctttgttaactgattacaggtttctgtaattctaggcatgttaagcgtagggtcaagcataaactctgtccctacctttccagaacatatgctctgatatattatagcagacaaatgcaaaatttccaagactcgtgggatttagaagggatttttctcaactcttcttttccagataagaaaagggaagcttgaggagataagttacttctgcccatagctccctgctg

SEQ ID NO: 3374 - DNA, 551 bp, Homo sapiens
  misc_feature (1)...(551): n = a,t,c or g
gcatctccttgtatgttttaaaatggtgtttggagcacctccagggctagctagcgggtgtatttcttcagctgatttttctcatttccttctttggtctacatcagggctgtcaggggtggattcaggaagtggcatgcaacacacatgcgtagaagatcctgtggatcagcccccgctatgggcttctccagggagaccacagaaggtataggtagattttctccggatgtgcaactagggcttcctgttcacatggatctacggcactgtggtctccactgcctgaggaaacaagcagtaaaacggaaagtttaaaaaggaccttgtctcctacagtttcaaatagccgtctagtaagatggctttattgtgatgtttaatagctgaaacctttggacttcaagaaaattatatcaaaattntcataaataagangcaactacaactagggaaaacccttgaagaacaaggcgtggctcacaatgtgaaagcgatggtgcttganctaaaacaatctgaagaggacgcgaggnaaaacttccagttag

SEQ ID NO: 3375 - DNA, 444 bp, Homo sapiens
  misc_feature (1)...(444): n = a,t,c or g
gaaataaatgaagcataagcattgaaaatgaggggtcagagtgtctttacttacattatactaatgtgaaattccctatgtgagaggtgtagtaattgagttggggtggctacgtggaatagtttataaagggagtttgcatgaattttggcaataagcagaccagcataaataaatggtgcacatttcactttcttttccactctttccagaggcgcaggaattggtgggcttggcataactgttgagggaccatcagagtcgaagataaattgcagagacaacaaggatggcagctgcagtgctgagtacattcctttcgcgccgggggattacgatgttaatatcacatatggaggagcccacatccctggngagctattcctcagagaggaccccagagaataattgattttgcaggaaaatgggtttgattttgcttat

SEQ ID NO: 3376 - DNA, 449 bp, Homo sapiens
gcctaaacttagaaagattgtttgggattacaggcgtgagccaaatgcccagccaagggtaaagtgtttagacttcaacgtgctttggtcccatctgggaaactgaggcacagaagttggcccacccagcccagcggtcctcctaatcccacagacagtggggatggagattctgcaaggggaagaggtgggagtcaggtagcaggcagaatttggacagcctgggaggtagctgcacacagtgacccccttccttattcctccccacagggagtggttttcagagacatttcagaaagtgaaggagaaactcaagattgactcatgaggacctgaagggtgacatcccaggaggggcctctgaaatttcccacaccccagcgcctgtgctgaggactccctccatgtggccccaggttgccaccgaataaaaatcctacagaaaattc

SEQ ID NO: 3377 - DNA, 549 bp, Homo sapiens
  misc_feature (1)...(549): n = a,t,c or g
gggggaatatgagagaagaactaatggaaggatttggggaggctggtaatattggcagcagagtttgggtagagggaagacaggagattccatccctaatcaaggcaagggatgatgggagtctgaattaagcagtagtagaatgagagggcctgtatttcaccaattacaaggtgtacttccccccccccccccaaattttggggtcngtcaaacttgganacttcnaaaagtcaanggaatntcanantttaagtggnattttttctttcttagagctacataaagganncataaaaagctgggcccattggtcacccctgtaancccancactttgggcggtgaagggggcgggtcacaaggncaggnattnaacattctgggnaanaagggggaaanccggtcccnctaaaatncaaaaaattnnccgggcnttgngccggcccccntgngccccggtacccgggaggnttaggcnggaaatttcttaacctgggngnnaancttccnttnncccaaattnccaanggannccaanttggggaaa

SEQ ID NO: 3378 - DNA, 700 bp, Homo sapiens
  misc_feature (1)...(700): n = a,t,c or g
ctgcacaattaactgtacacatcgatgttggactttgtgaatagaaaaaattgagaggaaaatcttgaactatgatgcgaggctaagctgggaacaattactggaaacctgattttgtttttccttttccaagactctgaaaaatttcggggtacctctcgcctaaccaagaggaaaggtttaaaaaaaataaacaaaataaataaaccaatacacctagcaaagcagacgccttgttttccagaacctcggactccggcagaaagaggtagagtaaaagtgctgctagattcagcttcaccttcttccctccatccttttctcttgcattttctttttccccaaaaacatgaatctggtttttctttctatagactgagtcagagaaagcgttaggaagaagccgcaactaatgtctgtgaagggaggaccatgaggcgagagtgaatacgattcgttccgctgcttctgactcatccggcagatcggaacacctgcatttctggatgtgtcattcccgtatgtcgaggcgcctccagaacccgaaataatgtgtagacagacctgtgtctaacatcccctcggagggagctccccggggtagggagcccctgggtgggaccgccgcggccgcagctcttgcacccccttgccctccctggagttcgcccagaaaaaattgaaagaggagattncagga

SEQ ID NO: 3379 - DNA, 457 bp, Homo sapiens
gtgataatcttaataacgatatattttaaattattatttctgaatccaacttacattaagatacttttctaaaaaattagagcacctcttttcataacttggaatgttttctttgagaaattctattggaaatggtgagtaggttaccagttggctctcagttgcatagtgaaccttctatgggtaagaactttggtatgaatatcacagtttctccttgtttctttggagactgcatcagatgccaactaggaactgaatgtaccaggaacacagctatccttttacccacttcacccccgcccccttagaaggaagaggaataatagtacacaatcacaattgtagcaacaaccgtgaacatttactgagaatttgttatatgccagatattctaggcgacctcacctatgactgtttctcaaattttcatagtttacaaaaagtgattactttt

SEQ ID NO: 3380 - DNA, 713 bp, Homo sapiens
caaaatggtggtattctcattctgtcgttttgcttgcctttattagctggaatggttttctaagaaagtgttttcttttttatacttatctggttacccagtggtacagttcatataggaagggcaggataaatgcttgattctttgctcttgtacactaagtttttaagataatgcattagttgtctgtcaaggaaggtgagtggtgaagggtttttacatatatacaagaattcatgggattacaggtgtgagccaccaaagccggccccaccttggctttttaaaacagctctgttgaggtgtaactgacaggtaatgaactgcacatacgtgaagtgaccgatgcatttgcctgtgaagctgtcgccagaacatgtccatcaccaccaacagcagtttcacaccccggtctaaaccgtccctcgtgtcctccatgttcaggcaaccactggtctgctccctctcactaaaggttaatttatatattctagaattttatctgagtggaatcgcagagcaagtactgtggggggaggtgcttctactcagcataattattttggcattcacccattttgtgtacatcaataatccacattttgtattgcatggatataccacagtttatttatttacctgttgaccgatatttcgattatttccaatttctaaataaaaataaagcaaataaagctgccgtgaacatttaa

SEQ ID NO: 3381 - DNA, 1064 bp, Homo sapiens
gggacgatcttttcctgtttgaacagaataaagagtttcaggtacccttgggcgagactgtacagtacttcccaaaccactgtcgacagcggtgaggtaaaaaccttcttggccctggctcacaaatggtgggatgaacaaggagtatatgcacctcttcattccatgaatgacctgagggtgccatttattagggacaatcttctgaaaacaattcctaatcaccagccaggaaaacctttgttggggatgaagattcttgacgttggctgtggtggtgggctgttaactgaacctctagggcggcttggggcttcagttattggaatcgaccctgtggatgagaacattaaaacagcacaatgccataaatcatttgatccagtcctggataagagaatagagtacagagtgtgttccctggaagagattgtggaagagctgcagaaacatttgatgctgtgaacttctgaagttgtagacatgtgattgatctagaacatttttacagtgctgctgtcaagtgttaaaacccggtggttctttattcattactacaatcaacaaaacacaactttcctatgccttgggaattgttttttcagagcaaattgcaggtattgtaccaaaaggtactcatacatgggagaagtttgtttcacctgaaacactagagagcattctggaatcaaatggtctgtcagttcaaacagtggtaggaatgctctataaccccttctcaggttactggcattggagtgaaaataccagccttaactatgcagctcatgctgtgaaatccagggtccaggaacacccagcctctgctgagtttgttttaaagggagaaacagaagagctccaagctaatgcctgcaccaatccagctgtgcatgaaaagctgaagaaatgaattgtttctgagaactatagtaatatggcttggatatctgatgttttcaaatacaagaaatgtacaatttatcctttgagagagaatcatgaagaaaagaaggtcaataaaaagggctaaaaccttgaaaaaaaaaaaaaaaaaagttcta

SEQ ID NO: 3382 - DNA, 418 bp, Homo sapiens
  misc_feature (1)...(418): n = a,t,c or g
cttganntttgagnccagnnnnnnnnnnnnnnnnnnnnnnnnnnnnnnnnnnnnnnnnnnnnnnnnnnnnnnnnnnnnggcacgagatgacactgacacctaacaggttttatttcctgatcacacatttggggcgaatctttacctacactggatttccacattgtgctggtggttctcaccctgcagcaatatttggcagagtcttttgttttcttgctatacctgccagtgttgagtttatctcactcagaagagagtatcctgaaaatggatatgtaactggaattttgggtaagacaaatattttcaaatttatctgaagacatcatagaagtaatgttcttggacagtgaataaattgccctgtatttcagtgcttctcaaacgttgcggaccccagcctacagttaaaaag

SEQ ID NO: 3383 - DNA, 513 bp, Homo sapiens
  misc_feature (1)...(513): n = a,t,c or g
tgaatcctttgnnnnnnnnnnnnnnnnnnnnnnnnnnnnnnnnnnnnnnnnnnnnnnnnnnnnnnnnnnnnnnnnnnnnggcacgaggtgtgtgataattatacacatacattcatatatatatgcatgtggattcatgtaataatgtaatagctttggaaaaatgcatgagaaacttagtctgatggttgcctctgggaaaatggcctgggcaccataggagggaggtatatttttcacttttatacttttaaaatgttactataggcatgtaatcactattcaaaaaatgtaaaaacatttaaagatgccatgtgagctcaaataagggagaaatatattgcttattgggaaggcctcatacaagaggtagcatctgagctgggctctgggatgggtagaagttcaccaggaagagccagggcaggaaagcttgcagcagcaggattgaagctgcaaagcaggaaagaccagggagagtgtcagcaatgttgcatagtctggagaaattgc

SEQ ID NO: 3384 - DNA, 1198 bp, Homo sapiens
  misc_feature (1)...(1198): n = a,t,c or g
gcaaggacagagtgaatttattccaagaatgccagtcctgagaacccacttcccacaggcaccaggtcacttggcacgctccgtagttttgctagttaaggcctgggatggcagtgaatcactgggtcactgctaccaacttggcaagggaccgccaccctcactcccacgctcacatgagggttgagtgtaagtctacaactctaagccatagggaatgcctcaaagggcctcttcagggttggccttgctaagggactcccagccatatgccaaggctggctgtcaaccctttccagggcccttgtggaatgagaaggccagccataggatttgtaaaggccacgtgggatactaagcttgggaccttcctatgtccaggaggaacagaggctacatctaggcccctgtccaccaggtcacagtcctgtcccaggcactctctgcttgcccagatcttgctctggtcagcttcctttgggagcagattcgcagaggtgggtggggagtagnaggtggaggttcccatggggcaaggaanggtgggggacactgtagctccaggttttctcctgttgcagagagaagccagcttcatgggaaagggcaacaggttgaggcctcggtccccagcagcttcaggctcaggccctgagtgtccacttcaaccaggtggatgctgtaattcccaaggccctcggtcttggccagcaccgcctccaaggcctccttttgctgtggctccttggtcaacagatagagaaagcctccaccgcctgccccagccaggctctggccatgcacgtggggggccaggacatccatcatacgccgcacagtcaggggctcacagcctggagccatgagcttcttctgctcccagtacgaggtcaggcactggcccagcagaggcaggcttccttggcggaagccttcagcacactcctcagtttgccgtaccaggctgtgggcattctgcaccacagcaggaagtcgggcataccagctcctcagcacatcctgcagcaggttccgagccaggcgggtcttgccagtgtacaccaagagcaggtggtcattgagcttctggacaaagccctcaggcaccgtgacctcttctacctccaccttcagtggcagctgagcccgggagcgccccaccttgatgccaggcattaggccacctacttggtcctgc

SEQ ID NO: 3385 - DNA, 523 bp, Homo sapiens
  misc_feature (1)...(523): n = a,t,c or g
tttgnnnccctttganncnnnnnnnnnnnnnnnnnnnnnnnnnnnnnnnnnnnnnnnnnnnnnnnnnnnnnnnnnnnnnnnnnnnnnnggcacgagcagatttcagaccccaatgccctcagcccaccatcacccttgaccccacaaccagcaataacaaaaagaccaaaagcctgtttcttccaccagccaccagcgcagttcctcttttccaccaggaaagctggagtagtcctgacgccatatataccacccgctccaaggaggattggattcactgttggtagagtggccatcaagccagaacctagccaaccaacacggagccagagggagaaggccaggggagggaggacctcagtggtgctcagcatcaactggctttggggtgggggcatgggatggagcagtcacttagcttcccatctggtgatgaggaccagcaagaatttgcaacaggaacgcagcttccatagcaaagtcaaggggaggggagctgccgcctgggcttgctggcaggaat

SEQ ID NO: 3386 - DNA, 333 bp, Homo sapiens
gtactttgaaatgtgctcatcgggactgggggctgcagaaggatgtatatgtatacgcatccaaaaaatctggaagaattgtactaaaaatgtgaacactggttgtctctggttggtgggggcccggctgagagtgttgtgttattcttgcctccctcgcacccctaattcctttggacaagatacctcttccattccttatggctgcccattacagtacacttgctcaatatagcaccctaattctcctggcaacagttttggaggccaaggggtgaacatgtcactctatcactcaagcagagccagagtccttccctgagaatgagatag

SEQ ID NO: 3387 - DNA, 1922 bp, Homo sapiens
catgccaatgccttcatactgagttctgggcccctctgcaaataagtctgagaagccccttctctccttcctttatcgtggcctatgctgcagaatctcactgcagctggcaaaaggcattggccagctctcagaaatccctttactcaacgttgaagctgcattttggtcaatgtgggtaacttactttagaaaatgacttgagtttaggtctcccccacccatatttaatttttcccaagttgctggtagaagagaaatttaaaagtggatcaatcctcacagagagagttctttttgttgttgtttattgaaaaaaatgcaatacaagaagcaagaccaaacagatatctaaacactacaaccacttctactacgaaaggccaaaacagcagacttgattattgcctgtgtagtctaaagattctgccaatctgattctgctgcccgagttcctattttttcaagaaatgtaaacaactacttgatatgattcataattttaaaaaaaatttacaaagctccttcatttttgtcacccaaaataatacatttgagagagatttgtagaaacaaccagcctggggctgagatcctgggcagaaatttcccgtgagcatcaaaaggcgtcagtcaggccgcagctctggctccagttccccgaggtttgttgtctcctcacccccagctgccaagcatcccccccaacacacactgatgggcccagcggtggaggggggggtggggacggggatgggtcacggggccctgacggggtcccgcagttaggctccctgagccctcggcttataaatacaggtcttgctttgtgggtgggtgccagagtcctcatgtggcttggaggaaatctttatttctcaaattaaaataaaattgcagcgagagttgttactgtggtgtgtctgagtcactctaggaaaactgttgccaagtttctgaccctggaaatgtaattctcttccccctcctcaccatttctacctggacagagtctgtttttcttcacacaaacacacatacacacaactgcagaaagaaaaaaaatccaaacaattgccaaaccccaagaactgttgccagagatggaggaaaggggaagaggcctggaaggacacccatcttgctgggcttgtccaaatctatggcttctaagagcctgaaaggcattagagctcttttcatccaatttacagacaacgaagccgagagaagtgagttggtgacagagctgagggaaacgtttaggcccccgatgaacggtcctgtgctgtgaaagctgccacactgttctagatcacacggaatattcagtgtgttagtttttaaagggacactcagtgccctctgccttttccccatcctcttcgttccacaggtctggaagccctggtagctcttcctaccaggccatctggccatcaggcagtgggcatgcactacatgttcgtttgatgtaagctgcatttcttgtcaccactcctggcaacacgaccaggcttgggcactaccccaaagcccacctttcagaccctctgcccacagcctataattttgttcctgagataggacaagctctttcccctaagcctgtcccacgtcccacctgggctctttccctccctcctgttgttcatgtctcacatgggtacccaaagaaaaatgcacacacccgaaatgagttcaaaccagccgaaacaaaactcaggcagtggagactttggacggtgttgggagaagcagctttagacatttctcttgctcactgcccttgagccccagtgactgctgcccgatacccactgtctattttaggaagctggaactgggattctaaggagccttgaggccaatgtgtttgtgggaagcagttggaagattagagaagttctgttaaataaaaa

SEQ ID NO: 3388 - DNA, 1477 bp, Homo sapiens
tttctcctcaaacctaacgatgccgccggagcggaggagacgaatgaaactggaccggagaaccggagcgaagcgaagcggaagcccggaatgaggccggactggaaagccggagcggggccaggcgggcctccccaaaagcctgccccttcatcccagcggaaaccgccggcccggccgagcgcggcggccgctgcgattgcagtccgcggcggcggaggaagagagacggctccggcagcggaaccgcctgaggctggaggaggacaaaccggccgtggagcggtgcttggaggagctggtcttcggcgacgtcgagaacgacgaggacgcgttgctgcggcgtctgcgaggcccgagggttcaagaacatgaagactcgggtgactcagaagtggagaatgaagcaaaaggtaattttccacctcaaaagaagccagtttgggtggatgaagaagatgaagatgaggaaatggttgacatgatgaacaatcggtttcggaaggatatgatgaaaaatgctagtgaaagtaaactttcgaaagacaaccttaaaaagagacttaaagaagaattccaacatgccatgggaggagtacctgcctgggcagagactactaagcggaaaacatcttcagatgatgaaagtgaagaggatgaagatgatttgttgcaaaggactgggaatttcatatccacatcaacttctcttccaagaggaatcttgaagatgaagaactgccagcatgcgaatgctggaacgtcctactgttgctcggatctcatctgtgcagttccatcccggtgcacagattgtgatggttgctggattagataatgctgtatcactatttcaggttgatgggaaaacaaatcctaaaattcagagcatctatttggaaaggtttccaatctttaaggcttgttttagtgctaatggggaagaagttttagccacgagtacccacagcaaggttctttatgtctatgacatgctggctggaaagttaattcctgtgcatcaagtgagaggtttgaaagagaagatagtgaggagctttgaagtctccccagatgggtccttcttgctcataaatggcattgctggatatttgcatttgctagcaatgaagaccaaagaactgattggaagcatgaaaattaatggaagggttgcagcatccacattctcttcagatagtaagaaagtatacgcctcttcgggggatggagaagtttatgtttgggatgtgaactcaaggaagtgccttaacagatttgttgatgaaggcagtttatatggattaagcattgccacatctaggaatggacagtatgttgcttgtggttctaattgtgggagtggtaaatatatacaatcaagattcttgtctccaagaaacaaacccaaagccaataaaagctataatgaacttggttacaggtgttacttctctgaccttcaatcctactacag

SEQ ID NO: 3389 - DNA, 1325 bp, Homo sapiens
  misc_feature (1)...(1325): n = a,t,c or g
aacggtcaacacaagtttatttattctcacataacaatactgagtggatatttaggtcagtaaggcacagttctcctccacttaggaatctcccatcttcaggccttgccttctccagagcctggtcaccatctgcttccagttggcagaaggagtaacagcacaggggagcacctgttggaggtctgtatgggccaggcctggaaactgcacacctcttctggtcactttccgctggggagagcataggcacagagccacacttaaattttactttgaggaatgcagtgtaggtgtatgtccgacaaagaaaacaataattcggtagacaaataagtctccactccaatattcaattacttacttaacttatgctctggtatgtctcaaattaacctagatggaaatgaactctgaatcttccacttccatcaagtttttcactcactcaatggcatcattatccatccagttgcttaagcatacatttgaaagttatccttggtctgtttcttatccttcccttccacatctaatccctcaggaagtcctgacaatgttacctccaaaatatgtcttaaatccatcttctcagccaaggcaccgggtttgcacggcctgtaatccccagtacttttgggaggccaagggagggtgaatcacttgaacttcaggggttggagagcagccggggcaatgtggagagaccccaattctnttcagcatcctgtttatgttcttcttagcatcagactcgggctttttcctgtttattacctacttcgttttcctgaaagatccatgtgccggtaccatgtgttgttcctactgtttctccaatgtctagtagatttggcacatactgatgtgcaattaatacgtgaatgaagaaccattgacagacgattagtcaaaagctcttgcaaagcccctttgataggttatcggtggagagtagggagcacaaacctggggtcccattctagcttgaccacttctcggctgtgcaacaaactagtctagctctcctgagcctcagttacctattttgcaaattagggatgggaacatccatacctcacgacgccaaacggctaccttgtaaagacgaaaggaggaaatgcaggaaataactccacgtaaggttaatgctccgtaaacagagctgctactgctattatatattctatacaatcctgcgcccttaacggcaggaccctttcagtgcttcagtcctgtcttctctctcctgggttgacctccacagatcctctcagaagagcgttttccaggcgtgaatctccgcagagtggagataaaggctg

SEQ ID NO: 3390 - DNA, 626 bp, Homo sapiens
gtgcaacagaacctggctcatcctgagtgacacacactcaccctcctcagtttcacacacgctgtgtcaagcacgtgctcataccctcttctgcaggatgcggacaattgcttgcattttacaagcaagaaaacagaaccaaaagaatgaaggcatgtgtggatctggagttcagaaccagagggcctgcctgccagtttgcgctctccctcccatctcctgcctcgccaccatcacagcgactgagacccagggataatatgaactcgtcaaagggatgtgctgccagaagggctgccttgctgggcccactggctatccgacagcatgagagaggcctcctcatcaggacacattccccatcccagagggggatcggcactcacgattgtgatgttggctacatccttgacaaagccgatggcctttccaggttggaacttgcaataaccatcctgttgaggatgcaaagggcatgaaatacaggttatggacccgaagtctcagcctccccacgcagttcaataacatttactaaacaaaacaagatgtgccagggcctgggggatgggataatttcagagagaattaaagcatccttgtcctcaaggagcttagggtctggt

SEQ ID NO: 3391 - DNA, 722 bp, Homo sapiens
gcccacccaccctttcctgcctcctccgtgtgaagacatccaacatccacgtgacttttccagctccatttttgaacagtgactgagattctagaaaaactggctgctaactggcctgagccaggcaacactgattccaatccctcctccttttttaagttatttgatggaagactcacctaatttgtgacctgaaactgttgaagaaatagagaggagggggcccgttgattacagagagcatttgggattttgtttggtttggagatgatgcctaggttactgggtttggggggattgttttcctttgggggccttccccttttactccttttcttccagagatcaagagcttctcttgcatcttcttccactgggctctggattaatcaattacccaaaggctgcacctgccgtgttgtctgggcttgcatcccagatgtgttggagtatgcatggatgtagtgctttttagaggagccactgggcaaggccaccaagaacaaatgcatgacattttatagccaaggacgcctcgctaaagtcttatgggcgtcccctggggttgggggggcacaaggttttggaggaagaagacaacttccctcattccatcatcaccatctctttctcactaggttctttctagttttcaagcaatagttctagcctgccttggacaagggggccccagttaaacaaactacccatccatgaggtgc

SEQ ID NO: 3392 - DNA, 393 bp, Homo sapiens
  misc_feature (1)...(393): n = a,t,c or g
ttgacacattagtatgtgtaacactaagcaacaaaccgtggaaaagtcaattagaaaagcagctgaaggcccatttggcaatgtgagatcatctttacagtttgcctggtatctgttgaaaaccagttttccatataaagagcctggtgcacttaaagtcatatagtgtggaggcaaagtttcacgttacaaagcagttctttatcctccattagcgtacagcccctatggatcttattatcactgttttccttttaatctaataattataaagaacaaaaagcattaaaaaatgctttactgctcccatttgaatttgtctttcctatagtttagtgaattttgccggaaaatatttatatacattgtcttnaataggcccctctcttttaa

SEQ ID NO: 3393 - DNA, 692 bp, Homo sapiens
tttttttaagcggcttaaacaataaagcctttattaccacatagtccagagcagtatgagacagtccatgctagggcatgacaaataccatgtgtaatgtcaaccatttccatgaaaatggtaaaccttcccaggaagcccccagcagataccagctcagctcctccggccagaggtgggtcatgtccacagctaaaccagtcaagggtagggaatgaggcctgttttgggctccactattaacgattctctactgtttagagcaaggagcacaaggtctgctgtcccacttgctgtagggaccttatggggtggatagaggtggatggcggtggataaactcagtgatgtgacactgccaacagccccaggcaagtcagagtgcaatgtggggtcccgaaagcgtcccacacaccaggcacacacgggaactctccctggggtgggtgttgggatgtgcaaggtttagcttctttcggatggcactctcacggccactctcctcaacctcctttctggaataagacctttcctgatgaacacggtgctagcagctaacgactttcccatgtgccctgtcctcctgacgcctttctggagtatggactttcttgtgctgaaggagggtggaactatgtttgaaggctttcccacactctgtacattcataagacctctcttcagctcgtgcc

SEQ ID NO: 3394 - DNA, 495 bp, Homo sapiens
  misc_feature (1)...(495): n = a,t,c or g
gcaacagataatatggagggttttaaaaattttttatgttatcttttgaatactaaataactgcagcctttgccaagagatatgtgaaaggtgtctgtatttaaaccatttattcatctgaatgttttattttttttcatcaaaatgatttatagggtttgagaggaagagaaaatagtagatcatccacctgtagattcttcttccctttccattctgcttctgattggctttgtgcttcttacgttcttggcctttgccagcatgtatgaaataaagatgttgtcataattgatactagtaggttttaaaaggccttctgaggagtgatacttttgtattttattaggaacacatctctattggggaggagtgttctctttccccttttcaaatctagaccaaataggatttatgactttaaccttctgcttttcttactgtataaatttatattttcagctgaaaaaaaaaatgttctcanaccactttttt

SEQ ID NO: 3395 - DNA, 1656 bp, Homo sapiens
agctcttaattttgcttttcagctgagccttctgctgtcagtttctaaataagcaggccagccgggctgtgcacctaaatgtctgtctgggaggagcaggctgagaagtcttgcagtctgcaggacaccgaggaatcgtatgtgggaacgtccccgagaaccacacgagcgtgctgctcagtgctgactgcagaatgaaatagaagcaaagtgttacaggatcagtgttttcttttctaaaacatcaaaatgccaaagattaatctgtgattggtgataactgcctcgtttaaatggtcacaagaaatgtgaagagagagctagggcagacatgcagtgaaatggttctttgttaaaatgtgcaataaaaatagattacaataagtagtgcaaagaactttacagaaatcaagcgaattagaaggcctgtaagagtaaggtttgctaaaacgtgaaacactgtaacacttttaaccactgagcattccacagtgaaatgttatttctatgctcttatttaatgtaatgtttctcctgtcatttttgaagttgagtttggagtagattggttgcttctgagaacacattctgccttcctgggaagtcggggtgtcatcctttcctctgtttgatgtgaggtagtttaaagatacaaggactttgtgtgaagctccagcatctgtgccccttgaattgcttaggtgcagacagttctaaagcaaggagctgcagcattctcatcatagatacgtgcagtatctttaatgagtatcttcatggtatgatagtgtgtgtttgtgagtgcgaagtaccaattaaggtgtcttaaatttggcgcatagaggagagaaggaaacctgaggagtagtgttcctcctgaatgaaggttcaggtcaccagccttctgtacactgcctttggttttagcagttctttgaaaagcaaacactttcatgtcctgtctattcattcagctggctgtgctgtgctgtggaaccagctgtgtggatctctagcccagctacagcagaatacattttaccagcaaacctaaggatgacaaacactatccacatctgaaaactaccacaccatatcagggatcataaattatgcatatctatgaattttccaacaaattcctacttcctgattggattggttttgccgctgatgttaaggcagccagcttcttagttcaaaaagaattctgagtttttcaaacactagtctagaggtggacattgtcaggggttctggaatgggaccaggggaccttttggtgcagtgggtgcctgtaactcattagacgtactgaggcagcacttctgcagggtgcataccctgattgttgtcatttgtaacaggtcacttccttttcactcagtttaaattggtgatggacgttgcttgattgagcttattactctctattttgagaaggtagaaggtaagagggcccatattcattctttgccatgaaatgaatgaattaggaagattgtatttacttaactgttttttaaatacatgtttaatgaaataaactgtaaaatatcccagttttgtgtattatatggacatttgatttttaatagcctttccaaagaaatgagggcatgattattgtacagtaagtacgtgactgatttaatt

SEQ ID NO: 3396 - DNA, 1106 bp, Homo sapiens
  misc_feature (1)...(1106): n = a,t,c or g
ttggacacgacctcagatcaaagacttcaaagagaagattcagcaggatcangatttccgtgattacagtgggccgaggagaagtggtcactgttcgagtacccacccatgaagaaggatcatatctcttttgggaatttgccacagacaattatgacattgggtttggggtgtattttgaatggacagactctccaaacactgctgtcagcgtgcatgtcagtgagtccagcgatgacgacgaggaggaagaagaaaacatcggttgtgaagagaaagccaaaaagaatgccaacaagcctttgctggatgagattgtgcctgtgtaccgacgggactgttcatgaggaggtgtatgctggcagccattcaatattccggggagaggagtctattcttcctcaagtttgacaactcctactctttgtggcggtcaaaatcagtctactacagagtctattatactagataaaaatgttgttacaaagtctggagtctagggttgggcagaagatgacatttaatttggaaatttctttttacttttgtggagcattagagtcacagtttaccttattgatattggtctgatggtttgtgaactcttgctgggaatcaaaatttccttgagactctttagcattcatactttggggttaaaggagattcctcagactcatccagcccttgggtgctgaccagcagagtcactagtggatgctgaagttacatgagctacatgttaaatatttaaagtctccaaaataaaacaccccaacgttgaccttacccggctgatggttagccccttgctgcctgctccatgtgtcttatgagagcccgtagttacagtgtcctctaatttgaaatccataagttaacaagtctatatcaggtgcagctggctttgattaaaggccatttttaaaacttaaaaactcaacacctcacagattataatagaaaaaagaaatgggcctcagtttgatctcgttcagaatgacccagattgtttctgctttggggtgcagctgtttagttcagagtttatattacagagaattatttttctggngataatctttaaaactagaatgtttcaaaac

SEQ ID NO: 3397 - DNA, 458 bp, Homo sapiens
  misc_feature (1)...(458): n = a,t,c or g
tccccttgganatttggataccgtnnnnnnnnnnnnnnnnnnnnnnnnnnnnnnnnnnnnnnnnnnnnnnnnnnnnnnnnnnnnnnnnnggcacgagggaggaggggtcaagttaatgaaggccataggactccagtccttccaccccttcagagtgacacggaccttttgcaaaatgccatttagtcaccctccaacaaagtgtctttccctctgttgtcctgtaaactgtaatgtacgaaataacatattttgatgatcggggtcttggcctcttgacatatacgctaaaaaaatgggggttgttttatatgtgtcctgtgtaaacctgtcggcaaatatagccaccacttttgaattctcctagatggccctgaattttgccactttgaaataatgtgctactcaatctcagcaaccaaaaaccattatccaggaatgtttcttgtgagtgagcg

SEQ ID NO: 3398 - DNA, 467 bp, Homo sapiens
ttttttagcctttaaaaaaacacacatctacaaatgtgtgctcacaaatgctcaccgacttgctgatgccagtgtttgaaattagagaggcttactgaatttcaaatgaagtgattagaatgaataaggcagtttagttcatctcccataggatacagaaagtaagactgggacaaaattctctactaactcttaagaaaattaacaaagacataccaaagaatggtggttgctagtattgctagtatttacacacacacacacagttagtagaaatccatttaaattacttataatagtgatccacggagtaaacacgattaatctggaaattattggtcttcagggaagtactaacagttcaacagtcgattatttcaagaaggtggctaagagagcagggtgtacaagataggaaaaatgtatggacatattcatagaatagaaatgagactgggcgtggtggc

SEQ ID NO: 3399 - DNA, 504 bp, Homo sapiens
  misc_feature (1)...(504): n = a,t,c or g
ttganccttnnnnnnnnnnnnnnnnnnnnnnnnnnnnnnnnnnnnnnnnnnnnnnnnnnnnnnnnnnnnnnnnnnnnnggcacgagagaacatttttatgttcaccccaaaagaaacctcacctcagaaaatcttgtaattgacnnnnnnnnnnnnnnnnnnnnnnnnnnnnnnnnnnnnnnnnnnnnnnnnnnnnnnnnnnncaggaaatcggtgtagtagaatattatttggcgataaaaataacacagaaaaactgataacatgccacgacatgggcgaactcgtaaatattatgctaaagaagctagtcacaaaagagcacatgttcgatgccattcgtacaaagagtccggaagtggcaatccatagagacagagaggagattactgattgccagagtctaggcttcttatttatccaaaagacttagttgcccttttcttttgctttggttattatagagtaactcatgataggaaatccaaaatcaacacnaatgct

SEQ ID NO: 3400 - DNA, 550 bp, Homo sapiens
  misc_feature (1)...(550): n = a,t,c or g
gccacgcgagacggagccctcctcgccggccggcctgggcgcttgggatctggttcctgttctggggattgtatcgtcaagctctgagaagaatcccgctccttgaagaaaacataatcccaaacttccttggnnatctgttgnggtctaatgcccagcggagactctgcctgtccatgcaagttacccccctgcaataggtgtgcaactgtgtaaaatgccatgtaaatagtggagtcagaaagtgattcaatcagccactgctcatcccaaggcaagtgagtgcctagaccataagttcttgagcaagcatgttcttgtagccaacctaaggtggcttcnaaattcctcctggtctcctcacagaatgtttccaggttcttcaagcactgagatgtctgtttcttccaattctcttctccataatccaagtaccactggtcacacagagccacaacacattcatctgacgacctggacatcacttgtttnctctggttaccatgtaaataagtgcatctccagcgtngnancntcttattaatgggca

SEQ ID NO: 3401 - DNA, 600 bp, Homo sapiens
  misc_feature (1)...(600): n = a,t,c or g
gatgagcttcaataccctgtctggcccttgatggaaaaaagcttggtggcccctgctctggactataagtttcttaaggcaggaccctttctgtttagttgcccttgcaaattcagcccttgctgggtgcctgcacagaacgggcacttaagaggtatgtgtctttgataagtcatttctaccctgtcaacattgtattgacttaagtcattattaaaactgcacactccatcaggaatagatgtcccttgtaagattccaagaccattttctagcaagcagttcaatacgatagcaatatcccaatgcaggcgggcatgtccagggtctcagagtagctactggctaatgaggccaccacacatctatgtgtgcagcgccatccatgtgtgcagactggaaacatacatggaaagaggcgcaaactcacacgcaagagattataattgagcagatttatggaaacacatcgtgagatgtcctacactttcatgaaggtgtgtcatatacactccaagaatgactgatgaattagtgaaactcattattgtataaacggaaaacgtccttttccttcnangntgccganctaggagttaa

SEQ ID NO: 3402 - DNA, 1390 bp, Homo sapiens
tcctctaaaatacttagctttattaaagacatggtactaaaaataacagattccaacatttgctctatttctacttatatatcataaataagacagctgttgatgcaagacacactctttcacaatctttccatatgcacccaagcattcttgtatcagaataagctgtttaccagccaaccgtatgtggctgaatgattaaaatgaccatctatactttacatagtaaagcatcttccaaaattttaatgtacacagtgacaaaaaggaaaaacaaacaaaaaaaacagtaattctgaacacatgaagagtgattaagcagcttcataatcaaatcaggcttcattacttgcaacaagggcaactctttccattccccactaaatactaaagtttcaatcttattaacattaaaagaaaactcaagttgaaaccaagtaactaacatgctattcagctttttagatctaaaaaagtaactcttcccatgaggtaaggcaactgagtaatctgattgtattagattgcattaaaataattatacttaacttttaatacactaattaaaaggtattacttttttggaaatacaacaataatgagttcagaaaccacaagttatagtactggggaaaaacattagcagtgctgtcactttactatttgcatactttctgtaaaaagtgagcctaagaatgatggatgacctgtatcttaaactcaagtaaacgtatccttaaacataaaaccaataacctcccatatactcctaagtccttaagtacaatttctgcacatcatttatgaaaagatgattgagaggtaataaggccatccaatgtagacaactaaagggttttcttcaatttaaggaaaataagaacatgtttcattttcaattatcacagtataaaactgatggtcccaaagctgcatgactctaatgtcattcttgaaaacaggacttccttctcattttaggtgaaatcagtaagaagctcttctgacatatcacttacacacttctctatgggtatgcatgaaatatccatctagattccatatgaattgagaatgactagcacatataaaattctagaaaacagtataccacattgtagaaggcactaaagcttcagcttgtgctcccatagcccattttgaaaagccagtttccttttattataagggcacctttgccacctacagctgacaagacacactgcaatattattcataataagcttggaaatgtcaagaaaatttaaaaagaaatgctcactttgtgggtagtcccaatgattctaaacactgaatactaattcatcattattagtattcaacacggttgctcttccttttgaaagagaacagtagcatgcattgtcag

SEQ ID NO: 3403 - DNA, 3552 bp, Homo sapiens
  misc_feature (1)...(3552): n = a,t,c or g
gctttggcccatcagggtcaaagagtaggagtgaggaaggaagggatgggacagcatccctgggacgttcaagtaccatcctggtctcccttctccagccttagagagtggaccagccagagcacctcgtctggactctcagacctgctgctttgtctctaccaaccttggcagggatctaggatccatttagtgggatcaggtcccagtcaataccattggggctcaaataaggtcttagaaccacagagtctagggccagggtcccaactcataggtgacggagttcccttcaagccacagattctgttttttttgtgtgtgtgtgtgtttttttttttatcagagtcccatacctcacgggtattttctcaatcagtgaacacctcaagtactagcccatgtgttttgagtaaaaagggctcctttcaacgaggatccccttctagaggctttgactaaccagtctcttggcacccttagaatgaagttgagagcgtcacagggatgcttaacgaggccgaggggaaggccattaagctggccaaggacgtggcgtccctcagttcccagctccaggacacccaggtgagtgtcctgccacatcatccaggggacctggggggtggccttcctcggggcaggtccctgggacctctttgcatcccttttgcaggagctgcttcaagaagaaacccggcagaagctcaacgtgtctacgaagctgcgccagctggaggaggagcggaacagcctgcaagaccagctggacgaggagatggaggccaagcagaacctggagcgccacatctccactctcaacatccagctctccgactcgaagaagaagctgcaggactttgccagcaccgtggaagctctggaagaggggaagaagaggttccagaaggagatcgagaacctcacccagcagtacgaggagaaggcggccgcgtatgataaactggaaaagaccaagaacaggcttcagcaggagctggacgacctggttgttgatttggacaaccagcggcaactcgtgtccaacctggaaaagaagcagaggaaatttgatcagttgttagccgaggagaaaaacatctcttccaaatacgcggatgagagggacagagctgaggcagaagccagggagaaggaaaccaaggccctgtccctggctcgggcccttgaagaggccttggaagccaaagaggaactcgagcggaccaacaaaatgctcaaagccgaaatggaagacctggtcagctccaaggatgacgtgggcaagaacgtccatgagctggagaagtccaagcgggccctggagacccagatggaggagatgaagacgcagctggaagagctggaggacgagctgcaagccacggaggacgccaaactgcggctggaagtcaacatgcaggcgctcaagggccagttcgaaagggatctccaagcccgggacgagcagaatgaggagaagaggaggcaactgcagagacagcttcacgagtatgagacggaactggaagacgagcgaaagcaacgtgccctggcagctgcagcaaagaagaagctggaaggggacctgaaagacctggagcttcaggccgactctgccatcaaggggagggaggaagccatcaagcagctacgcaaactgcaggctcagatgaaggactttcaaagagagctggaagatgcccgtgcctccagagatgagatctttgccacagccaaagagaatgagaagaaagccaagagcttggaagcagacctcatgcagctacaagaggacctcgccgccgctgagagggctcgcaaacaagcggacctcgagaaggaggaactggcagaggagctggccagtagcctgtcgggaaggaacgcactccaggacgagaagcgccgcctggaggcccggatcgcccagctggaggaggagctggaggaggagcagggcaacatggaggccatgagcgaccgggtccgcaaagccacacagcaggccgagcagctcagcaacgagctggccacagagcgcacgacggcccagaagaatgagagtgcccggcagcagctcgagcggcagaacaaggagctccggagcaagctccacgagatggagggggccgtcaagtccaagttcaagtccaccatcgcggcgcttggaggccaagattgcacagctggaggagcaggtcgagcaggaggccagagagaaacaggcggccaccaagtcgctgaagcagaaagacaagaagctgaaggaaatcttgctgcaggtggaggacgagcgcaagatggccgagcagtacaaggagcaggcagagaaaggcaatgcaggggtcaagcagctcaagaggcagctggaggaggcagaggaggagtcccagcgcatcaatgccaaccgcaggaagctgcagcgggagctggatgaggccacggagagcaacgaggccatgggccgcgaggtgaacgcactcaagagcaagctcagagggccccccccacaggaaacttcgcagtgatgcaccaggcgaggaaacgagacctctttcgttccttctagaaggtctggaggacgtagagttattgaaaatgcagatggttctgaggaggaaacggacactcgagacgcagacttcaatggaaccaaggccagtgaataagcaactttctacagttttgcaccacggcaagaaaaccaaaaaccaaaacaaacaaacaaaaaaaacccaacaacaacccagaacaaagcaaaacccagcagactgtacttagcattgtctaaatccattctcaaattccaaatatcacagacacccctcacacaaggaatataaaaaccaccaccctccagcctgggcaacgtagtaaaacctcatctatacaagaatttaaaaataagctgggcgtggtggtacacacctgtggtcccagctactaggggggctgaaccaggaagaaccgctccagcccagggcttcgaggctgcaatggagctataattgcatcattgcactccagcctggggcaacagagaccctgtctcaaccaccaccaccaccaccacccctactacccctgtattcaaggtaaaaattgaagtttgtatgatgtaagagatgagaaaaacccaacaggaaacacagacacatcctccagttctatcaatggattgtgcagacactgagtttttagaaaaacatatccacgggtaacccggtccctggcaattctgtttacatgaaatggggagaaagtcaccgaaatgggtgccgccggcccccactcccaattcattccctaacctgcaaacctttccaacttctcacgtcaggcctttgagaattctttccccctctcctgggtttccacacctcagacacgcacagtttcaccaagtgccttctgtagtcacatgaattgaaaaggagacgctgctcccacgggagggggagcaggggattgttggcantgtttacaccctgactgtgcttaaaaacactttcactaataaatggttataaatcaaaaaaaaagtcgacg

SEQ ID NO: 3404 - DNA, 5912 bp, Homo sapiens
cggaggacagccggaccgagccaacgccggggactttgttccctccacggaggggactcggcaactcgcagcggcagggtctggggccggcgcctgggagggatctgcgccccccactcactccctagctgtgttcccgccgccgccccggctagtctccggcgctggcgcctatggtcggcctccgacagcgctccggagggaccgggggagctcccaggcgcccgggactggagactgatgcatgaggggcctacggaggcgcaggagcggtggtgatggtctgggaagcggagctgaagtcccctgggctttggtgaggcgtgacagtttatcatgaccgtgttcaggcaggaaaacgtggatgattactacgacaccggcgaggaacttggcagtggacagtttgcggttgtgaagaaatgccgtgagaaaagtaccggcctccagtatgccgccaaattcatcaagaaaaggaggactaagtccagccggcggggtgtgagccgcgaggacatcgagcgggaggtcagcatcctgaaggagatccagcaccccaatgtcatcaccctgcacgaggtctatgagaacaagacggacgtcatcctgatcttggaactcgttgcaggtggcgagctgtttgacttcttagctgaaaaggaatctttaactgaagaggaagcaactgaatttctcaaacaaattcttaatggtgtttactacctgcactcccttcaaatcgcccactttgatcttaagcctgagaacataatgcttttggatagaaatgtccccaaacctcggatcaagatcattgactttgggttggcccataaaattgactttggaaatgaatttaaaaacatatttgggactccagagtttgtcgctcctgagatagtcaactatgaacctcttggtcttgaggcagatatgtggagtatcggggtaataacctatatcctcctaagtggggcctccccatttcttggagacactaagcaagaaacgttagcaaatgtatccgctgtcaactacgaatttgaggatgaatacttcagtaataccagtgccctagccaaagatttcataagaagacttctggtcaaggatccaaagaagagaatgacaattcaagatagtttgcagcatccctggatcaagcctaaagatacacaacaggcacttagtagaaaagcatcagcagtaaacatggagaaattcaagaagtttgcagcccggaaaaaatggaaacaatccgttcgcttgatatcactgtgccaaagattatccaggtcattcctgtccagaagtaacatgagtgttgccagaagcgatgatactctggatgaggaagactcctttgtgatgaaagccatcatccatgccatcaacgatgacaatgtcccaggcctgcagcaccttctgggctcattatccaactatgatgttaaccaacccaacaagcacgggacacctccattactcattgctgctggctgtgggaatattcaaatactacagttgctcattaaaagaggctcgagaatcgatgtccaggataagggcgggtccaatgccgtctactgggctgctcggcatggccacgtcgataccttgaaatttctcagtgagaacaaatgccctttggatgtgaaagacaagtctggagagatggccctccacgtggcagctcgctatggccatgctgacgtggctcaagttacttgtgcagcttcggctcaaatcccaatatccaggacaaaggaagaagaaacccccctgcactgtgctgcttggcacggctattactctgtggccaaagccctttgtgaagccggctgtaacgtgaacatcaagaaccgagaaggagagacgcccctcctgacagcctctgccaggggctaccacgacatcgtggagtgtctggccgaacatggagccgaccttaatgcttgcgacaaggacggacacattgcccttcatctggctgtaagacggtgtcagatggaggtaatcaagactctcctcagccaagggtgtttcgtcgattatcaagacaggcacggcaatactcccctccatgtggcatgtaaagatggcaacatgcctatcgtggtggccctctgtgaagcaaactgcaatttggacatctccaacaagtatgggcgaacgcctctgcaccttgcggccaacaacggaatcctagacgtggtccggtatctctgtctgatgggagccagcgttgaggcgctgaccacggacggaaagacggcagaagatcttgctagatcggaacagcacgagcacgtagcaggtctccttgcaagacttcgaaaggatacgcaccgaggactcttcatccagcagctccgacccacacagaacctgcagccaagaattaagctcaagctgtttggccactcgggatccgggaaaaccacccttgtagaatctctcaagtgtgggctgctgaggagctttttcagaaggcgtcggcccagactgtcttccaccaactccagcaggttcccaccttcacccctggcttctaagcccacagtctcagtgagcatcaacaacctgtacccaggctgcgagaacgtgagtgtgaggagccgcagcatgatgttcgagccgggtcttaccaaagggatgctggaggtgtttgtggccccgacccaccacccgcactgctcggccgatgaccagtccaccaaggccatcgacatccagaacgcttatttgaatggagttggcgatttcagcgtgtgggagttctctggaaatcctgtgtatttctgctgttatgactattttgctgcaaatgatcccacgtcaatccatgttgttgtctttagtctagaagagccctatgagatccagctgaacccagtgattttctggctcagtttcctgaagtcccttgtcccagttgaagaacccatagccttcggtggcaagctgaagaacccactccaagttgtcctggtggccacccacgctgacatcatgaatgttcctcgaccggctggaggcgagtttggatatgacaaagacacatcgttgctgaaagagattaggaacaggtttggaaatgatcttcacatttcaaataagctgtttgttctggatgctggggcttctgggtcaaaggacatgaaggtacttcgaaatcatctgcaagaaatacgaagccagattgtttcggtctgtcctcccatgactcacctgtgtgagaaaatcatctccacgctgccttcctggaggaagctcaatggacccaaccagctgatgtcgctgcagcagtttgtgtacgacgtgcaggaccagctgaaccccctggccagcgaggaggacctcaggcgcattgctcagcagctccacagcacaggcgagatcaacatcatgcaaagtgaaacagttcaggacgtgctgctcctggacccccgctggctctgcacaaacgtcctggggaagttgctgtccgtggagaccccacgggcgctgcaccactaccggggccgctacaccgtggaggacatccagcgcctggtgcccgacagcgacgtggaggagctgctgcagatcctcgatgccatggacatctgcgcccgggacctgagcagcgggaccatggtggacgtcccagccctgatcaagacagacaacctgcaccgctcctgggctgatgaggaggacgaggtgatggtgtatggtggcgtgcgcatcgtgcccgtggaacacctcacccccttcccatgtggcatctttcacaaggtccaggtgaacctgtgccggtggatccaccagcaaagcacagagggcgacgcggacatccgcctgtgggtgaatggctgcaagctggccaaccgtggggccgagctgctggtgctgctggtcaaccacggccagggcattgaggtccaggtccgtggcctggagacggagaagatcaagtgctgcctgctgctggactcggtgtgcagcaccattgagaacgtcatggccaccacgctgccagggctcctgaccgtgaagcattacctgagcccccagcagctgcgggagcaccatgagcccgtcatgatctaccagccacgggacttcttccgggcacagactctgaaggaaacctcactgaccaacaccatgggggggtacaaggaaagcttcagcagcatcatgtgcttcgggtgtcacgacgtctactcacaggccagcctcggcatggacatccatgcatcagacctgaacctcctcactcggaggaaactgagtcgcctgctggacccgcccgaccccctggggaaggactggtgccttctcgccatgaacttaggcctccctgacctcgtggcaaagtacaacaccaataacggggctcccaaggatttcctccccagccccctccacgccctgctgcgggaatggaccacctaccctgagagcacagtgggcaccctcatgtccaaactgagggagctgggtcgccgggatgccgcagaccttttgctgaaggcatcctctgtgttcaaaatcaacctggatggcaatggccagggaggcctatgcctcgagctgcaacagcggcacctcttacaattccattagctctgttgtatcccggtgagggcagcctctggcttggacagggtctgtttggactgcagaaccaagggggtgatgtagcccatccttccctttggagatgctgagggtgtttcttcctgcacccacagccagggggatgccactcctccctccggcttgacctgtttctctgccgctacctccctccccgtctcattccgttgtctgtggatggtcattgcagtttaagagcagaacagatcttttactttggccgcttgaaaagctagtgtacctcctctcagtgttttggactccatctctcatcctccagtaccttgcttcttactgataattttgctggaattcctaacttttcaatgacattttttttaactactatattgattgtcctttaaaaaagaaaagtgcatatttatccaaaatgtgtatttcttatacgcttttctttgttataccatttcctcagcttatctcttttatatttgtaggagaaactcccatgtatggaatcccactgtatgatttataaacagacaatatgtgagtgccttttgcagaagagggtgtgtttgaaatcatcggagtcagccaggagctgtcaccaaggaaacgctacctctctgtcccttgctgtatgctgatcatcgccagaggtgcttcaccctgagttttgttttgtattgttttctgacagtttttctgttttgtttggcaaggaaaggggagaagggaatcctcctccagggtgattttatgatcagtgttgttgctctaggaagacatttttccgtttgcttttgttccaatgtcaatgtgaacgtccacatgaaacctacacactgtcatgcttcatcattccctctcatctcaggtagaaggttgacacagttgtagggttacagagacctatgtaagaattcagaagacccctgactcatcatttgtggcagtcccttataattggtgcatagcagatggtttccacatttagatcctggtttcataacttcctgtacttgaagtctaaaagcagaaaataaaggaagcaagttttcttccatgattttaaattgtgatcgagttttaaattgataggagggaacatgtcctaattcttctgtcctgagaagcatgtaatgttaatgttatatcatatgtatatatatatatgcactatgtatatacatatatattaatactggtatttttacttaatctataaaatgtcgttaaaaagttgtttgtttttttctttttttataaataaactgttgctcgttgcattaaaaaaaaaa

SEQ ID NO: 3405 - DNA, 423 bp, Homo sapiens
ggataggtgtcgagggctgaaagctgtgctagagtttcggggtccgagttggcaggaactgaagtcccgatgctcctcagcccttggctgtcctcagggctgccctctgcgtggggacaccaggccgcccctgcccagggacaccaggccgcctgctcctgctctgtgcatctctcacatcaggctcctcacccagcattgtttgggctatgacagtggctgtgacaagaccctaagacgggaagctgcgtgcagggcactttgagggcccgctgaggagaagccgcctgtgagggacaggactgggcagggaaggccaccagccatgcggtcacagcccaggactccgccagtcctgcaggagccctggagccaggcccttgctgtccaggccacttgctgtacctggcccacaggtacttc

SEQ ID NO: 3406 - DNA, 405 bp, Homo sapiens
aagagattcgcggggccaagactcaggcccaggagcgggaggtgatccaaaaggagtgtgcccacatccgggcctccttccgcgacggggacccagtgcacaggcaccggcagctggccaaactgctctacgtccacatgttgggctaccccgcccactttggacagatggagtgcctgaaactgatcgcctcctccagattcacagacaagagggtgggctacctgggggccatgcttctattggatgagaggcacgatgcccacctgctcattaccaacagcatcaagaatgacctgagccaggggattcagccagtacaaggcctggccttgtgcaactttggagcaccatgggctctgcttgagatgtgccgagacctggccccagaggtgggagaaactt

SEQ ID NO: 3407 - DNA, 463 bp, Homo sapiens
  misc_feature (1)...(463): n = a,t,c or g
ctgtataaaaagcaattgctcttttgtttccaaaacaggtattacaagtggataaataatgtgcactgctctgagcccaaaggtacgcagtgggcctggcctctctgatatgcatcagtatagccaatggctagccagcagacatgaagctaatttgctaccaatgaaagaagatctggccttgtggttaaccaatctattagggaaggagattacagcagaaacttttatggagaagttggacaatggtgccttgctctgtcaacttgcagaaactatgcaggagaaattcaaggagagcatggatgctaacaagcccacaaaggtcaaaatcccaaattattctcatttccttgtttccagtgagtcataggaagggattgtctctccacacttttggatattattaactctttgngggtggggtggcccaggaggagcccagtgtcctaagntatttgtg

SEQ ID NO: 3408 - DNA, 593 bp, Homo sapiens
acgggtgccacccactgtcaccaacgctgtgtcctggcgctccgagggtatcaagtataagaagaacgaggtcttcattgatgtcatagagtctgtcaacctgctggtcaatgccaacggcaatgtcctgcgcagcgagatcgtgggctccatcaagatgcgagtcttcctctcgggcatgcccgagctgcgcctgggcctcaacggacaaggtcctctttgacaacacgggccgcggcaaaagcaaatccgtggagctggaggatgtgaagttccaccagtgtgtgcggctatcacgcttcgagaatgaccgcaccatctccttcatcccacccgacggcgagttcgagctcatgtcctaccgtctcaacacccacgtcaagcctttgatatggatcgagtcggtgatcgagaagcactcccacagccgcatcgagtacatgatcaaggccaaaagccagttcaagcgggcggtcaacagccaacaacgttggagatccacatttcccgttgcccaatgattgccgacttaacccaagtttcaaggacgacggttggggagcgtttaagttgggttcccgagaacagcgaga

SEQ ID NO: 3409 - DNA, 476 bp, Homo sapiens
  misc_feature (1)...(476): n = a,t,c or g
gtatctggttgccacatccaagaagaacgcgtgcgtgtcgctggtcttttctttcctctataaggtggtgcaggtgttttccgagtacttcaaggagctggaggaggagagcatccgggacaactttgttatcatctacgagctgctggacgagctcatggacttcggctacccccagaccaccgacagcaagatcctgcaggagtacatcactcaggaaggccacaagctggaaacaggggccccgcggccaccagccaccgtcaccaacgcggtgtcctggcggtccgaaggcatcaagtatcggaagaatgaggtgttcttggacgtcatcgagtctgtcaacctcttggtcagcgccaacggcaatgtcctgcgcagcgagatcgtgggctccatcaagatgcgagtcttcctctcgggcatgcccgactgccctggcctnaacgacaaggcctctttgacaacacggcccg

SEQ ID NO: 3410 - DNA, 1759 bp, Homo sapiens
ctgatatcccagggaaaggaggcggctttccggaaagtagtacaagcaactatggtacgcgatcgtcagcatggccccgtcgtggagctgaaccgcatccaggtcaaacgatcaaggagcaaaggcgggctggccggccccgacgggaccaagtctgtctttgggcagatgtgtgctaagatgagctcgtttggtcccgacagcctcctccttcctcaccgtgtctggaaagtcaagtttgtgggtgaatctgtggatgactgtgggggcggctacagcgagtccatagctgagatctgtgaggagctgcagaacggactcacgcccctgctgatcgtgacacccaacgggagggatgagtctggggccaaccgagactgctacctgctcagcccggccgccagagcacccgtgcacagcagcatgttccgcttcctgggtgtgttgctgggcattgccatccgaaccgggagtcccctgagcctcaacccttgccgagccctgtctggaagcagctggctgggatgagcctcaccatcgcggacctcagtgaggtttgataaaggattttattcctggactcattgtacatccgagacaatgaagccacctcagaggagtttgaagccatgagcctgcccttcacagtgccaagtgccagtggccaggacattcagttgagctccaagcacacacacatcaccctggacaaccgcgcggagtacgtgcggctggcgataaactatagactccatgaatttgatgagcaggtggctgctgttcgggaaggaatggcccgcgttgtgcctgttcccctcctctctctgttcaccggctacgaactggagacgatggtgtgtggcagccctgacatcccgctgcaccttctcaagtcggtggccacctataaaggcatcgagccttccgcatcgctgatccagtggttctgggaggtgatggagtccttctccaacacagagcgctctcttttccttcgcttcgtctggggccggacgaggctgcccaggaccatcgccgacttccggggccgagacttcgtcatccaggtgttggataaatacaaccctccagaccacttcctccctgagtcctacacctgtttcttcttgctgaagctgcccaggtattcctgcaagcaggtgctggaggagaagctcaagtacgccatccacttctgcaagtccatagacacagatgactacgctcgcatcgcacttacaggagagccagccgccgacgacagcagcgacgattcagataacgaggatgtcgactcctttgcttcggactctacacaagattatttaacaggacactaagatggggaaacgtcctcgtgagatgagagcctgagccaggcagcagagcactcgctgctgtgtagactgtaggctgcctggtgtgtctgatgagaagcgtccgtcctcgagccaggcgggaggagggagtggagagactgactggccgtgatgggaatgacagtgagaaggtccgcctgtgcgcgtggaacactgtggacgctcgacttccaagggtcttctcacccgtaatgctgcattacatgtaggactgtgtttactaaagtgtgtaaatgtttatataaataccaaattgcagcatccccaaaatgaataaagcctttttacttgtgggtgcaatcgatttttttttcttttctcctttctttcaagtgtcgtgagtcgtcttgattgtatattggaaataactgtgtaacaaa

SEQ ID NO: 3411 - DNA, 912 bp, Homo sapiens
ggaaattcccggagccctggcttcttggcgcgatgaggttccggttctgtggtgatctggactgtcccgactgggtcctggcagaaatcagcacgctggccaagatgtcctctgtgaagttgcggctgctctgcacaagggtacctaaaggagctgctgggacaggggattgattatgagaagatcctgaagctcacggctgacgccaagtttgagtcaggcgatgtgaaggccacagtggcagtgctgagtttcatcctctccagtgcggccaagcacagtgtcgatggcgaatccttgtccagtgaactgcagcagctggggctgcccaaagagcacggcggccagcctgtgccgctgttatgaggagaagcaaagccccttgcagaagcacttgcgggtctgcagcctacgcatgaataggttggcaggtgtgggctggcgggtggactacaccctgagctccagcctgctgcaatccgtggaagagcccatggtgcactgcggctggaggtggcagctgccccagggaccccagccccagcctgttgccatgtccctctcagcagacaagttccaggtcctcctggcagaactgaagcaggcccagaccctgatgagctccctgggctgaggagaagggtgttccaggcctgtgtggagccgccctgcccgtatggagtcacgccctctgaactgctcttcgggaggcagccctggttctaggatgctgaggccctggcccggactctggcctcccagatccccagctgcctcacttctctcttgagaacttggctcagggctcctgaggacctttcccagcattaccttcccttcccttgaaaggcaattgttggctgttttcataagcaggaaaaataaacagaagtataaaggaaaaaaaaaaaa

SEQ ID NO: 3412 - DNA, 447 bp, Homo sapiens
ggccaggttctgcacatgaagagggatgttgactgctgtggtacacacagttcagaaggtcttgccccttgctgaccttccctttatacctgctgtggcttctacccttagccacttgctcctttgttatttctggcctttccttgaatgcatccttcattgcatcagggattaaagtgggtacacgaggggcctgggcttatagacactcccaaggactctgggtaggggtcatggcagatctagtggaaacagcccggtgagtttgagagagtgaggagtggtagggactgtggagaagtagcgtgtgcacctgtacctcctgacattcaagttcaaattatttaatggcagccactctgctggccagtctaagcctaatgctaaccagatgtcagcatgcttttggctcactgccctgactaagggaaaaacagcataaaggag

SEQ ID NO: 3413 - DNA, 2809 bp, Homo sapiens
  misc_feature (1)...(2809): n = a,t,c or g
aaagcgacctgctgtagaaaaggcggcccacagccacctcagcatgcagaggaggcccagctgctgagaggagttgcctgagagtgacctttgcatctgcctgtccagccagcatggaaccaaagcggatcagagagggctaccttgtgaagaaggggagcgtgttcaatacgtggaaacccatgtgggttgtattgttagaagatggaattgaattctataagaagaaaagtgacaacagccccaaaggaatgatcccgctgaaagggagcactctgacttagcccttgtcaagactttggcaaaaggatgtttgtgtttaagatcactacgaccaaacagcaggaccacttcttccaggcagccttcctggaggagagagatgcctgggttcgggatatcaataaggccattaaatgcattgaaggaggccagaaatttgccaggaaatctaccaggaggtccattcgactgccagaaaccattgacttaggtgccttatatttgtccatgaaagacactgaaaaaggaataaaagaactgaatctagagaaggacaagaagatttttaatcactgcttcacaggtaactgcgtcattgattggctggtatccaaccagtctgttaggaatcgccaggaaggcctcatgattgcttcatcgctgctcaatgaggggtatctgcagcctgctggagacatgtccaagagtgcagtggatggaactgctgaaaaccctttcctggacaaccctgatgccttctactactttccagacagtgggttcttctgtgaagagaattccagtgatgatgatgtgattctgaaagaagaattcagaggggtcattatcaagcagggatgtttactgaagcaggggcatagaaggaaaaactggaaagtgaggaagttcatcttgagagaagaccctgcctacctgcactactatgaccctgctggggcagaagatcccctgggagcaattcacttgagaggctgtgtggtgacttcagtggagagcaactcaaatggcaggaagagtgaggaagagaacctttttgagatcatcacagcagatgaagtgcnactatttcttgcaagcagccacccccaaggagcgcacagagtggatcaaagccatccagatggcctcccgaactgggaagtaaagagactcctgcattcctcctcccctcctgagggaagcccatggacaagctcagtccaggacctgtccacttctgtgacaaatcaacgggaaacagcccaggggtgggaagttttcatttgcaggggggtctgaatgtaactcaccatgtggtgtgcaaggttcccctgcattgtattgctcactgcagcccctctgcccctatccatgacccccaagcagatataacaagctgtgcagcctcagtaggctgcttgccctctccaggcctcagggcctcttctggaaaatgaagaaattcaactagtagattcctgaggtccccctagcttaaaaaaaaaaaaatctgccccatgattctaacactcgcagtagtgatagtgtatctagttgttctgctggtgtccttccttggctaagtcttggccttcagttatcttcaaatgtaccagaacctgagccaacgcctccctgtgaaactgttgctgatctgtagtacagtaccaggaagaaacctcttttgttctctttagacatcttctacttgctcttggccttgagatcgtgtaacaaaatgaaggagggctctcttctttcttcctcatcctactcaaaaacttcccgagagcagtggtggttttgagggttttgacttctattacttttggcagcctggaaagttgtgtcttctgggaaagagacccggggaggccaggagtagctgagggtcctttctggtgcccttaaaccgcccagagggagccctattccactctggttttaggctgatctgaggaggggtctccctttgttcctttctggagcatttctctaacgtttattacaattaggaggggggaccccacatctgtggagattctgtttcatttgaggtttacagaaaaaaaaaagtggccagatgtgttccccccatgggtgagaggcctggggcaactgcctggtgaatgtgtcttgcggcagctgcagcaagtggaggggctgaactactggccagctcactggatgatgggttaatacaacaactgcactgtaaggactcagagccacacagaacttctgagaggggctgttagcattgcgcagcatcttcagttctccagtaaatgatattgcgttcgtgcctcagctttaagcacaagtagcagcagctcctgcttgagttctgagggcatcatggccctatgattaaccagagtgatctaacctagactaaaattgggaaccttatttgcaatttttgaccctgaccactaactagtgattcttctccaaaattgagaaagacagcacccattgaaacagatatgtgtgtgaaagtatatttttcaattccagatttttaattttaaggctccaggaaagaaaggagagtagaacatttttcctcattttatcaaatcctctcttgccctccctcaattcccctgtaacattcctgaagctgttcccactcccagatggttttatcaatagcctagaggtaaagaactgtctttttctctgattctttaataaattatctttatagaatatgcacaagtttttctacactcagtgttaaagtatttattaatgggaagtcaacttaatgttttgaaataaatatatgactctgtttaat

SEQ ID NO: 3414 - DNA, 3437 bp, Homo sapiens
tcctcctccaaagcaaattacacttgaaagtcaggacttctaatacatctgtaaactgaaagaaaatttccctttcattgaaaaactctcatctcaaaccatttaccctgcactaaatgggagttaggagaaatgagtcatcaagacagatgtagagatattaacccagaaccagttttctggactccacccatctactttcctaagtttataaatcctttgcatgcatttagtgcctttcctaggggtgtgccacatagaaccttctggaaatggctttctagaagttataaatctggatcctcaactggggaaaaggatgaaccatcttccacagcttcaagtggacttcattcacttcatgtcacagctgcttgatttccccacagttcatttctgtagaagagaagccttctggtctgtttttccagatggcgagcttggggtgagttagaagtgcctgattggacttcacaactcagcgtttttattggctatttttgttctaggtacaatggaggttgatggattgttacttttggttaccaaaaccaggaggaggggagggtgctgcttaggagaaacacccaaaaagaacagaccagcctttctcagggactcaggggtggtggcactgcttccaacttactgcttcatttagaacaccagataataagcacccaggactcggcctttagaagtcaatggaataaataagctggaaaaggttgaagagaaaaaagccaaggaacatgtaagtagaagattatatggagccatttaagagcacaaaaagcaagagtaacaaggcagcagatggaatttggccccgcctggccctgccaagctcactctgggaagcactgtgtcgaaagtgctctctttctgtcccctgaagcattcaagttccctagccaaattctcaggctgtttctatggagcttacaaaaaaagagcatagcagggttgatgtgccctttccttgtcattctgcatcctcttctcagcttcatgcaataaatctctggcttaaatgaaattgttcaaaggaaaatggaaaatggaaaaaaaaatggtggaggggcaggagatactgactagttctggtttttcacaaaacaagaagaatttgtctaagagtaaacggtgtttattttttgttgatttttttcaatcaaatggaattgcttaattaaaaaaaacttatctcttttctccttaaatactacagacaacctcattttatcgcagcagacacctaggaacaaaacactggacccaccagagaaaactgggcaataaaagcatcagaagttcaagtcaactatggaagaattactgttagctggcagctttcaattctaaacagaagtgtcccaaacctattgggtttgacaaaagtttcttagaactggggagctgggaatgttggactccttttaattctattccaatcatttcctgtatagggaaattaaagtcaatgcatcaaatgaagacccaaagaaacatttaaaaacttgtttgactagtattcagtatgtgagattattaagtaataacttgtccacctagttaaccttgtcctggaatatatataggttatttgtagccgccactgctataatattttctgaaggatgccaagctgtatgcaagatctttttgctaaagtccagactgtcgacactgatctcgtcttttctccgcttgccccccacacacacttttcggggtttgaggatagcccggggcttgctgttttccctcgaagctcccaagggtcacatacacgcttggtgtttctgtcggacctcccgaaggaggtggtggtaggggcctgtcatgatgacatctggctggaccatttccacacacacccataatttatcaaaaatggcaggcatttttcatagagggaacacagcttgctgcggaggtagtcatgaacctggtaagtctcgatggggcggttttccatgttgagatcccagactttgacggtcaagtagtccctggtcatgatatacctcccactgtggctgaacttcacatccgaaatcgaagagataatttcagagaaaaatgatctgttgcttggatcttccggctcttcaaaaaatttggtgtgcctgtcacacagggcagatgcccgcatgtcacacagccggattgtccctttgctgctgctgtacacgaaggtgttgcaatgatgggggtggaactcggctgctgtgactcacctccgtgagctcctccatgttggctggcttaatgtccacaatattaaaactttgattggttatttcaaagttccataggttaatcctcaggtcatcagcggacatgtaggtttcatagtcgctgttgacagatatggagttgatgtgatatgtgtgtgcgttggcaaatactcttcgtggggtggcctccaccatcaggtccatgggtctcaggacaggcacccgcagggttgtgatggtggcaggatcccggagccggccctcctcatctttcagattgtagccttctggcctcttatcacgctcgctgactttccacagcttcacagttttatcattagtagacagaagaaagtaagctgcattctgctgggggagccatcttattttattgattttttcttctatttctaaactcttcaggtaatcgaactcgggttcatggctctggaatgtgctgtaaacattgtattcacccctacgatgaacctgatttttactctcctgctctcgttgaaatattacaacccgaccccccttgtcccctgtcgctagtaattctcccgtgtggttgaattctaccgtagagataatgtcagcttcggtcgcatagctgtggtcgcgcaggaaactgttgttgattttgcgggtatcaatgtcctcctccattgacagcaggcttacttgcgtgggaaccagaagccggcagacaagtatccatgatccctccccgcagccagtctcacaggagaggggggcaggggagccagtgggactgcaccatggtccgagcctgaggaggagacggggaggcggagagaaaaaaaataaaaacccggcaatggagctgtcacctcctccactcgggttctgcgaggctgcggcggctcctcccgcgcggtgcgctcactccagctccagttcccagcgaggatgctgcgcctgcctccgctgcctccgggtgccaagatacgccgtgccccgaggggtctggtcccgcccgcccgccccggaggcgctcacaagcgggtctggggagatgcccaacaggttcccctccttggcagccgctccaaaatgcaaaaaagatccctcctccccctgggagagcgggcagccgcgacaaaatggtgcctttctggacccgagctgcagtggcgagatggcagggacaggattcaggcttgcctggcc

SEQ ID NO: 3415 - DNA, 1643 bp, Homo sapiens
  misc_feature (1)...(1643): n = a,t,c or g
ccggctggggaacacgccactgcacctggcggcctgcaccaaccacgttcctgtcatcaccacactgctacgaggaggggcccgtgtagatgccctgggaccgagctggtcgcacacccctgcacctgggccaagtcaaagctgaatatcctgcaggagggccatgccagttgccttaggaggctgttgcgtctggaggttgaagcagatcatccatatgctgagggagtatctggagcgcctagggcaacatgagcagcgagaacgcctggatgacctctgcacccgcctgcagatgaccagtaccaaagagcaggtggatgaagtgactgacctcctggccagcttcacctccctcagtctgcagatgcagagcatggagaagaggtagcaagagaggctccctgccttcctgccactgccccaccctgccccactgctgtctcagtaccaagaaaaagcccaacatctgggacttggagctgcacttgtctggtgaggaccttgccctcacccgcagatgccgtggggcagagatgctctctctccacggcctcagagccactcccagccacagtttccagcatctttttggacagggaccacagctcccagcttcttccagttctcgcagcaccagaccagcctctgcagctgcacttcagctccgcagacctgcgctatctcagcagacctcacttgccccatggccttcatggcgcgctccaggcctcagacccttctctgtgttccgtcctggccatgggcttgttgcagtcagcaggtgtgggcttaggcgggcaccctgtggccaggggtactgcgtgaggccctcagttggtcctgtgcctctcaccagcacttagacagacacgtcaccagactttcaaggagatactgcagtgagttttctctggttggaaggggaaggggttggtgagtccaagaccttaaaaatacaaggttaagagggaccccaaagcaaaaaattccaacccttttcctcccagtcattgaaacaccaaaactattataccggagggtgtaatagttttgctgcccagttgtggtaggccagtagtggccctcccaagatgcccatgtcctaatccccaggaacctgtcaaaattaccttgtatggccaacaggggctttgccagatgtaatgaagttaaggatctttcgccaggaagattatcccagcttgttcaggagggcttgatgtcctcacccgggtctgtataacagaagagcaggtgacgggagaggaggttggaggtgtagcgatggagcaggaaactggagttgaggagggcagctcaagccacagagtccaggccacctcagagccaggaaatgcatcctcacttgccccatggccttcatggcgcgctccaggcctcagacccttctctgtgttccgtcctggccatgggcttgttgcagtcagcaggtgtgggcttaggcgggcaccctgtggccaggggtactgcgtgaggccctcagttggtcctgtgcctctcaccagcacttagacagacacgtcaccagactttcaaggagatactgcagtgagtttctctggttggaaggggagggttggtgagtnccagaccttaaaaatacaaggttaagagggacc

SEQ ID NO: 3416 - DNA, 1384 bp, Homo sapiens
cgcgggacgggtgagggcgctggggctgggcagcggggctcgatgtgtgtcagccaagtagctggtcccactggagcgggagaaagagagagcgcgaaagagagaggatgtctctctcagactggcacctggcggtgaagctggctgaccagccacttactccaaagtctattcttcggttgccagagacagaactgggagaatactcgctagggggctatagtatttcatttctgaagcagcttattgctggcaaactccaggagtctgttccagaccctgagctgattgatctgatctactgtggtcggaagctaaaagatgaccagacacttgacttctatggcattcaacctgggtccactgtccatgttctgcgaaagtcctgggcctgaacctgatcagaaaccggaacctgtgggacaaagtggctgccatgagagagttccgggtgtttgcacactgccctggcacagcagctcctcttacagggaggcggtctttaagatgctcagcaataaggagtctctggatcagatcattgtggccaccccaggcctcagccagtgaccctattgctcttggggttctccaggacaaggacctcttctctgtcttcgctgatcccaatatgcttgatacgttggtgcctgctcacccagccctcgtcaatgccattgtcctggttctgcactccgtagcaggcagtgccccaatgcctgggactgactcctcttcccggagcatgccctccagctcataccgggatatgccaggtggcttcctgtttgaagggctctcagatgatgaggatgactttcacccaaacaccaggtccacaccctctagcagtactcccagctcccgcccagcctccctggggtacagtggagctgctgggccccggccattcacccagagtgagctgggccaccgccttggccctggccaagcactccggagagcagctctcacacaccgactcctggcacccagggtcattcctcagggacctcaccaatgtcctctggtgtccagttcagggacgcccatcaccaatgatctcttcagccaagccctacagccatgccttcaggcctctgggcagcccagccttcagagccagttgcagccccagctgcagcagcctacgtgacatgggcatccaggacgatgagctgagcctgcgggccctgcaggccaccggtggggacatccaagcagccctggagctcatctttgctggaggagccccatgaactccctgcttcccctgaacccccagcaagttgcagatgctactgcccttgggaggcactcatgaaggtgcctccatctctcccttccccaatatacctgatggtcaactctaaaaaaaaaaaaa

SEQ ID NO: 3417 - DNA, 816 bp, Homo sapiens
  misc_feature (1)...(816): n = a,t,c or g
tttgagtccaatagactcaaaggttacattttgtttttccatttaatttaataatcaacaaaacgacaaagtcagtttaatatctttcttctgctgagtcttcaggatgttagctagtctttcaaaagccattgctacaaaagtgcaaatttctcatttcctgtgggtctctagaaactctctcaatatttaaagccaaacaaatccatcttttctgagagacagaaactaaaaaattcagagttaattcactattaaaaacagcaaggccctgctatttcccaagaataaagaaatttaaaattctcattgtaagaagtatgaacttgaagctagaattggtttatttctggcagctacttacaatattaagaactttactttttaaatttgagacaatttcacaggaaagcaagaaattagtctattgtgaaatgtttttacaactaacttggaatatactgcaaatcactagtaagtagagacacatttaagataaaatgattaataaaacaattggtaattctgaataaggatctgaataaatccagatcacagactgttcctttaccaatatgtaaaagaatgtgcaaaattcgtaaaaatatacccaaaaaatttaccagcaaacagagaagcaaagaatggagttcaaccttacactataaacatctaatagatatgtatgaaaatttaaaaactagaaaaggttgggcatggtgggctcatgccttgtgatccccaggactttaggaggcccaaggtgggaggatttgtttgagcccaggagttcaagaccagncttgagcaatatag

SEQ ID NO: 3418 - DNA, 684 bp, Homo sapiens
aatgtctgtttccacgtggaaggccctacaccccaatctttctcccctactctggggagcttctcctgttggcccaacagtctgctcttgcttcccttacccaggagacccaccttgtgcctacctctctaagtccctaaaccagtgctttccaagcagaggtgccatgagccttacaactgtggttgcagatggaggcgcctccattaggatctcttccctcttccacccagagctctgcccccagtcagtggctgcagcatgggcccttttgtccaatcccagggcttgttccctaagtcaacctcagcacatgcccagctcagccatgtcccttcactcccctacaggctggaactgccaagtggtgcccacccaaggcggctgtctgccatgacaacaggagcgtgtgcgtcaggctggtcctgccgcactttctgggttttgttttccactcctcctcattgctcatcacatacttacctggggacaatgaaataggtctttgctattccctagaagtcaccaaaatgctttaggacattaagttgtcccagggtcacactatactaggccagggagtcaccccttcactaactcccatctccagtgataccctggtatgcactgaagcctacttaccaaaggggtaccatgtggaccagacagcagtcacctcgtgcc

SEQ ID NO: 3419 - DNA, 826 bp, Homo sapiens
caacgtgctgggcctgctgggagcttgctgcagccgcaacgtgtttccggcaagcgaagcaccaggggggcgctgtgggactgccttcttgtcctttcatccgcctgctgctgaattacaggaagtcctcccgccatctggctgccttcatcaacaagtttgtgcagttcatccataagtacattacctacaatgccccagcagccatctccttcctgcagaagcacgccgacccgctccacgacctgtccttcgacaacagtgacctggtgatgctgaaatccctccttgcagggctcagcctgcccagcagggacgacaggaccgaccgaggcctggacgaagcagggcgaggaggagagctcagccggctccttgcccctgggtcagcgtctccctgttcacccctctgaccgcggccgagatggccccctacatgaaacgggctttcccgggggccaaacggtggagggtgagtcaggccctgcttcacccacgccagatctgctggaggttctgagtgacatagacgagatgtcccggcggagacccgagatcctgagcttcttctcgaccaacctgcagcggctgatgagctcggccgaggagtgttgccgcaacctcgccttcagcctggccctgcgctccatgcagaacagccccagcattgcagccgctttcctgcccacgttcatgtactgcctgggcagccagggactttgaggtggtgcagacggccctccggaacctgcctgagtacgctctcctgtgccaagagcacgcggctgtgctgctccaccgggccttcctggtgggcatgtacggc

SEQ ID NO: 3420 - DNA, 672 bp, Homo sapiens
ctcaggtatctgacagtggtgtgattgcacttgttagtggaccttgtgcgaagaaattagaggagattcatatgggacattgtgtaaatctgactgatggggctgtcgaagctgtccttacttactgtcctcaaatacgtatattactcttccatggatgccccttgataacagatcattcccgagaagtgttggagcaattagtaggcccaaacaaactaaagcaagtgacatggactgtttattgatgcttttttgaagatgatcaatgctaggaaagcttatcaaaactactttcccaggaaaccatctatagagatttgcattctacttaatgttaacactatttttaattattttattgtcttaagttataactctcagagaattagctaagtcttggtatatacatggtttgtgctttactcttaaacatctttaaagtgctattattctatatctgttggatgagtcattatttttgaaatgataatcctagcatgaactctgatctatggtgttggattctgtttcttaaataactttaaaattaactgttttcccttgagatttccttctcctatgtaggtatttgagctattgttctaagtttacctgtaagtataaaccttgggagaatctaagtaaacatatttctaaaagcaaaaaaaa

SEQ ID NO: 3421 - DNA, 733 bp, Homo sapiens
tggtgagaagacaatatttgctttctctttttcctttcttccggatgagaggctaagccataatagaaagaatggagaattattgattgaccgtctttattctgtgggctctgattctccaatgggaataccaagggatggttttccatactggaacccaaaggtaaagacactcaaggacagacatttttggcagagcatagatgaaaatggcaagttccctggctttccttctgctcaactttcatgtctccctcctcttggtccagctgctcactccttgctcagctcagttttctgtgcttggaccctctgggcccatcctgggccatggtgggtgaagacgctgatctgccctgtcacctgttcccgaccatgagtgcagagaccatgggagctgaagtggggtaagttccagcctaaggcagggtgggtgaacgtgtattgcagatgggaaagggaagtgggaagacaggcagagttgcaccgtatcgagggagaacttcgattctgcgggatggcatcactgcagggaaggctgcttttccgaattacacaacgtcacagcctctgacagtggaaagtacttgttttatttccaagatggtgacttctatgaaaaagccctggtggagctgaaggttgcagcactgggttctgatcttcacgttgatgtgaagggttacaaggatggagggatccatctggagtgcaaggtccactggctggtacc

SEQ ID NO: 3422 - DNA, 400 bp, Homo sapiens
  misc_feature (1)...(400): n = a,t,c or g
tttgaanacnttnnnnnnnnnnnnnnnnnnnnnnnnnnnnnnnnnnnnnnnnnnnnnnnnnnnnnnnnnnnnnnnnnggcacgagagtaggtgctggtgatatcctcattttacagatggggagcctgaagctcagagaggaaatgacttgtgcaagtttatctggaaagtggtggggctgaggtccaaactcaggcactcttattccagagttctggctcataaccgctgtgtcccacagcccctctgctaaagcttgcctgcttctctccttttaagctccaaaagagagtttcttttggcttggttataatggctaactcactaatggcccaaatgctgcgctgagtaccttgaatatggttctgtaggggagccgctgaactgttttttttgtttg

SEQ ID NO: 3423 - DNA, 719 bp, Homo sapiens
tgttgtcctgttggtgaggaagggaaaggtttttcttgtagggaactggaaccagcccacaactgcacgcttgtgagctgtcatggaaacctgatccccaacagcttttgaggttgtttgtttgtttgtttgtttacctgtcttgggctttgttgcttttggcaaaaggtacttcaaacaagggagggcctggactgagggggaccaggtcttcttgctgacctcgtctacaaaggcaaaggaaggcaaaggaagctgtctcgggtgtttctgaacaacgtgactcatgaggggctttggctacctcttgcgttccccctagagatgtccaggccttacatttaatcggctttctctgcggtggggtagagaatggagctcccgccttgcggccagtgctaaaggtggagctgggggattttcctgggaataatttgagggctcttgaaagcccatgtgttccaaagcgtctttaactctgggatagcattggaagccgctgtcatgacaggacatggcactggatggctggcagagagccctggctgggagttagggagccctgggttggaatccagccccacctcttttatgccacaggtttggtcaagttctctcccgctcagggtagggctgtgaactccctcttacagctaagaacatgcagcttagtgaggacaagacccttctagagctttacccctaatccccccccagga

SEQ ID NO: 3424 - DNA, 1154 bp, Homo sapiens
ctgctggtcaatgccaacgagcagtccttctgagcgaaatcgtcggtaccatcaagctcaaggtgtttctgtcgggaatgccagagctgcggctgggcctcaatgaccgcgtgctcttcgagctcactggccgcagcaagaacaaatcagtagagctggaggatgtaaaattccaccagtgcgtgcggctctctcgctttgacaacgaccgcaccatctccttcatcccgcctgatggtgactttgagctcatgtcataccgcctcagcacccaggtcaagccactgatctggattgagtctgtcattgagaagttctcccacagccgcgtggagatcatggtcaaggccaaggggcagtttaagaaacagtcagtggccaacggtgtggagatatctgtgcctgtacccagcgatgccgactcccccagattcaagaccagtgtgggcagcgccaagtatgtgccggagagaaacgtcgtgatttggagtattaagtctttcccggggggcaaggagtacttgatgcgagcccactttggcctccccagtgtggaaaaggaagaggtggagggccggccccccatcggggtcaagtttgagatcccctacttcaccgtctctgggatccaggtccgatacatgaagatcattgagaaaagtggttaccaggccctgccctgggttcgctacatcacccagagtggcgattaccaacttcgtaccagctagaagggagaagagatgggggcttgaacacggggcttccttacagccccggatgcagattttagagggagggcaggtgcgggctgtgtgtgtctgtgtgagggcaggtcctggacttggcagtttcttgctcccagcacccgccccttcctcacctcttccttattccataggctgggagagaaactctctctgcttccctcgcccttggagctttccccatccccctgattttatatgaagaaatagaagaggggcttgaagtccccctcgcgagtgccttcttgcaattacctgccttagcgggtgttgcgggtccctccttcacagccgctgagcccagaggtcccgctggcccctcctctgaattttaggatgtcattaaaaagatgaatctaaaaaaaaaaaagaaaaaaagtcgacgcg

SEQ ID NO: 3425 - DNA, 2033 bp, Homo sapiens
catttatgattgatgtggaagatgcaatgaacatcactcgaaaactatggagtcgaactttcaactgttcagtcccttgcagtgacacagtgcctgtaattgctgtttctgtgttcattctctttctacctgttgtcttctaccttagtagctttcttcactcagagcaaaagaaacgcaaactcattctgcccaaacgtctcaagtccagtaccagttttgcaaatattcaggaaaattcaaactgagacctacaaaatggagaattgacatatcacgtgaatgaatggtggaagacacaacttggtttcagaaagaagataaactgtgatttgacaagtcaagctcttaagaaatacaaggacttcagattcatttttaaataagaattttccgattttttcctttcctttttccacttcctttcctaacagatttgggataatttttaatttccaggcatagcaatgttatctattttaatgtgtatttgtcacaataacagaacatgcaagaacaatcattattttattttataggcatttgattactattctagacttctggtatcttcttactaacataaatatctcaagtagaaaagtttttgaaaactaacatttaaaaattaatcagttacagtaaagactttgaaaaagaaatgtacttgttaggaagtagcttaattaccccccattgcagtattattgttatatatatagttaatatgttgtacatcacaataatatataattcagtctctagtttccctagagtcatttttgaaaccactgattgcaaacctccctgacaatttttaaaagtagtaagccacattacatttatctttgtaaaaagatttatggtaactggtttcttacttgacttttataaatagtattttacatcttatttttgcctttatttcataagtaatttaaaaatcactggattgctttattatattcagggcaatatggattatttttataccaaggatttgcatcgtgaattacattaagttatttggcaatttataatttattactactttaaatcaaatgtagcattatcacactgtatttaaattgtcattttttaaaggaatattttcttcttaagatatatagaggattttggagaagagagacaggaggggtaaaaccagcttaaggttcagcgagcagaaagggacctgagaggatgctcactgtaagactgttggacagtggtgtgtattgaggggatgaatcggaacgatagtctcatgcagaaaatagtgagattaagatcatccttattgtttctaaattatttcaatcagatgaaagtgatacgattgaaatgaaatcacatagttcgtgctcagaaattctattttggtatgtttgtattagcctttagaaaaaacactccgtttcagaattgttcacagttttatttcttaggtttttagagttcaggatttcatttattaatttcttcttgcttttttggtggaaataggctttgttgtaaacattaagaatataaaatctcctctatatagaaacaagaattttgttaaaaagagaatttgaatccctccctatactataaaatgctctatagggagacaaagtgtttcttttttcttttatgtttactgtttatgtggagtgaaatataaggctcttggatgtataacatactcaaaagctgttacactttctctgatctgctgtgatccactgaaaatgtgctggggtttgttctgctgtcactgtttatgctgctggaacttagcactgtcttgatttgtagcatatgattgagagccatttgcaagcaatcttcattaatgcagataaaacaagtttacatgtgcagagttagggaaaatgacatgttccaattctgtaagtggtgactttttgagcacctttcagtattatgtatttgtaaaaaccattgttttttggatataaagctaataagcactttaaaaagggaaaagggcagcctttactattttttctggttgagtccattgc

SEQ ID NO: 3426 - DNA, 2285 bp, Homo sapiens
  misc_feature (1)...(2285): n = a,t,c or g
aagaaagggaagtagggcagtgcatgactggccttaggttttttctttccaagtttattttcttgtgcttcagctactagaaaggtttaattcagggataagtcccaattgagtagttcaagatgatcagagactttgctattttcccctaagttctattccataatctaaaatgttctgtttctagtgccagttcttatgctaagcaggttacgtggaatatatcacttaactcaaaaagccctgttaagccaggactgttatctccatttaacagatgagaaaatggaggtttatgggtctgttctcacactgctacggagggaaatacccccaaactggggtaattattataaagggaaagagggttttaatgggactcagttccgcattgctggtgaggcctcaggacacttatacaatcatggcagaaaaaggagaagcaggcacctttttcacagggcggcaggatgaaaatgactgccagcagtggaaatgccagacgcttataaaaccttcagatctcatgagaccggctcactatcacaggaacagcatggaggaaaccgcccccatgatccagttacctccacctggtcccacccttgacacgtggggattgcnnnnnnnnnnnnnnnnnnnnnnnnnnnnnnnnnnnnnnnnnnnnnnnnngcccagatcaagtagtgacagagtagggatttgaatacaggttatagtcactattgtgttatttcttgacttttgtactattaaaaaactgtagccagtgaggcttctacccttagtacccagaactccttttaggtatagcaattgtttttaggtaaatttatattgagtttaacacctgtgtgattaaagacaactttccaatgtagtatctgtagccatgtcccctaatggctattagtgttcatggttagtgtgttgaagatgagccaggtacataacgcggcacattttctgcaggtcagcagtaaggtttcaaggtacagttatggaggaaagaagaaaatgacacattgataacacaggtctttattcccttttgaatgagacagtttttaaaagttgatttataaatacaaaaatacattctccaaagatagtatttccaaactgttatatacccatctactcccaacatggatataagttttttaaaaaaatagttgtatataacatacatatctgccccagtgttacttcacaggcctatgccctacgggaactccactctcccagccccactttttctcttggttctcccacattcttattctcccacatccctacccacgtttgagctggaaaggatgtccctaccctagggcatgaggtatattttattctgggcacccacacatttgccccatagataacaatacacgtgatgatgtcactagtactacctttctagtatttacatacttaaaagtagtaactagaacagttatcactggaactaagaattttccccacagaggtggaccggcccaagaactaaaatttcaggaaacctgtttaatttcttttgtatctttgaaaagttagttttatatctaagatttcttcacataggttataattcatctgtatgttccaagccttttaatgtaaaaaatataatagtgcccttccagttttaaacatagtttcacatgttctcagaactgctaaattcagtgctaccagtaaggcttaataagtagttcattgaccctgtaagataggagcactcagctctgtcacaatttgttgttaaacacatcactcaatgtaagtataaaaatatttattgataaaaaataaacttataattcagcaacttgaagttccaggagcatttctgttgttcctatgtcagtaagcccttgatttttcacattaaggagggaaagctaagcatgttacttgaagtaattttttcccagtcaccatcatgttgatcctgtgcacaacgatatatgcgaggaactcttaagcttagtctttgattctgacagaggcattctatggactgctgcattgaaaagggcttgctgttttcatccaacacctctgtgttgtgtggtcttgcttcatattaaatgcttgagatttactctcaacttcacatgtttgtgcatcactttctttgcagtaactttctgccccaactgtatccataatattgcttccacaattctgcgtattatagccactatccatctgaatgttactgctttcacaaggaatgacactgctttcagcaagaggtgacatgcacatatgagagtttt

SEQ ID NO: 3427 - DNA, 526 bp, Homo sapiens
  misc_feature (1)...(526): n = a,t,c or g
gagtttctcccacagatttagcatctattgatgatacttacctgaaccaatctttgctatcattgtcagtttttcgttcagactttttaaaggcacagctaaatatggaagtgattggcagcatgtgatgccactctaacaataagccttccaaacttcttccctcttcagtacccttcctcaggtatgcacaatttcacttcttggctattctcatctttttttgcctggccctgttacttacctctgggctctttccattttctttgatacctgaggatttattatttgatgttttgattcttcctgaatagacagagtgatttaaaaagaaatacatccaatcatttcattcctgtttctttatattcattgaatggctttttgctgctcttaggaaacaggaaaaggagctgcttcaacaaggcctccaagactgtagtgatctannnnnnnnnnnnnnnnnnnnnnnnnnnnnnnnnnnnnnnnnnnnnnnnnnacaagtggacatgaggcagggatcaaa

SEQ ID NO: 3428 - DNA, 785 bp, Homo sapiens
tttttttttttaatcaagaaatagttgaaaaggatgggagtgaaggcactttaagcccacagatgccagcagaggtgggacatgacaagtgaggctggggggctggcccataactggtccctcccaagtcagcttggacaccacacagcacttcgtcgcgcctcggctggcttagcacatggacaaggcattgccgctggagtcccaccttcttagagactcctgaaaaggagctccacgccaccccccacacctcgccctgtgccactcttccacttgtcctgtccactctggacatagagccttcacggtaaaccagtaataggacgtcaactactttctggaattttgtgagcccaggtgagtgaggccgttctaatttcaacatctacagaagttatcaagtttcaggtttaataacctagcaagttatcagacctgaaagcaaggggcctggcaacaaactctcaacctttcaggcaagtcagacagaagtgtgggcaccccatacctgctactcgcatctgcagcaagggcagactcgtgggactgaaccctcatccctgtggagtctgtgctaactccaggtggtgagtgtcagaactgcactgaattgtaaggcccccagttggtgtctggagagttagagaactggttgttggtatggcaaaaccccacacatttggcgtcagaaatgttatgagtagcaacagttcagagtcctttatgtgcgtttacaaaagcaataatttatggcaaggacttatcagaactactctcgtgcc

SEQ ID NO: 3429 - DNA, 353 bp, Homo sapiens
ggtttagtctttaacttctccttattaaccagcttctttcccataatgtatagctttagtcggatctcaagcctcgtttccaacctatttcacccttccttgcctatcaagctctggttattctttcttccacacacatgccctgagtaactattctgtgcactgtcgccacccctttacatttccttttactccccagatactactaaatggcttccaccaccgttgcctgacttaagcacgtctcagaaaggtcccttttgaccccctcactctctttttggacctccatactgctaaatctctgacttgaaggtcctttcctggcttctgtgaattcctggcttttttcc

SEQ ID NO: 3430 - DNA, 402 bp, Homo sapiens
  misc_feature (1)...(402): n = a,t,c or g
cgctggaccctcggacagacagcaagagagagacaagccctgagnctgacttctagcactcctgagtttgagccctatgagcagtggaacctagggaccaccaaggatccagatataattctttcctcagtaatagaaaaaagaatctgggatctaagaagatacctactcattttctaagtgactggccatgtcattgtcccacttataccgggatggggaaggccgcattgatgatgatgatgacgagcgggagaactttgagatcactgactgggatctccagaatgagttcaaccccaaccgacagcgccacttggcaggaccaaggaagaatccacctacggggtgtgggcagagcgagactcggatgatgagaggcccagctttggaggcaaacgg

SEQ ID NO: 3431 - DNA, 1477 bp, Homo sapiens
  misc_feature (1)...(1477): n = a,t,c or g
ctaaattgcccggccgcgtccgacaattttaaatccgactcacctatagggcaaaacttttttctttttattttttttttttcagagtgaaaaagaccctgtatttgatttacaatgaacaagatttacaaaaagggggtggggtggtctttgaaactgccttcaattccccccggactgggtggggctctagggccagcctgtctgacagaccaggaccccaggatgtctgggcccccgaacgttaggactttgacctacgtctcaantttgaacctttgaacgtggggcccagccagccgtgagtccacccagagtgccggcacccttggggaggccggtgaggtcaggaaggcatcgtaccgctttttctcctcctcccatctcgtggtggacagacagacataggatctgggaacttgccctggggcgcacaggccctcagatcccccagggggcccaacctagggcatggaggcggctgctggtgcgtgggcggaggcggaggccagctgcccccagcgtggcagcgtaaggcacattttcaaatcactcgagactcgacagtgaacacccgatgctggttctgcggccggagggagctggggctggggctggtgctggtgcggtgcccggcggtattgctcagaggaagatgctacagtctagacgctgggcgggttccggctgcacccactccggcttggggcgcgttccaggggagggtgggggcctcagccacagccactcggcctcctcccctgaggggctctcaggtacctcaggtacctatgtcccaaggcagcactggagattgtaggtcagaggtcagtgaccttgttctccagtgcagcggcaatctgctgcaggcggaaggccagctgcatcttctgggcggcaggatcctcctccaaggcattgatgatctcgtcatagtacttctgcgtgtattggtagagctggtggagtgccacgagggtgttcaaggagtccgtgtgccgcccgggaaatctctgccaggtgtgtgttcatgtcctggtcgctgacctgcaccatctgccggatccccttgtagtaatcctccaccatcttcttgtaggtggagatctccttggcgtacagcagcttgttgctgggagaatcgcggctcagcttatgctccgtgcgcgtgcaggcatccatgaaggtctgcgcgatgactgacagcgaggcgtccaccacctcgtggacatgcacgtcaaagatgaagtgggggttcttgaggatgttcacccagaaccggagcggtaaactgttcgtcttccagatgtggatggtgtcttcatcctggatgttgtgcttctctgcctgctcgtccaggaagtcgaagaagtacttgactgcaggtggcaccgcgtgcccaggcgccagcacgctctggaagaagttgtccacaaactgctgcagtgtgcccttgacttgagagcagccgcgtcag

SEQ ID NO: 3432 - DNA, 750 bp, Homo sapiens
  misc_feature (1)...(750): n = a,t,c or g
gcggttggtgcgcacaggcagcgctgagctgcgtgcagagatcaccggcccggacggcacgcgccttccggtgccagtggtggaccacaagaatggcacatatgagctagtgtacacagcgcgcacggaaggcgagctgctcctctcggtgctgctctacggacagccagtgcgcggcagccccttccgcgtgcgtgccctgcgtccgggggacctgccaccttccccggacgatgtgaagcgccgtgtcaagtcccctggcggccccggcagccatgtgcgccagaaggcagtgcgtaggcccagctccatgtacagcacaggcggcaaacgaaaggacaacccaattgaggatgagctcgtcttccgtgttggcagtcgtggaagggagaaaggtgaattcaccaatttacaaggtgtgtccgcagccagcagcggccgcatcgtggtagcagacagcaacaaccagtgtattcaggttttctccaatgagggccagttcaagttccgttttggggtccgaggacgctcacctgggcagctgcagcgccccacaggtgtggcagtggacaccaatggagacataattgtggcatactatgacaaccgttgggtcagcatcttctcccctgagggcaanttcaagaccaagattgnagctggncgctcatggnccccanggagtggccgtacaccngattggacanatcnttgtgttcacatcntgcttgnnnctgctntatctttccg

SEQ ID NO: 3433 - DNA, 564 bp, Homo sapiens
cgcggcccgcgtcgacggtgacccttcccccccaccaccaccaatgtcagccctggtccccgacactcccccggacacccctcctgccatgaagaatgccactagctctaagcagctcccactggaaccagagagcccctcagggcaggtcgggcctaggccagcccccccgcaggaagagtccccttcctctgaagcaaagagcagaggacccaccccaccagccatgggcccacgggatgccagacctcctcgaaggagcagccagccatctccaacagcagtgccagcctccgacagccctcccaccaagcaagaggtgaagaaggcaggagagagacacaagctggcaaaggagcggcgagaagagcgtgccaagtacctggcggccaaggaaggcagtgtggctgggaaggaggagaaaggccaaggtgctgcgggaggaagcaagctccatggagcgccgctgccggttttagggagcaaacgtcttaaagccgagcaacgccgttcaagccttggaggaacggctagcggaagaagtttgtggaaaacaaggggcgt

SEQ ID NO: 3434 - DNA, 373 bp, Homo sapiens
gagccagcacctcagcatagagcctgagacccttccatgtgcctcgctccttccagtttcatccctgcagccctttgctccagccaagtcacctggtccctctgccacgtgtgccttctctgctcctagcttgtcccttctcacccttttggcatctggtgactcctcattttggggacctgggcctatccagatgtcagcaggaggctccatagtcatgtgcagctaagggctctgctgcgctttgctttaggtctgtgacagctccagacacttgaggtcattgtgtatttgtgcctttctccactggggcacttttgcttggggagggagcatgtggattacaggcagccttcatttgacttaggttgga

SEQ ID NO: 3435 - DNA, 1339 bp, Homo sapiens
ttttttttttttttcaccaaaacaatttttatttccagtgtttaattgggtatgcacacaggcatgacacaggtttggattcattaagtcctcatgcagaattatattcttctcgataaagaagccagttccatccaggatccactatctacacacctatgttacaacattatatcaaatctggtatctgaagaaaagatacacatttaatatgttcatttaagttacgtattttacagaaagattaaaaattcattcacacaaaactcaaaaactgtattaaaaagtttgaatataaaactcagatccacctggaatgactaaagaatggaagttctgtatccacctgtgttaaaactggtaaatgtaatgatatctgttaccaataaaacgcattcgtttattcaatgtaagtaagttatctaattttaacaatatggcaccctaaaaaccaactgtatttttatgatgaggcacttttgttagtgatgaaaccaaaagaacaaatttgctgcacactgatgccagcgattttcttcagtgattttgggtatatgctatgtagtaagttgcaacaaataccttgctcatttgtatacaactatccgatatattttaaaatatatatatatatgtacttctggctgtagtaatgcactgtaaagctatttcacagtgcaaaatgatgaaaccagcccaaatgaaggctgcataataacaattctgatacaagaaaatattgacagagttactggaacgtgtaacagtagtttttttacttgctagagtggacatacccccagtttaaagacagggatgaaactctgctttactgcctggggtttcagacagtttatgaggttgggcattcgctgcagaactagcatttttgctcacgttctggaagctttctccgtttatttggtcaggtgactgtggtggtatggaaagaaggggcctgtttgttgaagccaaggtgctggaagaactgcctgtgttgcaatgaagagacaaaggtgtgtcggtcgtggctatttctcgtgtgcttgggttctctgtctggggatctccgatttctcctctgctaaggtcagaggtactggtgcgtaggcgttccctggccagccagtctgagatggaaaggtcctgggctgagcattttggttttaaccggtttacagctgaaagttcagattctctctccccgctctgctcatgcactttccaaaaattcaaaacgctgatttcggtagcatctctgtgccctcctagtgtaatgtctgcgccggatgcttttccttttagcagtctcggcattcactttgtgattccctactcc

SEQ ID NO: 3436 - DNA, 1049 bp, Homo sapiens
ttttttttttccagtagtaaacgtctttattcttccgtgacgtcgcacacccaagccacctcccgcggactctccgctggcagtcccacccagtgagggtagaggcggtggagggcccacccaaggccggctcttccaagcaccacaaatcctctcctcgcccaggtccctttccccctttctggccttcgtggggacaccttcagagtccccaaggaaggctgtgctgatagcctcactcaacccagcttttcaaagttctgcatggaggcaaatgggcaagcccagagattatgggttagagaccaaagacaagcggtcgttacccctaatatccaaggggatggggacgggagggggctttttgtaaaaatgcccctgaggtatagaaccggcaggcaggcaggctcggaacaaaacaccctgaaccagccacgaagactgctgctcccagactcctttctgcttcagtggtagatgaggccagggcagagggttttcatcatgtagctatgaaaggaagcccccaacccggtcaagtcaggcaatgaggggctgtctgaagcacaactggaacccctcacaaaggccatgtctgtccgaaacttcatgctggtgggtggctggcggcggagcagtgactccgtctggtcttggggtagaggctcatcatagatggtggagatgagccccaagccatttctacggggcctcttcagttgcccaaatggctgtagcttctctccatggtaccccaatccacgcttgcatctggggtgttggccatcactatccagggcctcaggcacccctgagcacctgcagcccaggccctggccctcagcccagccctgccgctccatcaccttccgcccaatgcccttggtgtggcgctcaaaggtgcccacctggcgttcgatcacagagccatcttcctgtccatctcggagtctctgttccagacgcatttggacagagtctcgggcatccttgtctccaccatctctgtcatagtacacactcatgtccacatcccagtcatcggctgc

SEQ ID NO: 3437 - DNA, 646 bp, Homo sapiens
gctaagaaggatacagtggctagaagtcgtcctgtcgtcctgcctcacagtaacatcgttaccgaattctcagcaggtgaaccaaatgaaatggtcaactgaaagccaaccaggagggtgtctggctgttttggggaaactattcctgaccttattttgactaaaaagttgcctgctgtaccagcaaaaaatcaccatgtaccaacctatccaaacttatccatggatgaatctatccagaagacgggagttccgatgcttgtcttgctctgaatgtctgcttgtcacctgcttagggttatcgactgtgattctgggactcattgttgttctacaggacccctctgactctgtggttttctctactggattaacaatgatagccataggtgctttttttgttgtcctcactggagtgacagccctgtgtacggttacagtcgacgagaacttgcagaaaaccacgaggctaagactaggagtgatacgaaaaagcggaagtctccaaggaactacagagccttccatgactcactcaataatcgctagcacctcgctgtagttgtacattgaaccctggcatcttcgtctttggaactaagtctcctgagcattgtttttaaatagaaataaaatctggctttta

SEQ ID NO: 3438 - DNA, 967 bp, Homo sapiens
  misc_feature (1)...(967): n = a,t,c or g
taacaaaccttttttttttttttattggagataaaaacagcgaagtcccacataccataccctacaagacacaaggtgcgcagacgagccttggctatgtaccggcgctgcaggaagaggctgtccgccgggcctgggctgctccagctacgcggggaggcggccccattgcaaagtgcagtttctccgcggaggtggcggtgggtcagtggcagagggccatggtttccatgttaaggaagcggacgtgcatcttggtctcaatgtcgatcccctgccagatcttcaggaagtcctcgaaggtgatcccctcgtacacctgatcaggctccatctgccccatgcacacgctggccgcctccatcatggccccgtcggcgatggagcgagcggactccttctcgatgtgagggtttcccgacagcagctcctcgaccactttacatttcgatattcttccagagtgatgcggccgtcgctgtccgagtcgtacatgtggaacagaaatctcagcttctccttccgggacagctccacctgttcctcgtccatggtggtgtcgatgggccggaagtaggacatgatggtcaggaagtcctcgaaattgatctcatcagccaggccactgggtcccttgcgcaggttcctgttgtcgaagaaggcacgaacaattttggatcggatggggttgagctccaggtccgggacattgttgaagttctccttgcgaatggtaggctgatctccactcagctgcttaaatctccgatggagctgctcgatctaatccgatgagaagccggtcttgccctcagagtcccgcacctcctcagacgcggagtggcagcgcccatggtgccgcggcggggnccccggggcgcgcgtccctctcaggccccgcactggcttcgntgcgcagcggcgggactggcctcgggtccggcctcgggtcgggacgccggcgaag

SEQ ID NO: 3439 - DNA, 557 bp, Homo sapiens
  misc_feature (1)...(557): n = a,t,c or g
cgtnnnnggncnnncnngnaangnannggnnanngantngnacngggcnagnnatgantttganctaatccttnagacacatacgaannnnnnnnnnnnnnnnnnnnnnnnnnnnnnnnnnnnnnnnnnnnnnnggcacgaggctgtattaagtaacctttttaattcctattgtagaattaaccacaatgaacgggtggaattcctgggtgatgctgttgttgaatttctgaccaggtaattaggcttttttgttttttacaattcctcaataattacattttataggtaacatacttattacattgctttctttgtaattagccaaataaggcattgatacaccgtgtattttatctcttttgtagagcttagaagccacatgtctgtggcccttgccctgataactggcactcactgatgctgtaatgagtgagattacaagatgaaaggctggngtctctgtcctgtcaagnatatggtaaagttgcttacagccacaagagatcagcttgccttggtctagatgcttcagagcttatattcaatttggaaaa

SEQ ID NO: 3440 - DNA, 412 bp, Homo sapiens
  misc_feature (1)...(412): n = a,t,c or g
ctcacgtagttatcttttttctttttttgtagtgagaacatttaagaacatttaacaattctttgcattttcaaattaaacaaaaaaaaatcagtagtaaagatgctataggaccagatggagttgcccctttataacagagaatattttagctttcataaagttaagcaaaatctaatgatagtcaaatccttcctggtttgaactacacaaatactaattaaaacaacagaaactgcctttagaaattttgcttcccatattgatcctttatattcctaaatttattacaattttaactatgagatcatgaaggtaaattgtttcataaaactaaaaccaatgtatacacataataacttgagtatttcctggtttgtagcgaccatcgatagcagggtatcncaaaatg

SEQ ID NO: 3441 - DNA, 1677 bp, Homo sapiens
ggcgaaggagatcagcaggacgctgcgcacaacatgggcaaccacctgccgctcctgcctgcagagagtgaggaagaagatgaaatggaagttgaagaccaggatagtaaagaagccaaaaaaccaaacatcataaattttgacaccagtctgccgacatcacatacatacctaggtgctgatatggaagaatttcatggcaggactttgcatgatgacgacagctgtcaggtgattccagttcttccacaagtgatgatgatcctgattcccggacagacattacctcttcagctttttcaccctcaagaagtcagtatgggtgcgggattttatttcaggaaggataggaacctttgctgttctttgcatacagcaatgtacaggaaagggaagcacagtttgggaacaacagcagaggatatatgcctatcgagaagaacaggattttggaattgagatagtgaaagtgaaagcaattggaagacaaaggttcaaagtccttgagctaagaacacagtcagatggaatccagccaagctaaagtgcaaattcttcccgaatgtgtgttgccttcaaccatgtctgcagttcaattagaatccctcaataagtgccagatatttccttcaaaacctgtctcaagagaagaccaatgttcatataaatggtggcagaaataccagaagagaaagtttcattgtgcaaatctaacttcatggcctcgctggctgtattccttatatgatgctgagaccttaatggacagaatcaagaaacagctacgtgaatgggatgaaaatctaaaagatgattctcttccttcaaatccaatagatttttcttacagagtagctgcttgtcttcctattgatgatgtattgagaattcagctccttaaaattggcagtgctatccagcgacttcgctgtgaattagacattatgaataaatgtacttccctttgctgtaaacaatgtcaagaaacagaaataacaaccaaaaatgaaatattcagtttatccttatgtgggccgatggcagcttatgtgaatcctcatggatatgtgcatgagacacttactgtgtataaggcttgcaacttgaatctgataggccggccttctacagaacacagctggtttcctgggtatgcctggactgttgcccagtgtaagatctgtgcaagcccatattggatggaagtttacggccaccaaaaaagacatgtcacctcaaaaattttggggcttaacgcgatctgctctgttgcccacgatcccagacactgaagatgaaataagtccagacaaagtaatactttgcttgtaaacagatgtgatagagataaagttagttatctaacaaattggttatattctaagatctgctttggaaattattgcctctgatacatacctaagtaaacataacattaatacctaagtaaacataacattacttggagggttgcagtttctaagtgaaactgtatttgaaacttttaagtatactttaggaaacaagcatgaacggcagtctagaataccagaaacatctacttgggtagcttggtgccattatcctgtggaatctgatatgtctggtagcatgtcattgatgggacatgaagacatctttggaaatgatgagattatttcctgtgttaaaaaaaaa

SEQ ID NO: 3442 - DNA, 307 bp, Homo sapiens
gagtttttctcctagaaatcatttgagggtatttgctttaagttgattggaaaaatatggcgtaactgtttgcacaaacttgggacaaatgatattgggataacgatctaccagaatagggacattttacccacagtttctgggagaaaaaccgaggaatttctatcatgaccagccttcaggcctcctgaaatatatctctcacagtgtcctattctcatgctgaggagcctgaagtccctgtgtgaggattagacagtggattgttatgtgtgtaggagaaccagcttaatatgtctgtccatgt

SEQ ID NO: 3443 - DNA, 276 bp, Homo sapiens
agagaagagccagcaacttctctttggaaatcaaatgagaaatttttatggaagaaatttagcccaagtgatacagatgaaaacgcaaccaatacacagagtaccacataagcatataaatgaattactgcaccagtaaactgctgccatcactgtttacggcactggattccacactgattctattatcttgaacacagttgttgacatatatttttattaaattattgctttaggattttttgaagtctaaagtattgtcatggaaaaaaaaaa

SEQ ID NO: 3444 - DNA, 373 bp, Homo sapiens
cttctttttagatcctttaagaacaggaaagataaaaattcaagatattttagcatgcagcttcctagatgatttattggagctaagggatgaggaactgtccaaggagagtcaagaaacaaattggttttctgctccttctgccctaagagtttatggactataagacctacttggactttgtccttgcattagaaaacagaaaggaacctgcagctctacaatatattttcaaactgcttgatattgagatcaaaggatacctgaatgtcttttcacttaattatttctttagggccatacaggaactaatgaaaatccatggacaagatcctgtttcatttcaagatgtcaaggatgaaatctttgacat

SEQ ID NO: 3445 - DNA, 305 bp, Homo sapiens
  misc_feature (1)...(305): n = a,t,c or g
tttctaaaaaggtctccagaaactttccgattctaatctcagccaacgttggcagccatgtntggaagggaaaaccatttatagtgtatcaggaagaacactggattcgaagtcaggagttccagaattcaaatcctggtttggctattgactgttaacttcagtttgcctctttgaggtttagttttcacatttataaaatgagaagataatgttttcagcattgtaaggactgtgtaagaaaatgtgggcaactgtttgaaaccatcaacaccctgtgtaattaatggatgcattatttcagt

SEQ ID NO: 3446 - DNA, 463 bp, Homo sapiens
  misc_feature (1)...(463): n = a,t,c or g
ttgangnacgaganctntntnggnaatancccnnnaannttnactattcnnnnnnnnnnnnnnnnnnnnnnnnnnnnnnnnnnnggcacgaggcgcgtctccccattgcacagagggggcaactgaggcgaacgcaggcctcaaggtcgcgccgccagtcaaggtcgactggggtcccgcgcccggaccctacgcctccgcgagcggaaatggggatggcgcgtccccgagacctaggagcagccttgcgtccgcattccgcgcgggcaaacaccacgtcgcgtcctaccaggcaatgtcaggaaggaggttgcctttgagcatcgctgttttctctaacgaggtgggacaggagcagtctccggttttgagagattatgaaatgctttcaaaatgctctactttccgaaaatatcttacactctgcttgaatcttcttcaggaggaagccattaaaacagga

SEQ ID NO: 3447 - DNA, 3149 bp, Homo sapiens
  misc_feature (1)...(3149): n = a,t,c or g
gtacaccagcctggatgttttttctaaaatgtttacccgggaaaagctggggtttgtttgtgaggagaaagagtactgtggaaaacctctgcttgagtaccatgtggcccaggcctatgtggatggctactccgtgctgtgcggcttcaccagcggttgggattggcccagcttggagtgcttgtgtggtccaacctcagtctggccccatagtgacttttgccccatgattctgcttcactgttggaatcctctttgaagttccccctctctttgctaaagcagtgaaggaagagaacagagacaaactctttggactgtgaaagagaaggtagagaattccaggcaacagtctgaccaagggtgtaaaccagtttattatatatatatttttcctttgaattaaaacctagagtgttgtnnnnnnnnnnnnnnnnnnnnnnnnnnnnnnnnnnnnccctttttctccttaggccaagtttagcttattcttatctttccacccaaacacctacacaacgtttaggcttcctgtaaggtttgaatgagacagatgtactctgaaggctggtggtaaatgtgtttgatgaccagactcttcatacagtcggcttgggccactttaaaggacaaaagccagagctcagctttatccctctcccagtgctgggagccaaaaactgttgacggttttttgtgcagctcaagaaaactttgaaaagaacatgctttaactgaagcattggactctgcagctttctgtgtaaggcccgtgtactcccactgggcagggtgaggaccaaaaatctgaaactcttatgaatctgacatattatatggaaattatatcttgtgaccgtcttcaagtgcatggacttaaaattcatgagagactaaatgtgagggagaggtggatttaaagaggccagaccttaaccaaagatgctgagatacagcattctgtcccccctgccctagaaactccataaatgctgtcacaaccctatcattgctgatgctttcatgcatgtcagcagtccaggaggatgctttttgtctctctttgcctccactttacaaaagataatatgatagaggcaacgtttataacagtcacatttaattataatgtacatcaaaggcagaatttcagaatggtttcttaaatttccttgggaacgggtttccacatatcagttatagacaaaggccatgggactatgctaaaccaataaaaccttattagcaaatctttagattctgacttagccagagcatctgagtgttcaagtacagttttacagtggctaaggttgtctcttgatcttttttctccgttgtgtgatcacagatgctatttctgttttattggtgattatacgagacttctaatacataaatgaacgggtattggtgcctctttattttaaaaaatttgaagaaaagagccacctcatattcatagggtgtgtattttttgagtgtgagcatttaattgaaaataagaaagctatgaagtaaatgttaacttctctgtagcagctaatgcatagagacactaaaacccacaccacattttgtgggaaatgaggatcctgatcctcttttgtcctctccaggtagtctcgcaggttatgcagcttaagttcagtcttctttatgctgcgattgatttccacctcagtggcttagcctttgggacagtggatactggcaacagcccaagaactcttgggttattccgcacaagctgctggtagactacattagccctctggttttccagctcaacctctgataaagtggactgagagccacgctgctcagtctgtttcgtcagccgactcaggttattttcagggaaggcatggaggcatagtttggttagtttcatcactaggatgtataaggtgacgacacaaaccaaatacctttctttcatcacttaactatacgtactttatctctggtaacactagaatgctgtggtcttgagggaatgttagcaaggaacacatagaagatttggtgtttcataagcctgtctaggtgtggcaggttttgtgtggtacactgatgtttaccataagcaggtacaagcttcatgaaccgttcttaatgaactataattgaatagataccaaaaatagaatgacaaatgtattttaatagcagatgaggcagttttaggatgaattttccactgttgattttacttcaagacatagcaagagaaacaaaattttgttttcaagacatttccactgcagtttcaagctgtagtgggcatatgcttcatttacttccaaagagggcaaaagcagctggaattgggcttacagcacatgctttgtttcatgttatgggtgaggacctacatacactcttactttaggcagtcacttaaccttctccagcaaggcagttgtggggttcactaggatttagtgcctgatcttttttttgggaaggggcgggaatgaatgtgttggggctgggagggaagcagaagaaaatgggagtgtgagtgagtgtgcatgtgtctgaagttcaccattgcccccacctgcacctagcaaggaacaggtgtttgatgtattttgctcatgactgcagtatgcatgtatttttttccttctctgtgttttctaaacttacactaaaggattcatcaaatcatcttgttcagatggctcaggattgtatttattttgcttaccccgtgctcttgggttctatagtatttctataattatgtaacgagaatagtgttgcactgtaatctatcatatagagctatatgtatggaaaattttgatcaattttttaagaaatgtatcctgtttgcaaaggcacagtaaagttgcatcttatagactataggcaataaagctaacaataaaccttatttaacacaaaccacatccatatcctctgttcatttgattttggaaaaagtagcatatccagtagtttcagggaattcattttaactttaagaattctgatatatttaatttataaatttcggactgatataatagagttttggaaaactataagaaatgctttgttaatgtgtgtattcctatgtaaaacacatggcttttcctgtgtatatttttaaaaattaaagaaatgcacattta

SEQ ID NO: 3448 - DNA, 2135 bp, Homo sapiens
ggacggggtccgactcagaaatggcggcctccatgttctacggcaggctagtggccgtggccacccttcggaaccaccggcctcggacggcccagcgggctgctgctcaggttctgggaagttctggattgtttaataaccatggactccaagtacagcagcaacagcaaaggaatctctcactacatgaatacatgagtatggaattattgcaagaagctggtgtctccgttcccaaaggatatgtggcaaagtcaccagatgaagcttatgcaattgccaaaaaattaggttcaaaagatgtcgtgataaaggcacaggttttagctggtggtagaggaaaaggaacatttgaaagtggcctcaaaggaggagtgaagatagttttctctccagaagaagcaaaagctgtttcttcacaaatgattgggaaaaaattgtttaccaagcaaacgggagaaaagggcagaatatgcaatcaagtattggtctgtgagcgaaaatatcccaggagagaatactactttgcaataacaatggaaaggtcatttcaaggtcctgtattaataggaagttcacatggtggtgttcaacatttgaagatgttgctgctgagactcctgaagcaataattaaagaacctattgatattgaagaaggcatcaaaaaggaacaagctctccagcttgcacagaagatgggatttccacctaatattgtggaatcagcagcagaaaacatggtcaagctttacagcccttttcttgaaatacgatgcaaccatgatagaaataaatccaatggtggaagattcagatggagctgtattgtgtatggatgcaaagatcaattttgactctaattcagcctatcgccaaaacaaaatctttgatctacaggactggacccaggaagatgaaagggacaaagatgctgctaaggcaaatctcaactacattggcctcgatggaaatataggctgcctagtaaatggtgctggtttggctatggccacaatggatataataaaacttcatggagggactccagccaacttccttgatgttggtggtggtgctacagtccatcaagtaacagaagcatttaagcttatcacttcagataaaaaggtactggctattctggtcaacatttttggaggaatcatgcgctgtgatgttattgcacagggtatagtcatggcagtaaaagacttggaaattaaaatacctgttgtggtacggttacaaggtacacgagtcgatgatgctaaggcactgatagcggacagtggacttaaaatacttgcttgtgatgacttggatgaagctgctagaatggttgtaaagctctctgaaatagtgaccttagcgaagcaagcacatgtggatgtgaaatttcagttgccaatatgatctgaaaacccagtggatggctgaaggtgttaaatgtgctataatcattaagaatactgtgttctgtgttattgttctttttctttttagtgtgtggagattgtaattgccatctaggcacacaaacatttaaaaggatttggactgcatttaattgtaccattcagaatggactgtttgtacgaagcatgtataatgcagttatcttctttctttcgtcgcagccagtcttttttgcttctcctacaaaacgtaacttgcaatttgccagtttattattgttggatacaaagttcttcattgataagagtcctataaataagataaatacgaagataaagctttattctttagtgttaaaatacagtatatctaataactagcctcattagtagagcagtatattaaaacaatgttttatgtaaaaagtgtttatcttcagcaccaaatacatgataaatgtatcaatcactatttataaacagagctttcaaacactcctcagaatattcttctaagtattttgatgaagtaactttgtaattatttgaacattgttttaatcattaggaaacactgattaactgcaagtcttcatgattctgtcatattaagaaacacctgtaggtttgcttcaaataaaggcatatataccaaggacttacagacaaaattaagaatgtcaatttaagttaataaaaatctcccaatatgaaaaaa

SEQ ID NO: 3449 - DNA, 1348 bp, Homo sapiens
gcacgaggaaaggttgtgatggcggctatagctgcatccgaggtgctggtggacagcgcggaggaggggtccctcgctgcggcggcggagctggccgctcagaagcgcgaacagagactgcgcaaattccgggagctgcacctgatgcggaatgaagctcgtaaattaaatcaccaggaagttgtggaagaagataaaagactaaaattacctgcaaattgggaagccaaaaaagctcgtttggagtgggaactaaaggaagaggaaaagaaaaaggaatgtgcggcaagaggagaagactatgagaaagtgaagttgctggagatcagtgcagaagatgcagaaagatgggagaggaaaaagaagaggaaaaaccctgatctgggattttcagattatgctgctgcccagttacgccagtatcatcggttgaccaagcagatcaaacctgacatggaaacatatgagagactgagagaaaaacatggagaagagtttttcccaacatccaatagtcttcttcatggaacacatgtgccttccacagaggaaattgacaggatggtcatagatctggaaaaacagattgaaaaacgagacaaatatagccggagacgtccttataatgatgatgcagatatcgactacattaatgaaaggaatgccaaattcaacaagaaagctgaaagattctatgggaaatacacagctgaaattaaacagaatttggaaagaggaacagctgtctaatcccttcaagaactgtttatagaagcttgagaatggggtaaaaatttctgctagcaaaatcaagttctttttgaaattttatcagtaatccagaatttagtagtccatgccttctcactcagcatttagaaataaaaatgtggtttcttaaacgtatatcctttcatgtatatttccacatttttgtgcttggatataagatgtatttcttgtagtgaagttgttttgtaatctactttgtatacattctaattatattatttttctatgtattttaaatgtatatggctgtttaatctttgaagcattttgggcttaagattgccagcagcacacatcagatgcagtcattgttgctatcagtgtggaatttgatagagtctagactcgggccacttggagttgtgtactccaaagctaaggacagtgatgaggaagatggcagtggccgaccggaggactggagcagtccctcctcatggcggcctgtgaccaaggtcggggaggagtggagctatccttccatgatctgatcatgtacagttccctttttaaaaagcaataaatgcttgggattagaatttctaaaaaaaaaaaa

SEQ ID NO: 3450 - DNA, 442 bp, Homo sapiens
ttattattactaataataataacgtaatcatacctctagtcatagcataccatttatcgggctcggcgcaggcccgcggggagcgcagcccggcggagagactgatggagaggcagaaacggaaggcggacatcgagaaagggctgcagttcattcagtcgacactacccctaaagcaagaagaatatgaggcctttctgctcaagctggtgcagaatctgtttgctgagggcaatgatctgttccgggagaaggactataagcaggctctggtgcagtacatggaagggctgaacgtggccgactacgctgcctctgaccaggtggccctgccccgggagctgctgtgcaagctgcatgtcaatagggccgcctgctacttcaccatgggcctgtatgagaaggcgctggaggacagcgagaaggcgctgggccctggaca

SEQ ID NO: 3451 - DNA, 408 bp, Homo sapiens
  misc_feature (1)...(408): n = a,t,c or g
gagccatcagagtaatataatacagtgaccacaatcaactccacaagatgaacaagaggcatcagctaccactggccaggtcgtccttccaatatttagtaaactcttaacaaggccgtgacatgtcagtgatgctcctagctctggagactgacagacaccagatggaacgactgggctcacccagggctatattaacaggaggcccatctcaagacacggggaacccacacacacatatcttggggactctgcaacttagctcatgttcctcctctgtgggaaggctgttcagagcctcacaggttatacccagcagtaagggtggcctggatctgctctcctaatgaagttggctccccagggattgaagagcagctgaggctgggagaagggggctngctttaa

SEQ ID NO: 3452 - DNA, 418 bp, Homo sapiens
acagacagcggcaggacagtcatcctctataaggtttctgatcagaaacccttggggagctggtcagtgaaacaaggtcaaattataacatgtccagctgtgtgcaactttcaaactggagagtatgttgttgtacacgataataaggttttaagaatatggaataatgaagatgtaaacctggataaagtatttaaagctacattgtcagcagaagtatataggatactttcagtgcaagggacagaacccttggtgctcttcaaggaaggtgctgttcgtggtttagaggccttgcttgcagacccccagcagaaaattgaaactgttatctctgatgaagaagtgattaaatggacaaagtttttcgtagtattcagacatcctgttttaatttttattactgaaaaacatggaa

SEQ ID NO: 3453 - DNA, 1348 bp, Homo sapiens
tttttggacaatgcttttaatggcaagtcatcacagcaggtctgcggaggtgcagggcagcgctcaggccttgctcagtttcttcttgatgaagtagctcaccagccgctgcggcctctgctggtactcgctgagcacattgcgagggctgctgatctggtccccttccaggcggttcaggagggtgacacacaccacggccgcttggaggccgcaggcgctgcacatggcggcaaacaccgaggactccatctcgatattgcggacgccggctgcataggctgcctccagatacgcctgcttgtccttctccgtgtaggagcagagagccccatccagacggccttgcccttcatagaagtccaaggtgcacatggtgttccccaccactgtggtgaactcgctcagctctgcagaacacagcaacagctcctgcaccagcttcttgttaaggtccgttttccggatgacccgcttccccaggacaatctgctcaaactctgccttgaagcaggtatccactgcctgctctgttatgaccacagtgccgggctccagacctatcccaccagaagtgccaatgcggatgatagtgacgttggagcaccgggcatagtacagcagctttatgagctcatgcaacatgattgagatagaaggaatgcccataccatgactgacagacagcaccggtcctactttatacatggcatagcggtcagttcccgcacagatgttgggatagtctctacctgggcagtcaaggcccagctctgcaccaacgcacctgatgaaggctttcatccgggaggggcttccaccaacacacacaaacttcacatctccaaacaaggctgggaaattgtgtctgctagtggtgagattgaaatgatagagaatatcttctttcatttttgctatgtttggatttaaaagtctgacggggcaatcattgtgactttcagctttctctgcattggctcccgtggccgccattccgccaactgaggcaggacccgtcagaggagagcggctggaggcggacagacgtctgcagtgggaggcgctccaggcgttccaggcagtgtcctgccggcgagtcacccgcgaccgcgagtcacctcaccaagccctgaattgggacaggagacgagacgtgtcggcgatctggggagttcctcgcttctctgggcccactcggcctgcgcagagagccgctacacccgcggcgccatcctcgcactgcgacaccggcgacaaacgcaatgctccagggccggacgaagggacggctctcgggaggctcgcggacggcggggcgcgggtctgttctccggagcactcgaat

SEQ ID NO: 3454 - DNA, 1410 bp, Homo sapiens
ttttgtaaagtacagaaaaaaatttattggaaatcccttgaatacattttgaagtgtagctcggtatttccaaacaaagtaggttggagaggttggaggaggaggagggactctgacacctggagacaaacagctggtcccagcctgtcccgggggtgctgcaggagtcagtctagggctcattcctttcatggcaggtctgaggggcaagggctggccttaacagttgctttacttctcccaagctcagctcaaagtcatggctgagactcttcacagatggagccctggtgaaaggctgctgccacctgtagatgccaaagattgctgcctcagacaatggctaggcctttccatgcaaggccttggaaagagagcagtagctgaaatatgggggcatcaataacttaccaggggccttcccccttctcaaagctggggccttggggataaacctgagcctgggttcagcaagccacgcatgtgctctgggccaaagtcaggagggccagttggctgctactgcttctgctaacacttcttggtggcagcagcagcacgcagagctctggtccccgccagagcctgctccaatcctcagaagtcagccttgtatgtgggaacagtgtcacatgcagtatactaacaagcagctgagagccacctgctccactgaagcacagctgctgcccattgaatgccccaggtgggccaggaggaatggagtagacctagatctccttgaccaggactaccagcgaggctgggaaaggacagatcataggtgggtgaggctaggcacttgacttattcaagtaacaatacctgaagggttaagtcaatcatacgcccagctttgatttctcaaccagaagccaatccagctggtaaaccccagggcagtgtagagaacctgggattagagggagatggtagctaggccccaagcaggaggaaaagctccacaggacagccccagggatcaggaacaagtacccaggcagttgggggacacacacaacatcccctaaccactacatgtggccatcacatttagcacccaggacttcctgggctgccagaatggagtcagtcactctgcagaaactgtgggagatgtaaggctctcaccaggaatacgcaactatccaaggtaaagcctttagtcagttccagtgcagccacactgggaggtgactttgcccccggccagccctcttcttggatctcgctgtctgtatggtgggaagatcctcaaagcagcagcccggattctcaataacctccggaggaggaggtctccgtcccaggaagagccctccgccttctccaagtgaaaaacaactcacctcaaacatatttcctctataaaatatctggtttctctgaaagtaataaatatttaccatg

SEQ ID NO: 3455 - DNA, 1073 bp, Homo sapiens
  misc_feature (1)...(1073): n = a,t,c or g
gcggcacgagctccatgttaatgggtccttcccacatagaaatgtattctggtacagcgctgcacacatggatagcaatgtgaaaaggcatgcctaagagacagaaacggctgaccttaccccaccccagccggatcctctgcttatctcccacatgcacttggcttaactggttttcacagattctgaggttatagaacctgttgtttttcaaactcctgtacagagcctggaaataatggagcaaacgcaaatgtattgagagtcattatactttaaaatagttttaaagactattggggtaccatcaggtcaaaagccactgatttgggaagcaatttttttgcaaaacactttttttggagtactgaactttacaggggcttgccttaatctctatttagtagtttcaagatgtatgcgcaattattctacgtgttaaaaatgttaaaatattctatgtagccccaaaggtgggtaaaacagtataagtaatgccctaaattaataagctaaaaggtgtcactacagctggatttttgagagaaaatggacataaaactaggctatgtgtaataaaaataatggcaccttaagattgcactattttacgcattattttatatgccatttcatagcctgcactttaatctccaaagaaacgatgtatgatgtcccacttgttccttattcttaataaactttttcctgagacagggcacttaattccattttactgtactgaattagtttcttggaggtagattcatttcttgagttctctgtttccttagccataatattttctaggatccgggaactccctgtattgtctatttccaacattatataattttaatttaatgtaatggtaaatctcatacttggtgatcagcacattcttaatatcctggctccagcaatggagtacccatttggttacaccttaccaaactctctaaaaacatatactgtgagtaaggtttcgaagccaggaaataaaaggcaggctggaaggaaacggcctatacgatgcagttggttgggaaatgggcggattcnggatatggaac

SEQ ID NO: 3456 - DNA, 800 bp, Homo sapiens
cacggaagccgaggacaagagcatccggctcggcttgtttctcatcatctccggcgtcgtgtcgctcttcatcttcggcttctgctggctgagtcccgcgctgcaggatctgcaagccacggaggccaattgcacggtgctgtcggtgcagcagatcggcgaggtgttcgagtgcaccttcacctgtggcgccgactgcaggggcacctcgcagtacccctgcgtccaggtctacgtgaacaactctgagtccaactctagggcgctgctgcacagcgacgagcaccagctcctgaccaaccccaagtgctcctatatccctccctgtaagagagaaaatcagaagaatttggaaagtgtcatgaattggcaacagtactggaaagatgagattggttcccagccatttacttgctattttaatcaacatcaaagaccagatgatgtgcttctgcatcgcactcatgatgagattgtcctcctgcattgcttcctctggcccctggtgacatttgtggtgggcgttctcattgtggtcctgaccatctgtgccaagagcttggcggtcaaggcggaagccatgaagaagcgcaagttctcttaaaggggaaggaggcttgtagaaagcaaagtacagaagctgtactcatcggcacgcgtccacctgcggaacctgtgtttcctgggcgcaggagatggacagggccacgacagggcttcttgagaggctcatccctcagtgggcaacagaaacagggcacaactggaagacttggaacctcaaagcttgtattccatct

SEQ ID NO: 3457 - DNA, 445 bp, Homo sapiens
  misc_feature (1)...(445): n = a,t,c or g
tggtcccnctttgataccctttgactgccttcgaatttaacncgactcnnnnnnnnnnnnnnnnnnnnnnnnnnnnnnnnnnggcacgagctctctcctttttttttaattctaaaattcatacatgtttattgtagaaaatttggaaagtggctgggtgtggtgggacagggtgaattgctattctccagaggacagtcagggaagacctggtgagacgatacatgagcaggggtgaaggatgcccctcttggcaggtccaggattgaatcacatttctagtttccagcactacagaaaggtgtccttgcttcctgtgttttcaccgtgtatctctattggaaggcagaggaaagtgaattgtggccactcacttttctgtnccccatangncaggggccttcaataattattttaaatagctcaaataccctangtnggatgg

SEQ ID NO: 3458 - DNA, 816 bp, Homo sapiens
  misc_feature (1)...(816): n = a,t,c or g
cactgttttccaatactttatattttattatttttatgactaaagaaatctgtttttaggagaaaaatggacagatgaacaaaaaagaacagaaaaaatcacccagagataaccactgttaatcttttagtggacacagctttcagaattgttttctatactatattactaggtaagtatctttgtagttttacaaaaatgtactgatgccatatatttggttctgcaagttgtgttttttaattttacaatgcaccatcaacattttttccatgtaacagatgaacatttcctactgagaacactgcattgcagataggtcaaaaggctgctagcaacaggagggatgcctaaagtaaagtattaccgtaacgttaaagcacatggcctggtaaatgcctgccagggacactacacataaggaatgtcttcaatgtcccttcgtggggccctgcagccacccctgaattcccttggacctctagggtagaaggggtcctgtaaatttctttgcatccacaaaaacgcccccaatttctgtttgctttttctcttctcatcctgcaccttagccatattgtcaaattctcttatcatgtcctcattgctgaaattcatatcatgtatggcctctttatactccttgaggtaatgagccagccccttattagtttttcttttggctttcctgggtacatcatcctcagctgggcgctttcctgcagcccttggtttcactccctggctctccttcactctctggctttccctctatctctggttttccctctctctctgancctccctccatctctg

SEQ ID NO: 3459 - DNA, 1571 bp, Homo sapiens
gagatcatagagccttccaagcaggataagccactcatagaaaaattagcggagatttatgtcaactcctccttctacaaagagacaaaagctgaattacatcaactttccgggggtgagaagaagaagaagatcacagtcttcaaggagatcagctacaccacctccttctgtcatcaactcagatgggtttccaagcgttcattcaaaaacttgctgggtaatccccagggcctctatagctcagatcattgtcacagtcgtactgggactggttataggtgccatttactttgggctaaaaaatgattctactggaatccagaacagagctggggttctcttcttcctgacgaccaaccagtgtttcagcagtgtttcagccgtggaactctttgtggtagagaagaagctcttcatacatgaatacatcagcggatactacagagtgtcatcttatttccttggaaaactgttatctgatttattacccatgaggatgttaccaagtattatatttacctgtatagtgtacttcatgttaggattgaagccaaaggcaagatgccttcttcgttatgatgtttacccttatgatggtggcttattcagccagttccatggcactggccatagcagcaggtcagagtgtggtttctgtagcaacacttctcatgaccatctgttttgtgtttatgatgattttttcaggtctgttggtcaatctcacaaccattgcatcttggctgtcatggcttcagtacttcagcattccacgatatggatttacgggctttgcagcataatgaatttttgggacaaaacttctgcccaggactcaatgcaacaggaaacaatccttgtaactatgcaacatgtactggcgaagaatatttggtaaagcagggcatcgatctctcaccctggggcttgtggaagaatcacgtggccttggcttgtatgattgttattttcctcacaattgcctacctgaaattgttatttcttaaaaaatattcttaaatttccccttaattcagtatgatttatcctcacataaaaaagaagcactttgattgaagtattcaatcaagtttttttgttgttttctgttcccttgccatcacactgttgcacagcagcaattgttttaaagagatacatttttagaaatcacaacaaactgaattaaacatgaaagaacccaagacatcatgtatcgcatattagttaatctcctcagacagtaaccatggggaagaaatctggtctaatttattaatctaaaaaaggagaattgaattctggacactcctgacaagttattactgtctctggcatttgtttcctcatctttaaaatgaataggtaggttagtagcccttcagtcttaatactttatgatgctatggtttgccattattttaataaatgacaaatgtattaatgctatactggaaatgtaaaattgaaaatatgttggaaaaaagattctgtcttatagggtaaaaaaagccaccggtgatagaaaaaaaatctttttgataagcacattaaagttaatagaactt

SEQ ID NO: 3460 - DNA, 899 bp, Homo sapiens
atcacatatgaatcatcacaggtcgatccaggcacagatctggagccaggcgtgctgatgagtgcacagacgatcacatctgaaaccaccagtaccaccaccactacgcacatcaccaaaactttgaagggggcatttccaggacaagaattgagaagcgaatagtcatcacgggggatgcagacattgaccatgaccaggcgctggctcaggcaattaaagaggccaaagagcagcaccctgacatgtcagtgaccaaagtagtggtccataaagagacagagatcacaccagaagatggagaggattgaccagaggaataacttagcttgcacatgaatgcagtcatgcaaaccgttaggaaaaccagagcctatatggagttccctcttctaacccaactgacttgtatctgtccgtggaaaatttcagtccagaagaattgaccttgaccattaataaagacactggcagagagatcttcccataataaagcaatctgattcagcatcactaaaccgataatgcatgaagcaacgataaaattacaaaagagcagcatttttaattttcacaaaatgtctcagttttcagctatacctgcacgttcataaccaacaatataaaccgtggtctcatgtaacacataaacaattcatgcctttcatagtttattattattaaagtctaaacaaaattgcaatttcttaggtaaccttatatttacaataaatgaagattaccctcaaatgctagaagctgtctaggtccgtccggtgtgtcagattttcctcagattagatgtgccaataaccaagtttattcagtaaacaacttgtacttgtttcatctgggttttattactctcacccataaacagtaatgactctctggaccct

SEQ ID NO: 3461 - DNA, 504 bp, Homo sapiens
gttcccaatctgaagtgggagctgggcgagaagtaggggagggcggtgctccgccgcggtggcgttgctatcgcttcgcagaacctactcaggcagccagctgagaagagttgagggaaagtgctgctgctgggtctgcagacgcgatggataacgtgcagccgaaaataaaacatcgccccttctgcttcagtgtgaaaggccacgtgaagatgctgcggctggatattatcaactcactggtaacaacagtattcatgctcatcgtatctgtgttggcactgataccagaaaccacaacattgacagttggtggaggggtgtttgcacttgtgacagcagtatgctgtcttgccgacggggcccttatttaccggaagcttctgttcaatcccagcggtccttaccagaaaaagcctgtgcatgaaaaaaaagaagttttgtaattttatattactttttagtttgatactaagtattaaacatatttctgtattcttccac

SEQ ID NO: 3462 - DNA, 1511 bp, Homo sapiens
ttttttttttagactttaaaaaacatgcactatacaatcttttatttccagtttaaaaacaaaatcttaaattactaggagtatatttacaagattaattacattttaagccagcacaccatggatgtacatgaagggccactcggtgtccctcgctgggacaggttgtgtgacctgcccaagggcgtgcctggctcatttgccaaagtcaagacgacgaccaggtcttctgactggctcagcccaaccaataatgaaaaaagtatcagagatgtgtcatatccattttgctaacaagcaattacatgcctttttagtgtttaagagaagccttaattttcctgggatatctcccgtaaaatcattctggaatttgattttgaaaattctttaagaaaaaaaaaaaaaagcttgtcacccccatgagacctgctgtctctcatgtctgcagggacaggccttttagaggcagcaaaagggaatactggtctctggaaagtccagacagaactctagcagctccgatggcttgatctcttccagggagccagtgggctaggccccatgctttggttcaaagcgtttggagaacatcttcttgctccttttccggaaacgagataatggacacagagtcccagacgtcatcctttggtgagctgtccttgtccaaggcctctaagatgggctgagttgggtcttttaaatactcttctatctgtaatgggatgcttggtggagtgtgaaaccagtatttaatcaggcctctatatttcaggaccaggaagaaacaggctcctgccagcaccgacagcaacgaaaatgttcccacggagatcaggatgacgttctgaagctcagtggaggcatctgccattgtttcgtagcaagatatgttgcttaaatgcccgactctaaagatgttacttttgttccaaagcagttgtgcctggacttgtaaacagtacactctggagggttttaagttatccaatgaaatggagttgcttctgaaagggcctttgacctgttggattcctcctttttcccagtaatggacataataacaaaaaaaggccgtggaggtatcagcgatgtcaaagggagaggagaacctgatgatgaagggagccttctcctggggtcacctcaatgttttctggaggcccgacagtcacattccgatagtgttgaaaccaaggcattgtcacccaggcagaatggagtgctcccagctcagctcgaaggcgtagagtgacattgaaatccattgggaagcctgctgagggactggcggcagtgaagtcacactctgttgctgtgatctgtgtacaattcacccctatggacatgatgtcggccgtgaaccatttactgtcggtgtatttaaactgcacttggtagacaacaggcctcgtgctattgctcagggccactggctcccaactcaggacctgctctgcgttgtacaggcgaatcttcgggtgctgaggagcgggcagctgggaaag

SEQ ID NO: 3463 - DNA, 344 bp, Homo sapiens
  misc_feature (1)...(344): n = a,t,c or g
gcatagagagacactctctgtctctcgattacaannnnnnnnnnnnnnnnnnnnnnnnnnnnnnnnnnnnnnnnnnnnnnnnnnnnnnnnnnnnnnnnnntgcacatcatttattgactaacagcaaaccatggaaattcactaaagatcttgaagtcagacagaaaatcatatttgggggngtttaanaggattaaagaaacatcctcttactctatactttgagttcatgtagtatgatgngaaacgaatcacaacaaagcggcctgttcttagggngcctgctggaagtcagtattcctctcaaaacattctttctcttctcttttctcctttcctagggg

SEQ ID NO: 3464 - DNA, 819 bp, Homo sapiens
ctcctcagaagtcgcttagctcttcggtggttgtcacacgtccggaggcctaggccgtgcgcgtacctaggatgccgcgtggaagccgaagccgcacctcccgcatggcccctccggccagccgggcccctcagatgagagctgcacccaggccagcaccagtcgctcagccaccagcagcggcacccccatctgcagttggctcttctgctgctgcgccccggcagccaggtctgatggcccagatggcaaccactgcagctggcgtggctgtgggctctgctgtggggcacacattgggtcacgccattactgggggcttcagtggaggaagtaatgctgagcctgcgaggcctgacatcacttaccaggagcctcagggaacccagccagcacagcagcagcagccttgcctctatgagatcaaacagtttctggagtgtgcccagaaccagggtgacatcaagctctgtgagggtttcaaatgaggtgctgaaacagtgccgacttgcaaacggattggcctaatgaagaagttcaacctggagagatggaaaatcagctctcataactaagttaatttagtataaaaatagaattgatagtgagggtataaagtgtaaccatcagttaaacctctcctgtcattcctagcttccttgcttcagaattgaaatggaagtgggggtgtccctactctgtagaatctgggactgggcaaatgtttgtgtggcctccttaaactagctgttatgttatgattttattctttgtgagttaattagaataaagtcattttcttccaaggtaaaaaaaaaa

SEQ ID NO: 3465 - DNA, 546 bp, Homo sapiens
  misc_feature (1)...(546): n = a,t,c or g
gtgnnnccccatttganaccnnnnnnnnnnnnnnnnnnnnnnnnnnnnnnnnnnnnnnnnnnnnnnnnnnnnnnnnnnnnnnnnnnnggcacnnnnnnnnnnnnnnnnnnnnnnnnnnnnnnnnnnnnnnnnnnnnnnnnnnnnnnnnnnnnnnnnnnnnnnnnnnnnnnnnnnnnnnnnnnnnnnnnnnnnnnnnnnnngactgccattgagattttgatagggattgcgttgactctgtagattttgggtggtatggacttttaatgatatttttccttcagtgcatgaatatggaatgtctttttatttatgtgtttcttctttaatttccttcagtgttttataattttcagtgtacaagtcttttacttctttggctaagtttatttctacatattgtaaaatacttttgttgctgtggtaaacgggactgttttcttaattgcgttttcagatagcctgcttgtacttagaaatgctgctgatttttttatattaacttggatccagcagctttactgnattcatttattaattctaaca

SEQ ID NO: 3466 - DNA, 451 bp, Homo sapiens
aaattggacaccccttgcctcccaagatcctggaatatgaccaaggatgcccccactgtcaccactgttattcaatgcagtacctagaagtccctagctagagcagtcagaccaagacaaggatataaagggtatcccagattggaaaggaagaagtcaaattatccgttgtttacagatggtgtaattttatatttggaaaaacctaaagactccacaagaaaattattagaactggtaaattcagtgaagctgcaggatacaaaattaacgtaccaaaatcagtagcatttctatttgtcaacagtgaacaatgtgaaaaagaaataaaaaagtatcccatttggaagccacacataaaataaagcacctaggaattacccaaataaatgaaaggtctctataatgaaaactataaaacactgatgcaagaaattgaagaggacaccaa

SEQ ID NO: 3467 - DNA, 6456 bp, Homo sapiens
gggccttgcgccgcgggagcggacggcggcggaggagaccctaggctcgcggcccgaggcgggagggctcggcttctcgactgcccgcctccgaggccgccggccgcttctctctcccagagtggccgccgcccctggagactcgccgtgacacgggcctaagccgccgccgcgggagtcctgaccgctcggacccgtcggatcaggccgggtgggagcgagcttgcgggcaggtgccgctcccggagggtgggccggaggcgaggcgcccaccgcgcggctcgcgggccgggctcggcggaggggccgctcgcgcagcacccccaccgcgggccggagcccgggtcgccgccccgccttctcccgggaccgcccggccggagctgcgggggccgagggacgccgcgcccgccgccgccagccgggctcgcgcgggagagcagggaagagaaactttgccttttattgtttttagtccttaagtgcaaggaactctgtgttgggaggaaaaatgtccttcttcagtttccgtaagatcttcaagttggggagcgagaagaagaagaagcagtacgaacacgtgaagagggacctgaaccccgaagacttttgggagattataggagaactgggcgacggagcctttgggaaagtgtacaaggcccagaataaagagaccagtgttttagctgctgcaaaagtgattgacactaaatctgaagaagaacttgaagattacatggtagagattgacatattagcatcttgtgatcacccaaatatagtcaagcttctagatgccttctattatgagaacaatctttggatcctcattgaattttgtgcaggtggagcagtagatgctgtgatgcttgaacttgagagaccattaactgagtcccaaatacaagtagtttgcaagcagactttagatgcattgaactacttacatgataataagatcatccacagagatctgaaggctggcaacattctctttaccttagatggagatatcaaattggcggattttggagtatcagctaaaaacacgaggacaattcaaagaagagattcctttattggtacaccatattggatggctcctgaagtagtcatgtgtgaaacatctaaggacagaccctatgactacaaagctgatgtttggtccctgggtatcactttaatagaaatggctgagatagaaccacctcatcatgaattaaatccaatgcgagtgctgctaaaaatagcaaaatctgagccacctacattagcacagccatccagatggtcttcaaattttaaggactttctaaagaaatgcttagaaaagaatgtggatgccaggtggactacatctcagctgctgcagcatccctttgttactgttgattccaacaaacccatccgagaattgattgcagaggcgaaggctgaagtaacagaagaagttgaagatggcaaagaggaagatgaagaggaggaaacagaaaattctctgccaatacctgcaagtaagcgtgcatcttctgaccttagtatcgccagctctgaagaagataaactttcacaaaatgcttgtattttggagtctgtctcagaaaaaacagaacgtagtaactctgaagataaactcaacagcaaaattcttaatgaaaaacccaccactgatgaacctgaaaaggctgtggaggatattaatgaacatattaccgatgctcagttagaagcaatgactgaactccatgacagaacagcagtaatcaaggagaatgaaagagagaagaggcccaagcttgaaaatctgcctgacacagaagaccaagaaactgtggacattaattcagtcagtgaaggaaaagagaataatataatgataaccttagaaacaaatattgaacataatctaaaatctgaggaagaaaaggatcaggaaaagcaacagatgtttgaaaataagcttataaaatctgaagaaattaaagatactattttgcaaacagtagatttagtttctcaagagactggagaaaaagaggcaaatattcaggcagttgatagtgaagttgggcttacaaaggaagacacccaagagaaattgggggaagacgacaaaactcaaaaagatgtgatcagcaatacaagtgatgtgataggaacatgtgaggcagcagatgtggctcagaaagtggatgaagacagtgctgaggatacgcagagtaatgatgggaaagaagtggtcgaagtaggccagaaattaattaataagcccatggtgggtcctgaggctggtggtactaaggaagttcctattaaagaaatagttgaaatgaatgaaatagaagaaggtaaaaataaggaacaagcaataaacagttcagagaacataatggacatcaatgaggaaccaggaacaactgaaggtgaagaaatcactgagtcaagtagcactgaagaaatggaggtcagaagtgtggtggctgatactgaccaaaaggctttaggaagtgaagttcaggatgcttctaaagtcactactcagatagataaagagaaaaaagaaattccagtgtcaattaaaaaagagcctgaagttactgtagtttcacagcccactgaacctcagcctgttctaatacccagtattaatatcaactctgacagtggagaaaataaagaagaaataggttctttatcaaaaactgaaactattctgccaccagaatctgagaatccaaaggaaaatgataatgattcaggcactggttccactgctgatactagcagtattgacttgaatttatccatctctagctttctaagtaaaactaaagacagtggatcgatatctttacaagaaacaagaagacaaaagaaaacattgaagaaaacacgcaaatttattgttgatggtgtagaagtgagtgtaacaacatcaaagatagttacagatagtgattccaaaactgaagaattgcggtttcttagacgtcaggaacttcgggaattaagatttcttcagaaagaagagcaaagagcccaacaacagctcaatagcaaactacagcaacaacgagaacaaattttccggcgctttgagcaggaaatgatgagtaaaaagcgacaatatgaccaggaaattgagaatctagaaaaacagcagaaacagactatcgaacgcctggaacaagagcacacaaatcgcttgcgagatgaagccaaacgcatcaaaggagaacaagagaaagagttgtccaaatttcagaatatgctgaagaaccgaaagaaggaggaacaagagtttgttcagaaacaacagcaagaattagatggctctctgaaaaagatcatccagcagcagaaggcagagttagctaatattgagagagagtgcctgaataacaagcaacagctcatgagagctcgagaagctgcaatttgggagctcgaagaacgacacttacaagaaaaacaccagctgctcaaacagcagcttaaagatcagtatttcatgcaaagacatcagctacttaagcgccacgagaaggaaacagagcaaatgcagcgttacaatcaaagacttattgaggaattgaaaaacagacagactcaagaaagagcaagactgcccaagcattcagcgcagtgaagccaagactcgaatggccatgtttaagaagagtttgagaattaactcaacagccacaccagatcaggaccgtgataaaattaaacagtttgctgcacaagaagaaaagaggcagaaaaatgagagaatggctcagcatcagaaacatgagaatcaaatgcgagatcttcagttgcagtgtgaagccaatgtccgcgaactgcatcagctgcagaatgaaaaatgccacttgttggttgagcatgagactcagaaactgaaggagttagatgaggaacatacaagaattaaaggagtggagagagaaattgagacctaggaaaaagacactggaagaagagtttgccaggaaactacaggaacaggaagtattctttaaaatgactggggagtctgaatgccttaacccatcaacacagagccggatttccaaattttatcctattcccagcttgcattccaccggatcataacaaagggaagcattctgtgcgtgggtttggctctttcagtatgtcattctgttctcatcttctgccacagtctctcagatagctcatgaagacaatcacctgcctcaccttctaggtgttttccttttttgttttttttgttttgttttgtttttaagcaaagatgaagggaaaacgaactaagacagacgctaggccatgttggcaaagtagcatcttggtgactaaggtgactttgtatattcatcttaaaaattatgttctttagacactgctacctgaaaactgttggagaaataatgtttaaagttatttaagaaaaactgttacatcactaagtattaataaattcttcttacctgacgtaacttctcaatgcctaaattctgtagttgaagctctgctgcagagagttgggataattttcttttggtggatcagctctcataaaaaagctatgatttgctcaaatatgctgttgactcagtaaatgaatatatttttttttttaaataggaacaacctcttttaaaagagaaaaattatttcagtgatttgtcaaaacgaattacctcttttggcatgagctaataattgagggtgctaattttcttaagatagtgcctaaaacactaaatttcagtcaagtcgtaagtaggattttctttttgatcaacagggacaaaaacatctttagaattaaaaacatggttgttttggaatttttgcttctcttaccgtttgatagaaattttcatcctaaaatacatgtacaaagtttggaaagatgaaaaaaagaggtagcttttagattgcaaattggaaatgtaaaactcatgaaatttaagcaatataggtttagctatctgtgtttattttctaaaataatacctgagctggttaaatgatttctctccatcttagctaattctgtttaaaactctgtcagaggcctgcaggctgtgagttatatttataaatatatcttcagaaattaatcttaaaagaggcattagttcagaatacttttttaaaagtttaaattaaatatttaggcacgtcagaaattacttttccttattttgaaatgaggctacttatgtcttggttttattttgttccatgtttaaatcattcagtttgatttgagtgggaaaagcctgaagcctttatcatgtggttgctggtgtgtgtaattattaatgaaatgttcactcctagtcccttatgaggcttagaatttcaaccacgtgtcaggtcagacagtattataaactgtactttgctgtctgagacagcacatttgtgaatgatgcttgctgcctgccattttcaacctattctctcttaagagtgctaggtaccaaattgtgaaagtttgttttcagttatattacttttgaggctggtgaaaaatttaaatgtaactttgtgggaacactgattcatatttagaaaatgtaaatgtctgtagcactttcttgcagttaatttgaaaactttggatgctgaaccttgtttgtcagtgatttagatgatttaaaaatgcatgtgtgatttgaattttataattgttttgacaagcataatttacttggacaacttcgtaggtagccttaacttctggccaagtttgttttttatataaatatatatacatatatacatattatgtatggttgtaaattcatacacttatcacatgaatgtgttactgtatacaaaactcttaatgctttattctcaaatgctgggttgaaaaatgttttgaaagccttttaaaatatatatctttataaagtaatattcaggatgatgataaaaattgtttatattgttatgataaaaatgacagtataatgttgcccagtgtatttaatgatttatttgaagagggattgggaaggaacgtcttcataccactttctcctttgaaattttcagtttattgacttttaaaaaatgaatacctcaggcagtagacattttttttctagtatcatttaattgataccctgtgcgctaaatagtgtgtggtgcctgattaatttggtctgaatatttgattctttctgttcctttcaacttgacattcagattattgactcaaggagagaggctcagagtggaatggttggcgctgtgggtaaggttggatctcccttaaaactgccttttggattcagtgtttgtgcttgagttcgctttcaaatatgaccataatcgtgtgggtgcaagactgtacagtgatacatatgtagaggtaaagcattcattttaatacttaaagttatataaatcttttcaaaaagtgaaaaaaaaaaaaaaaaa

SEQ ID NO: 3468 - DNA, 1447 bp, Homo sapiens
ttttttttttttacagtcataaccttttatttcatgtcataaaatggtgacacttacttgtgttaaaaaaatttaataacaatgtaatcattatatctctgcaatcagctgaagttctaagaaaaaatgacaatgttgaaagttgtatcatcattattataaactttcatgttcagtatatgtaaactccaaagccaatttcaaaagatatttttgtgaaataccattctttaaaaaaaaggatattatatataattgtatgaatgttaaatgttttacagtactgatttgctacattttatgtatgctgtaaaacaaataccattttaaagtatattggaattcgtaactaaagtaataaataaatgcttgaaaatatacccagtagaaacttatttttattatccaatccttttgataagaaatgccactagtgttatgtacaaacttgatcttctttgaaatgtgttgtccactgcttttctgtttctgtcacagtagctataaacagctgtttaaggatatccttatctaaatttctgccaatgaggaccaatcgatttgttctctcagtgtcatccttccagctcactggagtctcctccagatcatagagctcatggacaccctggacaatcacttgttgtgatttgtctttgattgacaccaatcccttcagccttatgacctccatgcagtgattgtccttgtttctcacattcttttcccacaggagattctgaataaacatattaagatgttcttcctttgcatttcctggtacttcaaatgtgattgtaacaatactctgatcaaggtgaggttgtgttcctggcacatgctgaagtttttttctgcaaacttattccagagagactatcaaaggcatgaagatctaatacattagagagatcaactcttgatctttgtgtttctaagatttgtcctagtccatttatggatctaattgtcgctcttaatttctttacatcttcttctggaaccaagtctgttttattaatgagaatggcatctgccaaagcaacttgtctagtagcttcattgataaggccatcaggtttctcttctgttaaatgttttaatccatattttgaatccacaatagttatgataccatcaagataaatatcactccctaattcagcatcaacccaaaacatagaagccactgcacctgggtctgccaatccagtggtctctaacagtatgtaatcaaatttccccttcttttgcatcaaattctcaatagctctaaggccattgtccttcactgaacagcagaggcaaccgtttctaagttccagccactcttcatagagctctccaccttggctgacagctaaggatttctccagcgcacttccttccccaaattcatttaaaatgaccgctactcttttactatgttgctctgtcaaaatatagt

SEQ ID NO: 3469 - DNA, 440 bp, Homo sapiens
  misc_feature (1)...(440): n = a,t,c or g
tttgaaacaccnnnnnnnnnnnnnnnnnnnnnnnnnnnnnnnnnnnnnnnnnnnnnnnnnnnnnnnnnnnnnnnnggcacgagagaaataagaagacgggaggatgagtacagatttacaaaattgcttcagattgctggaattagcccacatggtaatgctttaggagcatcaatgcagcaacaggtaaatcaacaaatacctcaggaaaaacgaggaggtgaagtattggattcttctcatgatgacataaaacttgaaaaaagtaatattttgctgcttggaccaactgggtcaggtaaaactctgctggcacaaaccctagctaaatgccttgatgtcccttttgctatctgtgactgtacaactttgactcaggctggatatgtaggcgaagatattgaatctgtgattgcaaaactactncaagatgccaatta

SEQ ID NO: 3470 - DNA, 721 bp, Homo sapiens
tcaaggatgaacacacacccaagctgtggctgccgtgcgtgtctatttattgttgctgccaccctggaggagccccagtttcttctgtagctttcttttctgggggatcttcctggctctgcccctccattcccagcctctcactccccatcttgcacttttgctagggttggaggcgctttcctggtagcccctcagagactcagtcagcgggaataagtcctaggggtggggggtgtggcaagccggcctggatcctgtcctgggtcctccttcctccgcagtcccgtctctattgctgggtgtagtgtccatggtctggcctcatctccaagctctgtctcaagcgccgtgcccctcgcttcttcctctctgaattctgcaagcttggtcaccagtttcctctcgtgcccgccagggctggggcggttggtgttggcagcagcttctctcttggtgcgacctttccggcctccacctccgaggtaggaatgggccaggctatagaggtcagattcatccaggctggagtcctcgtcctccgggcctgggggctgctggggggcgctggttgctggtgggaaggtggccatcgtgcctggcttgtcttccctgcctctcttcttctcctaacgctttgtctgtctctgctttcctggccccgggcctctccactccctcagcttataaggctgtgtcctcgtgccgctcgtgccgaatt

SEQ ID NO: 3471 - DNA, 816 bp, Homo sapiens
gaggaggcgagaggcgggggcgctagggccgagatcatgtctgactgggagaggtttccttggcagcagaggacgctaggtttgggatgaaagaagctgggcagatgcaaaatctggagagcgcgagggccgggcggtcagtcagcacccagactggcagcatgaccggtcagataccaaggctttctaaagtcaaccttttcactctgctcagcctctggatggagctctttccagcagaagcccagcggcaaaaatctcagaaaaatgaagagggaaagcatggacccttaggagataatgaagagaggaccagagtatctactgacaaaagacaggtaaagagaactggtcttgtggtggtgaaaaacatgaaaattgttggtctccactgttctagtgaagatttacatgccgggccagattgctcttattaaaccatgggtcaaggctgaaaaaactgtgatctttattttttccagaaaaccatgttctgcttgtttgaaaatgattgtaaatgctggagttaaccgaatttcatactggcctgctgatccagaaataagtttgcttacggaggcttctagttctgaagatgcaaagttagatgccaaagcagtggaaagattgaagtcaaaacagtcgggcccatgtgtgtgtcttacttcaacctttggtgtgttatatggtgcagtttgtagaggagacctcttacaaatgtgactttattcaaaaaattacaaaaacattgccggatgctaacactgacttttattatgaatgtaaacaagaaagaataaaagaatatgaaatgtt

SEQ ID NO: 3472 - DNA, 186 bp, Homo sapiens
aaataattggtcagatatacaagtcacagaaatgtcaaatgggagagtgaaggaaagtttaaaatagcttaggaagagatcacaaaatatcctttgaaagatcataggcacacacaagtcaacactagagctaaaaccagatattattccattactaaagagtgattttgaaagaccatttaaagt

SEQ ID NO: 3473 - DNA, 973 bp, Homo sapiens
tttttttgtttttaattacagctttattcagatgtaatttacccttgcaaagtatataactcagtggttttcattatcacttatttttggatcatccaattttaaagattaccttaattattgaattgaaaatttacaaaaacttggtttattctgaaagactttattaaaagcgtttctattgtaagaacacaaaatattttaagccagtaacaacatttaaattaaaaagatataaacatgtcaaaggaatgaaacctagatgttttattatgtgtgaattatgagcgcttacctggccttgtgtataacgtataaaccttcacctgttgcatgtcattcagtctctgcagcaacattccttgtgtccatgtgggtgtttctatgtgtgactgtgaatatctgtatgtaaatggcttgtctcttgggtgcatttgtgggggtgggtatccaccgctattatcattgctttctttttcagaaagtgtttccaatctttgcttcattttactcaacagaaatgaggaggttggtttatatttcatgtcttttctctttcagatacagctggtcatgccacagatagtgaagaagaataaaactcttcagaagtcctgagatttaaagatggcataatcacttccaacatcccattccatactctggaagaagtagaccatgatgctttccagcagtaagccactcaacacggccaagaaggagagcttacgggttgatgtttagggtcactctaattgcctgaaaatttgatgtaagaacaaatactttaatgagtttgaggcacacagatgtgtagtcatgttcccaaatgacagctggaatcagcaagagttttccgtagctagataataataatgtttcagcagcaaaatgaagttgggctttttttttgccgtcatgggccgttctacccacaggaaggtaaaaatgccaataaaataggcagtttgtt

SEQ ID NO: 3474 - DNA, 1422 bp, Homo sapiens
cgagacctactccacaggtccagccggccggtgagcgcctggggaccgcagaggtgagagtcgcgcccgggagtccgccgcctgcgccaggatggagttcgtgaaatgccttggccaccccgaagagttctacaacctggtgcgcttccggatcgggggcaagcggaaggtgatgcccaagatggaccaggactcgctcagcagcagccctgaaaacttgctacaagtatctcaatcagaccagtcgcagtttcgcagctgttatccaggcgctggatggggaaatgcgcaacgcagtgtgcatattttatctggttctccgagctctggacacactggaagatgacatgaccatcagtgtggaaaagaaggtcccgctgtttacacaacgtttcactctttcctttaccaaccagactggcggttcatggagagcaaggagaaggatcgccaggtgctgggaggacttcccaacgatctcccttgagtttagaaatctggctgagaaataccaaacagtgattgccgacatttgccggagaatgggcattgggatggcagagtttttggataagcatgtgcacctctgaacaggagtgggacaagtactgccactatgttgctgggctggtcggaattggcctttcccgtcttttctcagcctcagagtttgaagaccccttagttggtgaagatacagaacgtgccaactctatgggcctgtttctgcagaaaacaaacatcatccgtgactatctggaagaccagcaaggaggaagagagttctggcctcaagaggtttggagcaggtatgttaagaagttaggggattttgcctaaggccggagaatattgacttggccgtgcagtgcctgaatgaacttataaccaatgcactgcaccacatcccagatgtcatcacctacctttccgagactcagaaaccagagtgtgtttaacttctgtgctattccacaggtgatggccattgccactttggctgcctgttataataaccagcaggtgttcaaaggggcagtgaagattcggaaagggccaagcagtgaccctgatgatggatgccaccaatatgcccagctgtcaaagccatcatatatcagtatatggaagagatttatcatagaatccccgactcagacccatcttctagcaaaacaaggcagatcatctccaccatccggacgcagaatcttcccaactgtcagctgatttcccgaagccactactcccccatctacctgtcgtttgtcatgctcttggctgccctgagctgggcagtacctgaccactctctcccaggtaacagaagactatgttcagactggagaacactgatcccaaatttgtccatagctgaagtccaccataaagtggatttactttttttctttaaaaaaaaaa

SEQ ID NO: 3475 - DNA, 856 bp, Homo sapiens
ttttttttttttttgaaacctaaaaatgtattttattttgaagttgtgctttggattttccccaatccaacatctgttgagtgacagtcttaggttcacacaaagcatctccaagcatacatacaatattccagttatcaacactattttaaagaatataccattttacacaaatgtgacatacaagtcagacgccacaacattgcgattccctggaagatgtgacttctcttctgcatgggaagtagatctgcaccagcccttccagtgctctgcgcatcccggtgctggcatcaccgctcctcatctccttggggagaagccagggcgccctgaggaggttggctgagaccagtgtttccagtttacaggctgctggctacaaactcctctgttttctaaattgggatgctagtagccccaccccacctctcttccccgaagactgacccttcagagtccacaccaggaaaaggatccatgccatgaggggtggagcagggctctttgaagcatcatgctggtttcggcaagcatagctgaggaaggctggtctccctaggccctggatggccagctccttttggcttttcggtgtaaaaatcacagtgtgcaacctcaattccagttgtttgcagtgagctctgccgagaaggactctcctcctatcggttcctagtcctctcgacaggaccatctcacaggtgttaggagcaccagagatggggaagacagctctgcccccagagctgggtttagtaggtgaccactcacacactgttcagttcatgatgcaaattagcgcggatggacactgatcaaggggatggtgaacacgagtcatgtacagggttga

SEQ ID NO: 3476 - DNA, 395 bp, Homo sapiens
tttttagctactcttcattgtttattcattgttagattcagtaacctcaggggagcttaaatatctaccatggcagcgtgattgtcacagcttcagctcttagggcaggacaactccacacttgtatattttaggatctttgcattgacaaatgttaatggctgttggtctattggttcagcaagattttgcaattcctgatgttcacagacctccttcccttctcctgggggctctgtattcacacacagcacccatttggactggggaccattgcctcttgattagcaaatctgggtgctgtgctccactcctcagtttatatttgttgaaaactctgagggaaagtgtccaggggggccaatctgatgccagtgtcatgggccctttggggg

SEQ ID NO: 3477 - DNA, 425 bp, Homo sapiens
  misc_feature (1)...(425): n = a,t,c or g
gtctgcatgtgggtggagcactgttccagcctgagaagatggttctgaggccacttagcaagacattttccagcatgagcaggtttctctgtggaaatagtgacacctgttctggtgtgttgtctttcctcagggaacttaaggggtacaaagctcctgaaaatgttctttatgctggttgaagctcttatgtcgctgtactgattccctacgatgcagatttgaatcacagagtaattaaaatatggatcaaataaggctggggctcaccaaggctgaaagctgttagccattcaaggcatcattttctgttcatgaaaatatagggacctttttccaaaacatggcctttcagggaagggtgttcttctttttcaaacaaaagttcttaatggactggcntaactcttcttggaccacatctt

SEQ ID NO: 3478 - DNA, 652 bp, Homo sapiens
cgtcgacttttttttttatcaccatcactctgacccctccctgtcttaggtctgaataattgggtcacccataggaatgcagaacccagggtgggcagagcagagcagcacttgctgggataggcctcgagcctggtttctgagtccttgaggaccacgagctaacaggagctggtctgtaggttgctctccgtaagcagtgatgcaatggacgagggatcgtagacactgtcgaattcctcatctgagctcagcccttcgtttttgagagctgactcagcagctgagcgggaagctttgcgccaggagtccttctccagagacttgatccgggcctggagctgttcattgacctcatgctgctcctccacctcacgctgggccttcttcctcaggccgtccagtcgctcaatttcctcttctgcttcatccacctgacgcttcaaagccttcaccctcaggcttagctggtctttctggtcattgacatgctgccgctcgtcttcaatctggatggatagttctttaactttccgctccagttttcgattggtagactgcagaactgtcttctccctctcttcagcctgtagccgctcctgcaacaactgattctgggactcaagctgagagaggctggcactaggcttct

SEQ ID NO: 3479 - DNA, 432 bp, Homo sapiens
atattattttgtgctgaccagttcatttaatctttacaacaaatctgggaggtgagccgcattttcaccagtgacggtaatggaggccctgtgtagctcagaaacttgccaaaagcaagcacaaggacccacacctattgccacaactagagggagctacaatttctagggactactggagtttaaaacagaatcgaggccctgtccgaacccgcggaagaatcactgataagtcagtctcctctgttcatgtttcataggtgaaacgtggataatcacatgcacccactgaggtttagccagcccagggtcgctctgatccagcagggagaaggtgacacggcgggcaaagggtcactcaaggagattgtcaaaggcaccaggcagcacacgaatgtacagtgagaggtgtgtgccctcaccactgccatt

SEQ ID NO: 3480 - DNA, 1417 bp, Homo sapiens
ttctggtggtctctctccagaccttgcccaaattccagtgtctgggtaagggctggtcacagaacactctctgttgagccaagccagcagttagacactgccagcactgaagaaacggaccctgaaacttctcagccagagccaaacaggccttcagaactagacttgagactcacagaagaaggtgagcgaatgctgagtacttttaaggagctcttttcagaaaagcatgccagtctccaaaactcacagagaactgttgctgaagtccaagagaccttggcagaaatgatccgacaacaccaaaagagtcaactctgtaaatccacagcaaatggtcctgataagaatgaaccggaagtagaagcagagcagcccctctgcagttctcagagccagtgtaaagaagaaaaaaatgagccactttctctgcctgagttaaccaaaaggcttaccgaggcaaatcagaggaatgggcaaaatttcctgaggagcatttaaggcctgggccctttcccagatgttgctgggagtgctggccttcgtcctgcttcttcattcagggtcccactttcctggctgtctggcccaggaaatgcagcagcaggcccaagagctccttcagaaatacggcaacacgaaaacttacagaagacactgccagaccttctgtatgtgaattttcacacaccttgaagtatactgccaaattgaaaatgtttgacatcttttcacctctggcagttatgcctcaccagtacatttcactctggtcccttaggatgtttttgcagtaatccaaaagaatacaaacaaggattaagtttgaatcaaccctgcctacccatagacaacggtggatctgactttagactcaattgtggtctcctactggagggaagatcatgaaaagcccacagtagttattcagaactaacacctgcagagtgttggtcatctctacagccttaggcaggtttcacccaaagaggagaaacttctgtcgtcacccaaagtgttacatgcttaaaacacaagctacctttgtaaatacttcatctgatcagaagtgtgtcatgcttgtttgagatggagttgctgcattttaggactattgatacctttttttaattgtttttataatatttaatttgaaagaggagacccttctctctctactctttcatagactgaagtttgaatatgaaataggccttaaccatcatgttgactctcctgtcagaattttaggttggaaatttggttttattctttcatgtaattgcttatttgaacagatcacttactaaagctttagaagaagtgattcaaatgtgtgttttcccttcagttttataacaaatggattgatggcagtcaaatagctcaggaataaattactgtttcaatggttctt

SEQ ID NO: 3481 - DNA, 411 bp, Homo sapiens
ccttcgctccaggtgcggggactcgtggaagaatttgattcgcgcttgagaaagatcgctccgctcctgtaaggaagagagcgtgtaggggctgcaaccagagacacagtcagaagctccgaggctaccgcgatggtccaggtgccacaggacacagcctaacagaggcccaggttggagccatggaccatgggagtcatgagaatggaagggaagctgacgccatgtgggatggggtagaactgtccgcaaattcgtcccgcctctggagtcttcagaccagtcaaggccgaaattcaaccaagcctctcctctctctagctgttatttgtttgcagcacgcggtctggttggcaccctgcaggatttaccaagctttttgccaacattctggcctatgcaatcaatacg

SEQ ID NO: 3482 - DNA, 384 bp, Homo sapiens
gcttctcaagccttaatttttatcttcttaaaatggagatgataatactgtacttactgtgttgtgaggattaaatgaaataaagaatgtaaagaaaagttgtagtgccttgtacatgatatgtatcacatggtagttcctcctattccattgctaatggctctttgttcctttggggatatttccgtgttctcttgtaccataaaatgtgcaattaaatgtttgttccagttattttcaagtcatttagaattcttaagcaattagattctaaagcccatttttaaattatttatagggtatttaaacatctaggctgctcatgacatttcatgtgtgtcctgttcatactcgcactaagtgtttttcccatagtttgtgcct

SEQ ID NO: 3483 - DNA, 1105 bp, Homo sapiens
aagaagccatgtgttcagtacctgccccccgagaagccctgtgacagccctgcctcctcccacgggagtcatgctggactccccggccactccctctgcagctttggcctcaccagctgcccctgctgccacccattcggagcaagcccagcccctctccctcaccaccaaaccagaaacccgggcccagctggcttctccactctgcgccttcctgtcgggctaaagctgcagcctcctcctctgggcagatgggcagccagcctcccctcctgtcccggcccctcccccttgggtccatgcccacagctctgctggcctctcccccgtccttccacgccacgctccatgcccaccaggccctcccggtgctacaggcccagcctctttccctggtcaccaagtctgcccactaagctccccccgacccctgcaggctgtcacatgactcattgagtagtaatgattcagaagaaaaagaaaaaggagactttattggtcaatatttgaccactctggactgttctgtaaagtggctggtaacaacagcactttacagtttgtagatgtaaccagtagctgatcttaaggcttttttaaaaaacaaaacaaaacaacaaaaaaaaatctttataagaaagagaactgaaaagtagcgtgctattcgtcctgtaggtgctgtggtggatggacctgggcagagggcacttctctctcttacctctcttgcactttctgtctcctgtctcttctcgcccctgccgcctgccccagcttccccgactccatctgcagctctgccattgtgacatttcctgttacccagcccaagttttcatcgtctgctcaataccgtgggttcttcttcgtcctctgtcctctgcccagtgtgaggccatcaccatgtgagaagacatcttggcctgatttgctgccaccagcgtcccctccctcagtgggcccgaactcgccagccccagctttcagtggagaaagcggtcctctgaaatggtttcctcccaacccccgcatttaaagggactcaaggtgccctgcccacttcctcagcgaagaagtctgtgttcctccccgtccttggcagtgg

SEQ ID NO: 3484 - DNA, 259 bp, Homo sapiens
atttttcttactagtgcattacagttaaatagaattttattgaagaagttattgggctgaaggcagatcactgtaaagcagcccccatcactggcatctggtctcagtgtgataaatgctcaagaggagaagaaccttcacagggccaggaagtgatgatgtaggttccctacctgccggaaggcgccacatctctgcccgcaaaagcagatgtggaagttgcccctctgttctccagtctctctcttagaagcagtta

SEQ ID NO: 3485 - DNA, 2268 bp, Homo sapiens
  misc_feature (1)...(2268): n = a,t,c or g
ctcaaccgcacctctgaagtgctgcttgaatctggccgttctgacactgggtgttgaggtcatgtggcagtcctcacgattgaaattattgccctttgaattacctaaaatattgtttaccaaaaagattctgtgtttacatgttcttttcttctggtgattgctaggaaattactcaatccaatttcctagggtttagctaccaccttctttatcaacagctaaccaatttgagattcatgattaattatgtacacaaaaatattttccttgtagaaaatagttttccagacacttagccttctgaagtgctcatctcttgcttaaatgatagtctatttagtagtttaaaataaaaataatcactccctatgatctagttaatgtaattatccagtcactgtaactaatctcttgaagggacttttgtgataaagagccaagttcagaagcatagcgtngtaccgaaaatgaagactctcctatctactgctacagatcctgttgaagaaagagcttacccctttcccccggaaaacttgcaatcctgtagttcccatatgtgtggcatatgtcagttatgaaattattataattcagccttcaaactactactggatcaacttaaagggaaaggctaattaagggtatttctttttaaacaggtatttctggggaaaagttaataactatgggcacaaatgttcagggagtgtattattaaaaatatgtgggggctctccggatttattttggagccaaacattgcaatgagggtgttcattatgcttctaagtaagctttaactagaccactttcttcttatgtcagattgtgctggttctagctcataataatgaaaaaaatagaattatattttgtatgaattgtttctaacaaaccttgatctgtatatacttgtgaggggttgtttggttgcctaattgttgattggttggttagttgggcaaaatcatttattacatgcaaaaatagaaaattatttgttaaattcagagaaaatatgtgaagtttacaaaggaaccaaaatgataatgggagaatttagtcttaaaagtttaggttgtcagagtttatctgatatacaaaaaagtaggatcaaagtctaggaacaaacattggttatttcactgaaacagatttttaaagagcatattaagaaattaagaccattagatcatctctttcataatggatatggatgttatttccattggacggccaaatctatactgttccttgggttttaggagttggggtattctttccaaaagtgaatttaggcacatgcatgtacattgtatttataaagattatatatgtagtttccaaggaagaaacaaagacctatacagtttagactttatttgtttggtgaacgtgctgttgtgtttggcatagctagagaaatgtaaggtaaaaggctcactttgttttccagtgggtccagagtcttctctatacccaacatatgtttactttatgaacttaaatggaaattaatttattgtagactacatctctatttgggaatgatgaggtaaatgtataccttaggcattttctttaacaaaaatgttctgtgtgtcaggaaagaggtgtgagagcggtaggcagcctgccgcaaacacacggatggcttcccaccgccacgaaggttgagaacaaagccagggggcccagaggagcaatagccctgggccacaagcgtgggtaggcctttcacgtattccgtctgcacaggcaaccaaggccagtagaaagctatggctgcaaaaccctggggtggacgatgtttgatgattagacggtcatctctaactactaaactaatatctgcattcttgttaacataaatctctccttggctattttaatagccacagtcccaaacttcatcccagcttagatttctcagcactgaggtaaactctgcattgtcatcccagcgtacacctttaatgttttattgatttcactggcactgtatttggacctgtccttgtatatgtagagacatatgtggcttcattggtaatttacaagcaaaagatgacatgacgtgacacctgtatgaaaatgtgatgattgaactccctgtgtacagcgagtgaattaaaatgtctgcctctccagacatttcttaatgattccacttaatagactctatgtgtgctgaatgttcctgtgtacatatgtgtgttaaataaaacaattgtattgaagactgtttttctcacaataaaa

SEQ ID NO: 3486 - DNA, 683 bp, Homo sapiens
gttggacaagattatgataattcagaagtgaagtaaaatgcctccctctgatggcaaaaagccaacctgtttgcaaaatcacccttattgaagggtggcatggctgtggtccctccctcctgttacttgcatcaccaaccaaactaaaccaaaccatacctgggcctgttcagctggaccttgaaatcagtttcctttttctctcccctttgcagcacttttcagtttccagctttgtcattctgtggcctttgctgtgacaatgctgggaagggttagaaatcctgtcacctccatccacaaaggcacagttccacgccctgtgataagatatcccctcttctctcccagactgtctccttaagcctttcaaactgagccccttgctgttggggtaatcacccttaaggccgccttgatgcccctctctccaatcaagtccaatagtagcattaactgagaagcactacacctgactggcttcactgaagcttaagtggttgaggatgaatcttcggtgtaaaatcttttactataaggatatattttaaatatttcatatcccatcaagttggaggttaattttatccatcacaatgagtcatgatttgttgcacccaaaaggagcagaaacacaggtgatgagatatgggaggtgggcaccatggtgctttggaggcgtt

SEQ ID NO: 3487 - DNA, 407 bp, Homo sapiens
atcttaatattaaatacagtcaggagtggtgagaaacctatttagcctctgaagaggagaaattaggaattaggatacctgctcatcttctttttcactctgagatgtgaactaaaggaccataggctcaataagagcctgttcctctaggacactttatgtctgataacagtactctccctttgttttacaggttcgttggggtgataaaggatctactgaggaaggtgcaaggctagagaaagccaaaaatgctgtggtgaagattcctgaagaaacagaggaacccatcaggcctagaccacctcgacccaaacccacacaccagcctcctcagacaaaatggtacaccccaattaaggtatgtgtccagattttgtgtaatttaactcaaaacttctggtcga

SEQ ID NO: 3488 - DNA, 824 bp, Homo sapiens
aagccagtttataaagtggaagtattaggagattcataaatcttctatattgagaattggctatgttaataaatattacaacatcattaaggttttagctaagtttgattcatgctgtctgttaaatcaaaactgatctaaatcagaattattaaatgtgaggagcttttttaatacaggaaaagaaacatgtcatccacttgagttaatagttttcctacgttgatgacagccctcatgagtagcatccacatttttaaaatttcaaattggtttttctactagtagattgtgtttctagagaaagatacaaggcataggtgattgtttaggattttcctctagcctttgccattacctttttggggatgaggttcacagtagactttgagtgaccgtcccaccgtgaagtgaattctctgagctggtggtgtggtgctggaaggaaggttatttttggagccactctctccccttaagggatatttcccaagggcctgcttcaattctttgaatgactttagaggtgaaaaaatatttttatcggagatgatgcagaaaactccaattcagggagcccttgcgagtatatctgaagcacttatttgctaaggaaacctgaattgatagcagtactgtgctgtctggaataatgtccttgatactgaattgggaccagactggcttttatagtgacaggcaaagaggagtttattgagatcactgctcatggcatttgttgctgtaagaagtgttgccctttgattgttactaacccacggatgggtaaccggtcatacattaggctagtgtttggtaggaca

SEQ ID NO: 3489 - DNA, 456 bp, Homo sapiens
  misc_feature (1)...(456): n = a,t,c or g
gaacaatcctaaattgaaagaagtgtatggcattggggggtgggtgtgatagtacagagtggagcctgcaagttcacgcaccgggaaccaaaccccacctaacttggactggacgtcctcttccagggaatccagccagggccaattagaaatgtgtcttaaattggtgtcagggtcaccaaaaacaaaaacaggatccatgggggcctgtgaaacttcgagtgccattcatgctcggttcagtcatctgactcgtcaggatgaccagcagtgctccctgtaactcgccattatctgaccaattactggagctactttataatgaggcttctggagctactttataatgaggcttctgtttgctgtcatggtggggagtttggaattgtggcttcttgcctaacaccaatganaggactttgggacaaacccccagagccaagagtgttttgaggg

SEQ ID NO: 3490 - DNA, 1144 bp, Homo sapiens
gggaggaaccttattcgccgccactttatagtgtttgccatccggggaggcggcgccctgaaacgggaggggctaagtgcccaggcgcgagttgacagaggagacgatcgcttcccacggggagcgcagcgctggcttccaagctcccacgccttgccccaggccaggagcggaatcggcgtcccagaagtcttgagattcagagggagtttatagtaactcgtgccaatgcctcctccaaggaaagacattttctctagcaatagacgaagaacattaacggttaaaactgtttggcactcctttgtgcatacccatcactaccgtcctgcatatttccccttctctcgctaatcctgttatttctggatctcagttgtgcctggcaggaggggtgaggtgaggaaagagcgcgccagccctgcagagttgagtcagcgtttactcgggtggagcaatacctgttctttctggccctctagaataattcttagaacaaggcttcctctgctaatagcaacacctgccgttaggcagcagaggagtgttgccacattagcatgctggaataattttaatacatccttctttaaaaaatgggctttttgagtaacaagcatcctaatgatcaattctgtcatttcattgggcaatctctgcattcctgacgaccaaagtttctgtctcgatcttccagtttgaaaataccatgaaaaacagcatgtcagatttcttggacaggaagaaaacctggaagaatggcagtatcaccccaggtgacagagctctgtaaatctcagagttcaagagctgtggttgagctctcttaacacctgcttcctttggccaagaaagatgaaaacaacaacaaaaacccagcagccgccgtcctgagatgttctctgcagggctgtttgtggctgtaattttatgcttggcccggacttctgggttaccccgttacctagcttcaaggtgataattttctttgttttacctacaggttttgcctttgccagcatggctaaaacactatggaataccagatggaaattttacctcttgatttggcattcatttaacaagctggtatagcaaaggattctgttactgaaaaaggtcaaatcactcaggatgtatagag

SEQ ID NO: 3491 - DNA, 499 bp, Homo sapiens
tgatgacatgcttgatattggcgtatggtggaatggtactgagtagtcttgttaatgaaggcggaatagcagcaggatcaaccgaagtcacactgggcacccttacagaagatggctgatacatgagaacccctttggttgggctgctttgtgtttctgacataaagatgcatttccttttggcaggagggtcttcctcttcgtcagaagagctttctattgtaagatcaataacatctactttcttcttgcttgcctcactggctacagtcactgaacaaggcttactgaggacgcttgaactttctatttttgtacacggttggctggatactttcatagcttctttcttcggtctcattggacaccaagaaccatcttcttggaatttgatctcatctacatcagaacagtcattgagaatttccataaaaagcccatctaatattagactttcataggcagcttttttgtcacacacaggacaaatccaggtggg

SEQ ID NO: 3492 - DNA, 955 bp, Homo sapiens
tttttttgatggtggaaatcattttattctcatacacaggttattacagcacaattaggaagagacaatcacaactcacacaatgctatattcaaattatgccaaagtcccaacatattcatttcatttgcaagttaattcctaaaagatcagagcagagtgatacacaagtttattaacacagactacaacgtcaatgaagcctcctggcattgtcggaaatagaaaacatgtataaaaatcttcgaaatgcaggttaaaatgcaaatccaagtgaaacggaaaaagcactactgtgaagcctaacggcaattatttcccttcaaaggaggtttgtgtccagctggagagaaggcctggtggacagaagacaaaggaaggcaaaattcctaagggagaaattcaaaaaaatgatgggggtgctgccctctgctgggcctctttggcagtcgacttcaacttaatgcattagcgccgtaaggttgtaagagaagcaactctggcttgatcttagaaaagctgattttctttttggcaagcatatttccggtgagaactgatgggaaaggtggtgtggattcgtggacgaagtctctaacgtaatcttgactactgaagggtaaagacttgcccacaggttagagattacatgaattatccacaacgaatggtagcagatgatgggtcaggggtattttaattgtacagcataacactttagagagctgggaagtatgggacatcattcccgtctttcttcactcagtaactgattatcttgtttcttgtccacagatatttaacctaaataacaatgctttttgaaggttgtttggctaacccagaggtagtaaaagacttcataagtctttctattactgaagaggagcttagtaataactgcaagtctatttatatatgtagcagatggtaacaatctccagagccactgaca

SEQ ID NO: 3493 - DNA, 1232 bp, Homo sapiens
tttttagcatttaaaaatcagtatttaattacaaattatatgttctacagtccagcaatacaaagtgttgcattagtaccaccaaaaccaaaggaattggtgaggccaataaatcttttctcagttttccattcctgtgcctttagtggaacatagttgagatcaaattctggttccgaacaatccaggtttaaagtaggtggtagtttttgataataacaagctaatgtggtaaaagctgcctcgactgcccctgcagctcccagcagatgtcctgttgctcccttagttgaggaaactgcaagggcatatgcatggtctttgaagagatgtttgatagctttgttttcagcagcatctcccaatggtgtggaagtagcatgtgcattgatataggatatctcctcaggctgcacacctgcatcttttaaagcagcagccatacaccttaagggcaccttctcccttcaggatcagggggcagttatgtgaccagcatcacctgagagtccataagccaaaacctctgcatagatccgggctcttctttgaacagcatgttcatattcttccagcaccagcacagctgcacccttctcccattacaaaacccatctctctttggatgaaatggtcggacatgccaacttggggatctgagtttgtgcttcagagcccgggctctggaaaacccagcaagagataaagggctaatacaagaatctgtacctccagccaccatcacatcagcatcaccatgggctataaatctaaatgagtctcccacagcatgagctcctgtggtacaggctgtggatactgcatgatttgggcccttgagtttatatcgaatgctgacctggcctgctgccatattgaccagaatcttagggacaaaaaatgggctaactttattgtaaccttttgtctgaaaattcaaagcagtttcagaaacaacttcaagaggaatcattcccatgccaattgcaacaccagtagccacttgatcagcttctgactgaggatgccagccagaatccttcatggctaattctgcagccccaatggccatgatggtgggagaagacatggacttgatatctgatttggacacaaagttttgttcattgaactgaccttcatcactacctcttggcacataagcagcaacactgcaagggatactcttatatttttcaccaaccagtgaaacaattccctcgtgccgaatt

SEQ ID NO: 3494 - DNA, 4673 bp, Homo sapiens
atgcaggcgcagcagctgccctacgagtttttcagcgaagagaacgcgcccaagtggcggggactactggtgcctgcgctgaaaaaggtccaggggcaagttcatcctactctcgagtctaatgatgatgctcttcagtatgttgaagaattaattttgcaattattaaatatgctatgccaagctcagccccgaagtgcttcagatgtagaggaacgtgttcaaaaaagtttccctcatccaattgataaatgggcaatagctgatgcccaatcagctattgaaaagaggaagcgaagaaaccctttatctctcccagtagaaaaaattcatcctttattaaaggaggtcctaggttataaaattgaccaccaggtttctgtttacatagtagcagtcttagaatacatttctgcagacattttaaagctggttgggaattatgtaagaaatatacggcattatgaaattacaaaacaagatattaaagtggcaatgtgtgctgacaaggtattgatggatatgtttcatcaagatgtagaagatattaatatattatctttaactgacgaagagccttccacctcaggagaacaaacttactatgatttggtaaaagcatttatggcagaaattcgacaatatataagggaactaaatctaattataaaagtttttagagagccctttgtctccaattcaaaattgttttcagctaatgatgtagaaaatatatttagtcgcatagtagatatacatgaacttagtgtaaagttactgggccatatagaagatacagtagaaatgacagatgaaggcagtccccatccactagtaggaagctgctttgaagacttagcagaggaactggcatttgatccatatgaatcgtatgctcgagatattttgcgacctggttttcatgatcgtttccttagtcagttatcaaagcctggggcaggcactttatttgcagtcaataggcgaaggtttcaaagaagctgttcaatatgttttacccaggctgcttctggcccctgtttaccactgtctccattactttgaacttttgaagcagttagaagaaaaaagtgaagatcaagaagacaaggaatgtttaaaacaagcaataacagctttgcttaatgttcagagtggtatggaaaaaatatgttctaaaagtcttgcaaaacgaagactgagtgaatctgcatgtcggttttatagtcagcaaatgaaggggaaacaactagcaatcaagaagatgaacgagattcagaagaatattgatggttgggagggaaaagacattggacagtgttgtaatgaatttataatggaaggaactcttacacgtgtaggagccaaacatgagagacacatatttctctttgatggcttaatgatttgctgtaaatcaaatcatgggcagccaagacttcctggtgctagcaatgcagaatatcgtcttaaagaaaagttttttatgcgaaaggtacaaattaatgataaagatgacaccaatgaatacaagcatgcttttgaaataattttaaaagatgaaaatagtgttatattttctgccaagtcagctgaagagaaaaacaattggatggcagcattgatatctttacagtaccggagtacactggaaaggatgcttgatgtaacaatgctacaggaagagaaagaggagcagatgaggctgcctagtgctgatgtttatagatttgcagagcctgactctgaagagaatattatatttgaagagaacatgcagcccaaggctggaattccaattatcaaagcaggaactgttattaaacttatagagaggcttacgtaccatatgtacgcagatcccaattttgttcggacatttcttacaacatacagatccttttgcaaacctcaagaactactgagtcttataatagaaaggtttgaaattccagagcctgagccaacagaagctgatcgcatagctatagagaatggagatcaacccttgagtgcagaactgaaaagatttagaaaagaatatatacagcctgtgcaactgcgagtattaaatgtatgtcggcactgggtagagcaccacttctatgattttgaaagagatgcatatcttttgcaacgaatggaagaatttattggaacagtaagaggtaaagcaatgaaaaaatgggttgaatccatcactaaaataatccaaaggaaaaaaattgcaagagacaatggaccaggtcataatattacatttcagagttcacctcccacagttgagtggcatataagcagacctgggcacatagagacttttgacctgctcaccttacacccaatagaaattgctcgacaactcactttacttgaatcagatctataccgagctgtacagccatcagaattagttggaagtgtgtggacaaaagaagacaaagaaattaactctcctaatcttctgaaaatgattcgacataccaccaacctcactctgtggtttgagaaatgtattgtagaaactgaaaatttagaagaaagagtagctgtggtgagtcgaattattgagattctacaagtctttcaagagttgaacaactttaatggtgtccttgaggttgtcagtgctatgaattcatcacctgtttacagactagaccacacatttgagcaaataccaagtcgccagaagaaaattttagaagaagctcatgaattgagtgaagatcactataagaaatatttggcaaaactcaggtctattaatccaccatgtgtgcctttctttggaatttatctcactaatatcttgaaaacagaagaaggcaaccctgaggtcctaaaaagacatggaaaagagcttataaactttagcaaaaggaggaaagtagcagaaataacaggagagatccagcagtaccaaaatcagccttactgtttacgagtagaatcagatatcaaaaggttctttgaaaacttgaatccgatgggaaatagcatggagaaggaatttacagattatcttttcaacaaatccctagaaatagaaccacgaaaccctaagcctctcccaagatttccaaaaaaatatagctatcccctaaaatctcctggtgttcgtccatcaaacccaagaccaggtaccatgaggcatcccacacctctgcagcaggagccaaggaaaattagttatagtaggatccctgaaagtgaaacagaaagtacagcatctgcaccaaattctccaagaacaccgttaacacctccgcctgcttctggtgcttccagtaccacagatgtttgcagtgtatttgattccgatcattcgagcccttttcactcaagcaatgataccgtctttatccaagttactctgccccatggcccaagatctgcttctgtatcatctataagtttaaccaaaggcactgatgaagtgcctgtccctcctcctgttcctccacgaagacgaccagaatctgccccagcagaatcttcaccatctaagattatgtctaagcatttggacagtcccccagccattcctcctaggcaacccacatcaaaagcctattcaccacgatattcaatatcagaccggacctctatctcagaccctcctgaaagccctcccttattaccaccacgagaacctgtgaggacacctgatgttttctcaagctcaccactacatctccaaacctcccccctgggcaataaaaaggtaaccatggcaatgccttcttcccaaaacgccccttccccctttacaccaccttcctcctagaacacctttctcctcacggcacaagaaggcgttctgccatcacccaccattgacacaagaagtggaccttcattccattgctgggccgcctgttcctccacgacaaagcacttctcaacatatccctaaactccctccaaaaacttacaaaagggagcacacacacccatccatgcacagagatggaccaccactgttggagaatgcccattcttcctgagttcctctgtactgggatgtatattttcctagccccaaatccattgctggcaatggatgcactgaatgtgccagcactgaggagttaaaatgagaactccaaacactaacgactcttcttcaagatgcagtataagacaatgaattttaacctagatgtaattatacaatggaaatggtattccagtttagaatatggaaagaccgacctagaggaattggacaactgattgcacctgaaaatcataaagggactttttctggccaataggcaggagtcctctttttgtgaagtgatcttttgtgaagtgatcattaaagggatggaaaacacagtctagtgtccagcaggcccacatgacagtttttgtaattcaaattatgcacttttaaaaaaaaacaaacttaaacagggatcttaatatcttcctttgttttcctttgctttactcttctactttaggaatattttcttaaaaatcactcaaaggactgtgaggaaaggctgtgggtacctgaccttgttggaaatcaaggcccgggcactggtactacagggcctggttttacaggattattaccgggtggaactggaatggggtaccggaggcttcacccaaaggagggtacttttttggtggtggttggtggttttagggataat

SEQ ID NO: 3495 - DNA, 103 bp, Homo sapiens
agatggaggagagaacgatagaagctagactttcctgaatgtaccttgctttgtggcttactttggaactattaaatgtgatatataattatgaaataacatt

SEQ ID NO: 3496 - DNA, 2123 bp, Homo sapiens
gctatgtatatacgtgtttattatatgcttattacaaaagaaaaagtcttttgccttattttagggcttccatgtaaaacctagttaaaatacaaaaagtaaattagagaaaaattctgcttaggtagtgaaaattgatagcaacttataagctgtatccttaaaaacctagtcacagatatagaattacgtaaagataaaatgataagcctacttattggcaagaaacaggttaggccacttaagcagcatgtttctaccactatacaaatacatcggcaggtccaaacattaaaccaccattcgattgacaaccttttatttttcaacttaggtaacagtccaaaatcagtgtagattggcgaaaaactaggcaaaaacagcaaaaagtgcagtttaatttagcaaaggctcaagacagtatgtggaaggaaggtgagatttccctcctactgcggcaaggcaagcggcagttactgcccgacagtaacgatggtgtgcgcacccccgatgagaatgctgctgcaacacagactgggacgccgcctcccccattagacctgccagctcattcgtgaaaatctaccaggaacacatcaatgaaaaaaatatgtcaaatatgagttctctgttataagcaataaaatcacaaaatcaactcagatttgaaatttagggtaagctaggacaatttcctactttttaatatatagatattttagatttgacaatcgtttccacatacactcagacaggcttacagaagaatttcaaatatcaaatagagaagctgttaattcacgcacgttatgacttcagttaattcttccagtgtttagacttcagagctgctaataacactaaactcaataccgtgtttgttgagtctgtcaatcaactttgttttggaaaaagctgctccaggtgtgaagaccccgcccgccttaggcagatgagaagcatcacttagaagagtcatggctgcctgaaccatagctatgggggtagccacatagcccagcctctggtcctttcacctgagtacaaattttgatatttggtttgttcttatctgtaccagtgccttggctgtatccttgaccaaagaatgtcagcgtgaatgaggcagcatcaatctgtttttgtgttgggccttgttttgaaaaatagccaaaggagaagaaccatgggaattttatgagaagttgccttccaattccaaacctcacaaagaacaaaaagaaaagtcctgcaaacatcagcttaataacagaggtgatgcctccccacagttacatacgcagcatactgaactggtgattcctctaaattttcatacaagtaacgttgagtcctccttacaacagacacatcagatcccataaaaggaatggaataacctttgagttcccgacaataagaaattggccaccttctcttcaattttggaccaatgagcgggacaggtttcagatttgatacatttcttagttttctcaaattactctgatctccaaaaccataaattgctgacttccaggtaccatcatgaatgctcaacccctcaggtcctgaatgtatagtcaggaaactttccacagcagtcaaagtaccattcattttatttctggtatatattactcccagatctgctggaatggagtcaaagccgctgcttccaatgatataaacccctttgtctgcagctttctcatgatacttcagttgcattagttccagaaactgaggttctccactgatgtcgatacaactggctccattttcaatacatgcttttattacaggttctccataaaaccgatatggtcctacgcaattgaggacaactgttgcctgtttagccatttcatcaagcgaggctggattagcaatatcacagatgatgattccaacttcagatgacagtgttggtcttcccagcttcagggccgccttctccagcacccgctgcagcttctcccgggagcggcccgccacggcccagggcaggcgggagctccgctccgggtccacctgctcccggggccacctcctcggtcacgaactggccggtgaagccagacgcgccgaacaccaccaggtggaaaggcctctgctcggtc

SEQ ID NO: 3497 - DNA, 361 bp, Homo sapiens
caagttattttgtaatttgtgtaatattctggtaaaacggcctaaactggggtcatatttcctcatcagccgcattctgctaatgccagatgccctgggaagatcttcactgccatcttggaaggatgcagaatgtggtgatgaggaagccattctcccaggtacagcaaaggcagagtctgttggcaacccacctgaagggcagtagacttctaaatagcgagttgaggtccatgtgggtgaagctaaaacccagaacacttttactggctaaaaatcatgatgattcaaaactcaaaccttcacatggatgcacccaaagtgaatcaacaaaatttaaagtcctttgaatagatcaatc

SEQ ID NO: 3498 - DNA, 885 bp, Homo sapiens
gaccctgctctctcctttccctgttagacatgggcactccacagaaggatgttattatcaagtcagatgcaccggacactttgttattggagaaacatgcagattatatcgcatcctatggctcaaagaaagatgattatgaatactgtatgtctgagtatttgagaatgagtggcatctattggggtctgacagtaatggatctcatgggacaacttcatcgcatgaatagagaagagattctggcatttattaagtcttgccaacatgaatgtggtggaataagtgctagtatcggacatgatcctcatcttttatacactcttagtgctgtccagattcttacgctgtatgacagtattaatgttattgacgtaaataaagttgtggaatatgttaaaggtctacagaaagaagatggttcttttgctggagatatttggggagaaattgacacaagattctctttttgttgcggtggcaactttggctttgttggggaagcttgatgctattaatgtggaaaaggcaatcgaatttgttttatcctgtatgaactttgacggtggatttggttgcagaccaggttctgaatcccatgctgggcagatctattgttgcacaggatttctggctattacaagtcagttgcatcaagtaaattctgatttacttggctggtggctttgtgaacgacaattaccctcaggcgggctcaatggaaggccggagaagttaccagatgtatgctactcatggtgggtcctggcttccctaaagataattggaagacttcattggattgatagagagaaactgcgtaatttccattttagcatgtccaagatgaagaaacggggggatttgcagacaggccaggagata

SEQ ID NO: 3499 - DNA, 536 bp, Homo sapiens
  misc_feature (1)...(536): n = a,t,c or g
gcctgaagagagtcactagtatacaaagaattaggatgaaccacagctctactcggtaaaattcagggagtagggggttcatgtgggaggctgccggtggattaggggtatgangacacttccatggagagggtgtggccttacaaggacctgggctgaatataagggtantttatgtctattgcttcctatacntttcagaatcctttcccccttcnttatctcatttttttttttctgtaatgggggaaataaaccctaaaaaaggtgtgactggccctgcatttacataattactgatgagcccacctggattctggctccttattcttactcttgcctatttctcctatgttcccatcaaaaaaaaaaaagtgaggaagaactcccctggcagctggaacacgatcaaagagggagagcttggagggggcagtaagccagggcaaagttgttttgcaggatggatgacgaggcaagtgggatgggccttgggaagctcatgtttggtgtaagaatgccttcagggtatgaag

SEQ ID NO: 3500 - DNA, 473 bp, Homo sapiens
gctttcacagttctagggaatgggggcagggaggattttgcttttgcttttgctttgagggagaactttagctgactaaaaaaacagaagtttggggtcatgatcacaaaggggccattcccaaaagatggcaagccacgtattcagtggagactaggccaaattctaaatggttttatccatagcaggggagaataggagaatgagtttaagagtttttctcttcttttttcctagaaagaggtaaggataatgggaaaggtagagaaggcggctcccacagaccttttaagagaggcagaatcttgagcttgaggcaccttgagtgcatctcagttcagctggttctggctgaggcctccaaaggcaagctctgtgctttccagtggtttctggctggcatttccaggggatggtgtttaacaccgctttcctccagctcccttttctaagaaagaataaatggagttctg

SEQ ID NO: 3501 - DNA, 2559 bp, Homo sapiens
tttttttttgtaataaaagcagcttgttttctgcttgaacaatagctctgagagcaagaaggctggaaatgcacattcagaaatgaggtaagcaggacccagtgaggcacgacgtggtttactagaagtggccctagttcaatttccattaactcagatcagccattgtgattcaccatttgtcaggctctcaggtttaacaaaacctactatcaccatcatccttcaacagccacagtctgaattgagccaacatttttttttctttgagaaagaagtggactggggcacaacttttagtctgaggggagctagtggaaatctagacaatagaagtcatcgatagcagcttttcctcaaatgtgtgactcctcaggggctaaactgctcttagcttagaattatgctttactagagatctagcagataagtgggttaatcactaccatcctgtaactagttatatagcttccagacatgagggagacatcaaacagggatggaagcaaccccaaggatatgcaagaagggcatgatgaacccccttccctctggcaggagaacaaggccaaccaagggacagactggaaagcacttagatgtttaaggaggagaaaggggaagctttgaccagtccttgccttttgccaagttcagccagttctccgctgcttgcaacctctagcgcagtaacatttgcagaattgcagattttcccccagatactaggaggaaagggactttggggggtggggaaggggtcgtggtgttttaaaagcataagttacctgtttgcactgttttaagataggaaaaaaatagtgggcaaggtgaacatcagacgtaaatttgtgtgtttttattttgtcatgctcttgaaaatgtttgaccatttgtagtatacacagtgaaacttgattctctgttgcataaaacactatatttttttggaaatgttactgtccaaaagcctcttccctccctttccttttcctatgtacttccttcatacttgctttactgatcagccaggcaatagctatccaagagctagagcatgaaacagggccctttccaagtaggctctgggtgtcctaagccagcgtgtgcccctctggtttagtgagtgtaatagagtccctggcacctttctttgcaaatgaggctaacagaccagactgcagcaagttatcagattcctcaatcagatgcactaggagtgaggagcccagggatggagggggttcctgaagtattgcagttggctgtagtagctgagttcttttccatgttaccgaaactgtagccagttacagtttactcaggaaaacggtagatcaattcagccatggtagtgctggttggcagggattggtaacggagagaactgctcatcagccaaaactcaagccttgccttttaggaggccaccagcagagggacttggtcctccttgtctggtacttgtgtacatgccggtgacctgaggactccactcacactggcgagcaaaaagggagcagtgattctcttttctctccccaccccctgccctttgttaccaacaccagtttcccagggggtacatgagtttctgaatttttaaaaaatgtttttggtttggtttttctggggactgataagtgctttaagcaatgtccataccccgtcaagactcccagcttagtcattttcttgtatttttctgttcacagtatttgtgtgtgtgcttgttttggcagctcattttggctgtattatatattgagtgatgaattgatcctcttttttccctaagggatatgaattgtttttcttgtgttatattctgcttgtgaatagctggagcaaacctggggctgacacgcgtaagctagggctgcaaagcgagaagagagccggtggagtgtacttgtacctgacaggctgacctacctgagtctctgagcttttcagtccaaatctttgcaaggctcaaaatgccacagaacctctcctcttctccccactccccatggcagggaccggaccatccctacatgcaacatgctgttcctccagcccctcccattgccatggcaaaacaggtacctttggggcatgggggcattacatgggatgcttgtgtaatcgaccacctagccttctctctcccctcccgtcctcccccagaatcacttcctaggacacccgagctgcttgcccagggtcctgtttccctgctaactccagagaagcatcccagggctttgtgacagtctctaattcccttcccttctcgttaagaatcatattgtatagtagctttcagaccatacagtattcattgggttactcctattattatcaagtagctggaattgtgaaggtcggagtagttagatctttagcttttattccttatttttttgtattactctccatgtgtataaattattgatcatgttgctggcttttataaactctaagcgaaggaggagcactgcctcagcctttgcacatggtaatgaagcactgtttttaaataaaagagagaaacaccattaaaaaaaaaaaaaa

SEQ ID NO: 3502 - DNA, 77 bp, Homo sapiens
gcggcacgagcctgaagagccactttacctttttggtgctataaaaggagctgggggatccataaatgcaaagacgg

SEQ ID NO: 3503 - DNA, 1045 bp, Homo sapiens
gcacaggccacgtggtatacaatggcgccttctactacaatcgcgccttcacccgcaacatcatcaagtacgacctgaagcagcgctacatggctgcctgggccatgctgcatgacgtggcctacgaggaggccaccccctggcgatggcaggccactcagacgtggactttgctgtggacgagaatggcctatggctcatctacccggccctggacgatgagggcttcagccaggaggtcattgtcctgagcaagctcaatgccgcggacctgagcacacagaaggagaccacatggcgcacggggctccggaggaatttctacggcaactgcttcgtcatctgtggggtgctgtatgccgtggatagctacaaccagcggaatgccaacatctcctacgctttcgacacccacaccaacacacagatcgtccccaggctgctgttcgagaatgagtattcctatacgacccagatagactacaaccccaaggaccgcctgctctatgcctgggacaatggccaccaggtcacttaccatgtcatctttgcctactgacacccttgtccccacaagcagaagcacagaggggtcactagcaccttgtgtgtatgtgtgtgcgcgcacgtgtgtgtaggtgggtatgtgttgtttaaaaatatatattattttgtataatattgcaaatgtaaaatgacaatttgggtctatttttttatatggattgtagatcaatccatacgtgtatgtgctggtctcatcctccccagtttataatttttgtgcaaatgaactttctccctttggaccaggtaaccaccttccttcaagccttcagcccctccagctccaagtctcagatctcgaccattgaaaaggtttcttcatctgggtcttgcaggaggcaggcaacaccaggagcagaaatgaaagaggcaagaaagaagtgctatgtggcgagaaaaaaagttttaatgtattggagaagttttaaaaaacccagaaaaacgccttttttttttaataaagaagaaatttaaaatc

SEQ ID NO: 3504 - DNA, 2224 bp, Homo sapiens
tttttttttttttgtttttaagcaaggttttaattaagctgcatggcatccagaagagagaaatgtaccaaagaatccaacctgagaccagattatacattttagaggggggaaaaaatcaatgctatttgggagagggagcactgtaatcagaatataactccaaaataaatcatacaataaattattttctaaaagaaattgatccacatgcagacagatgaacacacacacggcacacgcgtgcgcacgcacagcgtgttcattctagtcatttattcagtgttgactgtgacttccatggagggcaccatgagaaaggaaaagattagacatgtgaaaagaaggctaggccccatcttgccaccagtggaatgagatttaagaccactagagaaggaacccactaaattgccagaaacaagagtagaaagaaacagcagttatcaaggaagattttaattgcttcaaagagggaaaggaagaaagcacagaaatctaatgcaagtaaaggcacaatgaatgtggagttgaatggaaccaaacccttccttcggttaaagttatccttttttttttttttttttttttttgcgtgtggttttgatggtggttgtagttttgtttcgttttgtttttaagagatgagtcttgaaggcagagttgtaatggccctcctctctcccctcccattcccgaaattagggtagcttaacagaaagccaccttgaccacatggccagggactgagattcaatggggaaagaaagactgtagctggaatgtgaagaatttgatttgcagttgattgcaggttgggtttccggaagggcagacagctcaatgtagtgccatcatagggcctcagatgcccacactccacccccagagcttcacaaaatggaaggaccctggagtcacccttctcccccacccccataagcactcagcctacagattatttcaagtgatcaggagaattaaaacacaccccaaccctgagttgctctttagcaagtctatttacaatttttttctcacctctccctggaggtaaatctgggtttcaagttgggaagccatggggtgagggagttccccagtgcaatggccgatgacgagtatccttgccactgccagttaacagggctgggatgagctcctgtagacagcagcctcacatccatcagctagggtagccctaggttctcactctgttggcctacgctgtgaaaatgatggggctctgcagtggagcaaatccccatgacagagaaaatcacacctggaatatcaaagtgctttggtccaggttcagtgaccagagaagaggaagaggggcatctagctcatttaaaaacctggaggtttgccctgcttcccagacagggcagtaagaaacaactataacgtttttcccattagggaaaaacatcacaaaaccaaacccatagaagggcttttaacacagcttcctgatgcttagctgggcaatgtctcttccttctgtggggggacaagggagttaatgggactgggcaacagcctcaacatgagaccacccaatcttccacgaaagagacgacattcccacaagcagataaaaagagcagtttaaaaggtgaggagttttagtgctcttgtagccagcccaccttaaacctaaattagaagctttttacaacatacaaaatagactgattaactatgcagatcacattcccatcttcaatagtaaatatacatagtaataaatctattattaacagtgggaccaaataacatataaggcagacatttaaacaggtgttgtatcatcaacatgctctaaaaaaaactcatctgactagatctagacccaggcctttttgcatgaggccaagacaacaagtatacaatcaatacccatgtgacacagtccaagtgctggggaatatgagggggcagtgggccatggggaggaagatatcagccccagtgaaaagctggggtttggctttactcgtgatattttgatgctctatgtctgagtaaaggaggaaaaaaaaaaaaaacactttgataacgtacaaaaggcatcgactcccatttcaaaaataaatgggaagacttcacagtcaaagttcagtcacttgtcagtatctgccctggaactctgatgcagtatcaactcttgtactctctccttttccctccactagcatgccctctctcagttgtttgg

SEQ ID NO: 3505 - DNA, 556 bp, Homo sapiens
gcagcgagcctgggctggaggagcgggcggaggggacggtcaacgagggacgcccagaatcggacgcggcagatcatactggtcccaagtttgacatcgatatgatggtttcacttctgaggcaagaaaatgcaagaggacatttgtgtgatccaggttcctccagaaatgagatatacagattactttgtgattgttagtggaacttctacccgacacttacatgccatggccttctacgttgtgaaaatgtacaaacacctgaaatgtaaacgtgaccctcatgttaagatagaagggaaggacactgatgactggctgtgcgtggattttggcagcatggtgattcatttgatgcttccagaaaccagagaaatctatgaattagagaaattatggaccctacgttcttatgatgaccagttagctcagatagcacctgagacagtacctgaagacttcattcttggaatagaagatgatacttcatctgtgactccagtggagttaaaatgtgaataaaatattttatgcactgcgttagtcatttcaaaaa

SEQ ID NO: 3506 - DNA, 163 bp, Homo sapiens
ggaagaacttttctgcctggcttctgctttatagcctataagatagactggaggcctatttaagacttttgttaaaattcatgatacgagttgagttattaatctgcccatttaaaccgggcagtgtatttttaatggttattggatgcaggagccagattac

SEQ ID NO: 3507 - DNA, 115 bp, Homo sapiens
ctccatcttacttggagcccagtgggcaaatcaaatatggttaccttgtaggagggccttccttactggattgggagataagctgtgaagcttgatgtttaatgcagtaacttgc

SEQ ID NO: 3508 - DNA, 268 bp, Homo sapiens
gctgggaaataaggtctccacaccccactggttagagcagaaggggcacagcctcttcaggagaactggcaatagctatggaagcttaaagcaaagcctttgagccagctgctccatttctagaaattgatcgcaacaaacacacaggtgtaggtagaaggatgttcattccaagaaaatttaggatagagtgcaaatggagaactgggtaaataaatcatgttcatccattcaatgaatactgtgtagttgctaaaaaaaaaaaaaa

SEQ ID NO: 3509 - DNA, 341 bp, Homo sapiens
  misc_feature (1)...(341): n = a,t,c or g
agagctctggccaacccagggtccctgcctggtgattcaccccagaagctagctggctagagggttagcctggctggggccagctcaggtccacttcaacagaagaggctgctgggcctcttgtcttcacaaacaaccaagagatcatcctcttgganagaagcagtgcagggaatggatatgatctcatccctcctgacctgtgaggggccctgctgtagatggccacaggtgcctgactaggagcccctaggtccccaggcttgagaaagggttaaaatagaacctccaggtagttttcttcctctacctccacatccccccaagactgaaaagagtca

SEQ ID NO: 3510 - DNA, 1559 bp, Homo sapiens
atttgacgaattttttttgtacagcattcatgtgtgatattttccagatttgttggatctatttggtttaaaaagtattctatcttaaggccaactaatataaaataccattgttaaagaatggtacttttataaacattagtgtatttatttcctatgtgttaatatgaagatcagaaattattttttgcactttggcataaatacttttcaatatctgatttgttctctggataaattagcatagttatttttttattcacatttacatttctaagtagttgtatagtagaagcaggaagctcttattgcttatttggtcgtaatgaaaataatttgtaaaatgtcctttaaaagtttaatgatacttctgatgtttcggaacagtcatttcacctactatttctgaatatattttgcaaattgaattggaataggaattgataatagcagtcttaaacattagtagtgggatttggctatggtccagactgtgctccttatagagaatttgatctgctcagtgtgagcggtttgctgttagccaggggctatttatggcaaacacatgcttttgtatcttgtcatagttatccacaaatggcaaaactggacttgattctactggtatgcaaaacaggcatgctagtaagcagtcagtcgtggctcaggaacttaaccccatagctcagaggaatgcttttagcagaaaacaggaaagaaaatatcccttaaaatttttttttgaatgtgtggaagtaattttagtataattagattttttccatatttttgaaagatttttcagatgtgaacattaaaatagggattaaatgtctaggcttccatttaaaattatatgaatggtttgggatctttttgcactgaggccaattttatttcaggcttccagctgtccctgtgagttatcctggacatttcgatggtttttggtaaggccaaactctgataagcaaaacagagaatactgacgtatacttaaccatatgtgtaactgatacttggcaccatggaatttttcattgagttatttcctcattcttttaaaaaataagggactataaatcagttatgtagtatcttttgtttttgtagctgattccttaactttcttgtatgcctctagtaatttcagagattaaatattgctttaaactgtgatactttgatttgctagattgacaaaactgatactaatataattaagttcatctttgaaatacatctttgtgcgtagagccaaaaaaagagataaaattaataatagttcacttgttatttgagattaatttggcatttgaaatgatcattttattttacaatcatttataatgaatcaatgttccagttagctttaaaaggtatacggtgctaattagtaaaatattgaaggcaatattttactgctagcttgcaaagttatgagagtttaaaaaataaaatatatgaaaatatgtaaagctgttgagatgtgtttacttatacttcagaacattaaaagtttaaaaactggtatttcagatcaaaaaaaaaaaaaa

SEQ ID NO: 3511 - DNA, 437 bp, Homo sapiens
  misc_feature (1)...(437): n = a,t,c or g
ggtttattttgtgagtagaatgtttctctgaatgctggaaacaataaagccaaccacttgcctgtaattagcctggaccccataagtcacccagacataataccaagctctaaaattgccttcagaagtaaggggccagcaccctggagttacaggcacttgcttttttggcaccagatttattgacattaatgatcccaatcccatatggagttccctggactgtttagataatgaatttgccttatgacagcagtgctccttctaatgaggaatgagtattttctataagtttttattttaatgtggtggctcttgtgatattgatcactggatcatgtgctgttcaagctcagctttaaattttctcgataacatggtttcgccaatnccattggggatgctggtttaaacaagggtgggattnctacagaact

SEQ ID NO: 3512 - DNA, 309 bp, Homo sapiens
agctcccagcccagagcctgacttgctcttttaggttttatacagctttctacctggctttgtcctggatgatgggaaggagattttcagtaattgttttttttctcactctataaataagggaaattttcagatcatgtctttgtgacattttagtgatttcctaatcatttcttggacatcttctgggcactttgggagacatcaactttctaagataccagaaatagcatagattattctcattagatcatgaggacctgaaccagaggaaactaagtgaccacagacaagtcagcttccaaaatg

SEQ ID NO: 3513 - DNA, 420 bp, Homo sapiens
  misc_feature (1)...(420): n = a,t,c or g
gaggaatcttctctgaaatatttctgaaaagtggtcatctagcctctgaacacttttaataataggatttctttacaagacagcccaccccattatcaacaagttggcttatttgaaagggacagaaaaattaggggtcttgctatagtcacacaatgaggtaatgagaagctggaaataaccctcagtctccttgaatctcagccctgttgctccttttccagttcagggattcccagattttatcttcgaaggctacgtgcaacctctgcgtgtgttttactgggccacagaggggctggggaacccngggcaactggcattttcttcttttctctttggaagggaagggatggatttgctgganggggtgggtgggaattggggtcttttcttttccacaggggtngggtttgnaag

SEQ ID NO: 3514 - DNA, 1193 bp, Homo sapiens
ctatggttcacagtgatttatgatgaccccatgcatcacccgtgcataagtgttagggaaaaggagcacatcctgtcctcactggctcaacagcccagttctcctggacgagctgtccccataaaggcgatggtcacatgcctaccactttgggccattttcctgggttttttcagccatttctggttatgcaccatcatcctaacatacctaccaacgtatatcagtactctgctccatgttaacatcagagatagtggagttctgtcctccctgccttttattgctgctgcaagctgttacaattttaggaggtcagctgggcagatttccttttgtccagggaatctttctcagattgatcactgtgcgaaagctcttttcatctcttgatatgcaagtttcctcatgggaatctcaaggggatttgggctcatcgcaggaatcatctcttccactgccactggattcctcatcagtcaggattttgagtctggttggaggaatgtctttttcctgtctgctgcagtcaacatgtttggcctggtcttttacctcacgtttggacaagcagaacttcaagactgggccaaagagaggacccttacccgcctctgaggacataaagttacaaacttaaatgtggtactgagcatgaactttttaaacattttttacttctctccatattcctgaccatagactcagcagttcttaactctggctgtgtgttagtcttccctggggagcctttataagacactgatacttgggacccactccagagattctgaatgaattggtctggggtggaaccccagatactactaatttttagatactccttagaggtttctagcatgcgcccggggttgacaacagctggacaaacttgaaaagtcaattcatgtggcctttgaattttcctcattggaaagtactaaataaataaaaattcatgtgaaaatgatcactgataaatatcttcatggtggggcaggttattggatgcagagaagatctgctcggaattgtagccatatgttacagatctcagcaccgatcagaactgtaaagctataatccccagaattaaagtttttattattttttatacattgtaaaacatagacgtttatttatgtgattaaattctattaaaatttacatgctaaaataaaaaaaaaaaaaaa

SEQ ID NO: 3515 - DNA, 358 bp, Homo sapiens
  misc_feature (1)...(358): n = a,t,c or g
gtgagcttcaataccctgaaatatcattttgcaaagggtgaaaggtggttattaactgacctttaagtgccatctaaccagatctttcattgtctcaatattccctgtcaccatttagcccagaataaatccattcatgtctacaaaaaaaagaagaaatggattcaaagctccatggaaaatatctacatgatccaagtgcaaaatgcaccaatatcagctgaattatgtcctacctcccccaacggccataatgcccgtgttgaaagtcctcaaccccaggacctcagaatgtgaccattatttggagacaggatctttaaagacatgattaagtttaaactgaggccatganggt

SEQ ID NO: 3516 - DNA, 778 bp, Homo sapiens
  misc_feature (1)...(778): n = a,t,c or g
tttttttttccacaaacaaagatggtttaatagatttcagcatgtttccacttgacaatgttatacgaaaatagaatctttattaaaatagcaaggcataacaatcactgctactcaggaaacactgtgtttattctttttaatcatcaaaatcaatgactttggcaaagacctgtgaaatctcagagcctgtttctccatctggagaacaggcaggtagggcattgccagctccctgtgagtgggggccactggtgggaggagatggccctggtcgcccatgggatgagaaacttactcctgcttctgtccctggagaaggtcagggagatgccagtgtggccttaaggcaattctaacacttgcttatctcattttgtaacagagaagagagagctctcagccttggccacaccagcatggagcccccttccccagcgaatttatttttcatggtcactttctatttttggcagtgagtgatacatgttatccactattggcagcaattggggggaaaaaaagttcattttaaaaacaaagtttannnnnnnnnnnnnnnnnnnnnnnnnnnnnnnnnnnnnnnnnnnnnccaagcaagccggggcaaaggcaaattttcatcactgatacatttgttcaaagggtggtgcactcaggctgggttggaccaattagctggtccccaccacctcttacaatgtcacttctaagagttagaacagggtctcacactcagatgccttcaggtccaggaggcgctgtgaatgcagaagcc

SEQ ID NO: 3517 - DNA, 460 bp, Homo sapiens
gaaaatttctaaaacttgtagtgagacagccttgaatttaaaatcagaagatgcacattctgtttttacctctgtcactgactctgtgggtctagccatgtcatttaaccacacttgaatttcaggtattttgtctgtaaaatgaggataataacgcctgtctactacattaaaccacaagatggtttaaaggttagcataataaattattagagtatgacctaggagttacctaatctgacctctttattttacagatagaagtacagaaaggtaaattgaattgctcaaggtcacccagtgtgtggcaaaatcagaactggaaacttaggtcttctgccagtcccattcaagggctttttccattgtacagttaaattatatgttgtgtgtaaggcatagtataaactgtaaaccattcatgccaaatgttcaggtggattgtttttccctcagtttt

SEQ ID NO: 3518 - DNA, 330 bp, Homo sapiens
ctggatttaaagattacaaccttgtggtcaggatgattgagacagatgaggacttcaatccttttcctggaggatatgactatttggttgactttttagatttatccttcccaaaagaaagaccacaacgagaacatccctatgaggaaatccatagccgggtggatgtcatcagacacgtggtgaagaatggtctactctgggatgagttgtatataggattccaaacacggctccagcgggatcctgacatataccatcacctgttttggaatcattttcaaataaaactccccctcacaccacccaactggaagtcattcctgatgt

SEQ ID NO: 3519 - DNA, 463 bp, Homo sapiens
cccgtggatggtggttgctccatgagcctccatctgattggctggagaggctgtgccaggcagacctcatttacatcagtcatctgcactcagaccacctgagttaccccacactgaaaaagcttgctgggagaagaccagatattcccatttatgttggaaacacagaaaggcctgtattttggaatctgaatcagagcggtgtccagttgactaatatcaatgtcgtgccatttggaatatggcagcaggtggacaaaaatcttcgattcatgatcttgatggacggtgttcatcctgagatggacacttgcattattgtgagtacaaaggtcataaaatactcaatatagtagactgcaccagacccaatgggggaaggctgcctatgaaggttgctctaatgatgagtgattttgctggaggagcatcaggctttccaatgactttcagtggtggaaaa

SEQ ID NO: 3520 - DNA, 439 bp, Homo sapiens
  misc_feature (1)...(439): n = a,t,c or g
gcttttatttactatgagcttcagctgaaaatccaaaagaaactttaatttcagatatttaatgaaatcattatagctgtggtaatttcctttagctgggtgtgagtgtgtgatgtgagcgtgnnnnnnnnnnnnnnnnnnnnnnnnnnnnnnnnnnnnnnnnnctctggcagcatattccaaataatttctgtaaaatttcagtttgaaattaatagaagacatattaaattgtttaaactctttgttatttaaattctatattactttagtcgattactctgtattattacggcaaagctttgatatgttgccctgaatttaaagaaaaggctgttcggcctaaaaacaggaatattttattaccaaagaggaattaactaccatatgtcatttacagaaagagtnaattcttcagggcatagaanattacacattt

SEQ ID NO: 3521 - DNA, 428 bp, Homo sapiens
ctgaggatctgatctaaagcataagttaattaggtgggtttttctgtagaccagacattgtaataaaaccaaaatcagttttgttttggtttaatgggtcctggttggaaaaaaactgaatatttcacatgcctggtttttcaacgtcttttcttggctacattccatctttggcaaaatgttggaaaaccatggaagtgaaataattagccatatggcaaatattggttttgttgaaccaagtcagacctttggtcagtttattctagtttatgcaaacagtgtggccaactaccaaggacgttcatgggctgtgcatgaacatgtccaactgttacacacagagtatttgtctcttagggtcctacccacgttattctcaggtctctttgactacctatatctaagggtactgtttcaaacactaa

SEQ ID NO: 3522 - DNA, 70 bp, Homo sapiens
tgttgggaggtgataaaaaggtaatctagccaaagggaaatctgctgatgagagtgaatcttagttggtg

SEQ ID NO: 3523 - DNA, 2559 bp, Homo sapiens
  misc_feature (1)...(2559): n = a,t,c or g
atatatatatatatttatttatttttaaaaactccaggggatgtccccaaagttagtaaacagttctgtttcttgtcccttttatggctgccatgcagtttcaattgttcagtacaacagatgaggcatttaaaaggtctccaacgtcaagaaacactaactcatctctggcatatcatattttttaaggcagaagtattttctgtaatggttactacagagtgtttactggttaatttttagttaaccagaaccacacgtcccatagataattccatttaactgaggtttatatccgtaagagcattaccatagaaaaatttccctttagcaatttcaagagacctcagccaccaatatacctaccttctttacaatataaagtgaaatattactttagatgaaaattttttgtatcttacttagaaaaaattaagttgatatttaaaagaattttgattttaatcaccttccacaacggatttgatataccttaaactccactttcattttttataagagaatcactttcaagggaaaaaaatggatgttactatattttaaaatctgctttataaaaaagtgtataaatatcaatctgccagatatacttcctatccccaacacagctgtaacactgactaatgggtcatgacccatgaagcaaattttacttcctaaatagaaatgtgtaggtggcagaaagcgtatttttcagcaggagtgattctgttggatctctttacaatgtcagagcagttgttagaaatgttagtattttattcggtttcttgctgtgaaggattatcacaatgttgaagtgatggctgttcacccagtcgtcatcaccgtcatcatctcaatcttgggaatcatcagcagtgtcccccacacagagagacaggtatagtggtgcagtttagtgacagggaatccagtcttagatcctgtttatatcacatttttgtgaatttacacaaaattccatttatagctttaaaactgtactacataacacattactatactactacaaaatatccttctctataaatgcactgaatattttcttgggcattttattaggcctttttagcattattacaaatgctaacaacaagatacttcaaaccaccaaatataaagtcagcttcttaattttctgaaatttagttatttgagttaataaggaattctgtagggaatactgacccatctcttttcatccaaccttcaaaatagttaaggcctatttgcccatctcacctaaccttcaaaatagttaaaacaaaaacaaacccaaactagctatatataacaagaatctttcaattcccaaactattgaaagaccctaagtcagccaatctatgaaattatacaagatgaaggtgaaaaagctgtgctttttcttaaaccattaaacccagttcttttctcttaaagttgtaaggaaaatggaaaatctgtttttaaatcatgcaaagatttaaataagcatttttctatctgctctaagaaactgtttcttatcttacaattttaaatattcataacactcaaactacttttttgtggccatttatgtttttgacactagattgtatggtattatttagccaagatgtattataatgctaaattatgtataaaatatgatttctggaatttgtccatcttctattgaagtgccattattaatgcccaggggaactaaaaaagaaaaaaacagtccttgcttgccagcaggtgtcctcatgcactactttccttcaatccttttgtgcccatagtgggaatctggacctttgagtgttgcacatgctgtgtagcacacattgggcaggatctctatgggttccttgaacatgaccctgaatgtgttagctgtcccatcacaactaaagccggtatcattctgtcccagggtttgctttttctcatattcaatgatctgtatattcacttgataatctgtagggccatgaatagatccatacaagccaaatccaactatagagatccttctattaactgtgaatctgattcgatcactcgtcccactgtaaccccagcggctttctacttgctggaatctattgatgcagcattcctttcccctgagacagcatcttggtcggtcaatgtattcaactcggggtttagggttgacagtaaaatgaagaaagaggtttaccacttcacgatctgacaaaattccagattgagcaggacctgctgcaaattcctcaattgtcatcagtgggaaccggattaaggaaagtgcttttcctagaactttttgtttattcccaaaagtcacaggtaattgttgtctctgacattctgcttctgcccagcgtacaacagctccaaaaagtcgactttctcnnatactgagtgtgtctctctcnaaaactgcacagagtntatctanatcaatatcagtaaacccttctgcacttattgcatccattgtgcttttgtctattgtatctagacaaagactagcaagctgaggttcatcaaataatcgagcctgagtaagtaacataaaggc

SEQ ID NO: 3524 - DNA, 401 bp, Homo sapiens
  misc_feature (1)...(401): n = a,t,c or g
ctgaattcttgctgtggggacttcctgagttttctcagtttttacatctaagattagtcttggctgaagagaaatgagacgtgattatactactttttcaattgcaggtttaaggagttcagatttaatgaccaaagtcatacagatcatggaatctgtcgtcgtcttatacagtgtcagcctcgagtacatttattaaccttttggggctgtcagttttccactaggattaagattttggccgggcaacgagtgcacgcctgcaatcccaanacattggggggtcgaggcggannnnnnnnnnnnnnnnnnnnnnnnnnnnnnnnnnnnnnnnnnnnnnnnnnnnnnnnnnnnnnnnnnnnnnnnnnnnnnnnntatatatatatatactagctggggca

SEQ ID NO: 3525 - DNA, 1003 bp, Homo sapiens
gagctgtgtgcaccgcatgtgtgctttccacaggggcgtctctgcgtccacgcctgcacatcccggcgcacgtgtgggcaccacagaggacacgtgaggggaatggtcaccagtgagccatatttattatttctagagaaatcacgaactgctttctgtaattgcactgtggataaatgttccgagagtctccattgttgtacaggatcttcagttattcgaggggaatgaggcaggtcaagccgatgctagccactagtttgattttttttctgttttatagtttgcgctgcatggtacttgtgaagcttaaatattttgagtgttctactgtgtctaggattgttgggattgtacatatggtactctttcataaatgataaatgattctgaatgttagtgttttatgttcatataggaaatattttcattgagtccaaaatacctgttttgttgatggacttgaatgcatttttgtctcttcttgatgaagcggctttgccgcagcaaatgaggcttctctctgaggagctgagaggtcttgcagcctctccttgtcattctcccaccccacatcccattttttaaagcccttttggtaaaaaccaacaggttgtcggccgcagacctcagatggacccggcccatccctggggacgtgctggcgtggcaggtccagagagctgcaccctgcacggggcaccgcaccgcttccctccgcgcagctcttctgcctggttttcggaggccaggctgctgggaggcttccgtgttcctgtcagtccttccttcaagaagccggggaactcaggcagactcatctccgcagagcataccagccgtggggaccgtttcgacttgaatgatgtgtgcacacttcaggtggtggggacttgagctttaaaaaaacctccacagccgaatcttctcctccgagccactccacgtcacgtccaagctgggccttgggcaatcttgtgggttaaccatgtggggatgagat

SEQ ID NO: 3526 - DNA, 973 bp, Homo sapiens
attgccaaaaaagcattttatacattgagttggggggtagtggatcttagtgtggtgttgcatggaggggcgagattttatatttataatcaacacgtgggttaacatgtttttttgaaatccaagcaatacacaggaaatttaagtagaataaaaattgcagcccatttttgaaatgtcagcatgtgctgtgttcagttcaggtttttgttgtttgttttgttattttttaactaataagttggttatcagtggtgggttttcaaaatgtacttgttctaataagttgtacaatgaactaaatcagtggcattctctagataatgtgggggaaggttagaatattttctggccttctatgggggtagcaacccagaatcaatctgaattagtcctgttttggtggagtttgtacattttaaatcctataacaaaaataatctagttttcatttccttactagctagatgcgaatttgtctttttgaatgaccctgtcaataagccagaaagggcaacccagaaaaagtgctccccacatccttctgagacttggcctgtgtgtgtggacgagaagccattcaccgtaagggtgcagaaagctcgaccaagccgaattgcaaacaacgttcgttctatttttaaatgtacaggttcgatcgtttctatagaaatgggtttatctaagaaaagtcttggtttgtcttgctgctgtaaaaggcctttccaaacccctccttttattcctgtttcccgaaataaggtatttgtagagttaaggacctactgcatgcctgtccccagggccccggtggaaggaaggcagcgctgcctcttccttgactcagcccatcatcctgaaaattccagaagtgaaccaagggtttagacgccagaggttgggcttctgttaagagttggcttccaaaacatggagccttatgggaagtagcccttaaaaaaagaatgggttg

SEQ ID NO: 3527 - DNA, 1482 bp, Homo sapiens
caagatccagctgctgcgcaggtcagacccagctgcttttgagtcccgcctggagaaacgcagtgaatttcggaagcagccagtggggcattccaggcaaggtgattttatcaaatgtgtggaacagaagacagatgccttggggaaacagtctgtgaacagaggattcactaaggacaagactctcagttcaatctttaacattgagatggtaaaagaaaaaactgcagaagaaataaaacagatttggcagcaatattttgcagcaaaagatacagtctacgcagttattcctgcagaaaagtttgatttgatctggaaccgggctcagtcctgtccaacatttctatgtgctctgccaagaagggaaggttatgagttttttgtaggacaatggacaggtactgaactccacttcactgcacttataaatattcagacccgagggggaagctgcagccagccagctggattttatatcactatcctgaacttaaggaagaaaagggcatagtgctgatgactgcagaaatggattccacatttctgaatgttgctgaggcacagtgcatcgccaaccaagttcagctcttctacgctactgatcggaaagagacctacgggttagtggagacctttaacctcagaccaaatgagttcaaatatatgtctgtcatcgctgaattggagcaaagcggacttggagcagaactgaaatgtgcccagaaccaaaataagacttagaactgtacaggttggcccttcacctagttgactcagccctcgatagtctagagcccaccccctcctcaggaactcaagagctcagcatttataatgagcagttggtaatgagttgccctatgtgcttgtcgcaagcagtcacagagatgagccctattacttgatattcaggaacaaaggtacctgaacattctgataattatctcagcatacttgaggtttccttttttaagtgttcgaggttataacaagagacagccaaggacctacaagacagttgacttgattttgcacagtgtaacagcgcagttgcattctggccactttgaccttatagctcccaaatgatgagtttgtcatctttatgaactcatgacaggataataagcttgaagacctgctgtagttagatatgggctttaatccttcccatgcaccagtcagctgaacaaaagcataagccaaacatcctgtttaaactgtagaataaccagatattcccatcaggttaaagacttcatctagatgatgccccccagagatgcctttagtgtaagtagctggcttggggtatcagcaaatttcaggtatagttagataaacaggtacagggcctgcatactattaaaccatagtttgtggcacccgcttttctaactccacctgttagaagctatgtgtttgaaggaatgaatcagtgcagtataaataaaattcttttgtaaggagaagattaaa

SEQ ID NO: 3528 - DNA, 401 bp, Homo sapiens
  misc_feature (1)...(401): n = a,t,c or g
gtaaatgaaaggctgcagtgccagttttaagaaagaatttctgtgaagtgtgatgactctggagtctagctcacataaagagagtgttatataaaaatccgacagctgaactaggttgctcttttttggcagggagtggggatgagatttgacaccaatatgggcaaaattagataacctttgggttaatataaatgattttgatttggaggcctaatttgtagattgtgaaagcagcttttaggtttaacttattcacagaccccttataattaccatgtttttttttttctncctaaatctcttggttcagcttgtgaatcttacgtgcccgtaaagttggggatgttgaattggctcttctttgttctggncagtgagtcaagtgtccaggcattttt

SEQ ID NO: 3529 - DNA, 108 bp, Homo sapiens
ttaacacagacttctgactctcaggccctttacatgtaatgattaacctcaactgaggctgttcagttgtattaggttaatagaaataagtgtagctgtatctgaaaa

SEQ ID NO: 3530 - DNA, 517 bp, Homo sapiens
  misc_feature (1)...(517): n = a,t,c or g
ggcttgtggtaccatagtggtacaaaaattttcatagtttgaaaataaaacaggtattttgccagtaatgtatttctttctgccagcagccaagtcccaaaccactttcccctctgaacctctgcttacctaaatggtttcaaaattaatacatgctgctttgatttggcagcacacttaatatactactgaaggcaaaacttgtgttgaaagtctttaagataaaaatggtgtgatnnnnnnnnnnnnnnnnnnnnnnnnnnnnnnnnnnnnnnnnnnnnnnnnnnnnnnnnnnnnnnnnnnnnnnnnnnnnnnnnnnnnnnnnnnnnnnnnnnnnnnnnnnnnnnnnnnnnnnnnnnnnnnnnnnnnnnnnnnnnnnnnnnnnnnnnnnnnnnnnnnnnnnnnnnnnnnnnnnnnnnnnnnnnnnnnnnnnnnnnnnnnnnnnnnnnnnnnnnnnnnnnnnnnnnnnnnnnnnnnnnnnnnnnnnnnnnnnnnnnnnnnnntacttggctccgtc

SEQ ID NO: 3531 - DNA, 626 bp, Homo sapiens
  misc_feature (1)...(626): n = a,t,c or g
gcggcacgagctggaagaatgaatggggctgggctgtgaaggcttagggagttctcagccttgtgggctgagcctgatgatgtggaaagcttacaggagggcagtgtgagcccctgactgcatggggcaagctgtccggtaaaagtataatgccagctactcatggaatttaaaacttttctagtagccacattaaaacagaaaagannnnnnnnnnnnnnnnnnnnnnnnnnnnnnnnnnnnnnnnnnnnnnnnnnnnnnnnnnnnnttcaacatataatcagcataaataacttttaatgagctatttggcattctttcttttggtacttaagccttcaaaatcttgtgtgtattttataccacaagcacagctgattttggaccacagccatattgcagatgttcaacacatggccggtggctgctgcattggctgcacagggttagcaggtctggggtgaatgagaagttgaaagtgatcttccttgtcttagaccttcccctgagagcctgaaccaggcttctcgcatcaaacccttgaaccagacctgcccaacagctaattggtacctcagggaaaagagaaaacctgggggattttgtcatgcatgggttatatggtg

SEQ ID NO: 3532 - DNA, 778 bp, Homo sapiens
  misc_feature (1)...(778): n = a,t,c or g
ctaatcacatacatttctcagggtgctcctcttttgaggccctatttccatgagaaggaaattgaggcaaacccagaagttgacagcttagctgggaaccaaagatgatgatatacgggagcccatggaatctcatagctcgagcagcacttttggcaccaacctgcacccaaagagcatctttaaaagttgtcacatacttgctccgggcagctctttcacaccactaccatgctctgtgccagacatgactaattttttaaatctctgacactctcaattagtcatgagctaattctgtaagaatgttagagtaagcacactaaaattatattcttctgcaaagagaaagaagattacctgagaccacttggtcccccctcaaagaagcaaggtctcagccaaaatctttgaagccttgtgacatcaatagattttctagggtggcatcatgtccttttgatttttctgtatatagtagttcaaatgccaccttctcctctcctttccattgccactgccctggctaggtcctcatcagtgccatcaactcttcaccagggctccctggccaccaatccaaacaaaaccaaacactactaatcatggatcttcatgggcacgtttgctttcgttgggctccaaaagcctccagtgggctttccattgcagattgggaaaggtctaggactcaggcgattcaaaacttccaccactggattggctttttccaaacatctccccttanttcctgttgtggaattaccacnggggttta

SEQ ID NO: 3533 - DNA, 2393 bp, Homo sapiens
aaccagaaagcttgcaaccaagacagaataaatccaagtccgaaattactgacatggttcgctcctccactatcacagtgtcggacaaggctcatattttatccatgcagaagtttggactgcgagatacaattgtgaaatcacatctactacagaaagaagaggattacacctatatccagaacttcaggttttttgcgggaacatacaatgtaaatggggcagtcccccaaagaatgcctccggctgtggctgagcaatggtatccaggccccagatgtctattgtgtagggttccaggagcttgatctgagtaaggaagcttttttctttcacgataccccaaaggaggaagagtggttcaaagctgtgtcagagggtcttcatccagatgccaaatatgcaaaggtgaagcttatccgactggttgggattatgctgctgttatatgtcaaacaggagcatgcagcttatatctcagaagtggaagccgagactgtggggacaggaatcatggggaggatgggcaacaagggaggcgtggcgatcaggttccagttccacaacaccagcatctgcgttgtgaattctcacttggcagcccacattgaagagtatgagaggaggaaccaggactataaggacatttgttctcgaatgcagttttgtcagcctgacccaagccttccccctctcaccatcagcaaccatgatgtgatcttgtggctgggggacctcaactacaggatagaagagctggatgtggaaaaagtgaaaaagctcatcgaagagaaggattttcaaatgctgtatgcatatgatcagctgaaaattcaggtggccgcaaagactgtctttgaaggcttcacagagggtgagctcacattccagcctacttacaagtatgatactcgggctctgacgactgggataccagtgagaagtgccgtgctcctgcctggtgtgatcggattcctctggaaagggaagaacatcactcagctgagttaccagagccacatggccctgaagaccagtgaccacaagcctgtcagctcagtgtttgacatcggggtgagggtcgtaaatgacgagctttaccggaagacactggaggaaattgttcgctccctggataagatggaaaatgccaacattccttctgtgtccctgtccaagcgagagttctgttttcagaatgtgaagtacatgcaattgaaagtagaatcctttacaattcataatggacaagtaccctgtcattttgaattcatcaacaagcctgatgaagagtcttactgtaagcagtggctgaatgccaaccccagcagaggcttcctcctgccagattctgatgttgagattgacttggagctcttcgtaaataagacgacagctacaaagctcaactcgggtgaagacaaaattgaggacattctggttctgcacttggacaggggaaaggattactttttgtctgtgtctgggaactacctgcccagctgttttgggtctcccattcatacactgtgttacatgagagagccaatcttggacctaccacttgaaaccattagtgagctgactctgatgccagtatggactggagatgatgggagccagttggatagccccatggaaatccccaaagagctctggatgatggttgattacctgtaccgaaatgctgtccagcaggaagatctgtttcagcaaccaggcctgaggtcagaatttgaacatatcagggactgcttggatactggaatgattgataacctctctgccagcaatcattctgtagccgaagccctgctgcttttcctggagagccttccagagcctgtcatctgttacagcacctaccataactgcttggagtgttctcccaactacacagcaagcaaacaggtcatttctactctccccatattccacaaaaatgtcttccactacttgatggcgtttttgcgagaactgctgaaaaattcagcaaaaaatcatttggatgagaatattctagctagcatatttggcagcttattgcttcgaaacccagctggtcaccaaaagcttgatatgacagagaagaagaaggctcaagaatttattcaccagttcctctgcaacccactctgagcctatctctcctcctattttacttgaggctgccaattaccagccccacctgtttcagctcaagagatgccttaagataattatgtgaggccacttggtagcaagaatggcagctatttcctgagcctagtaccccaattaagcccaccattggttagcacactcagcgctgtgagtcgtgaagacaacgggagaaaatccaccataataaaactgacattcaattttcaataaaaaaaaaaaaataataaata

SEQ ID NO: 3534 - DNA, 1715 bp, Homo sapiens
atttccatgggccaccccggaatacatgcctcatccttacccagcacttaaatatttattttaaaaatccacatcattttgctttaaaaatgtttattcagcgcctgcaatgtagaaggcactgtgtttggcaccatgaggaatacagaaaccaacaaggcatgattcttgccttaggaagctcacagtctagcgtgggaaattagaaattgcacatgcacacaggtaactgtcacaccaggcaggaagcactaaatgctgtgagattgataccaacattataagaacccagaggaagaaaacactatttggggatgaggataagagattagagaagttcccttagaagtagggggtttaaacatgacagatcaaatgtagataggaaaaaattcagaggaaaatgtaatcggggaaggctctaattaaaaccagaagcaggaggtacttctgtgatgtgatggaggcaggagaagccccgctgggctggattcagaggggaggggagacaagaggatggggaggtggaggagggagcagggagtggagtgggaggggaggctggaaagatgtgtggggatcaagacgggaaggtgagtatgtgagtatgtgtgccagacaatggtgtttccatgtcaatggaggtttctcagagagaggtgatctggctggagaaagcttaatctggtggcaatggacaggtgactttaagaagtggggaacgagggaaggaggccagtttgaaaatgataacaagggtccagactcagtgatgcagcagtgaccatgagaacagagcagctgcaggtagaagatggagacagaactggggagatctggtggaggtaagccgggtggaaagatgatgtcaggtttatacctagagacacatgatccattcacaaagccagggaaacctaaagagaaaacacttagaatttgaggagaagaggcttagggctgggcctgagacatgggcttggcctccaggtggaggggtccagcaggcaggtacaagccggatgagagttcagggcagagggcagagccggaaacagaccaaaagctgcccatggagtggcgagggtggaagcagcggccaccaggccgagggccatctcgccggggaagggtgggtacagcacaaccctgtggccacgttttcctcacacaggaaattcccacagaacacccaggagggtgacgatgcctcccatgaacaatgccgtgtgtctctgtttgtcctttgtccccgatttcacacctaagaaacaatgtcttcagctgtgtgatgacaagtaggaacgctgcctccattgtggaggatcatcttgaaaagacttactccaatgagagtttttaaaagttttcactactatttattttgaagagttttctgtaatggaactatttcttctgaagatttcagaaaagcttttgatgtctctttctcccatccttcaccctattagaggtagtgctctagcggggaaagattagggcccctctaggtcaatattgtgtcatttccccagaatagccagggccaaaccagctcccaagcagtactgtttcagaagtgaagataactcacctctcccaaaagcagagttttggcaatataaaacatgaaagtgggatgggatctaagtcatatttttttaatgagtttaaaacacgtgtgtgcattagaaaacatttaaacacagatattg

SEQ ID NO: 3535 - DNA, 594 bp, Homo sapiens
gtcgacacaagaatggacctccaaacccatctataggagatggtgggagcagtttgttcaagatgtcccggtcgacgttttggaagacatctgccaccaaatcctggatctttactcacaaggaaaacaacagatgcctcatcacaccccccatcagctgcaacagcccccatctcttcagcctacaccacaagtgccgcaagtacagcagtcacagccgtctcaaagctccgaaccatcccagccccagcagaaggacccccagcaaccagcccagcagcagcagccagcccaacagcccaagaaaccctctccgcagcccagttctccccgacaggttaagcgagccgtggtgtgtttctcccaaagaagagaacaaagcagcagaaccaccaccacctaaaatccccaaaattgagaccactcatccaccgttgcctccagcccacccacctctagaccggaagcctcccctggctgctgcctaagggtgagcctaaccccgggccccttgggtagcgcgtggccgccccaagggccgggtggcgctgggggggggcggggccttgtgggcggggaacgtgggtggtgagg

SEQ ID NO: 3536 - DNA, 1008 bp, Homo sapiens
caatttgacatatttttatttagattttgcctaagatgccacatgaagcctatataagacattctttccctaaaacttacatatgtatgtacatatatatatataatgttttacatcctaaacagtctacttcacgtcttcaccaaatgtgcagcagcgtgattcacaggttcaccactggaaaatagaccttaaaattccgccaatattgggtcaaagatcttacactataacacatactacactgtgggcacggatcaacagacgagaatactttatacagaagcttctcgacggaagaaggccttggagtgggaaatctaaaggaggggacacactacatggtccccagcacaccttgcgaagcccagcgaccacaattcccagaacggcactggttcgtcgcacgcaggttttccttgttgccggggtttgtagttcttctcgatcgtgtcagtttgtaaggcgagggcggaagttggattcctggcctgagaatattaggcgtagttttccagtttttggcaaagcggaaatacttaaggcccctgggttgactgggttctttgttttatctaccggcttctgctttacgacaggtcacaaacatgtcagacaaaagtgaattaaaggctgagttggaacgtaagaagcagcgactggcccaaatcagagaggaaaagaagagaaaagaagaagaaaggaaaaaaaaagaaacagaccagaagaaggaagctgttgctcctgtgcaagaagaatcagatcttgaaaaaaaaaggagagaagctgaagcattgcttcaaagcatggggctaactccagaatcccccattgtccctcctcctatgtctccatcctccaaatctgtgagcactccaagtgaagctggaagccaagactctggagatggcgccgtgggatctagacgaggacctattaaacttggaatggctaaaatcacgcaagtcgactttcctcctcgagaaattgtcacgtatacaaaggaaa

SEQ ID NO: 3537 - DNA, 782 bp, Homo sapiens
  misc_feature (1)...(782): n = a,t,c or g
tggtggttgtggggcaaatccaggggggcctaatagggaaacaagtgttcctgattcctgagcagaactactctgctctcagtaaagctgtcatgatagaacactgcccctgggtatatgcccttgttgtcccatcccttttttagttcttagcaaagccgtcttcctatttctcttgggnnnnnnnnnnnnnnnnnnnnnnnnnnnnnnnnnnnnnnnnnnnnnnnnnnnnnnnnnnnnnnnnnnnnnnnnnnnnnnnnnnnnnnnnnnnnnnnnnnnnnnnnnnnnnnnctccacctgctgtggagttcacgctgctgtgaacattagtatacaaatatctgagtggaattgctgggaatggtaaattggagccaacagttcacatcctcatgaaggttcggtgtgactgtcatgcgtggaccaccctggagtccagctgggcagtgacccttcctcacgcctttgctgtgtgatggaccggctgagcagcgtcagtgcggatcttagggaacatcagttcccaaatgggagacatgcctttaccaagttatctgaggctcctgtttcacactctcttcctcctcctccttctcctttatgagttctttaattttttttcttgaactatattcttctgaatctgttatcttatgagaattatgcatcttaatttttttaaattgagataataaagcccaagaagaaataacttttttcaagcacctctaagaaatatatcgggcttatatcattcgtgaacatttaaaaatgcacataca

SEQ ID NO: 3538 - DNA, 490 bp, Homo sapiens
gcaatggaggcagcagagggttcactttttgttctggtttatattaaattaggaaagctagatttgctaattgtcatatgactttgattacctctcccacatttgctttttaccatgtttaaaatccttttattggtgatttgtttttggacacagtatactctgtccaagcttcaaatgaaagcactgctctttaagctcctagcatcttaccttaagttctgttggaactgggtgagacctcatgtttgcgtatgcggtctcactgagttttagtaagactcagtttttaagcttcagcaactaatatttggaattgcactttttaaattatagaatatgatttgtgtccttgaagtttgatcattacctgaagaattggctgaaaacaataaatgtttaaatgttgcaatttagagaatgtctttattgtgttgccaaatgctgaatgacagagagctttaattctaactgctttaattagaaagag

SEQ ID NO: 3539 - DNA, 1049 bp, Homo sapiens
  misc_feature (1)...(1049): n = a,t,c or g
cgctagagatgtttttggagggaatcagtgggactatttgtggcatggatggcctattcctcctagaacccacgtaagagcttggatgatttagttggagaaaattgcacctatcaccaaatgcaaatttgattcccacctccacccccttttaggttatgggagttggtgttgggacagggtggcagagaatattggagtcaatcctagcttggtctcttgccttccctcttttcctccatccatcgtggacaatgcctgcaaaattttcacaggaagaaagcctattcaggatattaacttgaaatttccagtgtcctaagagcctctcatgaagcccagttctaataagtggcaagctgctctgccggggtcatctcctgggtcatcggactgattgctcaagttctgcaggagaggaagcaccattagaacaactccatcagaacagctccaccgggacttgtgggcctaaattttcctggcctaacgggtctgtctccaaaccctctttcctaagagctgagcaaaccaaccataataaacttgacaaaagactttgttgtggccatgacagagataccgactcaggagggctacctacctaggtgtgatcatgctgggggctaccttctgagtatatttgtgaaagcacatatttgggaactctggtagcttgagttgggaatgggaaggttcttttttacagaagtacttccccaggggacttctgtgtgtcacagtcacctctgatgcctttatcttgatgttgcattggggaatctcagccatcagcccaagtgcttgttttattccaaggcaggggtaatccccgtcaacttactctaacctttgctgaaaactaatcttgattcattctactctggaaaatccaaaggtgcttctgagagataagagggaaggggtagaaggaaaggtgccccttgaaatgggaattgagcccgttaagaatttaaaagcttatcttaacctccggctgggggaaaagtaatttgnaccaccaacccttttccttaacctggctttgg

SEQ ID NO: 3540 - DNA, 652 bp, Homo sapiens
  misc_feature (1)...(652): n = a,t,c or g
ggtgtgaatgtaccaacactgaatcttacagcagttatctttctatggccattaggtacctagcagatgtgcacaatataaacaaaaagatatctggcctaccttactactaaaagcatttaacacgtgcatttttggtacttttttttttgttttctaaaagctacataaaggccttatttgacattttcactgataactgatcgcaccctcatgttgcagtgttcgtcccctattcattaacagtgtgtgcaaatgcaaccccaggacacattattgttctgatagatgctcacagggaatcaagcttctcgcccactccacggctctgagccccatccaagggcaagacttggtgcccagctggaaggacgaaagcacactttgtgaccgccatcctcaccagctggcatgcctgggctgcacactgctgaacgtgctcctctctccttctctgtacaatgattcagcatctcggcggaagaggaaaatggagctttttgaggctcgccaggtcccttttgttttcaacattaaaaattcccaancccaaagcctttgttttgactgaagggagaaggagaagggaagtaaggcttcttgttcaagcaacctgaacccctaggaaaaaggagcccagtttgctaacggt

SEQ ID NO: 3541 - DNA, 446 bp, Homo sapiens
  misc_feature (1)...(446): n = a,t,c or g
tcagccttcccaaggtgctggaattacaagcgtgagttattgcgcccggccttctccaaggatttcaaagttaggcgccctgcattttgggccagagattgagattgtgaatctgtctcctggccatgcagtatgtttgtttgtttcacgtgaattttattgccaagtttaaaaagaaaaatcatagagggacatagcaactggcgtttgctctcgctcagttccccactcatgaattcaagccttggctctggcatggtttttatgttttctgtggtatgagctggccacaccctggtctggggatgctgttgccatgccgatgaccgagtgtctcatgcagccggccctgtctatgttactctttgcctatgtccagcatttggtcaccgttctgtactaaagttgaatattcctgtgggcctcaggaagtcactgnatatggc

SEQ ID NO: 3542 - DNA, 151 bp, Homo sapiens
gcaactggctcgttcaattgctgaagaacaatattctgatttggaaaaagagaagatcatgaaagagctggaggatcaaagagatgatggctagacacaaacaggaacttacggaaaaagatgctacaattgcttctcttggagggaaact

SEQ ID NO: 3543 - DNA, 427 bp, Homo sapiens
gaggcagttcctgagttgtttaccaaaaatttacattaaaataacataagctatttataggttgtacattgttctttgtgttacaaattctaggaacatgaagataatgggcgaggcagctagtcaggggcacaaggactaaacttttcctaggcatagtgtggcatcatatacatactcatgtctctctggccctgcacaccttgcagacttcagactgctcggagctattttcctttcctcatttctcctgtttataaaaaatcttcccatggaagcagtgatgatcaatctcttaggccttcatcccttggcactgggaaggctcattcttggataatcctcagtcaagtcattgatttctataactgtcatttcttgttaagtcatctccagtcttcagaatttcatgcttttggttttctca

SEQ ID NO: 3544 - DNA, 483 bp, Homo sapiens
ccccgattgctatggaattaggtagtctaatttgtacaaatccaccgtaaataccaaacataaggcatttttattataagatattatttctttccctttaaactccagtctttttgtgaagtttaaagttgacatcaggggttagcaaactttttctgcaaagtgccaaacagtaggtgttttaaggtttgtgggccacgtggtctctgtagcaactactccaccctgaagctatagcaccgaaatggctatagacaatgtgtaaatgagtgggcatgggtgtattccaataaaactttatttacaaaagcaggtggagggccagatttggcacctgggctatgtcacagtttctggtatatatcataagagtttaagagtgagggctccagaggcaaactgtctgcctcagttttcccatcttcaaaatatgcacagtaatagtacctacttcaaagttgctgtgaagattaaatgtcgacc

SEQ ID NO: 3545 - DNA, 404 bp, Homo sapiens
  misc_feature (1)...(404): n = a,t,c or g
ttttcaattctcatacatccgtattagaaattatgtattgtatttatggtcagatttattggagactgctgcaaaaaacaaattactggtatggtgcactcaaccaatctcaaaacgaatccaagggcaccagaatataagttgcacaaaggcagaaatctttgtctttttttttttctcatgtgtgctaaacacctggaagggtacctgcatttaatgggtgcaccataaataatgaatgaaggcaggcaggtaggcagacaggtggtacaatcaggatccccttaatatgaattgggggtagtttatgtaaaatttttcctttttacctactttctgattcattatatgaagtagattgggattcagacttaccatnttagctgtggccnggcgcgtggctc

SEQ ID NO: 3546 - DNA, 210 bp, Homo sapiens
gctcgacgagccaccatgcccggccgtatcttcccgacaatcttgtgaaatagatactactattaaaagtagctgtatcagataatttctagatgtaagagggttcgccaactatagctagcaagtcaaatcctgctgtttttattttgagaaggggactctgtcccatatgctggagtccagtggcctgaacacggcttctctgtaacc

SEQ ID NO: 3547 - DNA, 404 bp, Homo sapiens
  misc_feature (1)...(404): n = a,t,c or g
gcttgtcttgaaatggcattttgtttttcacagacagtgctttgagatgggttttatgtttatttaggtgggcttggggtggggggttttgtgatagccaggctttggtgcttgtactactctcaaaccatacccgagccacatgtgcaggcatgtgtgtagagacttgaggtgtactgacccaacttgtcgccagcctgggctctcagaaggtttcaagaagtttgttcttctctcagctcgatgggagttaaaaagtatagcagtggagagatccagtgtgagggcctggacttccaaccttccagggagagctgggcttgggagactaagaactcctcaggtaatgcctgaacatggcccagtagtctatagcaaggactnggccactgtaaacacaacag

SEQ ID NO: 3548 - DNA, 1258 bp, Homo sapiens
ggcgaggcaagatggcggcaaccaagaggaaacggcgtggaggctttgcagttcaggcgaagaagccaaaaagaaacgaaatagatgcggagccgccagctaagcggcacgccacagcagaggaggtggaggaagaagagagggaccggatcccaggccccgtttgcaagggaaagtggaaaaataaggaacggattctcatcttttcttccagaggaataaattttagaacaagacatttaatgcaggacttgagaatgttgatgcctcattctaaagcagatactaaaatggatcgtaaggataagctatttgtgattaacgaggtttgtgaaatgaagaactgtaataaatgcatctattttgaagctaagaaaaaacaggatctctatatgtggctttcaaattcacctcacggaccatctgctaaattccttgttcaaaatattcataccctcgctgaactgaagatgactggaaactgtttgaaaggttctcggccccttttgtcttttgaccctgcttttgatgaattaccacattatgctttgttaaaagaactcttaattcagatctttagtacaccacggtatcatcccaaaagccaaccatttgtggaccacgtgtttactttcaccattttggataataggatatggtttcggaactttcagatcatagaagaagatgctgctcttgtagaaataggacctcgttttgtcttaaatctcataaagattttccagggaagttttggaggaccaactttatatgaaaatcctcactaccagtcaccaaacatgcatcggcgtgtcataagatccatcacagctgcaaaatacagagagaaacagcaagtgaaagatgtgcaaaaactgagaaagaaagagccgaagactcttcttccacatgatcccactgcagatgtttttgtaacaccagctgaggagaaaccaatagaaatacagtgggtaaaaccagagccaaaagttgatttgaaagcaagaaagaaacggatttacaaaaggcaaagaaaaatgaaacagaggatggacagtgggaaaacaaaataagtcaatggaaacctgatttgtttttcagttactttatatttattttgtattcaatgtgtaaatacttttattatctaatactatcttacgtctaattagtgtagcatttacaagaaagaaaaattaagatcttaaaatcagtgattatctttttctaaataaaatatcaccagaattcatcagtt

SEQ ID NO: 3549 - DNA, 3131 bp, Homo sapiens
  misc_feature (1)...(3131): n = a,t,c or g
tttttttttttttttggctctgaatgttctgtttattggggtgttgtcatgggtaggaggctcagcagagcaattctgcctcctgcttcccagtactaccccgtccagcaactgcctctcgtataaataagtatcaagatggtcagtagaaaaggagagcatctcctcagccctggaagacagtgtgggagcttcagcttaaggaagaggtaggtgcctgtccgccagcccagcctcaagggccaggaagacctggctatgggtgctggaggggccgttagccacaccccagggttctacagtctttggtttggatcaggctgcaggccagggtcctggctggcagccccacccaccctgcgcctctgacacacacccagcgcttttccctgcaggggccggggattggatggggccctcctgagtgcagcagctctgagttgcaaggggaggcccactttcccagcctctgaacctcctttctgccactgcagtttgctgggagaaaggagagagaagcctgggggtcaggcaggaggtgtaagtcctgaggccggatctggtgcacagaggagcgaggtactgtcacagtgctggcacagaagctgggatgtggctgtggtttgggtctgcaggaggtcagcagagtccgccgaggaacacggaggatcccacagggccacagcagggcaggataccgcccagcggtatcaagccctcaggccgcatccagtcccatggggtcatgccctctgagcctcttgtcgctcagcactcaaatggctccctggtgaagacatggactgtcactctccccagatggtccagcagcgcctgcatctgttcaccaatgatgctgaccctctgaggcgccacagatgagcctgacccagtccctggcctcagccagctgngcagcctggaggctgacagggaggcaggttagaagtgattcatgtgtccacaggcaccctgtcacaccataccctgtgacatgtgaactgaatgctctcagggcagcccctcagaagccttcccggcagatccggggaccccgttctggtttttctgactcactgcctcatcaccttccttccaggtccccaaaacccctgcatcatgatggggccaggtgctacctggtctcccaaggcccttcagacttttccacgttggtctcgtgtggcacatgacacaatctctcccgtccctggaggccagctcccccgtggccaacctcaggcctcccatggcatctcagggctcctccagccagactggcgccatccaattaacctgatggtggctgagcagctcagctctgtgccagcccctgcaggaggcagatcatgttgtccaggccccagaggtagccgtcctcacggttgccctcagcccagggcagcctgtggctgagcgtctggtggtcgggcaaggccaccgtcttgccgaagtctatcatccagaccttggccaggccggtgtggtcgtgcacgaagaggagggagctgcctaccacctcgtgggtcttgaagaagggggagatctccagagcttcacgaagttcttctaggcatgccacgtacttttgcaggatgacgtggtctccatccacgaagtcctccagcacttttgtcacctgctccagtgcctgcgtcttcttgaagttggtgttacaggtcccatctgccttcttgatgccctcgatccggaagcccagggtagaggtggagctcatggtttccctccactgcatgtagcggggcttggtgactgcaccctgggcatgctcctcaggggtaggggccccagggtccacagccaccatcttctcatacatgtccttccggggacggggacgttcccgtgccttcactagctcctcttccagataggtcctgctgcccatcttgcagtccataatggaggggccctcaaagtcagccaggaggtcttccatctggttgaaggtctggccatcctgcagcaccatgccatagtaggcaggcacgaaaggtcgcagcgggtctttcatcagctgctccaggctgcgctgctcacactgacagaaacgtttcagaatccgaccatcctctcctgcctggaagttcccagcatgtccagaaagctggacccaagggtagtgttttcggaaggagaccacaaagggtgaatacttcagaactgtcttcagcttcttccagggtttgctcccagacctgtcctcgggatcgctggcacctccgcccccggccaccacgtcatcctcagactcgtcgaaagaagaggcagaggagaagccgccgctgcccccctcaacccgggaggggggtcccactggctgggcctcaggctcaggggtctcaggggtaatgatgaggcggggcacagggcacagggggctacacttcaggtgagagtacaggtgagtcagcaattctccaggctctggttcctctaatgggccatcctcaggctctcccaagaggcagtctgtcccaggtgctgtctgggaaccgtcagtgctaggttgtgtccaggagccatcagtatcctgttgtatttggaaaccaccagtgccaggctgtttcctggctgcttcagtatcctgttttttctgggagccatcagtatatggctctgtccagggaccttcaatatcctgttgtgtcctggagccatcagtatacaattctttccaggagccatcagcacttggctcttttgagggacaggctccttctgggtgagtctggaggctggaactgttctggtgggtccagaggttatcagcccaggacttgaccctctctggctgagtctgtgacccatgcgtttccagctctgtccagggcccatgaacccctggctgtgtccaggggctggcctcctcgggctgaaactggaggtcggacctgtgcggatcagtccaaaggccatctgtcccggtctccgtccaaagacaagtcgtctccagctctgaccagctccattctagatgcgtccggaggctggacctgtctggctccgtcttttgcttgggcctctcggtctctactccaaggccagctgccgcgggctcagtctgtccgtctgtccagaattctgcctgcggactctctgcggaattc

SEQ ID NO: 3550 - DNA, 661 bp, Homo sapiens
gccgccgctcggaggagtggcggaggggccagggctagccttcagcgaggatgtgctgagcgtgttcggcgcgaatctgagcctgtcgggcggcgcactccagcacttgctgacgatagtgggagccgcctcccgcgtgggcgtcccggagcctggccagctgcacttcaaccagtgtttaactgctgaagagatcttttcccttcatggcttttcaaatgctacccaaataaccagctccaaattctctgtcatctgtccagcagtcttacagcaattgaactttcacccatgtgaggatcggcccaagcacaaaacaagaccaagtcattcagaagtttggggatatggattcctgtcagtgacgattattaatctggcatctctcctcggattgattttgactccactgataaagaaatcttatttcccaaagattttgaccttttttgtggggctggctattgggactcttttttcaaatgcaattttccaacttattccagaggcatttggatttgatcccaaagtcgacagttatgttgagaaggcagttgctgtgtttggtggattttacctacttttcttttttgaaagaatgctaaagatgttattaaagacatatggtcagaatggtcatacccacttcagattggtaaac

SEQ ID NO: 3551 - DNA, 436 bp, Homo sapiens
  misc_feature (1)...(436): n = a,t,c or g
gccaacaccccgggnaagacccctcaatccagtgccccattgccagggaaagagtgcccaaggtgttctcatcagccccagctgaaagcacttttcccctcaaacattgttcaagacttgagagaggtgcatctcccatgaagaattattggcactattttctcttctacttagagtcacaggacagcagagcccatatgccacaaacaaaaatcaaaccaaaataacataaaatattaccactgttaagacgagaaaaagaatatgttaagatggggcaggaatgctgaacacacctctttcctttccctgactttttaaaacactgctacgtccttgtcaaattctgtttgagaagttagactcacacgcttcccaaatcttaaagcctaggaatacattttccagtaatacagtaactagcgacaaaattact

SEQ ID NO: 3552 - DNA, 1447 bp, Homo sapiens
  misc_feature (1)...(1447): n = a,t,c or g
gatcacttgtcataatcagggtgctgaaacataatgaaaaggtttaacttagtcacagtaaatattttatatccctgaaaataagttatttaatgagaatagaactatttaatgatccatgagtcctaaaaggatatctgccttgtattgccaagtttaaggcaaaggtgagatcctgtattaataagaagacagcttttttgtttgacattggtaagtaccaagaattctaactcacatatagtaggaaacaacaaaaagtctccactgacttctttgaattagatactgagaatccacaatacagtagtgtggataactttcaagaagccattggaaacatctccacattctgggatgacttgtaaatgtctacagagtaatggaaggaaaggcttccttgtctgctcattgctgccacctgggttgggaaaataattgaagatgttttctcaagtccttcaagaatctcttcttaatgttcagaatagtttaagagcgttgttgaggtaaagtgatagctgattattttctgagatttagatctaaacaaactcagcatgacgaggaagcacacttcacagctccagggtgcaatactgatgtaaagttgcctcgtgaggatacatttttcgctcatgtatgcaaaattcctatcagttcatttgcacagccagttccaatcatgtatgtgatcaccagattaaaagcttcatccagaaagacaagactcctcagaacgaatagtagacaagtaagactgctacccacagaagccagtacgcttcaggtgtgaggcggggtaactactcatctcttcacagagccaaggaaagaaaaagaacgtctctaacatgatttaccattttaaacagccttataagttttgtctcttaaaatcatgctgcagaaggagggggtaaaagtcgtgttctgccctgtctgtggcatttggagtgccccgctaggtaagaagcaatgcttagatcttgcttccaggcagcagcttgaattcccgaatcttcctgcaaggtgcataccaaatgcagcggttagaaatccattacacgtaatccatattcaccttcccatccatcccgcagaagaggcatggtgacacccaggctactgtccatgcttgagagggccgtatttgaaggttctgttactacaagttgggaatattcacggacatgcctgaataccccggctgtaactcacacgtggtctgtgtaagtggattaacctcggggcggccttgtttaatcctgaataatatctgaaagactgagtttacttgggaatgtgtagtttttctaatgccattaaaatttattttagctgttaaaaataaaatcattttattatcagcagactcttttatactttatggggcatctacatactacttccgccactcttcataataaaattagntgtaaaatat

SEQ ID NO: 3553 - DNA, 208 bp, Homo sapiens
caaaatatcttaagtagataattgcactaatctctgcttttctctcccagcagccttccaaattcatgtctcacagctgacagagttgttcctgccttcaggattcatgacctggctctgtgttctaggctcaggctttctctctcatatcacctcttgcctctctgttgcccccatattttcccctctggttggttggtgctccttt

SEQ ID NO: 3554 - DNA, 410 bp, Homo sapiens
gaccacccttgcctcctaggctagaatgtgctgctgctggtcctcagagcctgaagctaaaatggggagacagtaactccaagacacatgctgctgaggacattgtgtacacactacagctggaggacagaaacaagaggtttatttcaatctacagaggacccagccacacctacaaggtccagagactgacggaattcacatgctactccttcagaatccaggcagcaagcgaggctggagaagggcccttctcagaaacctataccttcagcacaaccaaaagtgtcccccccaccatcaaagcacctcgagtaacacagttagaaggaaattcatgtgaaattttatgggagacggtaccatcaatgaaaggtgacccctgttaactacattcctgcaggtattgg

SEQ ID NO: 3555 - DNA, 95 bp, Homo sapiens
gctgctggtttccattcatctgacaggtcataattgtgacgttggtaaaatagagaaagttcccttttgaaaattgagctatgagaacttttttt

SEQ ID NO: 3556 - DNA, 563 bp, Homo sapiens
caatgagaaatcaatgcttcctctgaaagccagcaacagccggtgctgtcacacccaagaagtacaggtacctcagtccaaacatcaggtctcgaatattcttctgtggtcaaaactggcattcaacaagttgctggtctgtgtgggctccaattattagcacagacaactgttaccactggatatctcgctgcctatgcccactaccacagcccagccacccccacagcctcaggaaagttacatatcctcaacactccatttgtaggcaagttcctccactgccttcttgctggcaagcctggcaaagcgcttctgttcaaatccattggatctgtccactccgtcccagcgatatccaggccagatattaaatctgttgggaggaggtgctggaccactgtagcgaggtctcacttttttattcttgttctccttggccttattcttcttgatgaagttggccatagggtccccctctctttcctgttctcttagcatcctatccagatcttcgtcatcaatatagcgggccagaggcttttgcatctctttcattgcac

SEQ ID NO: 3557 - DNA, 517 bp, Homo sapiens
ataaatgccattttttaattcaactttaataagaattacatttgactttggagaatacaggtcttgacccatgtgactgactagctgacccgatcgctgtaatttaacgtcatttataaattctgctgatggacaggaatgtatgaactcaattattgtcagcacaaagccttaaaacctgctgactttaaattaaatggtgcagtcctatgatgccctgcaccatccaggggactaacagggcctcgcagtgtagacagagggtgcagccacacgggcgggggcaccagccacctcactctggcacccgcgggcctcacacatctcccagctcacactctactaatgcacagagtcattagatccaatttgttatttttctcacttgctttaaaaaaaagcagtttggataatcatgacattggaataaagtgggaaggaaaaattccatcaggcacaaaatagggaagtaatcccaacttgtagtcacagttttctgactggctttgttttaaaa

SEQ ID NO: 3558 - DNA, 974 bp, Homo sapiens
ctcaaaaaaaaaaagaaaagaaaagcaattgtacttcactatgccatatgtatgtattcactgaccaaaaattcactgaccaaccaaccaaactccacacttcatctgatcccccatagacttggggatggacagctgttctttggccatatggtataagaggatcattcttgtcactacttaagttagcctcatcattttgtgctgctccaacaccagcagggtatctcccaataaagtgttcctaagcagcctgtatactgagtgcaagcaggctatcaattttaataatagtccataccatgtatgtgtttctgtcagcagaatgtacatgttgtacaaaacctccaggttccttaagctttttgctgtccatgaatcctctgtggcaactgtaatcacagagccagaagccagagggccagggatatgagaggctgacaaacatcaggggacatctggggaggagatccctgtcatgtctcttgtgccatggagctattatggctggtcttccatttgctttttctttaagtgaaaaccatttttctactttgcttttctctccatacttaaatggtcagtagctactgagtggtgctttatctgaataggcctggatcgaagtaaaatagaaatgggactggctttccacaggaagtaaactgcttcagagcccacagtcccctgctcagtgtccggaaagaagtcagtcatccctgttggcagtaaatcttcccacaggccgtccattagagatttaactagatatgttcaatagaaagagtctgaggcaagtggaaatgaggaacggaaacttaggttgggagaatattttttttttattcattctgtttgcttaattcagagtacagtttgtgctatttcatatctgtactccaggcagaaatataacttgaaaatactgtgtctaaagaaatttcagtgttctatcattaaattatttacttaat

SEQ ID NO: 3559 - DNA, 653 bp, Homo sapiens
  misc_feature (1)...(653): n = a,t,c or g
acgagttcgagcgggtcattgaccagcacggctgcgaggcatcgcgcgcctcatgcccaaggtcgtgcgcgtcctggagatcctggaggtgctggtcagccgccaccacgtcgcgcccgagctggacgagctgcgcctggagctggacccccctgcgcctggagaggatggaccgcatcgagaaggagcgcaagcaccagaaggagctggagctggtggaggatgtgtggcgaggggaggcgcaggacctcctctcccagatcgcccagctgcaggaggagaacaagcagctcatgaccaacctctcccacaaggatgtcaacttctcagaggaggagttccagaagcatgaagccatactgcatgtcgtttgcccactcatctatggatggacctgtgagacgtcaccaccttttggctgttgtgaatcgtgctgctgtgaacatcgtgctcaagcttttgtgtggacctatgttttcagttctttgaggtctctgtnnnnnnnnnnnnnnnnnnnnnnnnnnnnnnnnnnnnnnnnnnnnnnaacaataacaacaaaattgctgtgccctctctctgggcctttctccgtatgtttgccatattggcttcttggggctgtcataataaatgacccacaaattgggtgacca

SEQ ID NO: 3560 - DNA, 724 bp, Homo sapiens
gggtttggtttaaagctacagaaaggagagagctagagaagaagaaaaaaggtattttgcctgaggacttgaagcttttttttttcccttttcctccgcatgactgactttctcacactcagattccctccagcctgccagagacgtggtagctgccctgccaagagctatcctgggagggctattgaacgagctttgagtaagtacacacacggtgggattttctcctcccctcggtacctgctctgcacctgtacagggagcagtcccacacatatcacctgattcacagcccttttcaggggaccgtgaggaaaaataaagcccaggatagaaaagacatgtttgtcatctctccagggctgcagccagcttccagcagtcccagtgcccagaaacagcacattccaggccggctgtgcatgcatgtttgctggggcgcgtcccccaggtgggggtgctgggaaggggggggcaactagaggtcacctttgtaatgaccaccttgctgcccccgttctctggcatgtgctgactggtagcttgagaaccctctactagaatcagtatcatagtctttctagatagcagtctgtatgtgctgatcgcagaattcataaccaggatttttttttttttacctataaagcccctgaaatggaatttcaacgtgtgtctgtatgtgcatatttaacaggagcttaataaatattttccaaatgca

SEQ ID NO: 3561 - DNA, 468 bp, Homo sapiens
gcatctagaaggcaacaaattgcaagtactgggaaaagatctcctcttgccgcagccggacctgcgctacctcttcctgaacggcaacaagctggccagggtggcagccggtgccttccaggggcctgcggcagctggacatgctggacctctccaataactcactggccagcggtgcccgaggggctctgggcatccctagggcagccaaactgggacatgcgggatggcttcgacatctccggcaacccctggatctgtgaccagaacctgagcgacctctatcgttggcttcaggcccaaaaagacaagatgttttcccagaatgacacgcgctgtgctgggcctgaagccgtgaagggccagacgctcctggcagtggccaagtcccagtgagaccaggggcttgggttgagggtggggggtctggtagaacactgcaacccgcttaacaaataatcctgcctt

SEQ ID NO: 3562 - DNA, 348 bp, Homo sapiens
tttggtttcctgtcattcatttatttgacaaatgtgctcatcagggcatcccccaccctggtaccccatagtagctgcacacagcaggaaccccagaaaagaccttgccccttctgtccctgcagatgacgtccacggctcccacggccggcaggtctgccgtcggcacgagctctacgtcagcttccaggacctcggctggctggtaattgctgactctccttgtttctcaatttgccgcaagacatctaggccttcggtgacctctccaaacaccacatgcttgccatccagccagtctgtcttgtcacatgtcaggaagaactgagagccattggtgtttgggcc

SEQ ID NO: 3563 - DNA, 410 bp, Homo sapiens
ttttttttttacttttttcattgcattgggtatcataagtacttagccacatttccattgggtttcttgtcattgttttttatttttcctgttgttgatttgcagttccttgaaaatttcttcagtattttgtatctaccttaattacaccattgatcacactgtcctcaaattgatgtttcccccagtactctatatgtttcctgaggaaagaaatacagtctgattcaattctatatcccttgagactggcttgaagtaggacagcaatgaatatttactgtatgggcaaagggctaaactgctaactgaagcccagggtacaagggatgacctccttcagcaaagactgtgttgtgttcatctgtcttacctccatctcccttgtcccccttccaatacctagcaca

SEQ ID NO: 3564 - DNA, 145 bp, Homo sapiens
cttttgccctgagaatcgtctgtgaaccgtgtctgcttatgcctcagtgttttattctgttctctgtcttcttcttctccaatgccttagctataacctgggcagtggtgtggcatccatcatggtgaatggctccttcaacgat

SEQ ID NO: 3565 - DNA, 1238 bp, Homo sapiens
gtggtcagggaggcctttccgcggtgggatgttgagctgaggccggaggagaagtagcagtcgctggcagagcacacaggctgctctgggggatgagctggtgcgtttaaggaacaggccagcactggcattcgcaagcagtggggaaggggagagatgccgaggtggtcagtatcctgactttcagaggcctttttttgtttgttttaatttttgctagattgatattaaaaactcatgtggaggaactcaaggaatgtttagaagaccaaaagtccccaatgacaggaacaaaagcaaccaatttttaactttctcttctcattcctgttttcattgatttcccacatgtagtccttttgctcaggaagtctttggggaaattaaggatctttgaagctctgaaataggtgatccaggttagtgggtgtctgttcagctgtctaagaggttggaaaatgaactactcaagatagtcacgaaaatactgaaagttttgatttttctttccatatttgaattaattttttctgtttgactggaaggggtttttgtataactaaaacctcagcgcataaaggagatttaaaaggagcacatgatttagtgggtgggccatgaaactagagatgggatttgggggtgaatttgtcaatatctggattttaatccagacatctctgctaacaagcctttggtaagtcacttcagatacttttcctcctttttacaaagagagggctggcttaggtatttgccaaagccccttccaggcctgaattccacaagtacgatttactgtagtgtcttatcactctttcatgtcacaatagcgtggagcattagagaaaagcctaggacttttagttgatagccagttgaaatatcattgatagaattttagttttatggaaaaattgggtttgatttctagctttatttactattagggtatgtgagccttgggcaaatcgccttaatcctttgagtcctagttttcctctcaaaatgagaacattaggctaaatgatttcccgagtttcccagctagtccctagagttctatatttcctacatagttgaattattttatcatgctgttgctggggaatatgactaacccttttgaagctactaattttatgtcgagctttaaagtccataattgttatcttcagaaaatattatttgacctacagtatgtccaaatcaatttaataaaatcgctttataacaga

SEQ ID NO: 3566 - DNA, 257 bp, Homo sapiens
gagagtggattggactgattaaattgagagtaattatgcagtttaatcagttggtaatattgaatcatatgtatttttatgtttagagtacaggattgttttaaattgttctttttgacaagttgagattagtagtttattgtcaaatagtaaagagatagctaatgattgtgatatactgtaataagatctatcactttatatgatacattataagtttcaattatttcatttttgtcaggctaaatctcatttgc

SEQ ID NO: 3567 - DNA, 1867 bp, Homo sapiens
gtctcggctcacggagcggctccgcaagcgctaccccaccaacaacttcgggaactgcacgggctgctcggccaccttctcagtgctgaagaagaggcggagctgcagtaattgtggaaacagcttctgctctcgatgctgctccttcaaggtgcccaagtcctccatgggggccacagcccctgaagcccagagggagactgtgtttgtgtgtgcctcgtgtaaccagaccttgagcaagtgagaagagaggccagggtccaaccaggcacccgtccttgggaccagcagtagaccccccactctccccacccctggcccactgtggtgtgtgctgggcaaatgtggcctgaatgctaggtaggctttcccttccttcctcactctctccagctggattctggagctgttctccatccatgagagtggctggcaatggctgctctcaatcccttgagggagaagagcccctggagggcctggcatgtttgccctgctctgcctgggactgagcgagtggacttagggctgggcaggcagtagccaccagagggcagcagcgaactaggccaggcctgactggggtctgaagatcagggtcagtgtggctatgcctgggaattccagacctgaggttgggaaaagaggtttttctcctgcagggtactgggccaggcccctcaagcctcagagagcctgcagaagggcttgggagtgccacaccccatctctgctgattgaatgtccctccaggcaccaggatctcatcatttccccatcagagggtgtggccaggcctaacaagaccatgggtgcttctagaaacagggttgaagttcccagattccctgagaggagaatgtgtataggagggtttggctgagtccttcagcgttaagtggaggaaagcttggggaagccccaatagctggacagacctcagcctcccctcgaagacacctcaattcacagactctcagcccacacaatgccccagtgtccccagctccgctgaagcagctgcagggcacttggatcacaacttctgcaccctctgtccagagtctagggcagtcctccactggcccagcactccagtttcctttccctgcctcttgtccaatggagtgggaggccaggtgagtggagcagaggtcctgaagcccttgacccctgggggcctgggtagtgtaggatctcgctgggctgggtcctggattccagggctattccctggaggacagtctcagttatgggataaggccccctgggggtctccatttctttccaacagtttcatgttcactactggactcttacgggctcagtatctctcccttagccatgagctggctcaggcatcccttcccttccctggagctgccctgcctttctcaagtatttatttatttattgcatggttcctgggaacatgtggcacaagtaatgggatgaggaggaattgggggtgggggtcttctacctaggactcttccctggagtcatgggctgcctgggacccaggacccatgagggggctgagaggtttctacactcgaggagcaggggtccagagaggcaggctggggaggcaagggacccatcctaggcccgctttcttgccgagccaagcagcttagctggggctgtgcagccaggggcttacccaggccagtggaggtgccacagccctggggagccagacaggctttggtatcgtatcgcctctgtgtccttttaagagaggagagttcagtaccccgtgctttctttacactggagaggaactaaaaggatctctgtgtctatggagaattgtcaataaaaaggcctcaagcttcttgtttttgtcaaaaaaaaaaaaaaa

SEQ ID NO: 3568 - DNA, 523 bp, Homo sapiens
  misc_feature (1)...(523): n = a,t,c or g
ggtattttccacatcaaccacactactttaagtcgtctggttagaagtgtatgaacatgttataagctcagaaaatggcatgtaaaagcaatagagggccaggtgcggtggctcacgcccaaagtgttggggattacaggcgtgagctaccangcccggccaacttgcttttctcnaatggctggcgatgttaattttttcantggcttaattaccgtccccntccgtgggatgatccgggntaaaaaatgnacaattccnnaaangngnnannaaaacnggnaaggtgnnnaaaaccttggnctcctgtttgggcnttgcctcncaaggcttcangtgnaagtgtttgggcnncncngaggncncttcctgntcccaatgtcccctgacccaaggtnnngtcctgcccctnggcggggaaccccntgggaaccttngnttntnacaaangccgnanggcnancccaccagannngncnangtnccnanntcctnnccaangngngnnacnanagggggccca

SEQ ID NO: 3569 - DNA, 507 bp, Homo sapiens
attcgaggagagaaaacaggagtgtttcagaacaattttataagcatgactatgtcctcataagatatttgtgagttaagcctgttgcatctaactctgcccactgacaaggtagagcaatggtggcagatcccccagcagtgaacagttctggggcccaggctggggttgcttcacagcaaaagaagcagtcctggcagggtgcttggctccaggtctggggaagaccctgcaagatgggtgtggagtgctctgtcatgctggagagcgaggaagctattgcagggtggctggggctgggagacagggttaggagcctgtctctagctggtcatgggcagaaacttgaagcattcatgaaaacagctaactctgagttcgcaagggtgctaacaaaacccttcgtcatcatatttgtaggatgcaaaggaaccatctcattattttgaatgctgttttgaaaaaaagaagtactcaagcatttaacccacctttcatttataaact

SEQ ID NO: 3570 - DNA, 435 bp, Homo sapiens
ggggccctggttctgtatagaggttggggtggaggtgattaagatgataagctcttggctcttttgcatgtctgagttctgtgactcaccagtccctctgtgaccttgggaaggtcactcttcctctcagtttttccatctgtaatttcatggttcccaaaaatcaatgcatgtgctgctctctggggcaaagattgtttttaaaaatcactctgtagtgaaatgagggaaaaaaatgaccctgaagtaaggttttcataaaagaaaacttaatacactctaaaaactgtctctcattctgtgacttgtcctttttctgggttaaacttccgcttttgttatgaaatgatgatgaataagagactaaaagctagtcgttgggtttttgttctgttttgtttttgttgagacagtcttgctctgcactccagccag

SEQ ID NO: 3571 - DNA, 460 bp, Homo sapiens
tttttttttacttagctgaatataatgaattccgctgatggcctatttctgaaatccaccaatcaaaggaaattgtaaagttcaccatagtaacagctctgtgtcagtggcccggcgtgagaaccacacagcctgggaggcaccgcagctgaggaggcactggccaatggtggggcagagtgatgttaccatctcatagcaaccaagggatctgcatggcaacatcagttgctcccttttctctccgggttcagcctttcttcttgattttgatgggtgcgggttcttggccccttctcatggggctctgcctccagtagtacgtgctccagctgacttgcattctgttttacgctcagccatcttcaaccaggcaatgtggccgtctcgagctgcccgaggctggacgtgcagtcagccgagcacacaaaatgagaactgtttccctgcgtgcagctgg

SEQ ID NO: 3572 - DNA, 931 bp, Homo sapiens
ttttttttttttggtgacagactttctttataaacatttggaagttttctcccccatcttcttaagaagcaggggggcaggtggaggagagtgaggggagagctgcccggtgcagacccaggacgagggctgcacttggtgtggccgtgtcctgagcctcagtgaggttgggcagatggtctcggagcctccatggggcgtacgaggaaccgggcttggcttcctattgtgactgatgagaaaagtgaccacgtgggggtcagtcgggggcaaggggctcagccaccctggactctgggctgcagaggccaccccccaggtggggggtgccccgcagggatgggaggcagctcctgaactggtggccagcccacggggttactggaagacagtggttctgatgggttcagccctgctacttggggctgagctcagccgcttggctctcttctccagccagtcctccagatggccctcggggagctcaggagcatctagtagccactccctggctcgcctctcctcctccacctggatgctcagctcctgcaggtctcgctctgacatgtgggaaaatctgcagttggagccaaagtcgcactggcctgtcagtagaaacttcctgcagggccgcttgttctgctcatccagcaagatggcagctgcatctcggaacatgtcgtaccagaccttcttggccttgaggtgctgcagcccgttcaggtgcttcttgcggttgtggaggttgtcctggaaggagcggtcgcagtagtcacagaagtatcgcttccccatggccactcagagcaggtgctttgctgcagagaaggaagtgttcaagtcttccagtgcggagaaaagagactaggactcgcccctcgacgtctcgcggaaggtacctggctccccggtggctgcagctccgggctcc

SEQ ID NO: 3573 - DNA, 1631 bp, Homo sapiens
  misc_feature (1)...(1631): n = a,t,c or g
ttttacaaatgcaccactatttactgagggttccccacacgtcaggcaccctgctaggggagtctccaatgtcatggacatgccaaatgccagtgctcttcgccctctgagtctcccggagtccctgtgcctcctgcagtcagggtgacagtgtcagtcctgggcaagttgctgtgcctgagctgaaggggaggcctcgtcccgggcctgggcccctctgccagccactgtctgccttggtngtctctgtccctcgcctcctctggtatcatgcgaggcactggctcatctggaagcagatgctctggatggggttgggcagccacacccgctctccaatctctccccactgtttggcccagtgtttctgtgagaggatcaggacaaaggcaagaaagcccaggaggttcactggctgggcctgtggtccacagctcccgtttcttcacccagatgcaggatctaatgtggttccaaagctcaaggctgaggctggctggtggattatagttcaagttgggagatctgcaggcaggaattatggaggccagtgtttggggcaaggagaagggtctgcagacttcaggggcctcaggacccagctactggccatcttcagtcccttgggctcctctgcccaggcgttggctgctccataacattgccctgcaactgccacagaaccctagcctccaagagacccaaagctcagggctctcatcccctgggtgccaagccacacccagcacagtctcttctggagctcagacttagcatctttcttggagcgaataataggaaaaatggggggtaaaggaagaaatggagcactcagtcatttgtgggtcaggagcacaatcaccacacacacaccacagtcagcagaatgcctttcctgatacatatacacacatatctacacatgcacatgtacacacacagattttctgagacacatactctgaattcttctggaagagaagaactggcttgagagggcacaggaagcatccaggaatggaaactagtatttcccagactcaaaagacaggaccagtcattgctgcagaaacaagcagggtgactactggtctcttgggtccagatcaccattttctttggctgattggcttcctgctcattcctgttcccaattttatcctaggactttatctccaatgaggccctttttcaactgccatgacctagatttgtcttccttggccctgagcatagcaggaatactcattggccataggctcagccagctcagtacccattggctgctctgcactaagcctctgtctccattggccacacattcaaggcatcctcattcattcttattgctgtgggttcaggcggccgttttcattggctgctttgtcctgaagctcgatctctatggttgccacgagaggtagtatctccactgacagtgaatccaatggatgaatgggctttgttctctccgtgccacactggtaggtgtctcccaacatgtgcccctcctcagcctgcattagggtggggggcattgggggtgcctgaagaaggtccaacagcctcgagaagcctctggttctggcgaaggtgcctcctcctttcgtgtcccctgtgacttcacacac

SEQ ID NO: 3574 - DNA, 641 bp, Homo sapiens
acctgggtcacttatacacgcatttctttaaaatatctgattaggtatttatagtttgaaagagatgatgtttccttgactgagcatcttgagaaatcaagatttagttgacaattagacatgaggagaatagagagctagaagaccttgcataaactgattgaccaagagaatagatacactaatcatgtctacaggaacagaaaataaaagagacagagaagagataataaatctgatggtaaaaaaaaaaaaaggcaggaagattacgaatggcttctactctctgggtgtggtggcgcatgccctgttaatcctcagcacttgagctggggagggtcaagggctgcagtgagccctagggtaaggccactgcactcccagccctggacacaagagtgagagagaccctgtctcccaaaaaaaatgatttgatcatagcctcatatatgatttgactgcccccttgtggtaatttacatttgtcaatggtttagggagacttgcctgtataccgggatatacaaatttatgcaagcacgaagacagtttaatttccagttttaaacttttgacttgtgtaaaaccttatccccttcctaaaatattactcaaaatcattatctctgtttactttttta

SEQ ID NO: 3575 - DNA, 979 bp, Homo sapiens
tttatggttctcagataccactttaatcaggtttttcactatacagtgatgggggtagaagatggtgactgttttcaagcaaattcacgaggcacatgttcgtccctgccccaaagtgaacagtctgggcttcccagaacagaaaagtgctttccttcctgggggaatcccattcctgagctgacaagacagatttcagtaagaatgagcacaaaggatagggcaaaatagtgaagggagccaggtgcatatttgaattctttccagtgcagactggaactagacatgcaggtatccctcctaaaggcaacgcccaaatcccagccattcccactagaggccaaaccgcctgcccacagagattgacagccaatgttcatctcataactctcctcccagcagtgcaccagtaaactcagatgcctgagtgcttgtggccaccacacaacagatgcggccttcctcttcactggcccctcggctgctgctgggtctgcctggccatcaaggagcagccagtatttgtgtggctgtgtggtgtgggaagggccagaataagcaacaaagccaattagatgtgggttctggggctctgtcaacatggtagcaggacaagtcaccacccacagtaggaccatagggccctgtgtcctccattaattcttctctgggcggtttctgttcagcacagctttcggggcaaattctagcttgtccttaaggctcaccacctgcgtgtggtccttgcctagaagctcatccagcttgcgatcctcccggcgctctgagatgctcttttcctcctccacgggctgggggtcctttcccctgatgaaccattccaggtggtaacccacagccccgaccacgaaggcaacagggaatgtgacataaggagcataggtacgaaccacggtccaaaacacaggccacatgacatctgcggcccagcccacactccccagtgcggcccccgctc

SEQ ID NO: 3576 - DNA, 246 bp, Homo sapiens
ccagttgaagtgtttcaaaagtcctgtagctcatgaagatccgagcctgaaacagtgaagtaagaggatttcttccataatgtagaggagataactatagtgtagagaagttcattagacttctttttacctgaagaaactacttgtgcgtttttaagttaacacctaaatttctaaattacaagttgaataattgcataagatataatttgggatgtttggaattgacatttaaaaataaagtgg

SEQ ID NO: 3577 - DNA, 936 bp, Homo sapiens
  misc_feature (1)...(936): n = a,t,c or g
agagaactacaatgatcttaaaataatttttcaggcacatctcataaatgtggaaactgaggcacggatctgtttttgcctatgaaagataggtcctgtaactgttacacagtttaacacttctgaaattagaatattagagatcctgctaaatattacgtattgtttccttggcctctcttaatagtgccatttatatttttaatttaccagagttaggctcattaagatagtgtttgctttgaaatcaatgtttctgtggaaactaattttaacttttacagatattgattacgggcttgtgaaaaggcaagtaaaggaggaatgctgtgctatctgggcattaaaacaaaacaatacaattaaaagttaaagagaaagaaaaaggtaataacagatttgtgtggaaggagggcaaaaaaacttcacacgtggattatctgttggagaatgtgcattgcaaaaaagatgcaaaatagcaatcctccctctagctttgatggaaaggtgtttttcccatgaaccgtaggggatttttaccaagtgaaanatgatttgaaatggagggcatgttgttcaaccctgtggtttgggaagggctgggacttttcaagttaggtcttcccaggaggagttccttttgagaaagttggtccaaggcactttacggtgtttgccggttcccaagcgatgggccaggactgttggcttaaaggtgtttccaagtgcgattttgggccccttcccgcaattgtcccggggtttctttagagatgttggaagggtggtttggaaaaccctgggggttttccggggccccctaacctttatggggaccccccgtggaccgtggtgcggttcccgcaatgttttgtggggtcttgttccgagtccccccttaaaaaaaactttgtcgcgcacccggaagggtacggg

SEQ ID NO: 3578 - DNA, 155 bp, Homo sapiens
  misc_feature (1)...(155): n = a,t,c or g
gggcagccacaagcataggaggaggagccattagtgatggcctgaaagcccagggacagaagggaggggacctgggcattaaatgctggtcagtgataaagaatggcggttactggctgnncatggnncacgcctgcaatcctagcaccttggga

SEQ ID NO: 3579 - DNA, 1107 bp, Homo sapiens
  misc_feature (1)...(1107): n = a,t,c or g
gtcttgtcacatctggccctgaccccactggaccaaaaggggcagcactggtgcccaccatacacacaggtgtctcatgtgactcacagtgctaaagactcatgcttgacagcttggtaaggtcaactctgtagccctgcagacaaaagctggttaggtttgggtttgatactttagatgggaaagtgaggggcttgagaangtgggtgggaggagggaaggattttttaggagccttaatcagaaaaggactagatttgtttaagaagaaaaatgaaaccagacccagatcaatattttaggatactagatgttttaatgggttcagaatccagtttgtaggaagattttttaatggttttggttgctcctcccccagctgccaccccccaccttacccttattcctctctgtccacattttctgccccaccttacttctcctccctgacagacatccagcccctagtaatacttaaggcactatggcacttagctttgaagtgacacgaccctgtcttccttccgcccgctggtgggtaaccagtgccttccctgtaacggtaatgctgcagaactgcaaccttttgtacctttctttggggaatggggtgggggtgggagaggaggtagatggggaagaaataccccagacccaacaaacctccagccagaaagccagctattttgcatttgaaggaattgacttcctcattcattgagctttttaaaagatcacaacctcaagatggttaaaatccattgacatttgcactttcaaacatgacaagtctcggagctgctgagatgcacaggcccctggcctttccacttatgcctccttttctccttattcctcctacctcccgccccgcccaggtctggagttactttcatagcatttttcactcttggcttcttttctcccttgatggtcaagtctcttatgtttcaatatttcttaactggggtgtcttataacaaaaaactcttaggtctaaaatgagaaaaaagagagaaaacaaaatgttatttttataccataacttgagtgtattgccaaaatttggaaatccttcccatgcctgatgagtttatatcccagaaa

SEQ ID NO: 3580 - DNA, 725 bp, Homo sapiens
  misc_feature (1)...(725): n = a,t,c or g
gtggagaattaattaccactttttgtaaaatgtttttcagattccgtgtctggtgactgtaactttaagatgccttttataaggcacataaataatctggcacaaatctttatcattttgacagagtttcttttatgcttgtgttggtgattttgttgcatttaacccatggggacttaacatctctgcttttccaatcaggagcttggttctaaccttttgggagatgattaannnnnnnnnnnnnnnnnnnnnnnnnnnnnnnnnnnnnnnnnnnnnnnnnnnnnnntgtttcgccctcagcttttgcttccattttttttttaagaactctgggctaataacttctaatctttatagaatatttcaaagaaatatatttgttcttaaagatacataggtttgagatattgagtgctacaagcatttattttggttttaccttaacatattatgattcctcagttttgttggcatttagtaattatgtttatgtttttatcttatcaaaaaatgtcttcttacctttgatatttataatcactcctcggtcatgtaaatagtttgctttatattttactgttttaaagtctgtgaccttacctgccctcttctgtagcaaagtgcagcatttaactcaggaagctatattccccccaagtgtcattaatatttgcataagattaaaaacactccaccgcgcccagccaagtaaaattaaatat

SEQ ID NO: 3581 - DNA, 497 bp, Homo sapiens
  misc_feature (1)...(497): n = a,t,c or g
gggaaaacatgagtgactccaaggaaccaagggtgcagcagctgggcctcctggaagaagatccagcaaccagtggcatcagactttttccaagagactttcaattccagcagatacatggccacaagagctctacagggtgtcttggccatggcgccctggtgctgcaactcctctccttcatgctcttggctggggtcctggtggccatccttgtccaagtgtccaaggtccccagctccctaagtcatgaacaatccgagcaagacgcaatctaccagaacctggacccagctgaaggttgcagtggggtgagtttgccagaccagttccaaggcagcagcaantttattcaaggaantgaccgntttgaagatttgcnttttgaacgcntttgccgccattgttccccaagggattgggacattttttccaaggaaatngtttatcttnatgttttaanttcccagcgggaatntgggcacgatttcctttaa

SEQ ID NO: 3582 - DNA, 1185 bp, Homo sapiens
tttttttttttttgcagttacaacatttaccactttattataaaggctacaactcagaaacagccaaatggaagacatgtataggacaaagaaagatgtgggggtggaagaggttgtatggagcctccatgccctctctggatgccattggttgactgggggaattaattccctggtgcttccagcctgcaagatgagctccttcaaccagcaagtccccagtcaaaagggtgcacggggtgtagctggaagttgagcagatggtagtttgcatggatgagataaagccccaggggacagggcagctacacatgaatccaaatagtctaatctccaaaaggaacagagagtggattcatacaacataccaagcccgccccctaaatgcatcccactcaggtcacttataaagctccaaggatgggccaagaacacaagctctacaccagggaaacttggaggcatcagaaggacagaataagacccaggttcataggggatgaaaaatcgaacagagaaccgtctcagggcatttgtgaaggtccaaggatggagagaagaagcgctggcttacaagtgggtgaagttctgctataccacaatggaggctgaggctagcagggaaacaactattcgtctctgaagcagggctgcgggctttttgcagatccagtaattgtcaacgtcacatcgattgtcgttccagccactgccactaaattccgcacagtcttcattcccgctattgttgggttctccactgttccagtaccgctggaagctgggtgacagaggtgagccgtccacccattgccacgtgccttcctgatttaggtctgaaagtcccatcccaggagaagcggttactccctggaagtctgcagctgtaggaagttctgctcctcagcagttttgattacgacgagctgggccctcacttcctggcaggcggtgacggagtcgtgccagttccgctgggagttagacatgaagtaacagtttccttggaagaatgtccagtccttgggacagtggcggcacaggcgttctgttgggggaggctggtcagggctgggctcagattaggttgtccatattcccatatctgcccagccttcaagcccttgaaaatcagggcccttccttgactgtccatgttcgtggaccgcttggaatggggagaga

SEQ ID NO: 3583 - DNA, 2017 bp, Homo sapiens
ggaaaggttcggaggcacccgactaccaccactcggaaagccgctagtccagatcgactagggagaggcttagatactttagtgtatttaaagagcatttcagttaactttttcagctatttttaaagtttgtgaatggagtgttattttggacattcttaaatatgaattctccaaaggcatttagccttgacttaatattaaatcctaaggattttatgtaaggtttttttgcaacctatttaattttttttaaatgcctaacttctgaggtgcataagcccgtggtttgtgtactggaactaaagcggaactcactgattcatattggatccccaggtataccttctgctggtagcatatggctggaaaaggccgtttgcctcacacattgtaacctgccttggctagaaaatgcttttaatgtctcaactctctcttttctgtgtcatgttttggtaggaaatctttaagattggcggacggaacaggtattttagtgagacacttctgagtacttgctttttcctttgacttctaaccaactaaaagagaaggaggtcttcatgttgatattttgcttggttttattttactgattttaaaaggtatatagaaaaatgtaggcctttaaaaagaaacagcatgtagttttttattttaatatgttccatagagtggataggcagacaggtactattgtaatgtattctgtatttaataatttaatatactctagaaagtagacctcatgcattcttttagcatgattttcttttaaactgcttttcattttaagggcacccgtggcgggaagcctggttttgcaaggactgtgtaagctgtatgcgttctagctgtatgcgttctgtagtcttttcttaggtgggtaacattttcaataacgcgcgcacagcacacaggggtgccctgagccgaagagcaaaaaaagccaccgctcgtttctataatccagctttgcttttcacaggcgtgggatccaggatggtgtcctctgtgaggatttgaactctggggctttaattccactgtttaattttcaggtaccacagcagcaaagcacagagtgtgacctttttcatgtctgagctgattctgtttgctccacgtgcctgcttcttgctactgttcatttagtaatgggatcacctcaccatgccatgctctgggctctccctctctgtccatttctgttttgctttcctggctaaacccatctaccattcttaacactggtagctcctgtcccattccaagactcactctctcagaccttcccatctccctggctttccatgctcctctccctccacctcctggcttcaactgggtgagggccgtattcctgccactctgctccgcctcagccttgaggaactccacgtgggctgggtgggaaggtgctgacgattttcacactgtgtttaccactccatcacctctccatcacctctcaacctttgcttcgacaggtcttcactcacgatttattcctccaggtctttgattggagagagtaactttttaattctgttgttttgcagtttggctctgtaggagtgagtgggcgattcaaagatgccggcgtcccgcagtgtgcggtttcgtgcccttaaccacccgcttctttgtttcccgcccctctggttttcgcagggagctcttgtggttgaagttcaagtgttagttggtagcgtggctcactccacttggagggtggcggccgtctgaccgcgtgttactggctttgccgacggggcctcccggccccgaatccgtgtaacactctgcgggctgcaccgggtggctctggttgggggcgaagctgtgttgactgggagagcgttggaaattgagacatggagagatgacgggagtgcgtttctctgggtttgatctccatcctgttttctcccagacacaccacacctaccttgggggaatgccgttgccctgttccacccctttgtttcacttcgcgttaactgctgtggta

SEQ ID NO: 3584 - DNA, 926 bp, Homo sapiens
tttgttcttaagttttgattactacatgggacacacaggtaacagaaaaacaaaacaaaactggcatctgggaggctcagggaaagggaaaaaataataatgatctttatttttcagacctgctcctaaaagctttctcctcctcctaaaaaaccaaacacaagaggtcctcttgctgcctttccatggactgtggcggctgtggacttggacccgtctgctgagcccacacctcggcttcctcacggtgctgacgaggagaggcagaggactgccttggctcctgggctctgtgcagaactcctccagagactgtccacacttgataaggtgggactaacaaactcatgtcatggataaacagaatggtttggaactcagtcccaggcaggccctctgaagtcaaggcctaaacccaatgatccagactggacagaggcccgacgatgggaagccaccttggatccctgttaacctcacaacctgaggcgtgcgtgcccggctggggcacctgaccttgtgaattcgttgtttctaggggaccacgtgtgccctctgggattgcactcaggacctgtctcagcctggaagacattcaggtcacgttcagtttcctggccagtgttctgctgtgcctgaattgatgcctcaggccaggtaaagaagattcacacagattcttctgtctctccagtgggctgtggggcgtctttcctggcatggcaactgccgaggtgactgctgaggccatgttcagtcctccgggcccgaccatcctgcttggagtggcgtcatagccatggtctgctgttgcctcagacgatttacctggttattgtcacggcccgtcaaagtctgacctattggggtccatgatgaggtagcctgtttcacacttaggtcctgtgactggatcattttccgct

SEQ ID NO: 3585 - DNA, 329 bp, Homo sapiens
gaaaaagaaaaacagccatcaaaccaaggcagtaagtgccaggatataggagacagatgaagcttgagagacccttatccggtccatctgcgctgcctaaagaagaatttagcaatttagtgcaccaacttttacaagaagtgtccaaggaattacattatttgaaaccagaggcgaacataattatgatagccatttgtgcgtgtggttaaacacacaccatgttaaaaatcatgccactgatagaactcccacacacaaatagtgcttaatccttttttttcattaatgatttgtaaattgttgaaaaattgtatactcgatgaagg

SEQ ID NO: 3586 - DNA, 1016 bp, Homo sapiens
ttttttttttgcctcaaatatttgaccatttttaaatatcatgatttttttctttctgatcccacattttgacgtgtcaaagcttagagcaggaagtaggaatccacactttcacggagggggaccagcctgccatgtcgtccccaggctcacagcagcggcggctactctgctggtggtttggtggcaggtggagatggtgacggcgcattggaaaccgtaaggcatgacaacgggaggcccgcggggtgtttcaggcgcgttgacgcaggtgcatggctggcaggcggcctctacagaaggagggagcgcaattcacagcctcttgacgtagtttccggggaaagtaccaaagaatttggttcttcttgaggtccccacaaaccagccgtcatcacacttttccatgacatcaatgacatcactttctctgagctccagctcatcttcattcctgggagtatagttatacagagcctgaaacggttcccccccaccttgaatattttcatgagtaaacacaggacgctgtggcttatttgagctcaagctgtgaatcctatcactagaatagctgtggggtattggagggtcagggtagtcctcagcaccttttgtgttcttcttgacgacctccacataggaaacagggaagatgccttgtctgttggttcctgggattttaccttcataccagttttgatcaactcttttaagaagaataactctatctcccctgttatgaatatgagaaaaatgcattagaaacagagatagaataacatgaaaatataattgtcaatgttttctatgaaaaaataggtttccatttgggcaggttttataccttcagtttttgtttaatcaggggagggcaagtaaggtactagtgcttactagaaaaatacacatgatcaacatatatgtaattgaaatgtccattcaggccatcagaatcttccctaaggatgcctggttaatgtgaacgggtttatacttgtttatgctggtattgt

SEQ ID NO: 3587 - DNA, 373 bp, Homo sapiens
gggcggcgccgggaagcgaccggctgctgggcttaaggcgggagtgaccgcttaaccagtgagggaagcactgaagagcgccagtcgacgtgggtgcgacaactcgcggagtcttaggagcaaaacgtctggggcctgcgagccaggacccttctgaagccttaggtgtctatcggcgacgtgtacggtcactgcagctccggagcgcggaaccctcagccaggaggcgcggctggtcggtcccaggtcccggcctccgtaatgagagcccggaaccactctttgtgccgcagcttcgcagattcctataggcaatggaaactggatctcaattcccaggacagaaaggacctggacaagtttattaaatttt

SEQ ID NO: 3588 - DNA, 1088 bp, Homo sapiens
gtgacaccagcctataggtctccaggaaacaagggcatgaatatgtcatattatacaggatatattttggagaagttcagctgagtggcttaggagaaggcttccagacagttcgtgttgggacagtgggcacccctgtgggcaccatcactctttcttgtgcttacagaattaacttggcattcatgtctaccaggcaatttgagaggaccccacctatcatggggattattattgatcactttgtggaccgtccctatcccagctcctctcccatgcacccctgcaattacagaactgctggtgaggacactggagtaatatacccgtctgtagaagactctcaagaagtgtgtaccacctctttttccacctccccaccatcccagctgatggttcctgggaaggaaggtggggtaccccttgctcccaaccagcctgtccatggtacccaggctgaccaggagagactggcaacctgcaccccttctgacagaacccactgtgctgccacaccctccagtagtgaggatactgaaaccgtatcaaacagcagtgagggacgggcctcccctcacgatgtcttggagaccatctttgtccgaaaagtgggggcttttgtcaacaaacccattaaccaggtgaccctgacgagtttggatataccctttgccatgtttgctcccaagaatttggagctggaggataccgatccaatggtgaatcctccagattccccagagactgaatctcctctccagggcagcctgcactcagatggctccagcgggggcagcagtggcaatacccatgatgactttgttatgatagactttaaaccagctttttctaaagatgacattcttccgatggacctggggaccttctatcgggagtttcagaacccacctcagctgagcagcctctccatagatattggaggcacagtcccatggctgaagacttggactcattaccagagaagctggctgtgcatgagaagaatgtccgcgagtttgatgcctttgtggaaaccctgcagtaaaagtatccttggagtcccagcagcaccccctttttggtggccc

SEQ ID NO: 3589 - DNA, 705 bp, Homo sapiens
  misc_feature (1)...(705): n = a,t,c or g
gcagacaggtgttgccccgggtggtgggccgggggcatagagagggcaaggagagcctggctgtcagcaggagagaagggctctgggtggagagggagctttctcctactggaaaagcgaaccagcccatagtcttcagatttcctggactttctatttctgttatctgaagcaggattttattttagtttaactttctcagttcctctgagtctgtgcctggactagcttctctgccatctgttgaaaggctcagagaacacctattctctgtaattttagcctaagtaaagcataaatagaatgatgaatccacttagtgaaccttcatacacacggcagcgcgttccaaagcccagcgcagatgcactacagggtctgtgacgcccctctgccgggtcaagtaaagggtgacctgagcttgtgagggatccccgatttctaatcccaatttccccacccagatttggctgaaggactgggcaaccttaaagtgagctgcttttctgttctgggtctcagttttcctagtttcccaaagaaacaaatgctccaactgtggctggcttcaggtagggannnnnnnnnnnnnnnnnnnnnnnnnnnnnnnnnnnnnnnnnnnnnnnnnnnnnnnnnnnnnnnnnnnnnnnnnnnnnnnnnnnnnnnnnnnnacttcatgttaccaatctgaagtgggagcggtcc

SEQ ID NO: 3590 - DNA, 470 bp, Homo sapiens
  misc_feature (1)...(470): n = a,t,c or g
gggagagcccaatgacgcttgggggcgcgagaactgtgtcatgatgctgcacacggggctgtggaacgacgcaccgtgtgacagcgagaaggacggctggatctgtgagaaaaggcacaactgctgaccccgcccagtgccctggagccgcgcccattgcagcatgtcgtatcctgggggctgctcacctccctggctcctggagctgattgccaaagagttttttcttcctcatccaccgctgctgagtctcagaaacacttggcccaacatagccctgtccagcccagtgcctgggctctgggacctccatgccgacctcatcctaactccactcacgcagacccaacctaacctccactagctccaaaatccctgctcctgcgtcnccgtgatatgcctccacttctctcgctaaccaaggttaggtgactgaggactggagctgtttggtttctcgtgccgaattc

SEQ ID NO: 3591 - DNA, 398 bp, Homo sapiens
  misc_feature (1)...(398): n = a,t,c or g
agaggggatgagaggatgaaacaaggatgcagaagcaagatgtcaattgaaagataactctcaggtcaggtatggtnnnnnnnnnnnnnnnnnnnnnnnnnnnnnnnnnnnnnnnnnnnnnnnnnnnnnnnnnnnnnnnnnnnnnnnnnnnnnnnnnnnnnnnnnnnnngcaagaatccccgcccccgccgcccactnnnnnnnnnnnnnnnnnnnnnnnnnnnnnnnnnnnnnnnnnnnnnnnnnnnnnnnnnnnnnnnnnnnnnnnnnnnnnnnnnnnnnnnnnnnnnnnnnnnnnnnnnnnnnnnnnnnnnnnnnnnnnnnnnnnnnnnnnnnnnnnnnnnnnnnnnnnnnnnnnggtgagcctgggtgagccaaaccccaacaacaacaacaac

SEQ ID NO: 3592 - DNA, 464 bp, Homo sapiens
ttacatgtaaaatgtaaaaatattagacatccacatctaaatgtaaaaatgatatttctttttttttaagtcagaaaaccagttttcttttttcttttgctttagtcagaaagccataaaaaccatatttaaataggatcaactactgttttttaacataactgagatttgaaccgagattaatttggttccaaagcttatgctaggccttggagaatacaaagatgaatgaaaccccattcatcttgttgatcttgcagactaatggaaaggattgacatgtgagttcatgtagtactctgttaaaagttagataggattccagatgagaatgacaatgctggggaagatttttccaaaggaggtagcctttgagtgagtcagatagtgaaaagtgaaatggtgcctggtagagaaggcatacataggcagtgacagggtattgaagctcatggtgctagctc

SEQ ID NO: 3593 - DNA, 596 bp, Homo sapiens
ggtgcaggtgtggagtaggcagaaaattggatttaaacaaggttgtagttttgccaagcactataaagggagagaggggagagtgatgataataatgataaatcatggaatgtaatctcgataaagaggagagtgaagggacatcaagagcatgagagtcagtggagattccatgaggttgaacaatgcacagtagttcaggatcaccctagtagaaagaataagctggaaaaataggatgtggagatacagaattgagattatggaggggttatagtttttttgtaatggcaacaaaaagttagctgaagaagaaaagaatacttctgataaacttccttgtagatactgcatgggtaaggaggtaattataatgagaattacaaaatatttagagctgaacgacaatgaaattactccacattagatcttgtaaagtagctaaagagagaaaactataaccttaaatacatgtttaaggttaaaaaattagaaaaagtgaaaataaatgagttaatctttcaactcaagaagttgaaaacagagtaagcccaaagtaagtagaaggaatgaaataaaataaagataaaagcaga

SEQ ID NO: 3594 - DNA, 331 bp, Homo sapiens
  misc_feature (1)...(331): n = a,t,c or g
tgtaccttagagaatacctgagtcggctgtcaatttcaggaaggggcactgcttcangggctatggaaggaatatatgtgtgattcacccacgggcctgcacttcacacctcggtgtgctgctctcaccatgcagatcccatctgtgtctctaaggcttgctcctggagctggtggcaacttagtcacagaggaaatggccttcctgtcactgccatcatttgctacttgaagagaggtaatccttcacgcatttgctttacttgcaatgattatgacaagggcagactctctctggggagcaaatcctggcctgggaagncttcttgggg

SEQ ID NO: 3595 - DNA, 805 bp, Homo sapiens
ccgccctgagggaccccgctcaggctatgtgacctttgaggatgtggctgtctacttctcccaggaggaatggagattgcttgatgacgctcagaggctcctctaccgcaatgtgatgctggagaactttacacttctggcctctctgggacttgcgtcttccaagacccatgaaataacccagctggagtcatgggaggagcccttcatgcctgcttgggaagttgtgacttcagccataccgagaggttgttggcatggagccgaggctgaggaggctcctgagcagattgcttctgtaggactgctcagttcaaacattcagcaacaccagaagcagcactgtggagagaaacccttaaaaagacaacagggcagggtcccagttttgaggagttgcaaagttcacctatcagagaagtccttgcaaagcagggaggttgggaaggccctcctgatcagctcaggtgttctcaagcaccaggtgactcacacaggagagaagtcacataggagctccaaaagtagggaggcctttcatgctggaaaaaggcattacaaatgcagtgaatgtgggaaagcctttggtcagaaatatttacttgttcagcaccagagactacatgctgggaaaaagacgtatgaatgcagtgaatgtgggaagttatttagagatatgtccaacctttttatacaccaaatagttcacactggagaaagcgcttacgggtgtagtaactgtggaaaatcctttagccgtaatgctcacctcattgaacaccagagagttcacactggagaaaag

SEQ ID NO: 3596 - DNA, 2521 bp, Homo sapiens
ttaaattaaccagatctgtcttttaatagttaccagaatttagatgttaattccccagaggaaaaatgtacatggcacagtttttctggaaaagttcacatgtagacagtgaagcttctgaagttaggcgtcaaattagtagtgacaatcttttttttaatcttgaaagtccctagttttaaagaaagtagaatccatctggggcatgtctgcatcacagggtatcactcaagagtcatcatcaggccaaaaagactctgaagggaaccacggagggtttgggcccttgctgtggaaagatgctactgaaagtataagagaacaccctaatgcacggcgtcaggcaccgaaaccgtaccatgccccggttaagacatgggaccagagaacacgtcaacgtcaggccgctccaggaaaaccatccacaaagaccacagaagctaacccgaggtcgacaactgccatgaagagttgtttggctgaaaccgcagttaccagtgtctttactggacgcgaacatcccttaaggacacggctgtgctgcttccttaagcatacgtgaccacgatactgtctttccccgggtagttcttagcgccatcactgcaccaggcccaggcatgcctcaagtcctccagagccttctcctgagacagcactaggggccacgtcagaccccaagctgcagcccttcaccgtgcccgtccccggtccggtctgccctgctggggccggtgggtatcatggggacccctgtgtagacacggacaccggagagcgtgggacaggaggcgtctcagagctccccacccacacactcaagggtcagcgtcactcatgtttccttctgttcccatggtgcctccaaaagggtttccaaacaaagtcatcattgattaccctggagtatgtcaataagccaaacaccagcagccagataccaccaagctagtcaccactttaaaagaagatgagctggagaacgaagcagccctctgatggacccagtcagtgcagtcgggactcagggagacacccggggacccctgcccagctcccctgccggaggaaagactagggaagggaagcagaggaggaacgaagggcgccggcagagagagtaacaagtagaaacttcgccgatctgggagcaggccgagaaactctgttgagctgctaaagaattcttcattctcatgtgattttcttcatttctgtcttcccagttactaccaaggagctaaggaaagttcaggaatactttgtttagtgtcgccataacatctccaaccatgcattaagtttaaccaaaagctgcaatattccagattcttaaattctcaatggcaaccaatttatgctcaagttgaaaatctggcaagcaccgtacgccttcagcacacgcgtgggtccggattttcccatcacacacacgctctcccccgtccaaggtgcctgtttacttctggtctgcgcgggctcaggtttcaaagagcttgctgaaggcggcccccacctcggcgatcatgtcggaggtggtggtggagcgaccgtgcttctggaaggcttggtggttgcactgcctggtgagagagcaggcgccaaacgcggccaccaggagagggctggacccatttgttttctgtggtccagcaaggagcgcccagtgtaccaggacgcccagggagcccgacaggaggtccccttgccctccagcacctgcggctgctgccttcctggctgcacacaagcacctgctggccgttggagaggatgtcgcgctctcctttctggaccaccgtcacgttgcccagggcttggcctgagtcttagcacagatccatggctgtcatcgctgtccatagggcctctgagcacagcgtcatacagtctgctgaactccacgtggttgggagtgagcacagccttccggtagccatggatgagggccggctgctgagcgaccagccacaggccatccgcgtcgatgacaacagggatgtccctggcctttgacacttccaaaatgccctggacatttctgagaagcgcatcatctctacccaagccaggtcctacgacaagagcatgcagccggggcagccacttctccacctcatgaacagcattggggctgtcaagaactgggtggacgatcagctccgggctgtaggccttaatcacaaggtgcggccgcactggcacagaacacgtgggacaagtctgcgcccactttgagagctgagattgctgcaaaatatggggctccagtgtactcctgacagcctccaactacgcctattcttccatcttgcccttcgtgctttgtggaagacagaggaggtatgatatttctcaccagctgcaaagtattttccatatcctttatcgaatgtgctttacgtagcgaaaacgctctttctaaaactcgtctgcaagcccggattgccccacagcgaggacccagggccatcgggcagcattccggattcccagctgcccccgcgcgtcgccggaaacc

SEQ ID NO: 3597 - DNA, 1255 bp, Homo sapiens
  misc_feature (1)...(1255): n = a,t,c or g
ttttttttttcaactattaaatctgtttagtaaagacaatttcgctcatacaaaacaacagtttacaacaatcgagtgctggacacaccatctgagacaagggaggcgctgcaggcacccagcgccttcccccatacacaaagacgaccctgggcgcccctccaccacctgcccctgagggagaggaaaggtgaagtattcctgccacgagctcccttccaagggaagggggagtggggggccatggcacagacagcctaccccagctgctcctcatctgtgctgggggaggcccctcccctcaccggccccgaagctgagttgtttggggtgatggcaaatggctgatgggcaagggggcaaagtcaggacatctttggtgcaaagactccccctgacccaccaggccacacaatggaaatctgagggaagacttcaaaagtggccctgcctttgcccacaaggggtagctgggctgatgccccagaacccaggacaaacacaggaaatgcaaaagctctgccaacagaagctgcccaggctcacctacatgagctgggcggtggcccatggagaaatggctaaaaatttaaggaaaataaacaaaaatgggttaataatggcaagaaggggaagtagagaggtcattcagtagatgagtgcctcagaggacctaggaccagcactaagtggggggaggggggccctgggggctgggggtccagtcttcctgatcgcagtgccagtgcccggtcactcctctctgcctcccggaacccagctaatagagcacagccacagagggcctgtttcagaatctgggtgggcttcccaggcactttggcaggctcagtatgggcagggcagacccaagaagggagaaggttcctaagccccagcagggccgtctccctctgcagccctgcctgcccctggcccctcaaatgcacgatcccaggcacagatctgcgcactcatacacatctgtgcacacacacacacacacanacatacactcactcctatttgtctggcacactggagatgtctgagggctccgagagaggaagtgcgtggcatcctcctccaaggtggccttgagctcccagaacgcgtgagccagcggggacaaccccaggctgttgtggagaaacagggagggcagatgggacaacacagggacaatccctatgacagtttccacaaataccctctaacaaaccacaagcctttgcagtatccagagaggaaggcg

SEQ ID NO: 3598 - DNA, 911 bp, Homo sapiens
gctgccgcctactactactaaattagcggccggtcgacccgtttcaaaaaaaaaaaaaaaaattggaagtgatattagtgcctatctcagagtgattgtaagggtgaaatgagttaatacatgttaatactgcctagcacagaataaatgctcaataaatgtagctcttgtgattttgttactgttagagaaaggacattctgaatgctttaaatccagctcctcttccttgactcttactagttggagggacaggatccactagaggtaacaactacagacttctgaacacattttcagttggtctccgttgccatgtgggagaccaaaagtctaaccaagtgattagtagccatcccagtgatgttcttgaccataaattgagagctcagccacattcctggcaccgaattgccattcatttattacctgatatcattctcacattcacaagctttatgagctcattttacaggtgagtgatttgttcaagatcacacagctaataatggcagagctgggctttggactctggtctgtgtggctccagacaccaccttctttttcatattcccccacagcctccttggaggatgccgagaaacctttcaaattttgttgcctttctggttttgtagttctgctgatggaacagccagccatgaacaaggtgaggaagaagaaagaggaagcgctgaattatctgaactggagaagcaataaaaattaaagtgaaggaaaatactgaactctgtctgagtgggatggtatgagttagaggaagaattcctcttgcaaattaataatcggtcattagaaacaattggttaatgggggagcctaattggagaatgatgctgagaatttgtattgatgaacctcttttagaaactgcagagggctgggcacgg

SEQ ID NO: 3599 - DNA, 1256 bp, Homo sapiens
agcattggggctttccagctctcacagaaccttcagcatccccagctgccggtcttggcatcttcgaagtaaggagagttttagatgcttctggatgttcaatgctagcacctttacagactggagcagctcgattttcttcgtatttactttcaagagcaagaaaagtgctgggctcccacttattttctccctgtggtgttccggagttctgctccatatccaccagaaagctggcggcccacggctttggcgcatccatggcggcaatggtgtccttccctccccagaggttatcactactttttagtgctggactttgaggccacgtgcgacaagccacagattcatcctcaggaaatcatcgagttccccatcctaaagctaaatggccggaccatgggagattgagtctacctttcacatgtatgtccagcctgtagtccatccacagctttaccccattctgtacagagctcaccggggattattcaagccatggtggatggtcagccaagcctgcagcaagtgctgggagagggtcgatgaatggatggcgaaggaaggccttcttagatccaaacgtcaagtcaatttttgtcacctgtggagactgggacttaaaagtcatgctcccagggccagtgccagtacttggggcttggccagtggcggattacttcaagcagtggattaatctgaaaaagacgactgcaagaacattgccaacatcatgaagacactcgcctatcgaggcttcatcttcaagcagacatcgaagccgttctgattggccgaggacaggatggggcaggacagggtagctgtttggcccagcccagaatcctcctctccctcaccagaggggaagagggagagtggcatagctctgtgtccagagtgtccccagctgccctgtgggctcatgcccttggcgtgggcttgtgcccttgcaagggcttggccacttggcccttctggagcagacactttgtgccccccatccccacccctcaatctcagcccagtatcagcccctcccattgcgggcctgggctagggggacccaggcactcaccgcctcctccctggtacacaggcttctgtggggccaccaagcccctcctgtgccccctcccatccatagtgcatggtgtgtggtgcccccagggctccaggacagatcaggccccaccttgtgtctacccccatccccgctgtgaacgtgccactgaataaagtcggggaaacgaggc

SEQ ID NO: 3600 - DNA, 1052 bp, Homo sapiens
gatgaacaaatgatgaacataggcaatgaggagcaaggccctgatagctcatcctggggtgataactacttgggctattctctgggcttagggagcagaagggcctggagtccctacggcctgtgcctctcacagccttctctctccttctttgcaggaaaccagccatgtcctttgggctctgtggagagctttagccttgcacggcggcgctgggaggcattgcctgccatgcccactgcccgctgctcctgctctagtctgcaggctgggccccggctgtttgttattgggggtgtggccaaggccccagtcaagccgtggaggcactgtgtctgcgtgatggggtctgaaggcttggtgggagctgtccactggagcagctcattgccagagaggctatttctatggctccttttgctgctgaggacactcactgtggctctgtgggatgagagaggcatgggggtgagcacttgaaacactgccttggggccttgggttaggggagcctttgtctttagtgcaggacacacatatgcttacacctacctttatcaccattcgttcatgaatcatgcctagctccatccttgccctgggacctactaggccttccatccaactgggaaatggggagaagcaaagctggcctcatgctcttcagggtcagttcctatctggagttgaccaggcctaccccagttgccattcctgaaaaatctcagctgccaggctgcctttagggtccctgtagacccaggagagttgagagggtgggggacacagagagaatagagaggatgtgggaactgccagagggccggagcgcaggagttcaagtggaggaatgctggctttgagccctctacactgctggttgtatgaccttggacaagtcacttcacctctcagtgcctcagcatcctcatctataaatggggatctctgaaaccttcctaccctacctacctcacagggctgttgtgaggacccagggagtttggatgtggaagtaaaagtgctgctaaaacctaaaaaaaaaaaaaaaa

SEQ ID NO: 3601 - DNA, 710 bp, Homo sapiens
  misc_feature (1)...(710): n = a,t,c or g
attcggaacgaggccggcggggggtcaggatcctccacaggtaggcgcagtcagctggagcgtcgcgacggtccgcgtncgtggagggcgtgtcctgcggcgcgatggccgtagtgttgccggcggttgtggaggagctcctgagcgacgatggcggcggcggtgcaggagagcgcgcgaagtacgggaccgagttcctgatgaatatctgttatcgctgaagtttctctttgggctcatcagccacccaggccttggacctagttgatcgacagtccatcaccttaatctcatcacccagtggaaggcgtgtttaccagggtccttggaagttccagtaaaacatacacatgtttggcttcttgtcattactgttcatgtcctgcatttgcattctcagtgctacggaagagtgacagcatcctgtgcaagcatctcttggcagtttacctgagtcaggttatgaggacctgtcagcagctaagtgtctctgacaagcagttgactgacatattattgatggagaagaaacaagaagcataaaaggactgcaggaggtgctgtgggttggagccgtgggctgtggagggtttgtgtatgatgagaagccctgtacagtcttctcaagaaataccctgagccagtctctgagacgcttcggtaaaaaatgtccctggatggaatcaagattttaaattcaaataaagcct

SEQ ID NO: 3602 - DNA, 477 bp, Homo sapiens
gttgataaagagttagggcgagtttaaggcactgtggcagctgtgagataaagtctggttcctccccagccggctcaggaaatgttcgcggatacaacggcggccccctctgggcatacctgcctgtggagcggagagtggacggatgtgagggggaccgggagaggcaccaaatctggcctgggggcccgagaagcttcctctcaggtggggtggcgtgagagtcgaggcctggaggtcggggagggttagctacgtgaagaggggattctgccgcgcttcaggtgcctggaggggatgcccgagctcttccgtaggctagggtgaagccagccagggcctgggggaaaggtagcagaggtttgccatggcttggtatttgagggactttacacatcgtattaagggtttgagcttcaacttggggtcgtcgggagccattgaaggttttttgttgtttgttttttgagagggggg

SEQ ID NO: 3603 - DNA, 471 bp, Homo sapiens
  misc_feature (1)...(471): n = a,t,c or g
gaaccgtctgcaaggagcaagcaacggtggccctgtccaccccagcaaataagaagcatatctgtagcttaaggccacgaatccgtaaaaaccccatgactttctcttcgtgcataaacagatgtatttttgatttcagggaattctttagtatcgtcaatggtgccacataaaacatgttcccaaaccaaatcccacccgtgctgggcagagtgcgtgcacgccatttcctacagcattccaaagatggaaggttctttacttcatgttaatttttcctttgaaattatttatatgttctatatataaatacatatgtacatagatatatggggcctctgtgtggctggaacagtatattttgntaaatataagtaactagtcctaattggcagaaagagcgtcagttttcacctcccccacgaggcactttcagnattcaggtattggtatttcatttttattcctttt

SEQ ID NO: 3604 - DNA, 871 bp, Homo sapiens
  misc_feature (1)...(871): n = a,t,c or g
agctttctctccagcatcagtccctgcagcagctggggcctctggtcaggaaccctcagggacccaggaactcagcttccaaacatctgcaccttgaccggactcgccatcccgccgtgggggtgcaggtgattgtaaacacgggtttgcatgtggatgcacacgggtgtgcggtgaagatctgtggagatggagctgggagctgaggctcctgttgcaccagccaccttcccccatcttgtggctgctgaggggcaggaagcgggggagtgggctcgtctcctaaatttaagatcacctcctcagctagcttanagtgcgtggcacgggccccccgcccccgagatctggagcccagggactttcttcctggcagatctgtggccttccctgctcagcctcttggtccccccactccctccaccgcctcaccttccctgctgggtctctggggcacagtgtgaaacccgcaccctagccaggccccagggagcctccgctgggcccagacagcagcgttcggttttatccacttttctcggataatcaggaggtgccccagtcgtcacagtgtggcattccgagttggggcgggtggtcgggtcaagatagcagcagcaggtgtcagggctcaagacaccaccccctccagcttctggggcccaggagcctctccctgctacagggggtgggggtcctgctcagcagggtaggtggtggttttaggtcttgtcaccctcactcagtggaactgcctctgggagctttggcgtctgtgactaaagggacgctggattgctcaggtcagctgcttcggggctcccaggctgggtgtgccttagccacaggcagggctgtcaataaacccctt

SEQ ID NO: 3605 - DNA, 525 bp, Homo sapiens
tttttttttttttttgtttttcactttattatacaaaaaagggaaaacaaaacttccacagttggctttaagcataggcagacacctctaagccactccctcccacctcccatgatacaaattcaagttgtggtggttgttgaatcctacaaaacactccttaaatattagaaaagaagttaggagctcccagcacatttcttgaagcccaggttctgagcctggggtggccaggcttggcctctcagatgaacaggggagaccttttccatcaaatacaagctttaagcttcacaccatcttgcctgcctttccgccttcctgctggacaatggagaccagcagctcggatgcatgtgactctggcagagggagcctggtctgggaagcatccgagaatggcttcagcacactccccctaatggaatcagagactgggcaaaacagaggatgtggagaacggggcagcctcagcctgctcccaccagggtcaacatctcccggccctcaccgaccctttttccc

SEQ ID NO: 3606 - DNA, 1770 bp, Homo sapiens
  misc_feature (1)...(1770): n = a,t,c or g
ccacgaagaccttcccaggagcagtcagcctcagccagttctgggcagcctcaagcacccctgaatagggagaggccagagtcccccatggtgccctcagagcaggtggtcgaggaagctgtcccgttgcctcctcaggccctcaccacttcccaggatggacacagaaggaaaggggactcagaagctgaggcactctcagagataaaagatggttcccttccacccgaactgtcttgcatcccatcccacagagttctaggccccccgacttcaattccacctgagcccctaggccctgtatccatggactctgagtgtgaggagtcacttgctgccagcccaatggcagcttaagcccgacaacccatcagggaaaggtctgtgttcaggggaagtaggcaccagatgggcccacttacaaggaaaggttccacaagattgttccctggatttcaggaccccgagggaggggaacccactggccttagggctggaaagcccaggagagcctcagcctccacagctcaagaaagatgatgtcactagctccaccggtccccacaaggagctgtcaagcacagaggcaggttccacagttgcaggagcagccctcagacccagccatcattcccagcgttccagtctctctggggatgaagaggatgaactgtttaaaggggcaactctgaaagctctgaggcccaaagcacagcctgaggaggaggatgaagacgaggtgagcatgaagggacgcccgcccccaacgcccctttttggagatgatgatgatgacgatgacattgactggctgggatgaagacccaggaaactggtgcaaaggtttctctgcaacccttccctaagcatgattttgcacagccaaccctgggtctaggcgagccacagggtgaggtcaaggtgagcattctgggaacaatatttgggctcagagggtgggttggccaccttctgagccccacccccgccagacctggtgaagaggatcataaccctgtcttcaagaacactgggatttcagcagcaagttggaagaaggactggtaggttcccctccaagccagtcacctgtaagagtcctgtcctctgccagactttttaatctcttcattaactctcagactgacctgggagccctctacctgaatccagtgctcaactgtgccccggcaacaagacctgggctgaggtctccctggtagaactaagggagattacaccatctaaatcccagtgcagtcaacagcctggcctatagtcctgggacatgtatcttcttctttgccttaaatctgatacaagaggtcaatgactttgaaaataaaactaaaataaatgtctataatgaaacttgacccaagcccttggagaaaaattgagtttggttccaagggctgtctgtgctcttttgggaatctaagggtaggagtcttacagatctgggtcagttaatgtgcacaaaacgttgtggcatatttactccctttgatacctaaccctggaacttttaggctttcaaagaaagtcaccactgtagtcctagctcatccctggggcatgatggttctgtgaggaccagtccagtcatcctcttgctcctgcaggcttagtcctgcagtctaggaagccatgcaaagaaggtgagagggtcccttctttccattgttcatggcacctgagggattcttcactttgagagcagcttcaatcccttagaactcatgggaccangacttatgcanagaacat

SEQ ID NO: 3607 - DNA, 269 bp, Homo sapiens
  misc_feature (1)...(269): n = a,t,c or g
gcggagtgtgccatgagcgagagggaggctgccccaaatnaggaattggtgcaaagaaacaggttaatatgcagaagaaatccatataggatctttgagtatttgcaactcagcctagaagaggcctttttcttggtctatgctctgggatgtttaagtatttactatgagaaggagcctttaacgatagtgaagctctggaaagctttcactgtagttcagcccacgttcagaaccacctacatgggctaccatttacttttcgaagg

SEQ ID NO: 3608 - DNA, 339 bp, Homo sapiens
gcaacgagcaaaaaacctttctgtaggctgagacctctcggtgcacctggtgaccctgggtggaggggacttgctgtgaagtcttcctcgccctctgccctcttgctgcttctccacattgccaggaaaagctgctgacgcctgccctcctctcttgagtcgagggctgaatctttctcctctaagcagtctggtcaggaaccttggtttcttgagaggcccccaagatgccgcagctccagggctcttcctcctcaccagaaatccctggggcttccacaatgtggaactcactcattgtcaggtgtccgtggaagtgtttttggcatggtgacctgt

SEQ ID NO: 3609 - DNA, 1459 bp, Homo sapiens
ttgcatcactttactttaattgcatgatttatcagaacaactattaacatacgaataccattcagttcagctgcaggtataggcagtgacaagtatctaattcttagaagaatcacttactcccacaatctgtccagacacattaatctaaggacaagtttataaatagcaaacgtgattttcacattgcagtgttctcaagaatgtatatacaagtgtgtagtcctgttgatggggatgtttcccccgagttctttctattgatgcgttcatgctcttgaccctggtagagacagttctttctttccacagagcagattttcttttgtcatccaccatttacaatactctgtgaattagtattacttattacatttatgaaacggcaatatttggattgtaataggctcttcagtacaattccttgtgtcttctggtaagtctctgcactatcagagagcttttagttataatcattttcctgcaacaacagccaaactcaactattgagtttcagtgtgacacaccctctttgtagcttgctgggttaacccttggcttcaagtcctgatgatgtaatgagggtggggtgtattggcaatcagtacatttccttatcgcaatttacagtcattgaaaatcatgctgtcattaatcccagtctgacataccttttctaaaatgttcacagtgcagtgtttttgtggcctaacaaaatttttctcatatcattaaaaataaacatttttataaaaaatataacactttaaatgtttacgtcgacaaaaccagttagagtaacctacaccacatgcactatacagtagcaagcacaaaattccacagaatgaagcatcacaaagttctgctcagggtggctattccatctaggtgaaatagctgggattttcaattgcctttttcatttgcttctaaagtatgttttgcttaacataaaacacaccctaatgcaaaataaaactccccaaaagttttgtttccaattgcttgcgaggtgggaacctgccaccgagacagaggctaatcttttcaatccatccaccctttctttgctctacctatgagctgtggattggaaccaatgaaccttttaggtaaaatggtatcctgctttacaaacatgctgagttatctttaaaaatatttatcaacaaattacttgtcttattttgagttttcatttaaaaaaatacacacaaaacatctacatgttcacattcattagatcagagtagcatcattctcaaacagtgggtttttatatgacaactaaatatttcatgatgactaaattatttcatacaaattttcttaatgtcatctatgtacattacatcctgttcatttataaacatgttttgtgtgatgctattttgaaactttgactgtattgcctataaatattcttccaaccaaaggaatgtctatacaaaaattt

SEQ ID NO: 3610 - DNA, 1490 bp, Homo sapiens
  misc_feature (1)...(1490): n = a,t,c or g
aacagtggttacccaagacaaaagcagggtggagcccaatagataaggctctgctggaaggtacaacggagctcagaggagagtttgggatcctgtatacttttaggcaaagtaacttctgttgccctacaatgctggacaagaccttgagcttcttcctgtgctttcaaatgatctgcccaggtaaagggttgagaagaggtgaaagcacaggaagaagctcaaggtcttgtccancattgtagggcaacagaagttactttgcctaaaagtatacaggatcccaaactctcctctgagctccgttgtaccttccagcagagccttatctattggctccaccctgctttgtcttggctaccactgttccctcgtattggagctgatagaaaaatggctggaaagacaagtccttggtcaaatgatgcaaccctgcagcatgttttaatgagtgactgggagcaagccatcagtgatgaggatgaagaggaaagtttttcctggctggaagagatgggtgtgcaagataaaattaaaaagccagacatactttctatcaagctgcgtaaagagaaacatgaagtacaaatggatcacagacctgaatctgttgtgttggtaaaaggaatcaacacctttacattgctcaattttttgattaactctaagagtttagttgctacctcaggtccacaggcaggacttcctccaaccctcttgtcccctgttgctttccgaggtgccacaatgcaaatgcttaaggcacggagtgtgaatgtgaagacacaagctctttctggatacagagaccaatttagtttggagattacaggtcctatcatgcctcattctctgcattcactgaccatgctgctcaaatcttcacagagtggatctttctctgcagtactgtatccacacgagccaactgctgtatttaacatctgcctgcaaatggacaaagtacttgatatggaggttgttcataaggagcttactaactgtggtttgcaccctaacactctggagcaacttagtcaaataccgttacttgggaaatcatctttacggaatgtggtgctgagagactacatttataattggagatcctgaacaccaaagtaagcctaaaaggaatctttgaggaaaaaagccttctagcaaggaaattcaagattcttgaagttgaaggaatatactgaaatgtttataaacataacttttactacagtagcatctaaggttttaaatgtgttttactattttcagattagatttttagatataaagatgaaaaactcagataactcaaatgagatatctatatccctacaacctaattgtatattgagcagaaactgaattaatatgcttccttgcaaatgggaaatcacatagcagttaccccatggcattgtgactaatggcatcagggcnaaaatatgttactttacgatttacctgttagcaggttcttgtttcataaaggt

SEQ ID NO: 3611 - DNA, 1889 bp, Homo sapiens
gtgagccaccgcccccagcctggcctggcatttctttgagttcaggaagtgtgacaaggatttggacacccagaaataagcgtgtcgagaagagcacaagcagaggatccagcgctcggcatggcggagccagatctggagtgcgagcagatccgtctgaagtgtattcgtaaggagggcttcttcacggtgcctccggaacacaggctgggacgatgccggagtgtgaaggagtttgagaagctgaaccgcattggagagggtacctacggcattgtgtatcgggcccgggacacccagacagatgagattgtcgcactgaagaaggtgcggatggacaaggagaaggatggcatccccatcagcagcttgcgggagatcacgctgctgctccgcctgcgtcatccgaacatcgtggagctgaaggaggtggttgtggggaaccacctggagagcatcttcctggtgatgggttactgtgagcaggacctggccagcttcctggagaatatgccaacacccttctcggaggctcaggtcaagtgcatcgtgctgcaggtgctccggggcctccagtatctgcacaggaacttcattatccacagggacctgaaggtttccaacttgctcatgaccgacaagggttgtgtgaagacagcggatttcggcctggcccgggcctatggtgtcccagtaaagccaatgacccccaaggtggtcactctctggtaccgagcccctcgaactcgctgttggggaccaccacgcagagccaccagacatcgacatatggggctgtgggctgcatactggccgagctgctggcgcacaggcctcttctccccggcacttccgagatccaccagatcgacttgatcgtgcagctgctgggcacgcccagtgagaacatctggccgggcttttccaagctgccactggtcggccagtacagcctccggaagcagccctacaacaacctgaagcacaagttcccatggctgtcggaggccgggctgcgcctgcttgcacttcctgttcatgtacgaccctaagaaaagggcgacggccgggggactgcctgggagagctcctatttcaaggagaagcccctgaccctgtgagccggagttcattgccgaacttttccccaccaccgcaacaagcgggccgccccagccacctccgagggccagagcaaggcgctgtaaaccctgacggtgggcctggcacacgcctgtattcccacaccaggtcttccgatcagtggtgtctgtgaagggtgccgcgagccaggctgaccagggcgcccgggatccagctcatccccttgggttgggaacatcctccactgacttcctcccactgtctgccctgaacccactgctgcccccagaaaaaggccgggttgacaccggggggctcccagcccgtgcaccctggaagggcaggtctggcggctccatccgtggctgcaggggtctcatgtggtcctcctcgctatgttggaaatgtgcaaaccactgcttcttgggaggagtggtgggtgcagtccccccgctgtctttgagttgtggtggaacgttgggcctgggatgagagggcccagaagaccttcgtatcccctctcagatccccggggctgtcccgtgcatgggttggctgtggggacccccaggtgggcctgggcaggactccagatgaggacaagagggacaaggtatggggtgggagccacaattgaggataccccgagactaccaggagagccccgggctggaggctgagctgcatccctgctccccacatggaggacccaacaggaggccgtggctctgatgctgagcgaagctataggctcttgttggataaaagcttttttaacagaaaaa

SEQ ID NO: 3612 - DNA, 146 bp, Homo sapiens
gattagccagaactctctgaaatgtaaataattatacaatgctgttactacctttcatgttttgataccatagtaagtgactcacaaaaaatcagtggcttactaattcatctggcatatggttttctgaatatcagtaacacttt

SEQ ID NO: 3613 - DNA, 235 bp, Homo sapiens
gatagctatcctgaaaattttcatctgagggtagattgcgtcatggtcttctgaagttgtctttctctttaagaccattcattgaataaacctattagacgctttggagtcataattgaatataagacagaaatggtttgatataaaagcaaccaacatgcagtagataacacagcaatagagtgaacacattgcagaagatagggcaacctctaatccagaaattatcagatag

SEQ ID NO: 3614 - DNA, 50 bp, Homo sapiens
ggtcatccaagaagtggacacagtggcatctgaatgcccttctctaagca

SEQ ID NO: 3615 - DNA, 513 bp, Homo sapiens
gggagggaacccatctggggaccggtaggtgcaggtgcagtaggacgtgggacttttggacccgtcctttggtgcagctcgccagggatgagaggcacctccctacttgggtcttcaggagctggtccaaggagcttcgaatctaagtcatctagaatgaccctgaaatgactgacagccccgggcccaagaaaaacccataaccacctcagatggatctgacgtggctaagggacaaacagcaaatatttcagtcattttgattttacaaataaaaaatgtgttgtgtttttgtccgacattatttcctgactgcactgttctgagaatggagtccacctggtccctctggttgattagaatctcaggtttcagctcctgctgtcctgagcgaacttgcctgatgcagggctgtgctgtgtccagatgttgctggggcctcactttttctcttggctggaggtccaattgccagagcctcccacactgcacatacaaagggtctgagcccag

SEQ ID NO: 3616 - DNA, 519 bp, Homo sapiens
tctcatgctagcaaattttgaaataggattctaatcactgatttcaaatattaagcaaaatgtaaagcactttaatttatagctatggttataaacaggttttagatgtttcaaatgacttgtccactgaatgtcacttgaccttgataagaggccgcctgcacacagagcccagttaattctccgcacctcggttgtgtgcttccgaatgggctcactcccgtggtggtgtttgagagccaacaacactacctcagagacgggtctttgggaaactttgggtctcactgttgcctgggctggagcactttggtttatagctggaatactgagttcagttcagaaggcaggaaagacagtcacaccgacgtgtcctgaaggtgtaggctctccacttagggcgcacaagctgacggctgcagccagcaggcccccggtgacgagacacttccaggtcttgtggtggggacgcctctcagtgccagtcccgccactgctgagtgagcctggtgttcttgc

SEQ ID NO: 3617 - DNA, 1593 bp, Homo sapiens
gaatatatacaatttatttaataaattaatgtcattcaaaatacagtgccagaacatggtgcagttgaacatgctagtaatgtttgtcatgaagcacctgtgctcatgttagattggcggcgccccactactgctagtggttcctgggattaatgccagagcagcgctagttatctgctcttctgcacagctagtgcagagaattcctgaacagttcaccttactaatcctaacccccacacgcacacaacaggttaaaaaaaacacaccctgacagctaacagatctatacacaatcactctacagtaatgcttgttattaaattaagatgtaatgacctggttaaccgactctaaatcttgaagatggagaactacatcagcagcagatagttatatggcatgagcccattgttaacataatacagaaagtggaggctttttctgattaaagctccacgcagacccgcacaatgagtggcctgggcaattcttactgcaaggccccagcaacttaagtccacacctggtaaatgaccagctgactggaagacctgtattctagatagacaagtataagttagtgaaaagagaatacatgcacctaatagtatagttagactgatcctgcagtcatagctttccctgtgtaataccataaaattatggaagatcttcctcaactagagtataggatttagacatttctataccaacacggacattagtgttaagtgcagttgaattaattacactgaaaactgtattccaggacttcagaacagaagcacgggaatgaaacacacatactaaaataacctcagcacaatttgtgatacatcacactaggaacaggaaactacttttataaatgaactttttgaactgtacatacacagggctaacaatgttagataatccagactcttatactctcatgattacacataaagtttctcaattattgaataatctatttcatattatggaagcatatctttctgtaagactcactgatatatattatactgatgcaaatattaagtagggcataaaaataaaatttatcaaagatagaattttatgtactcatatttagttctttcatagcctcttttgtttagcaaagaaaatgacaaagcacataactcaggcgtgcactccctgaacttccccactatacaggtggtagtgcaaccatttctccatccagttcaaactcttctgtcccatccgttgaaaaaagataagttggtggtttccatggagactcttcaaggcaggatggatagagtttccccacagtgcatcgaaaatctctccccaagtcccacagtacacgttcagatatatgctgccgcagaggaccaccggtcaagttccaggtcatattggtaggtgacgtatttagctcgctcatttaagtgggtttctcgcataaacacacatagagaatttgagatcacaacagctctaacacaggggtcagagtacctcttagcagggatgttggctgccattttccactcatttttattcacatcataaatttccacagttactgaagacccatctacagtgccagaggggagt

SEQ ID NO: 3618 - DNA, 391 bp, Homo sapiens
aaatactgtaaatcttatagccaaatcaatttcttcatttaatcccttgctgtaataattgttttctttgcttcttcccccctagtggtgtggacatgcctgcaatcctgctgaaactcggatttaaagagtccctggtacagtcaaaaatggcagcaggcacaagtaccttcgtggtggcctatgcaatccacaagctgtttgcgccagtgagaatcagcattacgctagtctctgtgcccttgattgtcagatattttcgaaaagtgggattttttaaacctccagctgcaaaaccttaatgaactcttcagtcgttacacactgaaaacctatttcttctaaattacatgatttgggattggttttagggttttaggggttgtagggg

SEQ ID NO: 3619 - DNA, 523 bp, Homo sapiens
taaagatcccagttcgtgcatgttttttgaaccattgcttactatatcactaaataggactttcccttttagcctgcagtatatctgtcgcgcggtaatctgcaggtgcactacgtatgatggaattgatgggctccctctaccctcaatgttacaggattttttaaaagagtatcattataaacaaaaagttagagttcgctggttggaacgagaaccagtcaaggcaaagtaaactctccggtccccaaagggtgttaactaggtccgctttcatgtgcatcagacagtacacctatagcaagcacacgtagcagtgttaggctttttcatacagtatgtaagcttagtgttagtatctgtcagatgctacctgctgttacttattcagataaacatggtgcctattggaacaatagcggatagagctacaggtgttcagtaagactacaaaaacattttgcctatttcgctaacagtttggtttttaatggctgtggtatttgagtgaggcaactctggg

SEQ ID NO: 3620 - DNA, 1405 bp, Homo sapiens
catgctcctaggctccagagtcccgtgtaggtctctaccagcaggtcgcctctgggagaacgtttcatcttcaggctctagaaactcctgttgcggaattgctggctttagtagaaaagatatgtcaggatttagaaatcgtattgaactctcctggacttctgctccatgatttcattttgctttcacgaaccagcgatccctaccttggggtgggaaattcaattgtaggcagcaaataactcaaccctcctgtaacccctgaggattataacgaccccatgacccccgatgacagccagcagtttggtgactagagttttttgagcctgccattctcagtagcagctttggtctggagatggaacgtggagcagggaatctgacagccacgtttctcgtgatcacgtggactggagttgtttttgttatctggggtggaaaattgcaatgatcaagtttcttttttattttttttttacttagaaaagcaaatattgtgtttttgtaataaatccctttcagcaaaattgcggaggatcattcatccactagggccccacctgaggcacagcgctgactcatcacggtggtaccagtaggtcagccatctggaaacagaagtggccctaattgggccaaaatgtggtaagactcgctggcctcaggcagggccaggccagttccctcacttctctgcacacctattcccagattccatccagagcaaagctgatgtttatcgtctcattgtacttaggctttcgtactttaaaaaattatgactttttaaaaataagccttcagcagacagaagtgaagaaatttagcctgggttgcctcagcaacaaagtctgcggttcctaagagccacatgttggggaagtggggtgacccaaacttggtgacataggttgattgatcagaccctcagccttacaagcaagagctcatgcagatccacagagccatgcacatcctgtcttcctgaccttcctcaggtggcaccacctgcgccccatggacctgctgtatcggtgtcatgtggaggtctgatgaatcctttaaaacctaactgtgatgtcgtaaatgtaactgtgctacctttatatctactgaagggcagcgtctgcatccgagggaaattcaacatgaaacaaccatcgttttagttgcactcagtctgtccatatgacatacacatggaagtgaatgtttccttatgttttcaggtctacaatgtttagtacatgtaaataaggaaaaaatttgataaatatggtaaattaagttatagcgtgtcatttgattcttattttgctgtctcttgttatttaattttcctaatgctcccacatctaggttccttcctaggtgggtgggaacaccttgcagacgtgttgtg

SEQ ID NO: 3621 - DNA, 512 bp, Homo sapiens
gcgtcgaccagtattaggggatgtgggtggtagaaagatgcagtggccaagcctcaccctgggcgagctggggcaggctcgctctctcaggcacagtgaggaaggcacactgaagggggttgccctgactgccagcatgccaggtatacatggtgactgaagctgccacaggtcttctattgaccacactacaaggactcttcttggtcactgatgacagctgttgtctgtctgccattggccacactatccagttctcactggccaagcaggtgggccggggccagccaggactttgagaatcccactgggaaaggacagagcctgggttcaggctaggtccctcttctggggctgggcaagcttcagatgtgaagggtatgggtctctcacgctctccaggagcattgtctcatcccacttggatgggagactcccattttaaatttgaacagggatatgagtttgaaattgggtttagaccagagatcctgccgggtcggaccaaagaa

SEQ ID NO: 3622 - DNA, 1168 bp, Homo sapiens
tgctttacagaacaaacgtgttctttactgtgaagttcattatgaacctgaatccctgatcatttaaagcctattatccaacttatgcctcaagcagcaacatttttgtgttcaacaatttaacttactacacacaccttgtgcaaaatcacaaaccttctcatacatttatgagcttcagaatgtaactgggaagtgtaggcacagccctttgtccctctgcattgcatggtgagaaacggctaaagcaaccatcgccgcattctgttttatgagcacaaaggaacacctattcttatcgtgggccacgcgccccggtccttaggaggatgccagatccccctgggatgggcaatggcagaggctgcacagcttcctgaagatgtaggtaccacagcaccagccccgggcagggagccaggccaagggcaacgacagaatcttccggagacagcacagcaacccactcatttgtgtgcacccgcacccacaaccgtcttcactgggtgcatgtcacgcccagggtgagggaagttgaggcctggcctcacagtgtggaccggctgcgggacaagaacacagtcaactttggctttgcttggaaagctgcttcagatacataactcccggcccctcctgaaaatgatcgttttcttagccggggccctgtgctttaggagaggtttactgtcagagcttgctgttcttttgaaactgggccactaggctgaggacctgctcagaggctttgatgatcttggagccgaggtaggaggtgctgttggggcccgtctcctccaggaagtagcggtagttggccatcaggccgcaggagccggtgatgcctctgaggctcacatccgccatccagttgatgcgccacagcaccgccccgttctgcaggtggaagttggccacggggttcagcgcgtagccgcggtgcttctctccatacaggtaccaggcgcacagcctcatcagcggagtctgcagcgcccgcaccagcttctccgactgcacccactcgctgctgctgaggaggagcttgagggtctcgttaatggggccaccttgtgatctccgagatttccttacattccgaatctgtaaagagttcattcctcccatgctccttcgtttgcgagttcagaagccccagaagccattt

SEQ ID NO: 3623 - DNA, 407 bp, Homo sapiens
  misc_feature (1)...(407): n = a,t,c or g
gggcgctacgtctgctgcggagggcggcgcgcggagctgcggcggcggcgctgctgaggctgaaagcgtctctagcagctgatatccccagacttggatatagttcctcatcccatcacaagtacatcccccggagggcagtgctttatgtacctggaaatgatgaaaagaaaataaagaagattccatccctgaatgtagattgtgcagtgctcgactgtgaggatggagtggctgcaaacaaaaagaatgaagctcgactgagaattgtaaaaactcttgaagacattgatctgggccctactgaaaaatgtgtgagagtcaactcagtttccagtggtcttgcggaagnagacctagagacccttttgtcaatcccgggtccttccttccagccttgatgctac

SEQ ID NO: 3624 - DNA, 2167 bp, Homo sapiens
  misc_feature (1)...(2167): n = a,t,c or g
gtaagacaagcatgaatgtccctttggccgcagtagtatagagctgaccaagatgctatgtgagatcttgaaagtgggcgagttgcctagtgagacctgcaacgacttccacccgatgttcttcacccacgacagatcctttgaggagtttttctgcatctgtatccagctcctgaacaagacatggaaggaaatgagggcaacttctgaagacttcaacaaggtaatgcaggtggtgaaggagcaggttatgagagcacttacaaccaagcctagctccctggaccagttcaagagcaaactgcagaacctgagctacactgagatcctgaaaatccgccagtccgagaggatgaaccaggaagatttccagtcccgcccgattttggaactaaaggagaagattcagccagaaatcttagagctgatcaaacagcaacgcctgaaccgccttgtggaagggacctgctttaggaaactcaatgcccggcggaggcaagacaagttttggtattgtcggctttcgccaaatcacaaagtcctgcattacggagacttagaagagagtcctcagggagaagtgccccacgattccttgcaggacaaactgccggtggcagatatcaaagccgtggtgacgggaaaggactgccctcatatgaaagagaaaggtgcccttaaacaaaacaaggaggtgcttgaactcgctttctccatcttgtatgactcaaactgccaactgaactttcattcgctcctgacaaggcntgagtactgtatctggacagatggactgaatgcgctactcgggaaggacatgatgagcgacctgacgcggaatgacctggacaccctgctcagcatggaaatcaagctccgcctcctggacctggaaaacatccagatccctgacgcacctccgccgattcccaaggagcccagcaactatgacttcgtctatgactgtaactgaagtggccgggcccagacatgccccttccaaaactggaacacctagctaacaggagagaggaatgaaaacacacccacgccttggaaccgtcctttggtaaagggaagctgtgggtccacattcccttcagcatcacctctagccctggcaactttcagcccctagctggcatcttgctcaccgccctgattctgttcctcggctccactgcttcaggtcacttcccatggctgcagtccactggtgggacaagagcaaagcccactgccagtaagaaggccaaagggcccttccatcctagccctctgcaggcatgcccttccttcccttgggcaggaaagccagcagccccagactgcccaaaaacttgcccaccagaccaagggcagtgccccaaggcccctgtctggaggaaatgggcctagctatttgatgagaagaccaaaccccacatcctcctttcccctctctctagaatcatctcgcaccaccagttacacttgaattaagatctgcgctcaaatctcctcccacctctctccctgcttttgccttgctctgttcctctttggtcccaagagcagcagccgcagcctcctcgtgatcctccctagcataaatttcccaaacagtccacaggtcccatgcccactttgcgtctgcactgtgatcgtgacaaatcttccctcctcaccagctagtctggggtttcctctccctgccccaggccagaactgccttcttcatttccacccacgctcccagcctcttagctgaaagcacaaatggtgaaatcagtagtctcgctccatctctaatagactaaacctaaatgcctctaggacggactgttgctatccaagcgtttggtgttanccttctcctgggaggtcctgctgcaactcaagttccacaggatggtcaagctgtcagacatccaagtttacatcattgtaattattactggtatttacaatttgcaagagttttgggttagtttttttttttttttttttgctttgtttttgtacaaaagagtctaacattttttgccaaacagatatatatttaatgaaaagaagagatacataaatgtgtgaatttccagttttttttttaattattttaatcccaaacatcttcctgaaaataacattcccttaaacatgctgtggaataaaatggattgtgatg

SEQ ID NO: 3625 - DNA, 422 bp, Homo sapiens
  misc_feature (1)...(422): n = a,t,c or g
ggttaacatttgatgttttggcctcaggcatgtatgcattttttcacagaaagggactcatactgtgtatattgttttataaactgttttttaattcaataacatatcttgaatttccaagtctaccagacttttctacagaatcaatttaaataattatggtctatcataaatatattactcttctcctatagctggacatttaggttgtttccaatgtttacccttataaacaatgccactatgagcaaccttataggtaaatctttctacaaatttttgacattttcctggagatagatttctgggccatagaaattgaggttgatttggggtggggggagttggtaagatttacctgtaaaggttgatttgggggggtggggagttggtaagatttacctgtnaatgcattaacttcc

SEQ ID NO: 3626 - DNA, 270 bp, Homo sapiens
  misc_feature (1)...(270): n = a,t,c or g
agagcctccgtgcctcggagcaggagaggcaggctatggctgccaccctccctcctgcctgtttcccagtgagaactgacctgagtccccttccaaacccagacccacctcctgccccaggcccactgaagcatgttccatttctaaaaagcccagagttcagtgtgtcccaaggaaaacccaaagtggaggtgctcaggtccaggggagtccagtgggcaggacccttggcaggcaagnccctcccttcactcccaggacctaccttct

SEQ ID NO: 3627 - DNA, 695 bp, Homo sapiens
gttcctggcctgcttgcatgctgtttctcagtagactcaaagcagtatggagataaaatcatagaggagctgcaagatctaggcccccaagtgtggagtgagaccaagtctggggtggcaccccaaaagatggcaggtaggaccttgtttcacctgttccgtgaaactcacttccatttcttcccttcccctgatcttactgtcctgactgactggtggggtgggggggggtggaaaagtaccatgggccctcctcccttggtgatagaggaggggaagggaccccatcctatttgctcccttctgtctcacccctcctgtcagatcagtctctccctgttctctgtaccctaggtgcgagcccgaccaaggatgacagtaaggactcagatttctggaagatgcttaatgagccagaggaccaggccccaggaggggaggaggtgccggctgaggagcaggacccaagccctgaggcagcagattcagcttctggtgctcccaatgattttcagaacaacgtgcaggtcaaagtcattcgaagccctgcggatttgattcgattcatagaggagctgaaaggtggaacaaaaaaggggaagccaaatataggccacagagcagacctgtggatgatgctgcagaagtccctcagagggaaccagagaaggaaaggggtgatccagaacggcaga

SEQ ID NO: 3628 - DNA, 54 bp, Homo sapiens
tgagcgacagagtgagaccctggccttcataaattaatagaaacaaagattaaa

SEQ ID NO: 3629 - DNA, 591 bp, Homo sapiens
tacaagtctttaattaaaaaactcaacaaaaatatataattgagcattttacataatgcatacattcttaatatctgcaggtaagataaacaacagaaggcaaaagcagatatgctgtattgcttctttggcaactcaccaatatcatcccctgcagaaacagagtttttttttttttttttaaatccatggtcttaaaataattgtcccttagtataaacaaaatatttagcaataatacagtagacggattcttcaaattcacaacaatttataatactttataccacaagggtaaactagtaagctgctttctaaaattaaggcagcagcagtgtttagagggggagtaaaaaaaaaaaaaaaagacatcctttttctagttatatcctgggctctgccttctttgttgttgtttttaaataacgtcacattcaagctctacgtcttggatgacattcctaaggataataaaatccttttccctgtacataaactgtgtttcacttccagatcagtctgacactctccaacaaaaccaaatacatttcgtatgaggcaacacaacttttttttttttttgagatggag

SEQ ID NO: 3630 - DNA, 353 bp, Homo sapiens
cgcctgtccctgctaaaatcagagctttgtgagggcagagatggattctgtgcacaggtatcttctgagtctctgattcagtgcctgaaacacagtggctcccgagacaatctacctcagtgcctgttttacaggcttcacctgtgacacatgactgggacatatgttattcatgatgacatgcaagagtctctgtgtaggtgtctactggtcttcatcatcaaacagagcgagaactccaagtcaggaggcagacatatctttggggcaagaagacacctagaaattttttcttcaacccgtagactttcggatttgggtagaaggatttgtttaaggaggttgcgaaactt

SEQ ID NO: 3631 - DNA, 943 bp, Homo sapiens
aatatcagcttaattttaatgacaactaaatatgctgaagtgaggatttagtattttttaaaaaagcaaaacaaggttcagtagtcctcagcaattctccaagtttctctctttgcctaaaatggtcatagatcttgcatttctctgaatcgtgatgaccacacccagtcatcttcacagcataattgcaggtggcagtaaagagagtgtgctgggtaaggagcagttgctgggtcattccttgggccccgacctgcccggggagtagccctgggggagagagggcagtgttgcctatcccagaggtcccagcagtcacactgctctgcaggccgggctctctttatagccacgagaaatcaccttaatgcagtctctttagttgtctgctgaagctgctagttattatgggccacttacatgaggctgagaagtacgtgccggagctcacacactgcctgttgcggttctcttaacatcagttatcacagctgcctgtgggtcccgggtatttccattcctgccccttgttggcccgaggaaggatgtggaaagagcacctggcgggatgaaggtccaacagcctgtgcctctccactgctggccctggagccggcagcagtgaggcattcattgtctgtgttgcggtgtattcccagcttcagtgctcttttcctttttgcctgaaatgtttatgcttctctgcagccagtcctctaacaaatctctgaaatttaaaaacgtataaagagagcctgggttaatcagttctgcagcccctacgtgacactgtgctagttctccttcttctgtctcctccttaccctggccctgcacccctgtacttaagagggagaggtgggaggtgctgtctggtatcatttgctgcctcgccagtagagggtgccgctgtgcagggtaactgcccgcctgctcccttcct

SEQ ID NO: 3632 - DNA, 415 bp, Homo sapiens
  misc_feature (1)...(415): n = a,t,c or g
ctggaccgtgtcaagctgagcttttccatgagcctcctgagccgctttgtggatgggctgaccttcaaggtgaactttaccttcaaccgccagccgctgcgagtccagcaccgtgccctggagctgacagggcgctggctgctgtggcccatgctctttcctgtggcacctcgggacgtcccgctgctgccctcagatgtgaaactcaagctgtacgaccggagtctggagtcaaacccagagcagctgcaggccatgaggcacattgttacgggcaccacccgtccagccccctacatcatctttgggcctccaggcaccggcaagactgtcacgttagtggagggcaattaagcaggtggtgaagcacttgcccaaagccccacaanttngggcttgcggttccatccaaatt

SEQ ID NO: 3633 - DNA, 94 bp, Homo sapiens
aacaacctgcgttttaacaagccctgcaggtgactgtgacgaacacaaagtttgagggaccactagaatatagtcactgtagaatatatctcca

SEQ ID NO: 3634 - DNA, 251 bp, Homo sapiens
  misc_feature (1)...(251): n = a,t,c or g
ctgctctagttgatgtaaggatgagggggcggcctagaccccctgctgcccaggccgttaaggcaacactgggttcctggcttgaaagctgtgggctggctgcccttgccagctcaaacggctggcgagttttnancttccctaagggactggcatagggttttttggggtcaatgccaggaacctgggggaaactggatgcttttaatcctaagaagttcatccctcctgctcttactgtttccggccct

SEQ ID NO: 3635 - DNA, 494 bp, Homo sapiens
ttttgttgacattgggcttgtgctgctgttacgtgggcctgagtcccctagaaggagaggcagaggaattttaaatcagagtgggtatgactaggctcctgactctgcaaactcatgtctagttgaggtgacaaaactacagtttaaggcaggttgtaatcacagctaatatggcactttgactgtgttatctctgtacctcacaaaaaccctgtatggtgggtgttcttatttgcatttcataggtgaggaaatcaagactcagagatgaaatcatctgtctagatcatagatagcaagtggcaaagctggaaatgggatccagtctctgatctttctcacaccagggcctgccctttttctatgtggtgttgcttctctaagtaccaataatatagttccaagttttttaagagagggagaagcaagtggggtttgaaggatcaggaaatatatagtacctgagctggtcatttaaaacgggtatgattttg

SEQ ID NO: 3636 - DNA, 911 bp, Homo sapiens
aagggcttgcatgaaagaagagtatttttctttactgacggtatactccatgtcttctatggaaaacactagactagatgtaagaataggatgttgaagatgattaaaaaggatctaatagaaaagacatatggtacccagatcattcaggactgtgaatgcaggagagcgtactgtcggcactgtcgggagggacacagtaagcaaagcactaaatcccaggtgtccaaattggaattctggtactcaggcaggtgctgcctaagtcatcacagaaacataataaacaccggaatgaacactgggccatctttagacacgataacatggactatagttttgtcaaattttgttttgtttttacaaagaaatagtatgttgggatttaataaatgaatccatttttacttgcagtaaaactcataaaaacagtttcactttagttccaccacagcagtgccataagcaaacggcacatatgaatataacaatgataagaacatcttccaggggatccagtgaagctttatttactttaaaaagcacactctgtaaggataccaggcaaaatttatattactattcaagaaaatatagtacttaatataatactacatcttataatgctgagatccatccaaaatattcctttctcaatcaacacagtggcgcctctgtatccttcttaaaaattaattttatgtaattttctataaatgaatctaaattaaagattccagaggtaaaccatttccctgttaaaaagaaatttagatttatgttagaagaagaggtgtcatgaatcttgcttgacatggtttgcaggatctttgtcccccacatctcatgttgcaatgtgatttccaacagtggaggtgggctgggtgggaggtgtctgaatggtagggatg

SEQ ID NO: 3637 - DNA, 747 bp, Homo sapiens
  misc_feature (1)...(747): n = a,t,c or g
cgtacgggggctttttctgtctgtctgtctggctggcaggctggctttccccctctttcccacggagcccgagccgggctcctggaggggagtggggagtgggtggggggagccagcagagttccattttggaacgcccgtgccgcgtctccgcgttcccagcccgggtccccgcgttcacagccccagcgcaggtctggatgtaccgactgcttttggaataaaaagattcccaggatgtgagcaacacgggaccgatatgatgcttcctggtgtgtttagtggttggtgccattccaattttctgtgctgaaatcattctgaaaactcaaacagtagacttcagcacacaaggaaagccaaagccatttgagggggaataaagccaaaagcctttcaccttattcgttccaagaatctcaccgccccctccttatccccctccaaaaataagccattgcacacagacaggcagcatggctagcaaacgaaaatctacaactccatgcatggttcggacatcacaaagtagtagaacaaagatgtgccgaggaagtagacagggccaaagagaaaggaatcggcanaccacagcctgacgtggccaaggacagttgggcagcagnacttgaaaactcttccaaagaaaacgnagtgatagaggtgaaatctatgggggaaagccagtccaaaaaactccaaggtggttatgagtgcaaatactgcccctactccacgcctcgtgcc

SEQ ID NO: 3638 - DNA, 992 bp, Homo sapiens
ctgttttacaaaattaagtttataaatatttctccactgtacaaagttctcccagccctgcccaccccatcacagttcacatttctcatgtttttaaaatcccaattatatttattttttaaatcataaaatatatttttttctttgttcatatttaaaactatttacaggggcacagagaagccagagtggcccggccgaggtcaggatgagtccgtgcagggggacggagggggcgggaagagatggaagtagctcctctcggtggcgggcgagggcgggcagctgtcctccgccgacaggtactgggctgtggggcgtgggtgggggtggataggggtctgagtccgagttcaaatccaggtagtacttgctggccttcccagcggctggcgctgtagtcgctgtcacacacgtcggtgctgcagggcgtcgtcgggggcgccattcctcgaatgatgtagggcctgtacggtctcgcagtggccggaatgtttgaagagtagaacatgtccatgttgtacagggaggggtccgtggccggggagggcggcgggttcaggatcggcgggtacagcgtggccttcgtgctggacgagctgctggacgaggcccctgtgacgtggttccggtcgtagaggggcaccccgccccggccccccatcaggctcacggagctcatcatggactttccgcatgcgatgcctgtgaaggggccatgctgggaaccgcccggggctatgaaattgaggggcacgtgcggggtcccgctgacatactcgtgcgggaagggcccgttggcccccgcatagcgctggcacaccacgcgctggcacacaaaatagacaccacccatgacgaagagagagaggatgatgccaatgacgggcccgatggcactgctgtgggccgggctgtcgtctgagggcggcttggtgatttcacacatgagctcgtcggagccgtcgatacagtcggggaaggagctcgac

SEQ ID NO: 3639 - DNA, 716 bp, Homo sapiens
gggggacacagcctgggacagacctgcgtgctgatcgtgatcttcacagtgctactgcagtctctatgtgtggctgtaacttacgtgtactttaccaacgagctgaagcagatgcaggacaagtactccaaaagtggcattgcttgtttcttaaaagaagatgacagttattgggaccccaatgacgaagagagtatgaacagcccctgctggcaagtcaagtggcaactccgtcagctcgttagaaagatgattttgagaacctctgaggaaaccatttctacagttcaagaaaagcaacaaaatatttctcccctagtgagagaaagaggtcctcagagagtagcagctcacataactgggaccagaggaagaagcaacacattgtcttctccaaactccaagaatgaaaaggctctgggccgcaaaataaactcctgggaatcatcaaggagtgggcattcattcctgagcaacttgcacttgaggaatggtgaactggtcatccatgaaaaagggttttactacatctattcccaaacatactttcgatttcaggaggaaataaaagaaaacacaaagaacgacaaacaaatggtccaatatatttacaaatacacaagttatcctgaccctatattgttgatgaaaagtgctaggaattagttgttggtctaaagatgccggatttgggctctattcctctatccaggggg

SEQ ID NO: 3640 - DNA, 309 bp, Homo sapiens
gacttttgcatgtgatgggagatgccctggggtccgtgggttgtgggtcatcacggccatcatattctatgtgcttcccctgaagagtgaggacccgtgtaactgggcagtgttacattgaccccagcctgactgtcctcatgggtcatcatcattttgtcatctgccttcccgcttatcaagggaggaccgctggccattctggctacagatgggtcccaaaagggaggtcaacagggaaggaggctggatggaggtaaactcttctgctgtgcccgggggattaggcagttgtaacatggaagtggc

SEQ ID NO: 3641 - DNA, 1605 bp, Homo sapiens
gtcatttttagctcgaccacatcatcaggtctttgccaccgaggcatagtgtagaacagtcccggtcagttggccaacctcccgcagccaagtaggttcatccttgttcctgttcattctcatagatggccctgctttccccagggtgacatcgtagccaaatgtttactgttttcattgccttttatggccttgacgacttcccctcccaccagctgagaatgtatggaggtcatcggggcctcagctcggaggcagtgacttggggccaagggacctcgagacgctttccttccccaccccccagcgtcatctccccagcctgctgttcccgctttccatatagctttggccaggaaagcatgcaatagacttgctcggagcccagcactcctgggtctcggggtcggggaggggacgggggcacccacttccttgtctgtgacggcgtgttgttccccactctgggatggggaagaggcccgtcgggagttctgcatggcagttcactgcatgtgctgcccccttgggttgctctgccaatgtattaataccatcccatagctcctgccaaatcgagaccctctgacgacttgccgactaactggccaccacaagctgcagtctgtagcactgaacaaacaaaaaacaaaacgctcaagccttacgaccagagaaggatttcagcaaaccaccacctcccactcagtgtcccctccaaacttcacacttccctgcctgcagaggatgactctgttcacacccaatccagcgcggttctaccccacgaaactgtgactttccaaatgagcctttccctagggctagacctaagaccaggaagtttgagaaagcagccgcagctcaactcttccagctccgccagggttgggaagtccttaggtgcagtgcggctcccactgggtctgcggaccctcctattagagtacgaaattcctggcaactggtatagaaccaacctagaggctttgcagttggcaagctaactcgcggccttatttctgcctttaatctcccacaaggcatctgttgctttgggtcctccacgactcttaggcccgcctcaacaacccaggcacctcctaggtaggctcaaaggtagacccgtttccaccgcagcaggtgaacatgaccgtgttttcaactgtgtccacagttcagatccctttccaagattgcaacctggccctggcatcccagctccttcctgctccgtgtcttaacctaaagtgctttcttgtttgaaacgcctacaaacctcccatgtgggtagctccctttgggaaatgtctgctggtggcgttttatgtgttgcttggagtctgtggggtcgtactccctcccctcccgtccccagggcagatttgattgaatgtttgctgaagttttgtctcttggtccacagtatttggaaaggtcactgaaaatgggtctttcagtcttggcatttcatttaggatctccatgagaaatgggcttcttgagccctgaaaatgtatattgtgtgtctcatctgtgaactgctttctgctatatagaactagctcaaaagactgtacatatttacaagaaactttatattcg

SEQ ID NO: 3642 - DNA, 133 bp, Homo sapiens
atgactcagaggcatctggagctgagtgagtttagagagccaagaaacatacagtgttaggagaagcagcaggaaaagcactgggagctcactgggtcccctaacaagccgtttttgcctggcctcacagagg

SEQ ID NO: 3643 - DNA, 1048 bp, Homo sapiens
ttttttttttttttttttaataagcaatcattttaatacaggatttaataagttgtcttaatatttctgataaatattcagatgattactttgaagtattttgaaataaagatactttccatatttcataaagctacttttaatatattaacatttattgctcttgagttcaaagtatatcttattctagccaccaaaacatttagaaaatagaaaaaaaggtaaaaactaatttttttatctcttatatttcagacacttaatacccttaccccattcactgaatccaatttcattgctatttccttgttttgtccttttgagtggttcgggatctgcttcaaatgacaaagagatgtgagtaatagggttcaacgtctttcttattttcagatttaaagctcttcaatgatgtagctcaaaatgaaagttctttcaatccaacaactttgcagagatgctgatccctctcccaggtgaatcctggccaggcctttctgacaatcctgggataccctggggccagtatagagttcaagggcagaccagactgggggaggggttcctgagggacctggaaccagcatcaccagcacagtcagaattgcaaccccatgtgaatccttgtcagaggaactggagccatgatactggtttagagcactcgtctattttcttgttgcctgattctggttagtccctgatccactcaagcactaattagcaaggatgattccttgtttttggtttgagttcccatttctcccaggtcccaattttcaggtctgcttttctttgtttttctttgtgctccccgctcctaagaacttcggctgggatgacattcttcaggtgcagaaaccagggggaagctcccagagcagtgggggctgaactcaggacacagtcatttttgctgttaagtctctcctgcggcgctgaggaggcaggctcaaagtaaccaaccagagcagccgcagagggaaaagctaagacagttctggtccggcccagcgcttctcaccctctagctctctactctccgccg

SEQ ID NO: 3644 - DNA, 292 bp, Homo sapiens
  misc_feature (1)...(292): n = a,t,c or g
agatgcgacgatcccagctgaggcagaaaacgataatgctctgcctgtttcagttattagctgtcaagtcttttcacgatgagtgncgggtgttttgccctttgggctttttctggtgacatcgctgtctgaagtggccccaggtgcagtgtgaagtgctgtctgctgttcttaagtgcaggctggctgtcaggtgcttacagacaaaaccggtgtgggatgagctttctaacaggctgaaatgatggcaccacagactacttactacagctggccctgagttcaatgttaa

SEQ ID NO: 3645 - DNA, 935 bp, Homo sapiens
ttttttgtatgaaacttggaggcttacaggtatagacagctttcagctacagcacattctaattttttattttgtttagttcttttgtattcacttctggtctctttaagactgttttaaaagaaatcaatttagggaaccccagttatataatataaactttgtaatctgagagaaaaaatgtatagtaaatctaagtcttgatttttaactttctattgtaaaaaataataatatacagagtttaatagaaggtgatgttttggttttgttttcccagaggctggccatatgggtctttgagtacgggggatgtccccaaactgggcccaccaattgagccatgggcggctccggccaggaatgccagagttagcctcccaggcttgcgggtggacatgcctgctccctgccagcctccagtggcctggccaggccttcccgagcctgtctgccctccccaggggtggaggagtctctgggccccaggaggattccctcccggagactcgcacggtgctccctgctcacgcgttgtcacagttagtccggaaatgactgaaaccaggcattctcccggacctcagcgtgggggagcctccaggcagacgctgggtatggagctgtggtgtggtctgtcctgtatggtggccagtgctttctgccagcatttctggatggatatagggactatcattagtatcctaatacacggtgattttaaaacaaccataaaattgattcagagtccactgacccttacagatgtaggtatacccttactggagagggaactctgatgaggagatgctggtaaattatcattttttaaattgctggtgagtctgacacttggtgagttttcagccagtttgttaaacttttaattaagttttgtttataataaaaatataaatggaaaaaaaaaaaaaaaa

SEQ ID NO: 3646 - DNA, 1181 bp, Homo sapiens
  misc_feature (1)...(1181): n = a,t,c or g
tttttttttttttgtctttttattatgaaaacaaaacaaatgccccaggagaagggtccatgattaccagaaacatcaaagagtactttctaccatttttattctgttgtgttgaggccagcattgcaataaacaagctaaactacttacattggactcattttcagtaactgacatttacaggaatatactagaaacggcactaaaaagtttaagaaaagttacggtaaacttgcatgcacatcatacagaaaagtaacattttaaatataaaaaagaaaaacttcctggaagcattatgccagtattaaggaacagtgctactctggatgtgacaaattctgtatgtgggtgttactctttcccaaaagactgtcagaggcgtgagtgctgcaaaagaacaacaacaaaaacaaacacacaaaaaaatgtgtcttacagtttgtaagcaagatgacactgcccaacacaaagaggggtctggagttcagttcacgcccgaagcctgccccctcggcctccaggggtcattcagagtgttctcaaatccaattccgacacacgacttgtcactactcctctccccttgaaaaaagcatgttagaagctgccctacaggtctcagcagtgggacaatctaattgaatcaccgcagccttctaatacagaagaaacggacgtgactgtcaccctcagcccgccagcaagggcgctgaggaagtcattaatccttcgaaactctgaaaagaaaccagtgttgaagtctggacagaaagccttaaaaaagtgacagcaccaatgcagctgctcagtgtagcgcncgtgggctgtcagggtcagtggcttctttctagatgaaaggagcagaggcaacaatgaaagagtacccattcttccttttgttataggagcaggagtgcctaggtgcactaggtactggcattggcggtatcacaacctctactcagttctactacaaactatctcaagaactaaatggggacatggaacgggtcgccgactccctggtcaccttgcaagatcaacttaactccctagcagcagtagtccttcaaaatcgaagagctttagacttgctaaccgctgaaagagggggaacctgtttatttttaggggaagaatgctgttattatgttaatcaatccggaatcgtcactgag

SEQ ID NO: 3647 - DNA, 785 bp, Homo sapiens
tttttttttctgtattcaaatatttttattctgtgaacattgaaaatgccttctaggaatatggcattgcggggtgtatacaaaaaaatagatcttttctcaaaaagcatgtaatctgcttgggaagacaagaacattattaaaaaaaaccctttagaacacaagtgagttgtggacagtaatacatataaataatctgaatggcagtatataataactgataactatctacaaccaaaaccagcctagaacaaaagcatgagtaagaggctttagggtacacttctgagcattttcttttaattctcaagacatttgtccttgttttcctaatctttaggtggattcatacatttgtatttcctacctggtatttcctctgaattactgacttgtaattcaaacaccacatctgctcccaaccacttcctaccacttccactgctacctgaattattgttatagcctaactggtcttcctgctctcacctttgctcccctaaagtctattcacaataaccagtttaaactattattttattaggaaaaatttcaaacacacagcaaagttgaaagaattttacagcaatcacttctgcatccaccacttatattctaccattaacagaatactcctttaaataatggcagatgtgtagttcctctgctcaaaaccctcccacggcttagcttactcaaagaggaaaaaccaggctgggcgtgatagctcacgtctgtaatcccagtattcttgttttgacagttagatgtttagaaactttttt

SEQ ID NO: 3648 - DNA, 448 bp, Homo sapiens
tgtcagctatggccatgtggccgcctgccagctaatgggcccccacaccctggccttgagggtgggagagagccagctcctcctgcagagcccccaggtggaagagatcatgcagctggtgaatgcctacttggccaacccctcccccgagaggccctgcagcagctcttctcctccatgccaagacctgccagacacctcccctcccagccagcgcccgggcctggacgagccccagggacagtctggctgcttggggcagctgcaggactgagcctgccaagaggtcacgacttccctcctgcctgcagcctgggccaaggactgctctgagatttgagggaaacatggacccttttggccctgcagggacagggcacatcccacacccaagggctacaatgggtgtggggtaattttctagtttgtttcttaatttatttgtaga

SEQ ID NO: 3649 - DNA, 349 bp, Homo sapiens
tttagaaagaagagctttattggtgatatcagttgcaagctggaagagaaagtctccagcatggaccaaagatgctctctcttcaaacaggggaaggacaggttgggtctcattcctctgagagtctgtattacacaatagagtcatacgtattcagcaggtttggggtagaagctatacatatttatgaggagagccaagcacaggagcaatgaataaacaaacatgtaatatacatcccatattcactttggggcaaaaggtgaactataggacacaaagacagtgtgtgtgcagcctctataagctggctgaaactggcttaaggtctgcaattgctcatcagaaa

SEQ ID NO: 3650 - DNA, 462 bp, Homo sapiens
  misc_feature (1)...(462): n = a,t,c or g
ggttcctcttctgggtcttccagatcccggcccccttccccgagtacgtcactgacctgtgcatctgcatcaacagcagcgccaagcccatcgtctacttcctggccgggagggacaagtcgcagcggctgtgggagccgctcagggtggtcttccagcgggccctgcgggacggcgctgagctgggggaggccgggggcagcacgcccaacacagtcaccatggagatgcagtgtcccccggggaacgcctcctgagactccagcgcctggaggaggcaggggcaggaagcggcctccaagacccttcgccttgggacaggaatgggcacctgcttctgagtccatacaggagaagaaagatctgtttcctctcctcgggcctccttctccctgggctggggacttccaggggtngctgggagacttggcaaccaccagcaaaacagaccctgtggcccct

SEQ ID NO: 3651 - DNA, 994 bp, Homo sapiens
tttaatagaaaagaatttattgcaaatacagtgactttttatattacagtagtacattccaatcagccatatggcataatttgcatacatttcaaatataaaactatactttttttttttttttacatatagtacaatttccagtgtgatgacatttcaatgggaaaaagattgtgcatttgcaataaacaccatcattcctgagtccacagataaggtccccggagaaggggcttcccctcctttctcgctgggttgacgttcccagcgagtgaagccttttctggaatgtgtgtacgcaccctccaccaagagttctaataagctaagcttaaagcagaacagtgaaatggcaaaactgtacagagccctgactttacatttcactctgacagccagggtcggaagcaccacatggaaagtgctgtccataactgctcacttacctgctccttgctgacagctcccaggatctggctccagagagtggcaaaactgggaattttgccaagggaaattactcaggaccgctaataaaaacgccggcttctgcaacatgcatattcccccagcccccacctccatcttgcccagggcagaccattcattaactatctgcggggtgaacaaagaatcccaatcctcagatgtcccaggactcatggctcatgacccacggaatctaaggcagcacagtggcttaatttaaaagatgtgctttcgaatgaatcctagaaaataatcttgtctttacacagagagggctgcgggggcaatccctactgacgagtttgttgagagcgcgaactttttcttccaagaggcggctttgtttctcggcgcctcgctgcttctcctcggtggcctgaagtgctctcaccaggtgggcgttctccacgtacagctccttcagcagcaggtcggacttcgtgttcttttcaaactgctccttcagcttatccactttctcttggaggagcatttccatattctc

SEQ ID NO: 3652 - DNA, 879 bp, Homo sapiens
ggattttgcctcagctgtgggcttccctagagtaggttcaggggaatactcagcctgattctcttaaaattgaagaggtgctgccaaggccttcagatctaacgcagatgcatagaccttgttcctggtacttgttcagcctgtgctggggagccgtggtcccgagttccctgggaggctgacagggtcaagccaccctgcccaccaccctcccacttcccctcccctttcctctccagcattaggattcaagggaaatctgcatgaagccaattttgagggtagacgtgtggggaaaataaatcattatacagtaagacctggggcttgaggggtggggaatggggagggaagggcatagcctgctcctccatgagtctgacatctcggaaactgagcagctgccggacgcctgggtcaggaatccaagaccccacctcttaaggactggttcctcagaaagcaccctcagggaaaaaggtgaaaacattacatccgtggattctcctgccacaaccgcattggaagaaaaggctgccgcaacatctcagcgaggagtgaaggacccatgtcccaggaaccgcgctgcgccacctgcactcacccccctcacattctcttaagcacccggtggccctccgaggcctggcggaatggtggtgcccacggggttgggcaagggctcaccaggacctcaacgggcaaagttgtgcacactaaaatatcaaatcaaggtgcttggttttaaagtaaatgtttttctaaagaaagctgtgttcttctgttgacccagacgaatgagcacagccctgtaactgcacgtgccttctgtcattgggaatgaaataaattattacgagaaagggacttgtcctaaaa

SEQ ID NO: 3653 - DNA, 460 bp, Homo sapiens
gctaaaaattctgactagtgcctgtgtcatggatcagccagttcataatcacacactgccctgtgacatctctgatttggaagttaactccccactttaaacgttcttcatatgcatccaggcatcccctcttagtgcctctgtgactgtggaagaggacatcatttctcaggaaccactgatgggagtattttgaggattaaatgagctaaggacacataatagtgcctggcacttggacattttcatgtccatgttagatgcttgctttcctctgtgagtcacattcaaacctgtctcaggaacttgtggatgaagcactgcacagtgcctctggtgtagaagcagaccccatcccatctcgatggggctctcgaagcagtactctcaccacatgctcggctccgtcgagctgctctgctcgtcctctcctgcccacccccaacctcagcagaggctt

SEQ ID NO: 3654 - DNA, 61 bp, Homo sapiens
gatttttgtgggcatatttctctgacaatttctcttattacaaaccaaacttgttagtgac

SEQ ID NO: 3655 - DNA, 185 bp, Homo sapiens
agcgatggtgttttgaaggatctttctgagttttaccggaaaatgattccagcaatggatagaagagtcattacaccatatcaagatggaccagatattagctatttggaagtagaagatggagatatcttccttgaaagaagaaataaatatggaaccaaatcattcggaaactatgttccaga

SEQ ID NO: 3656 - DNA, 893 bp, Homo sapiens
cccaaaccagtgaatgcatgggcatcttctctgcattcagtttcatccaagtcattccgggatttcttactagaagaaaaaaagtctgttactagccatagttcaggcgatcatgtcaaaaaagtttcttttaaaggaattgaaaattctcaggcaccaaaaattgtcagatgctctacccatggtaccccaggaccagaaggcaaccatatttcagatttaccacttctagacagtcccaatccctggctatcttcttcagtgactgctccatccatggtagccccagtcacttttgcatctattgtagaagaagaactacaacaagaagcagctcttattagaagtcgagaaaaaccgttggctctgattcagattgaggagcatgccatacaagatttattggttttctatgaggcatttggcaaccctgaagagtttgtcattgttgaaaggacaccgcagggaccactggcagtacctatgtggaataagcatggatgctagttcactgtggagttgagatgcattttacataattatgagtttgttcatataaagaaaagctgtggaaaagagtcttagagattttgtaatatcattctaaatagattaagaaaagatataatttctttactgcagttaaatcatataatgtttgtatgattaaaaataaatttctcagaattgtgattttagtaactttatataaaatgtgtgagacaaaaacttattaaggttaaatagaattgtttcttctgaataatctaacaaaggaaaatataagtgattgaatcataagatataaggggggtaaagtattagaaataacttttttgtttgataacttgagaatttagaagattttgccaagtatgtgttgttgcttgact

SEQ ID NO: 3657 - DNA, 195 bp, Homo sapiens
ttaagttcctttgtgcgtaattccagctgactttattagcggcaactcagcactagcattacccctgacatactctgagtaagatctaattcttccctcactggttcgtgatgtctaccgcagcagaaggccagctcttgactctgagttcagttggacaaaatgctgttgataaaacctcctgtcaggcctctg

SEQ ID NO: 3658 - DNA, 467 bp, Homo sapiens
gttgaccctgcaactttagaagcacaatcatttattaataatttttttgaaactcccatctacccctgttagagaaatcaacaggttctaggaattaaatatgtctctttgtaacccagagcatgttcaatttttggaaaccgtatttcagtgattttcttaataccttacatgtgtagggcatcttcccccagaatcttacagtccctttctgtgaagagaagtggacacacgtgggaactctcaccatctctgggactgtcgtcaggaaacgcctgcaggtccttgccctgtctgtatggtgtcctcacttctccatccatacaggtggctccagtgggcattttttttttttaaattttttacatgaagcaatagaagtacaaaatacttatttttttcaaaatttaatgtgttccatgaaacctgttgggcagtcgctttccttcccccacatctaaattctt

SEQ ID NO: 3659 - DNA, 341 bp, Homo sapiens
actggaagccgagaggagaggacagctggttgtgggagagttcccccgcctcagactcctggttttttccaggagacacactgagctgagactcacttttctcttcctgaatttgaaccaccgtttccatcgtctcgtagtccgacgcctggggcgatggatccgtttacggagaaaactgctggagcgaacccgtgccaggcgagagaatcttcagagaaaaatggctgagaggcccacagcagctccaaggtctatgactcatgctaagcgagctagacagccactttcagaagcaagtaaccagcagcccctctttgggttggtgaaggtaaaagact

SEQ ID NO: 3660 - DNA, 66 bp, Homo sapiens
gttacagcttttgctttagaaaacttggaaagtacagaaatatataaaaaaaaaaaaaagtcgacg

SEQ ID NO: 3661 - DNA, 635 bp, Homo sapiens
ggaaggaagggaccttttcaactacgagcacactctctatcccatctcatagccagttgtgctgcagacagacaaaaccagagaagccgcttttcacggacatttttcttttttgcagatacctaggggttatcatggggaaacaaaggcatgtataaacctcattcagcagtcttttcagatagagtctgaaaagagtctatcaccaatctatctgaggtcagcttaatccatacccacagagatgatgagccaaaggcttccctaagctagggtcccatagtcttccccaagctagggtcccagcgctgggtgggggacaggagaaaaggcctgaggcacgggggagaaaaggcagttgcagatagtaatgtttggaggcatgctcagttattcacgaacaaatggaatgacgttaaaattctcccaaaaaaggttggaaccacctctgcttccctttccccactctgtaatcagtaatcattgtctggtgtgttcagatgataatccagttggccaccaaggggttgtgcttccttactgactgtatttgtgatctgtaagacttttcaaacacaggtttaaacatccagagactccagcctctttgacagtcattctcccactgtgtccct

SEQ ID NO: 3662 - DNA, 333 bp, Homo sapiens
atcaaaactcatttacttttgctcccaatggtgtgcctttcattactgaggctctgtacgggccaaagtacaccttcttcaacaatgttttgatgttttccccagctgtgtcaaagagctgcttttctccctgggtgggtcaggtcacagaagactgctcatcaaaatggtctaaatacaagcatgacctggcagctagttgtcaggggagggtggttgcagcagaggagaaaaatggggtggttttcatccgaggagaaggtgtgggagcttataacccccagctcaacctgaagaatgttcagaggaatctcatcctcctacatccacagc

SEQ ID NO: 3663 - DNA, 423 bp, Homo sapiens
  misc_feature (1)...(423): n = a,t,c or g
gcagagaccccaactggcaatgcttgtttcagactgtggtgccaatatgacctgacgtggaggatgtttaggcaactaagcatagtttggtcagcatccgaacatcctccacatcaggggatactggcacctcatttgtgttgctggaaaactaaagccagtcactgccccccaggtgcatccttgccctggggctttgacctcaaacccctggcaaacatcagcatgagggaacagcccctcctgaatggccagccacctgaccctcagccttgttctactctcatcctgccctgggatggtcagggaactgcttcagtcactataaggtcagcagtngctgtgcccacggnatgggaggagcagacccttgcatttgggcctncattctnccttttatcccccacaatgtgtttgttccca

SEQ ID NO: 3664 - DNA, 689 bp, Homo sapiens
  misc_feature (1)...(689): n = a,t,c or g
gattgaaggggccacaaagtgcaaacagaataaaattctctgtcctcaaaactatgtgcaaacctgaactttccccagggacaggaacaagccttggcacccactaacctgtctttattgacagaatcgcctgcaggtctggcactggcagccaccacaggctctgtgcaaggcttcgaggcgccgaaggagttaggggtactggagtccagtggcagtagctgtggactgctatgagaagagagcatggtgcccgccagggagcccgagagggggatgctgttaaagaatgccgtggagaagtccctgtcatcaagtaagaacaaaagtcagccttgaaagtcaggtgccacatccagtactttatacattcaaataacttttttctaggtccaaaggcagtatgttttcatgatagaaaatctgcaaagttacagaaaagtaaaaagaaaattaaagccacttaatatactatatttaattggaatctaggatttacaggttctatatgtactactaagaaagaaaacaatgctactaattgtcagatgccattgactgtacaacacacccaaatctcagaggtgttaaactgtgcaaacacatctcgtgccnnnnnnnnnnnnnnnnnnnnnnnnnnnnnnnnnnnnnnnnngtattaaattcgtaatcatgtcaaggngttcaaa

SEQ ID NO: 3665 - DNA, 4032 bp, Homo sapiens
gatgcggctgtggtggcggcggcggcggccgagcgcgggtggcggctgtggcggcggaggggggcgcgggccggcgatggcgcggcggccctgagggcgcggggcgggcggcggccggagggcgggcggcgcgggaggaagcggcggcggtggctccatggcccgggcgcgctgagggacccggcgctcgcctcagcccggcggcggcggcggccgaacaatgaagctcctgaagccgacctgggtcaaccacaatggcaagccgattttttcagttgatattcaccctgacgggaccaagttcgcaactggaggacaagggcaggattctgggaaggttgtgatctggaatatgtctccagtcctccaggaggatgacgagaaggatgaaaatattcccaagatgctttgccagatggacaatcacttagcatgtgtgaactgtgtgcggtggtcaaacagtgggatgtatttagcttctgggggagatgacaaactgattatggtgtggaagcgggctacgtacatcggccccagcaccgtgttcggctccagtggtaagcttgccaatgtggagcagtggcggtgtgtctctatcctccggaatcattcaggcgatgtgatggatgtagcatggtctccccacgatgcctggctagcctcatgcagcgtggataacactgtcgtcatctggaatgctgtaaagttcccagaaattctagctactctgagaggtcattctggcttggtcaaagggttgacatgggaccctgttggtaaatacatagcttctcaagctgatgaccgcagcctaaaggtgtggaggacgctggactggcagttggagaccagcatcaccaagccttttgatgagtgtggaggaacgacccatgtgttgcggctcagctggtcacctgatgggcattacctggtgtctgcccatgccatgaacaactcaggccccactgcccagatcatcgaacgggagggatggaagaccaacatggactttgttgggcaccggaaagctgtgactgtcgtgaaattcaacccaaaaatcttcaaaaagaagcagaagaatgggagttctgcgaagcctagctgcccgtactgctgctgtgctgttggcagcaaggaccgctcgctttctgtctggctcacatgtctgaaacggccgctggtggtcatccatgaactgtttgacaaatccatcatggatatttcctggactctgaatgggctgggcatcttggtatgctctatggacggctctgtggcattcctcgacttctcccaggatgagcttggcgatcccctgagcgaggaggagaagagccgcattcaccagtccacctatggcaagagcctagccatcatgaccgaggcccagctctccacagccgtcattgagaaccctgagatgctcaagtaccagcgaaggcagcagcagcagcagctggacccagaagagtgctgcgaccagggagatgggctcagccacctcagtcgcaggcgttgtcaacggggagagtcttgaaagatatcaggaagaatcttttgaagaaacaagttgagactcggacagcagatggccggagaagaatcacgcctctctgcatagcacagctggacactggggacttctccacggcattctttaacagcatccccctctcgggctccctggcgggcaccatgctctcttctcatagcagtccacagctactgccactggactccagtacccctaactccttcggcgcctcgaagccttgcacagagcctgtggtggctgccagtgccagacctgcaggcgattctgtcaataaagacagtatgaatgctacctctactcctgctgcattgtcaccttctgtgttaacgaccccgtccaagatcgaacccatgaaagcgtttgactcccggttcacagagcggtccaaagccacaccaggtgctcctgccctgaccagcatgactccgacagctgtggaaaggttaaaagagcagaaccttgtgaaagagctgaggccccgagacctcctggagagcagcagtgacagcgatgagaaagtccctttgggctaaggcttcctcactgtccaagcgaaaacttgagcttgaggtagagacagtagagaagaagaagaaagggcggcctcggaaggactctcgtctcatgcctgtgtctctgtctgtccagtctccagctgccctaaccgcagagaaggaggccatgtgtctgtctgcaccagcacttgcactgaagctgccaattccaagcccccagagagcattcaccctccaggtcagctccgatccttccatgtacattgaggtggagaatgaagtgacagtggtggggggcgtgaagctgagccgcctgaagtgcaaccgggaagggaaggagtgggagacggtactcaccagccggatcctcactgctgcgggcagctgtgacgtggtgtgtgtcgcctgtgaaaaaaggatgctgtcagtgttctccacctgtggtgcgccgtctcctctctcccatcctcctgccatccccgatctctactttgcattgcacaggctcctacgtcatggcgctcaccgctgcagccacactctctgtctgggatgttcacagacaggtggttgtggtgaaagaagagtctctgcactccatcctggcaggaagtgatatgacggtatcacagatcttggctgacgcagcatggaatcccagtaatgaacctgtccgatgggaaggcgtactgctttaatccgtcactttccacatggaacctggtttctgacaagcaggactcactggctcagtgtgcagactttaggagcagcctgccatcccaggacgccatgctgtgctcaggaccgttagccataaaccagggccgcacctccaactcgggaaggcaggctgcccggctcttctccgtgcctcatgtggtgcagcaagagaccaccctggcctacctagagaaccaggtggcagcagcactcaccctgcagtccagccacgagtaccgccattggctcctcgtctacgcacggtacctcgtaaacgaagggtttgaataccgacttcgagaaatatgcaaggacttactgggtccggttcactactccactggaagccagtgggagtcaacagtagtgggtctgcggaagagggagctgctgaaggagctgctaccagtcatcgggcagaacctccgattccagcgcctcttcaccgagtgtcaggaacagctcgacatcctgagggacaagtagcctgccccagcctgccctggctgcagcaagggcagggccacactctcgccgctgatgacatgcaggaccgcctctcacctgaccaggctgtagggggaggagacactggcaggagatgtgctgtcctgcaccagcgccagcccagctccctgggcagatgtgccctgtgtcctgggtctgacattgcctcaggagggggaagctcatccctccctccaagcccccgatgcggagctagggcctggagctctgccaggtgcccctggggcccagcaaggcagtcccaggcctgccgtctccagcacggcccccaaggtggaacactagccccctgctgctgccagggcccccatgcctgcttcagccagtgacgattgagccatttgtgagacagaatccggaagcgttaaggtattacagcagactgacctaagacctatgtaacaaggaaaagctgttccaacacacggactatttttgtactaagaatttgctaacttgtaatattgaatttcctttggccgataatcaggatttccctataagtcacttggacattggtcacttgtaggaaatttaaactctaattatgacagctacactgaaaaataattgtactgaaattaacttgtctatcttcatttggttttaatttttaaatgtttgtaaaaagagactgttttgggggaatggggcaaaggggtgggcgatttcttttgtaagtgtaaaataaatgaacacgcattgaatacc

SEQ ID NO: 3666 - DNA, 278 bp, Homo sapiens
  misc_feature (1)...(278): n = a,t,c or g
ggcacgagcgactaaccagtgccatgtttgttgattggatctcctttatcactctgatggtcaacagaccccacccacaactcttgctgcctccatacaccttgctattttcatttatcatgtgttggaacctaaaaacaaaactaagcacatgggaattatgcatggaatatgaataaatgggcactgcatatgcggctgagatgctgtcctacaaagaaagcacatgctcttcatggtattaacttttgactttgggggattttctgnctgagagg

SEQ ID NO: 3667 - DNA, 550 bp, Homo sapiens
  misc_feature (1)...(550): n = a,t,c or g
agaaacttaaattctcccaagataggcatgatttgtaaatgagctagctgggaagctgggataaaatatttaagattcattgattttggctggtcaaacatgccccattcaaatagggccgccttcaagttctcaggctgagaccccactatgattttagcttttaaaaacttagttgacatctcaagtatgttctcacttcatgcttccagttatatatattattctattgtcccaaacgtaataggtccagaacaaaaatattataatatcttactccacaatagctcataatcagaactacaaagtttgggaattttatcgtttgtcagttgtttccatgataaattataagatctttggaaaaccaaaattatattttactccatttatatattttccataatatctagaacagggccgggtacataaaaatcacttatgggaccagtggtggcactttgggaggcactttggggacgcctgatcaacatagtgagacccannnnnnnnnnnnnnnnnnnnnnnnnnnnnnnnnnnnnnctactca

SEQ ID NO: 3668 - DNA, 334 bp, Homo sapiens
aaaacccagaagctctgacaggccataatttcagatcctttggcttgggcagttttgattttccccgtgtttgcatggcatgaagtcttcgtccttgtcacagtagcttgggatgactcccagtccacatggaaaacatcagggagtgacaatccagttcctccggaataacagtcccactgttaacctggtgctactgggaagttccacacagtaatctgagcagtgactcatggaaggatgaggaacgttttctccagcttctctccctttccagcaagggcagagtcctaaagccaggggttagcacccgccacttatgtggcagatggtt

SEQ ID NO: 3669 - DNA, 1338 bp, Homo sapiens
  misc_feature (1)...(1338): n = a,t,c or g
ggggtggcactaacagtagatgtcattggtgaggactgatggcaaagtctcattccctcacagccgcgctgccagctcgcctccccctcgctttgctgggagcctgccctggactccaaaaggacacgggttcacctcctttcccaggctggaggggtactgcccttccctgaggggccttctgactggggcaggaactcttttcgtgtgtccagctgggcctggaggcaagttcaaggtgtgtcacaccacacaccagggcaaggacctcatctccagggaacagggacaagtgagtggctaccagaaagtccccgggcagcctgggagttccccagagcctggctggtccttacagagcacttcttcccctggggccaccaggaccaaaggcaacctaaacacttgaagctaaaagcaagtgctgatgatgggatgggctggcacgtggctgggagggctcctgggcaccacagagccctcagcccagcagagagtggaggctcagtccgcggggagtgggggttgtgaaggagacatggccaagcccctggtcggggagataagctcccccatgcccaggccagccccaggggcaacaagccaacatggagagaggtggcaggtgaggctgacaggtgggtgcctgtggcctgggcccatgagggcaatggtcctcagtaaccaatggaaaggacacaagggcgccgtggtcaccaccacccaggcaaagaaatgggaggtggccagcacccccacccttcacttttcnnnnnnnnnnnnnnnnnnnnnnnnnnnnnnnnnnnnnnnnnnnnnnnnnnnnnggagagtaggaaggcaacttcattggagcttttggggaaaaaagccttcaaagtcaccttctggcagctctggggagggtcatttggggtggactgagactgtagggcaggtagggtgtgtgccgggcagcagctgtgtccgtgcagccagcacccagcagggcagtctcacaggagccgttgtgagcactttggacttgaagcagctatgaaccaccccccgcccccaccnnnnnnnnnnnnnnnnnnnnnnnnnnnnnnnnnnnnnnnnnnngttttaccattttctcagtgctttttctgctttcattcctttgattttagttagaagcacaagccatgatggatgtgggactcttctcaattgctctttaaattgtcactttttaaatcctattaaatgaagtgtcgattcctgacaaatacattaaaagtgttttattcctagaagagttgggaaaagaaattattttcagcaagagtaggatgtttgttaaactgattccttggcaaa

SEQ ID NO: 3670 - DNA, 497 bp, Homo sapiens
  misc_feature (1)...(497): n = a,t,c or g
tcatctggggcgctctatggcctgttcctgactgcggctgcacagccctgaaggccaagaccagcctcccagcctggtctgctgccatggatgccggcctggaagccatgcagaagtatggcaaggctgctccaggggacaggactatgctggattctctgtgggcagcggggcaggagctccaagcctggaagagcccaggagctgatctgttacaagtcctgaccaaagcagtcaaggtgagtgaggctgggcccagccacctggggagacaggcttctagccagcagactcctgtctccatgtgaccctgagcaagttaataaccttcctggaccgcagtttccttcttctgttacaatggagatgagcacctattttcagaaggtggttatgtgggcttaaggaaatatgttagagccccgcacattgcctggggattttgacagggcctcanttgaattggttgancctttttccctgnttggaagttagat

SEQ ID NO: 3671 - DNA, 501 bp, Homo sapiens
tttttttttttttttttttcttgcttccatgtattatagtttattaactttctttttcacgctcactggggttaaggtgcggaaagcatttcacagggagtcttaaaaccaaattaggattgccaggtaaaggctgcacaaggaaaatgccttatctctgaagcccagagctggcaggggagggcatgacccagggactccaccctcctgcaaagggaaagggcatgctggagaggcatggggacccactccagctcactctgggtgctgtctgtagttctggaagcttggtggaggatttcctgctcaacttagagggtgggccaatggggccaggccgggggaaggtgagggttggaaggcagaaggaagtgacaaaggccaccttcagcacagcagtgagaggagctgaggccaagggaggcagtcacacaccctagctctgcaagacctccaagatggcccggaggatggcagcagctgccaccgccccggggtctg

SEQ ID NO: 3672 - DNA, 260 bp, Homo sapiens
ggggcatttgaactgagcccagaagtttgaataaaatttctatcactagaagctgggcacaggctcaggaggaagacattgcaggaagagggaactgtgtgagggagacatggaggccagagtactgctgacttagagggggaagaaactgatagcattaagcaggatactgagcaagcttcacccaccttctttgtcccttcttacagatattacattgtggggcatggagctgggccttctgagcatgcagagaggag

SEQ ID NO: 3673 - DNA, 585 bp, Homo sapiens
  misc_feature (1)...(585): n = a,t,c or g
gcgggggtcagccgttctgtcaccgtcactgtggcctacctcatgcagaagctccacctctctctcaacgatgcctatgacctggtcaagaggaagaagtctaacatctcccccaacttcaacttcatggggcagttgctggactttgagcgcagcttgcggctggaggagcgccactcgcaggagcagggcagtggggggcaggcatctgcggcctccaacccgccctccttcttcaccacccccaccagtgatggcgccttcgagctggcccccacctagggccccgtggccggcaggccggcccctgccccacccccacccacgggtgtccctgcccactcgtgtggcaagggaggggagggcaggagggctcggcctgagcagggtgctggggggagagcgcaatacctcacgcgggctgccgtcctaatcaacgtgcctatggcgggaccacgctcggagcctgctcttctgcgactgttactttttctttgcgggaagggggnnangntccctacnangnggttnccagcccangtnccngncctggntgctcaacagattgctaagcctgncctacct

SEQ ID NO: 3674 - DNA, 72 bp, Homo sapiens
acgagtccccgtccacagctcacgaccagatgcaccagcaggagtccacatcgaggacgtcctccgggcact

SEQ ID NO: 3675 - DNA, 501 bp, Homo sapiens
gaaagaaaaaaatatattatcatttattatataacaatgtcaacattaacaccaagacagggacagactccaactacgcactagggaaaaacactcaatgaggcaagactttctagagcccaaaagaaggaatgggggaagagatctggggagtagcgtgaatgtggctggttgatgggtgtggtggtagtggggggtgggactcatctttttgtgtttgtttttttaagttttgagacaaaacaagaaagtcacatttttaaaattgtggtttcaagctactgattagatcagcatccagcgaccttgagtgcagatgtgaacattgggtgaaatgaaaaatcttgtctgtggggttctcttggctactgtctctctccttctctctctttctcctctctctctctctttctctaggaaatgtctgttgtgaagcaggcctcactttagctattgtcgctccactctggcaccatgccactccgtgcacagaggggtact

SEQ ID NO: 3676 - DNA, 640 bp, Homo sapiens
  misc_feature (1)...(640): n = a,t,c or g
ggtaacctcatgatgacgtataagcttttgcacctcactgggaggttgggtcttcattctgaaggcttctatgtatacatattaaataagtttgtatgccttttttcctattaatctgccttgcgtcagtgattttcagcaaacttcagggagccaaaggccttggctcccacagtgataataaacaatatgacttttggctatcaaaattcctgctgttagttaaggaaaaattgtgacagtttctgaaatggacaaatacaggcatccttccagtggattactaggatttgtctagactagaggacaggatgcttctgggggttttctgattctctataggtcagtatccttccttgtcttgtactgttttgcaactctagaaagaaaagttaaatatgtagaagcctgacagtgatacaaatgatccctgttcatattaatacaaatgcaaattgtttgcctggtagagatacaattgattttctctctgtagaaaaaaggatgatcccagccaggcgtggtggctcnacctgcggttnnnnnnnnnnnnnnnnnnnnnnnnnnnnnnnnnnnnnnnnnnnnnnnnnnnnnnnnnnnnnnnnnnnnnnnnnnnnnnnnnnnnnnnnngggatgcggg

SEQ ID NO: 3677 - DNA, 479 bp, Homo sapiens
gtaaaaaataaaaagtctaagaggatacacagaaatttttaagtggttacctccacggaatgggattaggggatcagaggtgagggaactcatggtttggctatttctcgttctttctgcactgtttcaaatttttacaagtgtatgttattgtacttttaaaaagattagcttggcaacaagtctagcctgaaatgggtgctattttgactagtctgagtgaaaagtgaggatttaaatgaaggtaacccctaaactcagccagtcccatgtttttttaacacttggaatatctaattcccatttacactgcattcttcaaatgtaattttcaaagatgccttttgcctcatcccttgcttttaagtattattatagacttttggagactcacgaaacaagcaatccctaaattctcgcccaggaaagtatcttggattaaatggtttttgagaaccttgagagtgtatattctatga

SEQ ID NO: 3678 - DNA, 669 bp, Homo sapiens
  misc_feature (1)...(669): n = a,t,c or g
ggccacatcctccaactcggtgacacagagctccaacagcatatctgccacctgtgggtaggcggtccccatgccggaaagcaccgcggagagcacatccctgcccctgtccccggcccggctgcacactgacagcttgagcaggtctaccaccacacgagtgtcatccgcaatcagcagactggtgaactcatccaaggcctgaggctccggnacctgctgctttattttggctttcaacatcctctttggttttggtcatggtttctgcaatgatgcttgcagctcccagggtcatccgtcactgggataaaaggccgagcggaggctgagggggccgacggagtcactggcagagggggtcactgcgtccttcagaggaaacaatctctctcttttcttgccacggatttggactcagtctgtcttcgatatcaacagccagcatgcattcttctccattcatgggactagccatcgcaaatgcgtccgaagcagccgcagaggggcactccaccggggcgatcatggcggccggcatcagggcccccactacggcatctctggcatacatgatttgcaatgctgtaagaatatgcgataaggcctgctgtttggccaggtttccatccaatgacaagagaatcttggcaagagaagggtgatatc

SEQ ID NO: 3679 - DNA, 560 bp, Homo sapiens
  misc_feature (1)...(560): n = a,t,c or g
ggacacacacacacacacgtatacatatgagagagaggggctgggcatggtggtgcaggcggacagtccctcagccccagtgaacgtcaccgtcaggcacctcaaggccaactctgcagtggtgagctgggatgttctggaggatgaggttgtcatcggatttgccatctcccagcagaagaaggatgtgcggatgctgcgcttcatccaggaggtgaacaccaccacccgctcatgtgccctctgggacctggaggaggatacggagtacatagtccacgtgcaggccatctccattcagggccagagcccagccagcgagcctgtgctcttcaagaccccgcgtgaggctgagaagatggcctccaagaacaaagatgaggtaaccatgaaagagatggggaggaaccaacagctgcggacaggcgaggtgctgatcatcgtcgtggtcctgttcatgtgggcaggtgtcattgccctcttcttgccgccagtattgacatcattcaagggacaattgaacccattaacaacaaggganaaagccaagagttgcttca

SEQ ID NO: 3680 - DNA, 79 bp, Homo sapiens
ttgcttttaaactacttaaataaaaagagccaacccaaaatcttgtgcatgcttgggaaactggcagtgggaatatgag

SEQ ID NO: 3681 - DNA, 74 bp, Homo sapiens
aaaagactctggggtgacatctacttcaaacctaagacgcgaaagttcacaaaaaaggccccaactagcagctc

SEQ ID NO: 3682 - DNA, 112 bp, Homo sapiens
gcggcacgaggagagagctcaccatgagcttcaataccctgacaatgctatatgctggatgtcataactcatagcctatagttaaacaatgtacagccaatgactaatcaat

SEQ ID NO: 3683 - DNA, 501 bp, Homo sapiens
tttttttacttttaaacttgtctctaacttagaaaattttttctaaatgtatcgattagtgtaaagaaaaagtatgagtagttaataaatctgacctattatacaagaaatgcaattttgaaataccagattttcattttttgtactaagtgtatctcattgtaggcaataaaaaattgcatcacaggcatcaaaagtgggaaaaaattgttccttttatcaaccaaatagaaactttcaataacatactttgagtgataaaatggtgatgtcttacatttaccattatagagaggtcttgtggttagaaatttaaaaagtgtttaaagatgattaagcatagacaattaaaagaaacattatatctcttggtatttttctcaagacactaaaataataaaataaaaatataattaaggaaaagcatgactttgggaaaaaaaaaatcacaagttaatttttatggctggattgaaacactgtaaaatagacaaaacctca

SEQ ID NO: 3684 - DNA, 393 bp, Homo sapiens
  misc_feature (1)...(393): n = a,t,c or g
ggggaaactgagtccctcagagggcatggcatgagtgggcaacagaggcaggcgtgaccttgcctcctggctcacagccctttcctgcatactgggccagttcagttgggtgcacacggctgtggggtcagggaaggagcatggactggggtcagtgggtccagggtctgtttctcccctgctgtgcggcttggggtaagtggcttaacctttctgagctcctgtttcctcctcagtaagaggatgacaacctccactgtagtngatgtggctgtgaccccacactctcccccgagagaaggcagctcatgctgaagttcacatagaggttctttttcaaaggggcatcttagtaggtgcttattccatgtgggattcaaattgcctgcattt

SEQ ID NO: 3685 - DNA, 868 bp, Homo sapiens
ccagcaactcccagaaacaactccggggacaccactccccatcacaactcccacaccgagcctggtgcccggtctgtgcccgagctcagcgggacccaggaagggatgggccctgcccagggttgcccctgcacatgtgcaattcatcgcctgggaggcacaagttctttcatctgcttttccttcagaggtgctgagcccacgccatagcccctgtgggatggtgggggagggggcgacccgaacaacagtgcagtcggtatcgagattggggagaggagcgagtccaaggagaaggtcatgagtttctttttactcgtgttgaataataacaataacaataacaatatggaaaccaccgcaaacttggagaaaagttgtaagcacagtaaagagaagcttccttctgagtcacttgagtggttgccgttctggccctgcaccctctgtgctttgggacggcgtccaacccgcattcatgtcaggagtgagtcgcacgtggctttgtggtcatggcgacttaatccgcctggacggtggctccgtctccctgggcttagacgaccttggcacttctggagataagcccatggctcccaggttgtgttcatgtgacgtttccttgtggtaggttctgggtctgcgttttgtctaggagtgtcacaggatggacactgcctcctggcaggggctgcccaatgcagttagcctcctgctggtgttctctcttgttgcttggtgaaggtggccctggtcagcttctccactgcccagtgaacgacccctttgtaatgaatgagtggggaggtagtgtgaagcgatgccaatatcccatccctgtcaaactgcctttactttttccttcctt

SEQ ID NO: 3686 - DNA, 446 bp, Homo sapiens
  misc_feature (1)...(446): n = a,t,c or g
aattcggcacgatgacagggcagaaaggtctctctcctcctgggcgagccgttcttcactaccagcctgctgccgtggcacaacctctacttctggtacgtgcggaccgctgtggaccagcacctggggccaggtgccatggtgatgccccaggcagcctcgctgcacgctgtggttgtggagttcagggacctgtggcggatccggagcccctgtggtgactgcgaaggctttcgacgtgcacatcatggacgacatgattaagcgtgccctgggacttcagggagagcagggaagctgagccccacccgctgtggggagtacccattgccgcagccttttccgagcctgggaagattcctgaacctttgatttccagaagccgntgcccttnaagccctnttttgccgagggatttttgggatttnagaaggcccggaagagca

SEQ ID NO: 3687 - DNA, 191 bp, Homo sapiens
  misc_feature (1)...(191): n = a,t,c or g
gtcaggagtccttctgagctctgccccttgtccacaggagtgctagtgggcgtggtgaaggcctgggacgcggaccagacggaagccaacaaccgcatcagcttcagcctgtcggggagtggtgccaactacttcatgatccgaggctttgtgctgggggctgggtgggctganggctacctccggctgcc

SEQ ID NO: 3688 - DNA, 407 bp, Homo sapiens
  misc_feature (1)...(407): n = a,t,c or g
gagatgttctggaattagatagtggtcatcactaactttgcttaacttttttaatatactaaatatcaccgaattgtatattttggnnnnnnnnnnnnnnnnnnnnnnnnnnnnnnnnnnnnnnnnnnnnnnnnnnnnnnnnnnnnnnnnnnnnnnnnnnnnnnnnnnnnnnnnnnnnnnnnnnnnnnnnnnnaaaannnnnnnnnnnnnnnnnnnnnnnnnnnnnnnnnnnnnnnnnnnnnnnnnnnnnnnnnnnnnnnnnnnnnnnnnnnnnnnnnnnnnnnnnnnnnnnnnnnnngccaaactgggtctttgaacacctggacctcaagtgatcccaccagccttgggcttccccaaagtgcggggatttacaggggccttaaaatnccaaccttnaaaatttg

SEQ ID NO: 3689 - DNA, 372 bp, Homo sapiens
gcttttataaaatacccaaattgcaatctggacttggagtctcccatgtgggatctgcagcattcctagggctgctgtttgtttgatccctgggttttgtcagatggatgctttatcaggtcttctatgttgccctggctgttgctttccattccggctttaaattctcatactttgctcccctcatcaagcaaacctttactttctccatggcctcatcccaagggctccctgacatttcacgcaccagcttttgtttttgtttttgcatacgctcttggaatctttggggcaaaatgggaaaaagaagttcataatgatctaccatataaataatggtcaataagatgatgaagtcctactaatccagaa

SEQ ID NO: 3690 - DNA, 446 bp, Homo sapiens
  misc_feature (1)...(446): n = a,t,c or g
ctgtgcccttaaatagcacactgtgtagggaaacctacccncgtactgctttacttcgtttagattcttactctgttcctctgtggctactctcccatcttaaaaacgatccaagtggtccttttcctcctccctgccccctaccccacacatctcgttttccagtgcgacagcaagtttaccgtctccaggacttggctctgctctcactccttgaacccttaaaagaaaaagctgggtttgagctatttgcctttgagtcatggagacacaaaaggtatttagggtacagatctaggaaggaagagagaggaacacctagatccaactgaccccaggagatctcgggctggcctctagtccttctccctcaatcttaaagctacagtgatgtggcaagtggtatttagctgttgtggtttttctgctctttctggtcatgttga

SEQ ID NO: 3691 - DNA, 1081 bp, Homo sapiens
  misc_feature (1)...(1081): n = a,t,c or g
taacttgggttttaattaggtacataaatagcaacatgagaatgaggagttctaaggcttgtacattatctctaggtgaagggattccaggttagtttgcttgtaggatgatttcacagaagataacagaggtctggtctagtttttcctgattaagatggcagagcatgaagttttctacttagttccaggtgaattcttcacatttcctggcttttgaaaagttctccttccacaaatcttctatgactatatatcctcgtaaaccccagtcatataatctctccccactgacctgggcaaacacgatggcttgttgtggataatagagggaggcagctaatcccatgaaaccaggcggatacactagcttctttatttttgaacctctagccaaaaggagtccaataaggccagcaaaaccaataacaccaagtctcggaaaaaatccaggaggtgcattttggagatagtcatagctgtctaacccccattgaaccaaactttgcatcttgggcttagtttgggagtacgtttcctgacaccaggttgtgtatggctcgcaatagtgtcggagctgtgagatgctttcttcaagctggctccttgcctcctccacatacttcgattgaccctcaggaactgagtagagtgaaagctcatcaaccttcacggaatttttgggaggtgagtccttttttggtgctgcatagactttgaaggtgagtaggctcaggctggtcagccccatggacctctaaaccaccttgaacatgttactggcagtggggactttcacaaggtctttttaaacgtttgaaactcagtttctagcctgggcaacagggcgagacccctgtctctacaaaaataaaaattaaaaaaaaaatagccgagtgtggtatcatgtacctataatcctggctnnnnnnnnnnnnnnnnnnnnnnnnnnnnnnnnnnnnnnnnnnnnnnnnnnnnnnnnnnnnnnnnnnnnnnnnnnnnnnnnnnnnnnnnnnnnnnnnnnnnnnnnnnnnnnnnnnnnnnnnnnncagcctgggtcttgtggcacactcctgtaatc

SEQ ID NO: 3692 - DNA, 510 bp, Homo sapiens
  misc_feature (1)...(510): n = a,t,c or g
tgctatggaaacagnanaggctgccagctgttttaccaggganccagagacatagaggaagtanggggtggtatgagattatactttctgtttttaaaagattttttttttttatgtatttagtagagtataaagaaaagcagatgcctatagatgtctggagcatattttcatttgtgatctaatgttttaatttgtaaagtgtacaagtcatttttaatgttaaaaattagtgaatctaacaaaaggaataaattagcaatatttgatgtggttatgaaaagttgtttttgtttctaggttcctagtttcttaaggattcagggcatgggaagtaaaacattgactatgtgccaataatggaggtnnnnnnnnnnnnnnnnnnnnnnnnnnnnnnnnnnnnnnnnnnnnnnnnnnnnnnnnnnnnngcttcaagggatcctcctattcttcagncctcccaagtaggctggggtcttacaggaacaggaaactttgggttattaagga

SEQ ID NO: 3693 - DNA, 433 bp, Homo sapiens
  misc_feature (1)...(433): n = a,t,c or g
agatcacagcctgcatcagactatgttggtgtacgtcttttacacagttcccattccagtcatcactgcttacatgactacatgaaaacatcaaaaagacaattgtgattctgcttattatctgttttatttttcttcttagcaaactttttctaatacaatttttcttttgactagacacaaacagcacagcatgattcttgttcccatgaacacacctggagtaaaaataataaggcctttgtcagtttttggctacacagataattttcatggaggacattttgagatccattttaatcaagtgcggagttcctgccacaaatcctaatactaggtgaagggtaggggatttgaaatttcccaaggccgccttggaccttggcagaaatccaccaactgtattgagaaccagtagggtttgggncggaac

SEQ ID NO: 3694 - DNA, 283 bp, Homo sapiens
cctgggcctctctgtgtttggttccaagcacttcccacctcaaactcccattttcaaaccactgtatctctgcgcacatctgctacttaccaaccgcatacatgatggagggttttttggtcctgatccagtggccacacctgtctttgaaatgtctcactgaactccagttttaaaatagattcattgcttcaacacagcaaggcccattgcacccagctaagactggcttgaccgcaagcctgggcctttggtgggggggcttcctggggcctggggaaag

SEQ ID NO: 3695 - DNA, 504 bp, Homo sapiens
gcctaaatttatgactaaaaattcccccaaaagatgaaagatctacaatgtttttgtcagtattatatttgactcaggaactaattattaagggagctttgacacctgcagatggagggctgatcttgtgtcaagttaacaggaagactgcccacagatgacactgcatttgtatccctgtggatgtagagtattgggaaggcatttgtttagtttcatgcctccaaaccatgcattgtctgtgatgtatctgcccagccttctcagaactcaatgttgtacatttttccctctaggacctgaattggtcttggaggcagcttttagaaatcctctgtgtagttcctgtccacatgcactatatatttgtttcttttttctcctctcatgaatctgctcgtttctctacttctgtctacgtagaagcactcagcaactagtttctgctcattaaatgtgttctatatactaggaaaaaaaaaaaaaaaaaaagatgcggccgca

SEQ ID NO: 3696 - DNA, 440 bp, Homo sapiens
  misc_feature (1)...(440): n = a,t,c or g
caccattttcctgatgccaaactgaggctcagagaggtgaagtaacttcttcaagtcacaacacaactgttgtccaggaatcaggcagtctggctctgctaacccagttttacccactgcattaatgtaccgcatccacttgttcactcagtttcacctgacaaatactaattttgtctctctgtggaacaagttctttgctgggtgcagggaataaagcagaacaccgttcagttcctgccttcccaacgcttgtaaatctagtgcaggtcattcatggccgggctgcagggtgtccatgaatcctgctaaaatcattttgcgaaatgttgtgagcgtgggncttttcttctgggaaagagagtcttgtgactctcaggttctgagttgatctgtgatccnaacagaggttgtgaaggaagtgtttgttttagcagatc

SEQ ID NO: 3697 - DNA, 460 bp, Homo sapiens
tcaagtgaccacccaccttgtggtgctgggattacaggcgtgagccaccgtgtcctgtctcctgttggctcgtttcttttacttgatttttttcctcttggcttttgatcatttattttgcttcttaatatgactgataattttttattgaaatcagggatatgggtatgtgaaaattttcagagataattccagactctagatggtgttaactgcctagcgggtttattttctttctggttgaaagttagggtagaggcagatcagctagtctaatctcagtgggcttgaatcttcatgaccgtcctttgtttctggttccctattactcctgaaatgaatcccatccagggttccaactgaaatgctgggatattttgtctgcttcttattgggtcttaagcttccatgttattccttatccccgtgaaactcttagaatatctgctcagctccttcc

SEQ ID NO: 3698 - DNA, 505 bp, Homo sapiens
ggctaaataataaaatctacctcactttctttccacttgtcacttgtgtttggagcaacacaatggaaggagcaagctgtaacttgtgaacaggagacacattaatgaaataaagctccagagagagaactcaagctggcctgttgccgtgacgctgggctaatgacattgagctggaagagtgattcccctggagtccttatcaagtgacaccatcttaattacccagtgaaaagacagcccgtttccagcaaacaattacttcctgatcgatacccttgtcttgttaagtatgcttcctgaccatttatagccaaacatttgatgtacttttcctgagaagaaaaatcaccttcttagctatctctactcagcagaagcccctggccacatcacacacaaaaccatctacatttagatattctgaatggttggaaactcctatttattatccttcggtgacttttatctttagatgaagaactgagaagagcacacaagttcc

SEQ ID NO: 3699 - DNA, 495 bp, Homo sapiens
cagacgtgaagcctagcagaggactttttagctgctcactggccccgcttgtctggccgactcatccgcccgcgacccctaatcccctctgcctgccccaagatgctgaagccagccctggagccccgagggggcttctccttcgagaactgccaaagaaatgcatcattggaacgcgtcctcccggggctcaaggtccctcacgcacgcaagaccggggaccaccatcgcggggcctggtgttccaagacggggtcattctgggcgccgatacgcgagccactaacgattcggtcgtggcggacaagagctgcgagaagatccacttcatcgcccccaaaatctactgctgtggggctggagtagccgcggacgccgagatgaccacacggatggtggcgtccaagatggagctacacgcgttatctacgggccgcgagcccccgcggtggccacggtcactcgcatcctgcgccagacgctcttcaggtacca

SEQ ID NO: 3700 - DNA, 1221 bp, Homo sapiens
ttttttttttttggtgggaaaagccaactttattaaagattctctatacacagtcccccatttctggaccagtcagattggctttgggttgaagtttctgattgtctttccttccagtttctctctttggtccatggcttcctgagattcagtgtcctcgatggcatctggggaaaggtaggtgaccttggggtcctggaccaatgcagggtgagcttgcagcttgcagagggccaaggaagtggccagccccacagcccacaaggagtcctgacgatgacagcagagcctgcaccggctttggggcccagacgttggcttcagtgccatctccgcacatgccatgctcattccagccccaagagtaacacactccaccaattattgccaaattatgctctgagccacaagagacctgtctgagcaaccaggtgtgtccatccactccagatggcagtgaccttttcattctggaaacaatgtgcttctattttctggggcacaggaaggaaagcagcctcattagccagttgcccatgcttgttgcttccccaaacatacacctctcctgcatctgttaatgaagctgagtggtctgagccagcaagaacacacattgctttagaattctctagacctgtcactctgcttggttcctttgctgtgaaaaacaatggaagagtctgcccagggcacaaccgtcgtccacatgatgccaaaccagtcccccactggaacacgatgccactcgctgtagcagttactgcatgcctcagtccagcagcaatacaaacaaccttctctttatggagctcaatggcctggggaaccacacatcttcgaggtccatgaggaactcctaactggccaaaggagttggatccacatgatagaacttgaccattttctgtgagcataatcgtaaaatcccagccacaggccacctgttggatgggacagccaaagagggatttgcagggggtaaaatatgggatatcctctgtgtgaccaagccccagttgcccatctttgttcaggccacaaacaaagaggtctcctccatctgtgacaactgcagagtggccccctcctcctgtgatcctcctgacactcctgggtttacagaagtcattccagttgctggggcaacagcacatcttccttatggccgaggccaagttgcccatagctatttgcaccccaggcgaagagcgcggtcgc

SEQ ID NO: 3701 - DNA, 695 bp, Homo sapiens
ggatccctaagatcccggcacgctcgaaaattctcgtcttacagatcagtcaacccaagaaagcaacggattgccaggcttccctgaattgcaagcaggagacttccaggtgaagaaagcatttgtccccatcactgatctcagcctttgctagtcatcagatgccaccaaatgaaaaagaagcaactcagagttggaagatgtgctgtgccccagctccgcagagccccacacccattcaaaactccctcaacaggtagctgtctgccatggatttatttcagctcttgcagaagacgttagtatttccaaactgtcgcttctaaaggaataagggacccaaattccctgactagcatgtcaaacaaaatttcctggtttttttcttctaaattcaccaacttttctatttgggctttcaggaatgcctcctccatctagcaatactgactctgagtcaagttcattttcagtgcacccagcccttctgctaattctcatttcgacttcaagctcttctgagcttccatcttttcagatgaagcgcacttgtttatggctgcacagatcccttccaagcccttctgatctctgtatctttgcagttactttctctggttcatttccatcttggtatttgccgaggccgtctgccttgagaaagtgatctcgggctgtatttatggagggtgtcc

SEQ ID NO: 3702 - DNA, 198 bp, Homo sapiens
tgacacctttcttgaggcttgcagaagcaccaaggtgcctgcctgtgactgggccgaaaacattttagcattttgatatgggcagggcatgctaactgagagtccagttctccagttagttcttgctttttgattggaatgttcctgcccattgcctgttggaatgctcagaaagggcctttggcttcctgaaggaca

SEQ ID NO: 3703 - DNA, 127 bp, Homo sapiens
gcgtggaagcatctcgcggttttctagaaacaggcattttcttatccctctcccgctcctttttccacaaaggtgaatttcataaatgtaatactagtaaagtgaatgaattactgagtttatacag

SEQ ID NO: 3704 - DNA, 1192 bp, Homo sapiens
gacgaggtggtcagggaaggcaattcctggaaagaattttggagaaaataatagaagaaagccagagctccaataagcaaacatgaagagaaacagcaagaaggtggcattgtttctaagaacttcacaaagaaaatccagcttcctgcagaggtggatcctgtgacagtatttgcctcactttccccagagggtctgctgatcatcgaagctccccaggtccctccttactcaacatttggagagagcagttccaacaacgagcttccccaggacagccaggaagtcacctgtacctgagatgccagtactggcccatccttgttttgtccccaaccctagggcttctctgattccaggatacattactttagctgaactcagatttagtgcaagtaaaatgttagagggtgcgggggtgaggactgaccacagattccctggatagtgtagtggtagatttctccacaggatagcgcaattggcaaatcatgcttggttgtgttaggccaaaatactagttttgctttctttaccttttctatcttgatgaaaatgttgcacattctatagttgcaaaacacataaaaggggacttaacatttcacgttgtatcttacttgcagtgaatgcaagggttacttttctctgggggacctcccccatcacccaggttcctactctgggctcccgattcccatggctcccaaaccatgccgcatggtttggttaatgaaacccagtagctaaccccactgtgcttccacatgcctggcctaaaatgggtgatatacaggtcttatatccccatatggaatttatccatcaaccacataaaaacaaacagtgccttctgccctctgcccagatgtgtccagcacgttctcaaagtttccacattagcactccctaaggacgctgggagcctgtcagtttatgatctgacctaggtcccccctttcttctgtcccctgtgtttaagtcgggatttttacagagggagctgtctccagacagctcccatcaggaaccaagcaaaggccagatagcctgacagataggctagtggtattgtgtatatgggcgggacgtgtgtgtcattattatttgagttatgctgttgtttaggggtaaataacagtaaataattaataataataataataataataaaggagctgacgttcttaaa

SEQ ID NO: 3705 - DNA, 199 bp, Homo sapiens
aacagtgtcccctaataggatgagttttgggctttaaaatttaaaaaaaaaaaatgggggcattgatgagtctcgttggcaccttttggcttgtggaggctcgtgatctaatattggtctctgctgtatacccagcacactacctgccacttagccattccataaatatcgttaaataagtgaattaggccgagtgcca

SEQ ID NO: 3706 - DNA, 452 bp, Homo sapiens
ctaggaggcagtccccaacttccagagccagggtataggctacttctatgtgtcccatggtactgccacagaagagtctcagctctctccaggattcagttctaaggtcagtgcctaagataaaaatggagtgtaattaaaattcctcttagaaatctaaggaaggtgccctattgaagaccaacatcttgaggtcccatgtagtcatttcttgcccatgtgggaacacattactgtttggttgagtaccaggtgaagtgattggcctgcagttagggctgtgttgtgcaaaaatcacttgttttggggtgttagaaccacatttaggcgagaagatcacttttggggagcttgggaactgaggcaggccgcaggtgcagcagaggcatgagcttgcccgggcccgccctcttgtctatgctcatggagtgaaggaggggccagcggaatgg

SEQ ID NO: 3707 - DNA, 605 bp, Homo sapiens
  misc_feature (1)...(605): n = a,t,c or g
tttaaatactacccagttcacagggttgttgtgaggatccaaaataatgtatgtattaatgaaatgcctggtgcctatgctgcaaccatggacaccatcactaaatactaagaaggtgaaattccacgaagcttgctgaaatccctggatgggggtactgtcaagatgaagttataataagaatgttcctagacagctatgaattgcagccattcttcccttttccagaatatgtaaagaatgtttgtgtgcccacggaggagccgcatctagcctttgaggctgttcagctcatctttcccaacccgagggattttcctttcctctggactcctcccttcattctcccccactgacatctgttcactgcctcgccaaccaagggggaaaacattctttggaactgaagctgaggcaccaccaagagtcaaggcagctatgagatgtttattgtcacagagaatatgtggtgctgggctgaccacagaacctgccagggttgggatgccaaggagggactttaatgaagcaacnaanggatgggtngnaaccccnananccaggnantgtccccngcctttgggaaaacncttgtcaaagggtcc

SEQ ID NO: 3708 - DNA, 427 bp, Homo sapiens
  misc_feature (1)...(427): n = a,t,c or g
gcggcacgaggatttggagagtataggaaaggaggcttttaggtaatatagagagatattcaaaaatttatgagtgtgatctcatgtattagttattcggttaaagaaacaaaattaaatgaaaaatacatttttaaaaaggttgcaattctgaattatgggagagaaataaaaattagcaaaacatatttgcaaagtggctcaggaggaaggagctgaaaccctaagaatgggtgagtttttttttttttannnnnnnannnnaaagncaaagggcccnaaangggntccaancctgtttnncncnggggnggncncnttntcntttaaancnggaccaggggagncaantttaaaattnnggggcaaatnccaanggggtnntttgngnaaaagtnntttngtttggaaacccntgggttncacc

SEQ ID NO: 3709 - DNA, 1909 bp, Homo sapiens
acggcgagcctcatcctccgggtgcggcgctgagcagcgagtccgactgtgctcgctgctcagcgccgcacccggaggatgaggctcgccgtgggagccctgctggtctgcgccgtcctggggctgtgtctggctgtccctgataaaactgtgagatggtgtgcagtgtcggagcatgaggccactaagtgccagagtttccgcgaccatatgaaaagcgtcattccatccgatggtcccagtgttgcttgtgtgaagaaagcctcctaccttgattgcatcagggccattgcggcaaacgaagcggatgctgtgacactggatgcaggtttggtgtatgatgcttacctggctcccaataacctgaagcctgtggtggcagagttctatgggtcaaaagaggatccacagactttctattatgctgttgctgtggtgaagaaggatagtggcttccagatgaaccagcttcgaggcaagaagtcctgccacacgggtctaggcaggtccgctgggtggaacatccccataggcttactttactgtgacttacctgagccacgtaaacctcttgagaaagcagtggccaatttcttctcgggcagctgtgccccttgtgcggatgggacggacttcccccagctgtgtcaactgtgtccagggtgtggctgctccacccttaaccaatacttcggctactcaggagccttcaagtgtctgaaggatggtgctggggatgtggcctttgtcaagcactcgactatatttgagaacttggcaaacaaggctgacagggaccagtattgagctgctttgcctgggacaacaccccggaagccggtagatgaatacaaggacttgccacttggcccaggtcccttctcataccgtcgtggcccgaagtatggggcgggcaaggaggacttgatctgggagcttctcaaccaggcccaggaacattttggcaaagacaaatcaaaagaattccaactattcagctctcctcatgggaaggacctgctgtttaaggactctgcccacgggtttttaaaagtcccccccaggatggatgccaagatgtacctgggctatgagtatgtcactgccatccggaatctacgggaaggcacatgcccagaagccccaacagatgaatgcaagcctgtgaagtggtgtgcgctgagccaccacgagaggctcaagtgtgatgagtggagtgttaacagtgtagggaaaatagagtgtgtatcagcagagaccaccgaagactgcatcgccaagatcatgaatggagaagctgatgccatgagcttggatggagggtttgtctacatagcgggcaagtgtggtctggtgcctgtcttggcagaaaactacaataagagcgataattgtgaggatacaccagaggcagggtattttgctgtagcagtggtgaagaaatcagcttctgacctcacctggggacaatctgaaaggcaagaagtcctgccatacggcagttggcagaaccgctgggctgggaacatcccccatgggccctgcctctacaataagatcaaccactgcagatttgatgaatttttcagtgaaggttgtgcccctgggtctaagaaagactccagtctctgtaagctgtgtatgggctcaggcctaaacctgtgtgaacccaacaacaaagagggatactatggctacacaggcgctttcaggtgtctggttgagaagggagatgtggcctttgtgaaacaccagactgtcccacagaacactgggggaaaaaaccctgatccatgggctaagaatctgaatgaaaaagactatgagttgctgtgcccttgatggtacccaggaaacctgtggaggagtatgcgaacttgccacctggccagagccccgaattcacgct

SEQ ID NO: 3710 - DNA, 775 bp, Homo sapiens
gcggccgccctccatcattggcccaggccgggctctagggcctgctgggaagctgtctggggccctgcgcctgatgagctgccatgaaagtggccgcctctcacactggcaggcggtggctcagatctgctgaggttctggagtggcacaggaacaggaggagcaaatgacactgggtctttgtgctgaggcaggacacagcggctttccgaaacacacacacagaaaatatgactcctgctgccatctcaaggacattttcctaaggacagtcctggtgtcctgatggagtgaaagggatcacacgtgggatgtcccagcagggcctaagccaagtccatcagatgtctcaacggcttatgaaacaaaaacagaggactgaagtctgttcacagtggcccatggttgggcagcagccctgggtgagctcctgtgttctccagcctctcgctcacccagggcttggctatcctggcctccaggtgctggttcctgaggcttcccttgcggcagtggcgcagatacagggacactcatgtcccattgctcctcagaagtcctagcagcagccagactaggggcaaagtaagttttcacagggggaaaaaccccaccaaaaaccccctaaagtaactggacaatcctttccctgagaccactacagtaacatcacccacagacaacttctaaagagcacttctaactgctcaaagtcttgagaagggaaagattttagcaaggctaggaaaataaaaatgcaacagcacattgtccc

SEQ ID NO: 3711 - DNA, 658 bp, Homo sapiens
  misc_feature (1)...(658): n = a,t,c or g
gtaggtacttctcctgactcttgggggagaagtggttttagggattgatttgggggagcgggtttttgtcccatcccacctcctctcttctttctctgcttgtcgatattgtctgtgtgattcagagaattggggcagttacattgtgtctgttgttgagattattaaaagattaaaacgtagttgtagaaatgaaaaattaaacagctgtgttttaaaaatgcaaaccaatatcttgttaataaaggaattcaagctatggggcagccacactcccctcctcccaggctggcataggtggccctgggctggcggcttaggaagcatggagcacacttagggtagtgcctgcctgggcaagagacacctgccgagcaaaaggaacgagaatctggggctcagagcctcgcagttgtgccaggattttcctatacatgttcaggacctctgggtagaggtttcacagtttgtgaccccataaccaccctcacccgacgtgggttctagctcagtgtgcctaatactgcatggtaacctgggcttgaccctgaagcccctgcctggcaggccacaggacctctcctgccanttngggcnaacncctccaantgncaaccagcaagggttgacnntggcaancctgganctgcaatcaagt

SEQ ID NO: 3712 - DNA, 336 bp, Homo sapiens
  misc_feature (1)...(336): n = a,t,c or g
ggagtgtggacgctccacctgacactaccgccttccctgcccctttgcaacagtgtctcttggcttctctttcaccatgctctcctggtttccctctcatttctgtgattgttgcctctgaacttccttcactggctccttcccctcctccctattcctgtcccttcaaatgtgggtgttcttggggttcactgacccccgttttttctgtttgccaactctcagttctgtctctaggccgagccttcttttctgaggttgactctcttgctcagctgctttttggagatcacatctaaaatcagggctcaccatctcccccanaatttggcccac

SEQ ID NO: 3713 - DNA, 581 bp, Homo sapiens
tttttttttaattaaaatatgtcactctgaaagctgtatggagaagggacagggagtgctaaaggagtgttccagggcaggatgaaagttacttgtactatgtcagatatggtgcaagaaacagagagacattgatggatttggagatagagtcaacatgagcttgtgaccagctcaggatggagggctgggaagagtcagaggtgcccctgcatttccagcatgtgtgagaacgactggggggcagtcacaggaagacaggaagaacagcccacctcattcatcgcttagtctacaaatagtcattagtatggaatggactgtggacacaggccctaaggatataggtttgcctcggaggcaaacgaagacatcccaggggcttggggagctcacagcccagaggctgggggtggtgtgggggtcagatgttttgagaatcacctctcaaacaaatattaaattggacctacaacagcagctctagggagaggttctcaaatgagtccgtacctatgcccgcatttctgttgggcaggtgacttgccattctgtgactggatgtgtatttcctgggctat

SEQ ID NO: 3714 - DNA, 507 bp, Homo sapiens
gaactggaaggaaaagagcgggaaggggagtggaaggcaggggctgaagacacaggccaggcggaatgaagatgatggtggtcttgcttatgctgtcctcgctcagccggctcctgggcctcatgaggcactcatctctcaggcaatacctggactctgtgcccttgccaccctgccaggagcaacagccaaaggctagtgccgagctagaccacaaggcctgctacctgtgccacagcttgctgatgctggccggggtagttgttagctgccaggacatcactccagaccagtggggcgagctgcagctgctgtgcatgcagttggaccgccacatcagcacgcagatccgggagagcccccaggccatgcaccgcaccattgctcaaggacctggctacccagacctacatccgtttggcaggaagttgctgacccacttgccagccccaggcccagtatttcagcccctggaaagacatctaaagggacagggtcagggcagcc

SEQ ID NO: 3715 - DNA, 207 bp, Homo sapiens
ggaatgggagtggagctgggctggctgggcaggcaggggcttgcctcttgctgactaaggcagccctggaggggcccgaccatggggcaggaacccagttgccatcctcagagcgaggatcattggccgggctcggggatcagggcctctgtggtcccggcacgcctggcccgtgagactgtactctgcacgactcctccaggtggc

SEQ ID NO: 3716 - DNA, 843 bp, Homo sapiens
gccggtagacgcggtggacggaggctcttaaactgtccgatttccagacacctcagccctggcagaaaatggagagcttatcagaggcttgagttcacacaggcagacacggcgtgggggtaaagtcctctgaacagacacggaacagaaataagttagtcttctcctcgcaggggacagtgaacggcgcaaacttctcaaaggccagaacccattattaccacaaaggcgcggcatcccttcttagcggttatgatggctgtgacgtctcagctcaatggaaaattaaagtcacctctgggcacctcagtcactattgtaaatgcgacggttttagaagccgtataaaaactgaagcaagagagactagaacaaaaaataagcgagcggtgcgttgcaggtaacggagccagagcccttaggggagagcatcatgggggcggccatcttaggggacgttcggtgtccgtacggcagaaccatattctctctgagaagcttgcggtggaactggcccatggaaatgtctttagaagagaagaaccacctggctctgttcttgactctggaaaagaatccttttctagaattatttaggttgttgccagattaatttcctttagagagtttcccttgccccccacgacttcctatctttaaagcccaacaatagtatgtgaaatccctttcatatttgaaaccactgactattgctgctgcatctctccggtttctcctattcttaagtgcttgggcaatccagaataatctcccaatgctaaagtcagctgattaataaacttaattacaatgcagaaaaaaaaaataaaaaaaaaaaaaaaa

SEQ ID NO: 3717 - DNA, 998 bp, Homo sapiens
tttttttttagtcataaaaccgattatttaattgaagctataaaaaaggtagtataagtgataaaataattaggaaagaatatttagcatgtttcaaaacatttaaaataggagcagaacattttacaaaaagttgtacaggaaattaaattcttaaactatcagtacaaacatgacattacagagtatcttataaaatacaaagacaaatataaaaggactatgatgctttaagtctgaaaactattggccaaatatttaggtttaaatttacagttcctgggtatgagaatcatattactatatacatctcccaaaccagtaggtagtattttccaattaaccatgtgtggtatcatcttctacaaagtctttggccatctctgctgtgatcacatcaatatgactaaccttatttctgaactttacaccatagaatttgtcagctgactcaagcagttcaggcctaaaagtagttgtaataaactgagcatgtacagcaagttccataatcatatctgacacagcctttctgtgctgagcatcccagagcctggtcaatttcatcaaacaagtaaaatggagccgggtcacatttctgaatggcaaaaatcagagcaagggctaccaaggatttctgtccacctgaaagctgttgcatttctctcatttcaccttgttttcctgtaaatgacaccctaattccaactccagtaaactggtcaactgatgggacactgctttgtgagccagaacccctctcactctcaccactcccttctccttcatcttgagactgactgccctccacatctcctttcttcatcaccaaagtagtttgccaccaggtactaacttctggaatacttcactgaagttcttagatacctgtttgaaagttaactgaatagcttcatatttccgaagttcaagtacattcatcagttccatgatcgatttgtaacccctatctaactcttcttgacgctttattaact

SEQ ID NO: 3718 - DNA, 979 bp, Homo sapiens
ttttttttttttcctgtgaaaccaccatagagaatttatttttttctcaggtgaagtcagtaactaattcttcctattcccgttggacacaaggagtctgtgagggggtgtgaaggaaggaggctgcggctgcgtcctgggactccgtcgtgcggtagggagtccagcagggatggctcagcctccgcacctggtgtgcagccggatctccatcctgaggaaggccttgaggttctcatcagccacgtgctcctccagggcagccagggcccgctccccaccgtcctggaagtgctgcagcagcctgtccgcgtactccacccacacgcagttggggcagccactcatgcagcagtttgtgggcggctggagctcaggtggcagcgatgccttgggcggcctggtgccgtccgcacctgcttgggagcccacctctacgtggtctgtcccgaattttctgcgcccatcaggggcttgcgctccgggatggtgcctttgaagaaagctgccacctccaggaagcctctggcagcagtccgggctggagaaccggcgagcccccaacttcacttatttaactagtcctgcgaggggcatcatccgctccatgtccacggccagtccccagagcccaggagggctcgcacacaggcgctcggcagatactgagaaacaggaaagtggccgttcaccgggctgcttcctctcccaaggctaagcggcccctccacagattccggggcggggactcggtaagagccgatggaggagaggagcgaggggtctctcggcggcggccagcgcgcgatcctcccggctccgtccccacatgcgggtggaggggccggggctctcccggtacgtgcgggcccccggacagcggcctctcggacgtgcccttcgcgctgccaagacccgtcctggtacttgccgagccacggaccgcggcgtaccgcccggcctcccgcgcctgtgccga

SEQ ID NO: 3719 - DNA, 1166 bp, Homo sapiens
ttttttttttattatgtatcatgcttttaatacaaacttaaaaaaatctggaacaatagaaactgtacagatttgatcaatctttttgttttgtttttaaactaaaatctctaaacacaccaatgtcccattccaaaatattgcacaacattctgaatacaaaacccttgattgtattcctccttcactaaagaaaaaagttcatgaccctgctccccggggctcctctccaggcttgcctcaatgcccccttcccatccctagggagaaaactagagaatctataactcactgcattgagaaaaagacatcattctggactaacagtttccattcttcagaagataatccaccttttgatttgttcctgggaaagagggatagatagaggatggggaaaggggagaaaaggttttatttctcctcttttttttttaaagtttgtttttcctgaaaaaatatgtttctctcatctttttaagaaaaaatcttgaaaagaaaaaaattatgttttttacgttagaaatatacatatattatatacctcttacattttacaaatgtagcaaattattcaatacaaacggacaccaaaaaatgtaaaaaataaaaaaaagttttcctacgaaaccaggtaaattagtgcagatttctgtttttgtattcttaaaaaaaataaaattgaagcaaaaatgcctagatttgagacaagacagactgaactgggcccaagagcgcagcactggagtcatgctcctgaacacacatttttcttcgtatttcaaaagacacaaaggggttggtctcccctctctccctacatgtgagaaacaagccgacctggtgtgggtgggtgcctgtgtgtgtggatgggaggagggctagaaggggatgtaaggcagcatccaacctttcccagagagaagctatctgctgggtctgtcacctgtgtgggagccgaggatgagggaaacaaagggtggcccagactgggctggcccctgagaagtctaggggaacagatggtgctgggctgagaagccaggacattgcctgccgggggaggtagagctggtgcctactgcagggagaggaggctggcagtgctggcctgggctggacccactgccataacagttgcctacttggggtccctctcgtgccgc

SEQ ID NO: 3720 - DNA, 428 bp, Homo sapiens
gaagtagggcagtttgataacatcaggccacacagctggacaagggctaccacaaagtcggctgatcagttctagctgagccagttccagattggcttgaaaaataggcttctttgtgaatagttccccaagaatacatccacagctccaaacatctatggctggtgtgtaacgttcctatcctagcagtagttctggaggtcggtaccacaaagtaatgactttgtttgtgtaagggcgactctcttcagagttatagagccgagcaagtccaaaatctgctagtttgatttgcccactgttattcagcaaaatgttagaacacttaatatcccgatgcaggaaattctttttgtgacagtattccaatccttccattagttgtttcatgaacgacttgatatggtcctcagaaaagtgcaccaaat

SEQ ID NO: 3721 - DNA, 5092 bp, Homo sapiens
cagaaaaatcaccaaagtcacctaattcagtgaaagcagaaaaagcatccagttatcagatgaagtcagaaaaagtaccaagttcaccagcagaagcagaaaagggacccagtttactgttgaaagacatgagacagaagacagaattacaacagattggaaaaaaaattccaagctcctttacttctgtggacaaagtgaatattgaagctgtagggggagaaaaatgtgctctgcaaaactcaccacgatctcagaagcaacagacatgtacagataatactggtgattctgatgatagtgcttcaggaattgaagacgtatcggacgatttaagtaaaatgaagaatgatgaatctaataaagaaaattcttcagagatggactacttagaaaatgccactgtgatagatgaatctgcattgacacctgagcagaggctggggttgaaacaagcagaagaacgcttagaaagagatcacatctttcgacttgaaaaacgatcaccagaatataccaattgtcggtatctatgcaaactttgcttaattcacattgaaaatatccagggggctcataaacatataaaggagaaacgacataagaaaaatattttggaaaaacaagaagaaagtgagcttcgttctctgccacctccttcccctgcccacttggctgctttaagtgttgcagtcattgaattagcaaaagaacatggaataacagatgatgacctcagagtccgtcaggaaattgtggaggaaatgtcaaaggttataacgacatttttaccagaatgttcacttaggttgtatggctcatctctgactagatttgctctgaaaagtagtgatgttaatatagatataaaatttcctcccaagatgaatcatccagatcttctgataaaagtacttgggattttaaagaaaaatgtattatatgtagatgtggaatctgattttcacgctaaagttcctgttgtggtgtgcagagatcgaaaaagtggtttactttgtagagtgagtgcaggaaacgatatggcatgtctcactactgatttacttactgcccttggcaaaatagaacctgtctttattcccttggtgttagcctttcgctactgggctaagttgtgctatattgactcccaaactgatggtggaatcccttcttactgttttgctttaatggtgatgttttttctacaacagagaaaaccccctcttcttccttgcttacttggaagttggattgaaggctttgacccaaaaagaatggatgactttcagctgaagggcatagtagaagagaagtttgtgaagtgggaatgtaattcaagtagtgcaactgagaaaaactcaattgctgaggaaaacaaagctaaggcagaccaaccaaaagatgataccaagaagacagaaacagacaaccaaagtaatgccatgaaggaaaaacatggcaaatctcctttagcattggaaacaccaaatcgggtatccttgggacagttatggttagagctgcttaaattctacacactggattttgctttggaggaatatgtcatatgtgtacggatacaagatattttaacaagagaaaataaaaactggcctaaaaggcgaatagccattgaagatccattttcagtcaagaggaatgttgcacggagcttaaacagccagctggtttacgaatatgttgtggagagatttagggcagcttatcggtattttgcctgtcctcagacgaagggtggaaataagtctacagtggatttcaagaaaagagagaaggggaaaataagcaataagaaaccagtcaagtcgaacaatatggcaaccaatggttgtattctgcttggggaaaccacagaaaaaataaatgcagaaagagagcaacctgttcaatgtgatgaaatggactgtacatcacagagatgtattattgacaacaacaatttgttggtaaatgaactagattttgctgaccacggacaggactcttcatctctttctaccagcaaaagcagtgaaatagagccaaaattagataagaaacaagatgatttagcgccttcagaaacttgtttaaaaaaagagctcagccaatgtaattgcattgatttgtctaagtcgcctgacccagataaatctactggaacagactgcaggtcaaatttagaaacagagagttcacatcagagtgtgtgcaccgacacatctgctacctcttgcaactgcaaagctacagaagatgcttctgaccttaatgatgatgataacctccccacccaggaattatattatgtgtttgataagtttattttaacctctggcaagccaccaacgatagtatgcagcatctgcaaaaaggatggccattcaaagaatgattgcccagaggattttaggaaaattgatttaaaacctctaccaccaatgacaaaccgatttcgggaaatacttgatttagtatgtaaaagatgttttgatgagttatcaccaccttgttctgaacaacacaacagggagcaaattttaattggcttggaaaagtttattcaaaaagaatatgatgaaaaggcaaggttgtgcttatttggctcttctaagaatggatttggatttcgtgatagtgatctggatatttgtatgaccctggaaggccatgaaaatgcagagaaattaaattgtaaggaaataattgaaaatttggcaaaaattcttaagagacatccaggtttaagaaacattttgcctataactactgccaaagtgcctatagtaaaatttgaacacaggcgaagtgggttagaaggcgatatcagtttatataatacgttggctcaacataacacaagaatgctagctacttatgcagctattgatcctagagtgcagtatttgggatatactatgaaagtgtttgctaagcgatgtgacattggggatgcttccaggggaagtttatcttcatatgcatatatccttatggtgctgtactttctgcagcagagaaagccacctgttatcccagttctacaagagatctttgatggaaaacagattccacagagaatggttgatggatggaatgctttcttctttgataaaacagaagaactgaaaaagcgtttaccttcacttggaaagaacacagaatcattaggggagctttggctgggactgcttcgtttctatactgaagagtttgatttcaaggaatatgtaattagcattcggcagaaaaagctgttgacaacttttgagaagcagtggacttccaagtgcattgcaattgaagacccttttgacttgaatcataaccttggtgctggagtttccagaaaaatgaccaatttcatcatgaaagcatttatcaatggaaggaaactttttggtacccctttttatccactcattggcagagaagctgagtacttctttgattccagagtattaacagatggagaactggctcccaatgatagatgttgccgtgtgtgtggaaaaataggccactacatgaaagactgccctaaaaggaaaagtttactgtttagactaaagaagaaagacagtgaagaagagaaggaagggaatgaagaagagaaagattcccgagatgttcttgacccccgagacctccacgatactcgagactttagagacccgagagacctcagatgttttatatgtggagatgctggacatgtacgaagggagtgcccagaggtcaagctggcccgtcagaggaatagcagtgtggcagcagcccagctggtccgcaaccttgtaaatgctcaacaggtggctggttcagctcagcaacagggtgatcagtccataaggactagacagtcatcagaatgttctgaatcaccatcttattctcctcagcctcagccatttccacagaactcttcccagtcagctgctattactcagccttcatctcagccagggatcccaacctaagcttggcccacctcagcaggggagcccaacctccccatcaggtccagatgccactgtataactttccccagtcaccaccagctcagtattctcccatgcacaatatgggattgttgccaatgcaccctctccagatccctgccccgtcctggcccatccatggcccagtgatccactctgcaccaggcagtgcccccagcaatattggcctaaatgatcccagcatcatctttgcacagcctggctgccagacctgtggcaatccctaacacgtctcacgatggacactggccccgtactgtggctccaaattccctggtaaacagtggtgcagtggggaattcagagccaggctttcgaggactgactcctccaattccttgggaacatgcaccgcgtccccatttcccccttgtcccagcttcgtggccttatggtttgcatcaaaacttcatgcatcagggaaatgcccgattccagcccaacaaacctttctatactcaagacagatgtgccacccgtcggtgtagagagcgttgtccccacccaccaagaggaaacgtgtcggagtaatgcgagtccattttctttcagctggtctaccgatgcacagcaaccagccaatcctgctgtctcaagggtatccgtacctcaatgtcagttacattcagcagaaaaagtgacatttaatggaaagcaaaacaaatcaggtcctgatttaaaattttaacacgtttagatagcttatttaaattctaagactgtttttacagactgtattatttgtatataaatatgaactatagtttttactagtatcaccaaattgagtgatacaaatttcatctattttattaccctatttttaagggaattttatgttttgtttaaccttgatgaattgtataaagagagaatttaaaaaattacattctttattttctattagctgtattcatactttggttgcttcagactttatatattgttcttaaaagttaggaaagaatttcatgtgttttaaattgtcacttctattctttacagaaccttgtagtgccaaaaactttttaaaaggtaaaaaaataaaataaaattacaacaaaaaa

SEQ ID NO: 3722 - DNA, 1398 bp, Homo sapiens
tttttgtttttggtgtttttaattgtttttgttaatgtaaaaacagaaccatcacagccgctcagctctataacccatccagcccaagactgttctagtggtgaaaccaagagtagacaggtcttcctacctcagtgacctcaaaacacaaggacatctccatagggcatcaacatgcatctgtcatccaagaatctaagaacttcctgatccttccacattttctatcaataatattgccttctgaggttatggattccaggtcttctatgaaataggtaaagcttcctttcgcgttccaagaaatatagtttgcgaagggaactggaaaacgtgactctaggcctcagccacttcctctgttaccctgtgcaagttgtagaacaatccacgttctcacagctccccttcttcagttgtggagttcttcaaggtggacagatcacacctcaggaagtcatcccttgtaagcacactagaatttatcataaaggcaggtcggcttgttagtttttctttgtccccagcatacactgagccaacaacttaagtcatgaatgggttgtttagggctctgtctgtcctaaatgattcctaaaagcttcatatagctcatatagtcttattgtccactgctcttttggtgtggtatgatcctacctgtaaagctatcaaacccctgggtcctggatgcctcctccagatttcataccttcctcaagtttactaaatactttctgaatttaagaattttgagaaagtcacctaccagctaatgcaaaaacacagcctaattctgtgtgaatccctgttgagatcagcttttcaggtcagggagggaaggtatggggtttagggtaccctctcctatcacacacatcccccctgcccacagtaccctgacctaccttgcctgagactcctagacactatgagctcccttctggctgccactcagactggccaggaaggctcccagattgaacacaggtgacctggtatagatacacactgtactgtgggccagaaccatggactacattttaagccatgttgtgggcccttcctgcctacagaaaaggacacttgagtggagtcacacttgggttgcctaatttattaccttaactagaaacattctaagtatgggagcctgttctggaggatagcttctaaaccaaatctaaaactatctttgcacacaagtgttgtgaagaggtaagcaggggatcagagctccatcttctgtgaccacttctccagggactgccacctatagggctcaggttggtaccaacagccctgcatagtagagtcactgtcaatcatcttcccacttgtaagcaggaagacaaaaagtctcatgaaatagaaacgaaaacactgaaggcatggcct

SEQ ID NO: 3723 - DNA, 449 bp, Homo sapiens
gtttggggataaacctgccaccctgtgatttgagactctcgataccaggacttattgatacatttttgaatgtcattggcttacatgcctaaacctgaagagaacaatgcatgcacattggaactttgtacacaaacagaaaaatataaatgactttgaattaccatcccaagcattgctaacgtagatgtgccattgacgaaagtctcatgtgttcttgagtgaacaaatttccttttcttcctttttggctcaagcacaataatgctgtcactgagacagtgactgagcactcaatgtccaagactaaatcacatcaccacgactaagtaggcactatgtcctgggatgagtcttttaaactctggccatcaggttccttacttgttaaataagtaggttggcctaaaaggtttctaagacctctcatgatctaggtaaaatccagg

SEQ ID NO: 3724 - DNA, 649 bp, Homo sapiens
ttttttttttttaatcagcagcaagcagaatgttaattaatagtctaagatgatctgagagttaattaatagactaagattatctgtggtctatttattgaccacaccttataaacaggataggtttttcctattttgagactttacatgtctcagtactttctaaattgaaatcagagcattaaatcaagggaattgatgtggacaaaacagctgccagcatgatagtgtttgtgaattatgtacctctcttagacataaactcttagacataaactcataaaatctgttcagaacactgaacagatttagatttaccatagccaataaaatttggatttagtgggttagtctcagcatttcatggaatcctgagatgcccaaatctctggaaacttcctatttcctgttttactatctttttccttttatcaaaatgggtgccatgagggtcccagaccaaaactcaccatcctgaaaaacaaaagtctggggagagaactcctgttttattttcagatgatatatttgctaatcatagaataagttcagatcataattataaataggatttctctgaagcaatcaatctgtatttttaaagcttctccttcagacctccagtatctagtcatcgaagtaacttggg

SEQ ID NO: 3725 - DNA, 768 bp, Homo sapiens
  misc_feature (1)...(768): n = a,t,c or g
ggattttgctctgctgtctccatggaaaagtcaggtctctctgctccctggtgtgtaagtggacatattcagcagagaaaggctgggacgacagtttctggaaaatgattggtttggaagactttgttgcagataattacagcaaaataggaaaccaagtgctacctcctggagcttctcttggaaatgggctcacaccagaggcagcaagagaccttggccttctccctgggattgcggtcgcagcttcactcattgatgcccatgcaggaggactaggagtgattggggcagatgtgagagggcacggccttcatctgtgaggggcagccagtgacgtcacggctggctgtcatctgtggaacgtcttcttgtcacatggggatcagcaaagacccgatttttgtaccaggcgtctgggggccttatttctcagccatggtacctggggttctggctgaatgaaggtggtcagagcgttactggaaaattgatagaccacatggtacaaggccatgctgcttttccagaactacaagtaaaggccacagccaggatgccagagtatatattgcatatttgaacagtcacctgggatcttgattaaggaagggttcagcctgtggggttttcctttactgtttgattttacatgtttgggccagatttccctgggcaaccngttttccctttaggcagatcttgnacattaaaggggcatnggtcacccgntttgaaantgttttcagggaccttggttgatctttg

SEQ ID NO: 3726 - DNA, 517 bp, Homo sapiens
gatgggtggaggccaaatagatcaatacagaattgaagaagacacagagcacttgtatttcccttcaggcatagcgcgctggctaggactccagtaccgtgaagggaggcagtgagagcagacatctgtgcctcattcctgatctcaaggggaaagcaagaacaagggaggcttcctcaggatctcgaacctgcggaaggaggaccagtctgtgtacttctgccaagtccagctggacatacagatcagggaggctgtcgtggcagtccatcaaggggacccacctcaccatcacccaggccctcaggcagcccctccacagggcccctctcctgcctggacagctctgctgggtctccccgtcccctggagaagaacaaggccatgggtcgggcccctgctgctgcccctgctgctcctgctgcagccgccagcatttctgcagcctgggtggctccacaggatctggtccaagctacctttatggggtcactcaaccaaaacacctctcagcctc

SEQ ID NO: 3727 - DNA, 213 bp, Homo sapiens
ggtcgactgcagacacaccttctgcaaaggcttgtagttaaataaggcagcacgtggaatggacagactggagacagtccttacctcatgtggaacctaggacaggtaaggccctgtcctccaccccagagctcactttgtcttagagcagctgaccagcagtggaagacatttgctcagcgatatattagttatggctacaaaagcccaaga

SEQ ID NO: 3728 - DNA, 358 bp, Homo sapiens
gagcttatgttcagtggaattttataggaattatttgaggtctggatagaagaatattccaccaaagagaatataattttaatccttctaagtgatttatctctgttgactaataaccgctttaaataattggcttgaggtttttttggatatcagaggaagtaagtctttttattctacctagcatctagtttttgatagacaagtttccttattatacccctcttctggttggtttgggcttctcattgttgctattgttgttcacttttcactgaagatataagggctttctgggtttatgtgtagggtctcctctcaggcctctggcatgttgggggcagtctcttttgtcctc

SEQ ID NO: 3729 - DNA, 434 bp, Homo sapiens
  misc_feature (1)...(434): n = a,t,c or g
tgaccaccatacccggccaaaattagtcttcaaaacatatttcatgctctgtccagtcaagttagtgtttatcaatacaggtatctggacaaactctgaatttattaggtccattatctcagtttcaaaggagggaaatggaacaaaagaattaaaaaatatacagctctgagaacaggcccttgggggtgtaaaaagcctctaaaggtatctaattntatgtttctgacataaagggtgagaacaaagtaaaaggcgaccttntaagaaaatagcaacaaggagaacattcatgacaacacttcaagaactctaggttgtggctcattttgtaggcaacatccatagctgatgcactagaaataaaatatttactgggatgctcttttntaggatttgtgacaggtatgtaatgagacagccatgccatatcc

SEQ ID NO: 3730 - DNA, 463 bp, Homo sapiens
cgtttcttggacactgtgctttcccgtttgtaactcaggtttgatcaggcagttggtgaagaccgtccctctatgggtgtccctagtagtgtggggacatgttccctactcagcgcatcctgtctgtgcctggagatccctaagtggggcctagtgtgggttgaatctaagtagttaacagggttgcgcatttgcaggggcagcatctttccagtgagtgatgtgttaaattcccatgtctttgtgcagtgaagcaggactaagaatggatttctggactttttggaagtttacccctttctgaattgcttctgtaagtggcagtgccatttaggatgtactgcataagtttttggctgggattttaggactgaaatacatgtaggtggccatcaaatcagggtttcattgtatcacattaaataaacatgataagttagccaggtgtagtgactactggggc

SEQ ID NO: 3731 - DNA, 470 bp, Homo sapiens
ggcttctggcttctgtttattgcggctgacacgacacctgcgacacccgcggtccttccacccagaccctcgaccccagaggcagccaggccggcaggccaaggcgtgcccaggcccaggccaccctcaccacgtgcttctctgagagcgcggagcccaggcgcgtcttctgctcccggggtcccgggcggggtgggccctgtgccccaccttcacccctaaggccggtccagcagggcgtggacgacagcagcgatgtaggggaggccccttcccggggcccctcctcttccaggatgtggtggggctggcacagtgactcctcaggcacccccatttttcgacaggcttctagaaaactctccacattcttccgagccttgagggcactgagttttggcacagcaggggagggcacatggatgaagggcacggagcgcggccgtagctggttggccagctggcacagc

SEQ ID NO: 3732 - DNA, 482 bp, Homo sapiens
ggagttgattttggaagccaccagcgttccagacatttgcgataagtttaagcagataaccaaagggagtttcgtgatggagtgtcacacgtttatgcagaaaatattttcagaacctggaagcttatccatggccaccgtcgccaagctccgcgagagctgcagggcccggctgctggcacaggggtgagcgtgcctgtcccctgcgttgctcgtctctacactgacgatgcccctttccagagttgacactggaccaactttcactgctttcctttttagtgttgtaaatacttgacatcactacactttagttgtgaattttttaaaagagcagtttaaaatcaggtcattctaccagcttttgatgattagctatgaagtcatactttttaaagaaaacttatttttacctgagagatcaataatatataaaatgttgagtgtgggtttgtatctaataaagtatgccaacacctgta

SEQ ID NO: 3733 - DNA, 443 bp, Homo sapiens
tggtctcttccattttcagttccattttcatgcacagtagggtgaattttcaacttaaaaagacaagtaacaaaaacctggcccgggcaccaccactgggtgcccttgtgcccatccactgaccccaacaagctcaaaaacctttcttgtcacagtgtagccaccatcaaatattagaagttgacccacaagatgaaacttgtttatcctccctttaaaagggtggtcccaaccttagtaatattagggtcaaagccatgtcaattacaaaccaccttcatagtatcaggagagacaccacaaaatatgaagcgcaggacgtcgtatgtaactcatgaggcacaagaaaatcagaatagaggccagaagctcacacatttccagggacaagtcccagaagcaaaacataaaagagctggcttaggctgaaaaccaatggctct

SEQ ID NO: 3734 - DNA, 549 bp, Homo sapiens
  misc_feature (1)...(549): n = a,t,c or g
gcggcacgaggcgtttcctctgcagccggttcccgcagggcgcacagctgcggggcgcgctgcggacgctgagcctcctggccgcgcagggcctgtgggcgcagatgtccgtgcttcaccgagaggatctggaaaggctcggggtgcaggagtccgacctccgtctgttcctggacggagacatcctccgccaggacagagtctccaaaggctgctactccttcatccacctcagcttccancagtttctcactgccctgttctacaccctggagaaggaggaggaagangatacggacggccacacctgggacattggggacgtacanaatctgctttccggagtataaagactcatgaaccccgacntgatccaagcatgctactactcctttggcntcgctaacgatatgaganccaaggagttggangccacttttggctgccggatgtcaccngacatcaaacaggaattgctgcgatgcnacataaattgtagggtggnattcaanggtgacagacctgangagctcctcnntgtctgtagat

SEQ ID NO: 3735 - DNA, 865 bp, Homo sapiens
gctccgcctcaccgtcccccagccaccacattgtatagcaaaagcattacattcaatcctagaacaaaggtaaatacaacaaatcatctttgcagctggacaactaataatactttgcagcattaagagatcttctgtgttaccagtcactctgttgaaatgaactttccgaatctctttattcaggaaaacatggggttttgaaattcttgggccaagagacataactgaggggttcgcagagctaggcaagggtgcactaggaaagggccacattggtgggtggggggtaacagagaacagatggtgtcaggaagtttctctggagtaaataatgtggatattcttggtttccctctcctccgccagctgaagctgtgttagtgctgttgacactaatataaaatgtttggtccatttgaaatccttgtcattgccttatatgggggaaactcaatcccccagcctgtgttggaaatatcaccaaactgattgtaaatgtgcggctgtacagacattttagtgtggtggtgtgcaccatttggccctacacctgcagcctggctactacagttgttggtccgattttcgccatcttggtggctacttgtgcatttcacatgcacagagtgcgtcgagaagatcgtcttacttgaccttcaggagtgtgcaatccgcatgctgctactgatcaaaattggaaggagtcatttaatgcggggaatgctcctaccgaccctgaaagggcgggatcactcatatgggggagaaacctggcgctttataccgcctgcagccggggcagcatcttccgctttaaacaattataagagctttcgataactgtggcccgtcgccggaacgg

SEQ ID NO: 3736 - DNA, 172 bp, Homo sapiens
gtcgactcagtactgtgctccctagagtaggcacggcatcagtttcaaacttcaacattattttccagatttggaggctcaaaatatttgagcaagttaagttaagaaatagcctttttctgattattaggcctttcatatacaactcaaaattagtttaagagtaaagcat

SEQ ID NO: 3737 - DNA, 906 bp, Homo sapiens
  misc_feature (1)...(906): n = a,t,c or g
gcttagactcttgcgagagcctgcaccccatatcaggtggggtcaatagataaatacccctgcctccttgccccttagttctggtgtggtgggcaagtcagaggaactgttcttctcacactttcacgtgctctcggtggagatctggttcaaaggcagaggtctgggctggggtctgtgattgtgcatctccaaccagctcctgggggattggctcttgccgatggtccacgggccacactgaggagcgaggcgtcatagctgcccagaggttcccggtggaactgaagccctggttgccggccatagaaaccttctccctaacctgaaccagctccttctcaagttcccggtctcaacctcccttcctgggactgcattccgaataaaccacttccacttggatcctgtttggggatccaacctcaggtgacgctcccgcactccacctatcagccgatggctcgagcaagtcacttggcctctctgagcctcagtttccttaatcttcaaatggagatggtaaccaggatgtgcagaagatggcatgaatgaacacgcgcaaggaaccggaaatgcctagcaccagcgccgatgtttgcccagctgtgcctgttaggaaaagcaaggctgatccgcgttgcccacagggttgctgcagtgttgggctctcagtgaaccggacgcttcatcaaaggctggggttgctctgtaggtgggggtgggtgcctctttggagcaaatccagagtgaggatttatgttgaacccaaaacgtcactcccctantcttattttttgtctgttcttctttaagtacgtcctgggggaatggttcctaatgtctgcagtttacttttcatttatttttaatgccaaagccaagcatactgaatnaaaccaacaa

SEQ ID NO: 3738 - DNA, 152 bp, Homo sapiens
ggattttcatcggacacttggctgtgatgatgagttaatgtatgggggagtttcttcttatgaaggttccatggctctcaacgctagacctcagagcccacgagaagggcatatgatggatgcctttgtatgcccaagtcaagaagccgcgg

SEQ ID NO: 3739 - DNA, 82 bp, Homo sapiens
taaaagccctctttaaaaaaaaaacattacaaatattttactcatatatctttaaagttaaagactaagggctgggtgtggg

SEQ ID NO: 3740 - DNA, 392 bp, Homo sapiens
ccggcatcgcgccagccacgcgcagccgggccacgccccaggccctgctcctcgatgccctctgcctgctcctggacattcttgcgcccaagctccgccccgtgagcacacagctgtacagcacccgtgaaaagcaacagctggccagcctggtgggcacgatgcttgcttacagcctgacctaccgccaggagcgcacgcccgatggccagtacatctacaggctggagccgaacgtggaggaactctgccgcttccctgagctgcctgcccgcaagcccctcacctaccagacgaagcagctcatcgcccgcgagatcgaggtggagaagatgcggcgggcggagcttctgccgggtagagaacagcccccaggtggatgggagccccca

SEQ ID NO: 3741 - DNA, 983 bp, Homo sapiens
ttttttttttttttttcaacagagacaggtttattttgggaataaacctgagaggggcttctggccgatttcggtcagggacattctcttacagactaagggcatttaagggtttaggaagggggagcctaccgcaggctgcgaatgtttctgtgtgaaggagagttttattgcagagttggaatatctctggctggaggggaggttattctcaggattggcatgtttctggtcagatgggggtttatctcatggttgaaatgtttctgctcatactgacatgagccattaggctgatgttttgggctggtttttaatcacggagaacttaaaatggccatgtttgtccaagatggcaatgctcctgctgtcacacccacccacccacagggtactggggtcgctgcagaacctggccgccttcgcagacacgttccactgtgcccggggcacccccatgcaccccaagggagcgatgccgcgtgtggtagccaaggccgctccgcgctgtgcggcccacgcccacccgctgctcggaggcatctgtgcgaaggtgcagctagcggcgacccagtgtacgtcccgccccggccaaccatgccaagcctgcctgccaggcctctgcgccctggccctagggtgcagccacctgcctgacacccagggatgagcagtgtccagtgccagtacctggaccggagccccctccacagacacccgccggggctcagtgcccccgtcacagctctgtagagacaatcaactgtgtcctgcccaccctccaaggtgcattgtcttccagtatctacagcttcagacttgagctaagtaaatgcttcaaagaaatcagaggccttgcttgtctgggagggaccagggtgggtaaacaggtagcagtggtcttgggcaaaacactgcgcgggggtgggagagagtgacagctgggagctgatggggagggagccagttccagtcaggtctcc

SEQ ID NO: 3742 - DNA, 423 bp, Homo sapiens
  misc_feature (1)...(423): n = a,t,c or g
agcacttggggaaggcccaagggtcggggggatccccttgagccccccggagtcgacaccagcctggggcaacacagggagaccctcatccttaaaaaaagatggcaccttattgcagtgtcctcacgtggcaaaagggcactcatctcattcatgacacaagagccctcgtgaccttcaccttccttaaagggccccaacctcttaatacccatcacactgggtatttaggttccccatatatgaattgtggggggatattaacatttanaccatagcacctactcatgaaagaacattaataattaacacctctagtgagtatttgtgagtctaggatttacagaacataaggatattgtacaaattttaaaagccaaaatgagttttagtattactaaacaacaactgttcagnatattt

SEQ ID NO: 3743 - DNA, 288 bp, Homo sapiens
  misc_feature (1)...(288): n = a,t,c or g
tccccattttctttaaaaggcctgaacatttccttcctcgtgtcagtcctgaacaattcacattttcagggctctgctcacaggcctgtgacttagcctgcctgcctatgaaaccattaggcaaattgggaaatacctcttggcaccagtcaggaagggggattggtttctcttatatggcacatacattggggtctactggcacaaatttacaggggctccaagtgtctttatggaggaggcaggganttgggggctggaccatgttntcttctggccccttcaccc

SEQ ID NO: 3744 - DNA, 278 bp, Homo sapiens
atgccacttgcatgggagccctgaaggctgtcaaagtccatttagggccaagtcccaagcctgcccgggggccctgcggtgaacactggtcaagctctctccggctgggatgatcacaccctctgcttcctggccacctgccagcctccatgcaactctgtctgtctgctgcccatctgctgtctgtgcaagcaacttctggaccctggcaccctgggctgctggcctggaggagttcgggaaggaggatagaccaggaaataaagggtcaacagaaa

SEQ ID NO: 3745 - DNA, 2244 bp, Homo sapiens
  misc_feature (1)...(2244): n = a,t,c or g
ggagaaaggaaaggagagcgtgggatagtaaaagagaagacgcggagaagaggagaggacctacaagaacggaggacaggggccgcacgatggtcccggggggagcggaaacaaaggcacgcaaaacggaaaagcgtgtgtaggggagcggaaaaggaagtcaccaccgtggcctgcgacgaaatggcgaaaagtcttttgaagacagcctctctgtctggaaggacaaaattgctacatcaaacaggattgtcactttatagtacatcccatggattttatgaggaagaagtgaaaaaaacacttcagcagtttcctggtggatccattgaccttcagaaggaagacaatggcattggcattcttactctgaacaatccaagtagaatgaatgcccttttcaggtgttatgatgctacaacttctggaaaaagtaattgaattggaaaattggacagaggggaaaggcctcattgtccgtggggcaaaaaatactttctcttcaggatctgatctggaatgctgtgaaatcactaggaactccagaggatggaatggccgtatgcatgttcatgcaaaacaccttaacaagatttatgagacttcctttaataagtgttgcgctggttcaaggttgggcattgggtggaggagcagaatttactacagcatgtgatttcaggttaatgactccagagagtaagatcagattcgtccacaaagagatgggcataataccaagctgggggtggcaccacccggctagttgaaataatcggaagtagacaagctctcaaagtgttgagtggggcccttaaactggattcaaaaaatgctctaaacataggaatggttgaagaggtcttgcagtcttcagatgaaactaaatctctagaagaggcacaagaatggctaaagcaattcatccaagggccaccggaagtaattagagctttgaaaaaatctgtttgttcaggcagagagctatatttggaggaagcattacagaacgaaagagatcttttaggaacagtttggggtgggcctgcaaatttagaggctattgcctaagaaaggaaaatttaataaataattggtttttcgtgtggatgtactccaagtaaagctccagtgactaatatgtataaatgttaaatgatattaaatatgaacatcagaattactttgaaggctactattaatatgcagacttacttttaatcatttgaatatctgaactcatttacctcatttcttgccaattactcacttgggtatttactgcgtaatctggaacatttagctaaaatatacacttttggcttaaaaattattgctgtcaattccaataataattcttagcttataaccaaagagcagtgtttaaaaggagagcttctatacaaaacctattcctggcgttacttttcatacaatttttgttctgttttacctggaaataatttaccaaaataactgagtgttgctgctaaagaacaaaagtggggaggtatcagggaacaagaaaacaagaaagggtatgatcaatcattttcttctgctccaaacagctggagtaaaattcatgggaaatggcccttcatttaaaaaaagatgtacctcactacccactacaaatttggaactttgttcttttcaataattagttttctattgtaaattacctactaaacagtggtagccatgacatggaaagtcaactgattctacaattggacattcatttgtgtgccctggaatttccaactagtaataaacaactactgttgatgtagttttaaaccacttgaagggactcatgaagcatcctgcaacataaatttgcatttttacatcagatttcttttttttcctgaaaaacaactaaccttctaacaactatctttcaaaagtaaatgtaataaaaatgcacaaccataaaatgtttatgatcccagcaatacactttttaaaaaatgtgaaagtccaagaattaagttctagttctgactcatcacaagaggtcaaaagtatttgctactgtaacattcaattcacatttgagaatcatggtaaaaataacttgtatttgccttaccatcatgntcctactgttgagttaggaaaatatggttagacagactcacattactttttttcagaggtaaactctagattactgtgtcaacccaatactatttggccatagatgtaaaaactaccaaataaaagtggattttgtgg

SEQ ID NO: 3746 - DNA, 858 bp, Homo sapiens
attcggaacaggatggcgacgcttcggccctgcgcggacgggccctgctgctcgcatcccagcgcggtgctcggcgtacagcagacgctggaggagatggacttcgagaggggaatctggtcggcagccctgaatggagacctgggccgagtgaagcatttaatccagaaggccgaggacccaagtcagcccgactcggccggctacactgcgctgcactatgccagccgcaatgggcactacgctgtgtgccagttcctgctggaaagcggacgtaagtgtgatgcccagacccacgggggtgccactgctctgcaccgagccagctactgcgggcacactgaaatcgcgcggctcctgctatcacatgggtccaaccccagggtggtggatgacgacggcatgaccagtctgcataaggctgctgagaggggtcacggggacatctgctccctcctcctgcaacacagcccagccctgaaggccatccgggaccgaaaggcacggctagcatgtgacctgctgccttgcaacagtgacctgcgggacctgctatccagctgagccgccaccctatctccagctgcctttaaagggtacacagaccagttctccaagcccctgccttggtcagcatccatgctgctgggcagggaactgaggccagaccacccaggaagagccccagtctggtcactgtggaagcgagggagtagatttggtgtggctaaaagtgtttaagactggacagatgatcatattctaaattagttcatatgagacatctatttatttggaaaaaaataaagttatatccttacctcatcccacacccaaagataaattgcaagattaaag

SEQ ID NO: 3747 - DNA, 926 bp, Homo sapiens
tccggtcaatggaacgggttatgtacgtcatgttgataatccaaatggagacggaagacgtgtgaaatgtattacattacgttaaagaacgggatgccaagccctgcctgatgtggctctgggaattcctgcagagaagagcaggggtggccaggagatagtgagcagctcccaggagctagtgacacctggtgattcggctgtgtatatctcctaggaggcatggagggatccagaacctggactgaagaaccacctagaaataactcagcagaattctgaaaatgaggtcacgctggattttccaatccataggcccaaagtgaactcccacgtggagtaggatgaaaacccacagcatctagatcttcaaattctggagaaaaagagagtgtgaaagactgctcagtggctggggtgagagtcaagtctggccaggtgctaatctggagaaaagccaagacctggagcgagctggagtggcaggccctggaggatgagaaggtggcaggagtgcactggggatacaaagaaaccaagattttctgggaattctcagaggcctggatccacgaaaaactccgcacctgccatcgaaaccaccaggtgtaccggattatggctgagcagctgtgagaacatggcttcctgtggaccctggagcaatgttgctatcggttcaaaaacctcctgaccgactactgcaaagccaggagcacctacacaccaggcaccagtgtcttctatgatgagatggatgccctgttgagtcttggggcactttctaacacctttgatgccttagaggtggtaggaggccttctttgggattgagaggattccaaagggaaccagggcatagcactagaagatgtggcgggatggtaatgaaatagtggaggagtctcaagaggaatcctggaggc

SEQ ID NO: 3748 - DNA, 996 bp, Homo sapiens
aggttttagaccgaaaagatgggtccttcatagtaagatacagaatgtatgcaagctacaaaaatctgaaggtggaagttaaattccaagggcaacatgtggccaaatccccatatattttaaaagggccggtttaccatgagaactgtgactgtcctctgcaagatagtgcagcctggctacgggagatgaactgccctgaaaccattgctcagattcagagagatctggcacatttccctgctgtggatccagaaaagattgcagtagaaatcccaaaaagatttggacagaggcagagctaatgtcactacaccttaaaggataacaaggtttatatcaagactcatggtgaacatgtaggttttagaattttcatggatgccatactactttctttgactagaaaggtgaagatgccagatgtggagctctttgttaatttgggagactggcctttggaaaaaaagaaatccaattcaaacatccatccgatcttttcctgggtgtggcctccacagattccaaggatatcgtgatgcctacgtacgatttgactgattctgttctggaaaccatgggccgggtaagtctggatatgatgtccgtgcaagctaacacgggtcctccctgggaaagcaaaaattccactgccagtctggagagggcgagacagccgcaaagagagactcgagctggttaaactcagtagagaacacccagaactcatagacgctgctttcaccaactttttcttctttaaacacgatgaaaacctgtatggtcccattgtgaacatatctcattttgtgatttcttcaagcataagtatccaataaatatcgatggcactgtagcagcttatcgcctgccatatttgctagttggtgacagtgttgtgctgaagcaggattccatctactatgaacatttttacaatgagctgcagccctggaaacactacattccagttaagagcaacctgagcgatctgct

SEQ ID NO: 3749 - DNA, 652 bp, Homo sapiens
ggaagagatcacactgtactgaaacctacattattttccaaaatctctggatctgcttctgtcttgcaggcagagagctcatccagtagcccttagctcttcccagccccctcctttgatttgtgggtgccactgcggcagctgctgagtctcagtggtttctagtcttcaccaagttctgcccacccagatggtttttacctgtcctcaccagaaacctgcactgtctagattgctgaggctgcttctccttaaccgatctgctatctgtattccaggggcaccccagggttagaggtaaatggcacaggccttgaaatctccaactgctctgactccaggttggtgcacttcaatgccaagtactaaccacacaattacaggatgccaccaaaaccttgatatggggctgctgcatcctaattaaaaaaaaagttaatagacattaatttttagaacagttcctaggttacagaaactttagtggatatacaagagttctcctaggctcccctgtcctccaagcacacaattttccctactagtatgttgtaattagtgtggtccattcattacaaattgatgaaccactggttgatacgtcattaatcaacctaaaagtccataggtttacattaggggggccattcct

SEQ ID NO: 3750 - DNA, 904 bp, Homo sapiens
  misc_feature (1)...(904): n = a,t,c or g
agactgcatagggctcggcgtgggtctggagaaccggtatgggggagaggagctctcttcaatgatcggaggaatccgctcgttactgaaataccggcaaagggcatcctcccctttcctgccatgacctcgaggtctggcaaaagggtccacaatccccatccagttcccatcagcaggcatggacaaaggccgtggcttgccataagatggtgttttctctctcatttttgtgggcagaatgttggtttccaccgagtacccaggcaactgatccgagtctgcaatggtgaatcttcgtctccggctttcctggtccaagaaggaattcggggactctgaacccttaggaccaggcaatggttgtttgcacttactggaccctccataaacaaaactgccattctcatcccggggagagtagggaacagcaggcggaggaggaatataaagatccaggatggctgacttctccttcttcagtgaggtatccatagtgctttcaggggactgggttgtcgcgggtggaggtgaggtctgtacaagaggtggcttccaccgtaagttttttcaggggagcaggagtaaagttgaaagacccggtggggcgcttcttaagcagtaacacaactccggtggggattctctctcaatttcttcaccagatttttcagctgccatcccacagtttgctgattaacttgaaatgcttcgtcaccagcatgaatcttctgagatctgtctgcaggagaattttctgtggttccagtaatcacgtgtaacccatcataggttgatttgatgtacatgcccaggccttccccaggtttaatgtttggtaagtgaacttcctccanacatgcanactggctcatcacaggatctgtggtagatcggattgttt

SEQ ID NO: 3751 - DNA, 589 bp, Homo sapiens
  misc_feature (1)...(589): n = a,t,c or g
ttccaagtttaaggttttcttaattagaaggcctgagagaagatgagtgaggacaaatccgagtttccctgtgtgtggctggccatggttggcggtcgcagcatcacagcgttggccggctgctgcttagctttattttacttgtgatttttctttgttatgcaccgaacagattcccctctctggtattcagtggggagcatatagccggaggatagcaattagctatagctaggcctgctcctctttgcacagctcaagatgacgtgtacaattactttgggcaccttcaccagctctttcagaccttttccatggcatggatggggaagacaggtccattctctggaggagtccctcactccctccccctcccaaattcccccttacctggatgaaatcctgatgtaaatggaccttgcctgcaaatagaactgaagggacctgttacgtcatcaggcctggcagagctcattggcagagaantaagagtttattttagaccagagaccangctgtgcanatcagctanaacagtctcttctggtcacctcagtgctggtccctgctgtggttactggggcccaaa

SEQ ID NO: 3752 - DNA, 367 bp, Homo sapiens
  misc_feature (1)...(367): n = a,t,c or g
gggcatgttaacatttatgagcctgttacgtttcttacatgtgtatactcatttaattctcactactattctttattattcccatttaaacagatgaggtaacttgaggttcagagagcttcaattatttgcccagagtcacagttatttgtaaaactggggctgggagtccagggtcttctgattcttaatccagggggtttcattgcctcataatagtaacagtgggatgtctcttcgctttcacttcaaatgctcttttggataaaatatggatttgcttcttgggagcttgttaaataaccccttattttcacagttcccngctggatactggggacaccngtctggacactttaaggacact

SEQ ID NO: 3753 - DNA, 457 bp, Homo sapiens
gcatataggaaagggagatcatcaagaaaactgaagtgtactgtataaacactcttacagatatttttctccagcattgataatcaaacactagataaggatactaaattattcttcccccacttctgccctttctgaaaaacacaaggatctcccctgaaatcagaaatgactccacacaaatgagagatttttacgtatgtggtcccactatcaaaattataggaagcagttaatggggctttgagaaaagcatagtcccatgtacagtaatatgcatctaaatagagttttctttcgcctgtcaattattttcacaagattagcattaaaaaatacaagcaaacatatgacccttaagcttcacacacaaaaaattggtctttgttcattctcagatgacaggatgtcccaagagtaacaaaagatgggagccaatcctctcatagctgtttct

SEQ ID NO: 3754 - DNA, 302 bp, Homo sapiens
cggccaccagctacagctctgagttcagcaagcggctgctaagcacctatatctgtaaagtgctgggcaacctgcagttgaacttgctgagcaagtccaaggtgtacgaggacccagctctgagcgccatcttcctgcacaacaactacaattacatcctcaagtccctggagaagtctgaactgatccagctggtggcagtgacacaagaagactgctgagcgctcctaccgggagcacattgagcagcagatccagacctaccagcgcagctggttaaaggtgactgattacatcccaga

SEQ ID NO: 3755 - DNA, 1180 bp, Homo sapiens
gctgcctgggtatccacgggacaaaaacagcaaactccctcagactttgtccatgtataaacttgaagtggttgtgttgtagggttgcaggttttttgttacgctgctgtcactttctgtccaggagctggcaccccaggtgttctgagaccttgagggacccagacctttgggtccaagagtttcccaaacagccacgcctctcaggaacccacctggcggttccgtgagctcaggcaggcctgacccggcggcacagcctggcagggaccttcgtccccaagcctggcagaatgagaggggttgaggtcccgagcgccactcctagccttgccgccttcaatagagaagaaatccctttgctagatagggtcccccaggcagtccccagtggcgggacacaggggtccggctgtggagctcccctgccagcccctggagctccaggagggcctgttggtcccctgttcagaatggagtgcagcccgccagcggaaagtgttcattctgcataggtgtgaggctttatctgcacacaggacatgaaaaccagcagaaaggccctgagctgctgcatagccccatctgatttctgcagttcccgccagcctccaacacggggactctgccgtaactggaatcttcataggtcatattgaaatcttcaaggtgaccatgccccaccgggtgactggggcagtagtcatggcagactcccggcctgggcccccaggattctaggacccccaggcagccccttggactggtcccgggtgccttccaagcacagtctccatgctcccagattctcgaccttcccccggcccgggaggtgcagcctgcgtctgcctctgtcgtgtgtgctgatttgagtggcttagcttgccacagcgcaacctcttctgtccctttcagtcatttgctgtacttccctgtggcacgttaccatggaagccgctccagggtgggtcagggtgcaagctgctggtgaggtttggaagcatcaggctcacgggtgttcatgtgtgttcgtgcgtgtgtgtgcgtacgtgtatataactgaagtgtctgtacggaatgccctttgctagccatgggctggtcaccagattgttttgtaatgcccgccccttgcctcgatattgccagtttcttgtgcaataaactatcagcagctaaa

SEQ ID NO: 3756 - DNA, 994 bp, Homo sapiens
gcgtcacccctgggcaagcctagcatcagtccattgacacctacagtcaccatgatagacgttctcccagaccaacagcttcctttggctcgaggcgggtcttacgtggagggcctatgggaactacgtcggctcagccaatagggtcagggcagggggcgtggcgggaagtttgaaactggtaacttcgggagttgagccacgagctgttgtgcatccagaggtggaattggggcccggcattccctcctcgtcccgggctggcccttgcccccaccctgcaactcctggttgagatgggctcagccaagagcgtcccagtcacaccagcgcggcctccgccgcacaacaagcatctggctcgagtggcggacccccgttcacctagtgctggcatcctgcgcactcccatccaggtggagagctctccacagccaggcctaccagcaggggagcaactggagggtcttaaacatgcccaggactcagatccccgctctcctactcttggtattgcacggacacctatgaagaccagcagtggagaccccccaagcccactggtgaaaacagctgagtgaagtatttgaaacttgaagactctaaatcaaatcttcccccagagcctgttctgcccccagaggcacctttatcttctgaattggacttgcctctgggtacccagttatctgttgaggaacagatgccaccttggaaccagactgagttcccctccaaacaggtgttttccaagggggaagcaagacagcccacagaaacccctgtggcccagccagagctccgacaagccctcaagggaccctgagactcccagatcttcaggttctatgcgcaatagatggaaccaaacagcagcaggtactagggagatccccctcacccatcctgcaggatgacaactccctggcaccctgacactacgacaggtaggggcttcaccctaagtaaaatgttagtaactaaggaggggcat

SEQ ID NO: 3757 - DNA, 857 bp, Homo sapiens
tttttttttttttttttagacttcataacaaaaaacatttattaagtagccacaatctaacaagccctgctcacctgcctcttctccttcctgtctgggagggggctccttggtgtgcagagccacaaggtgggggtccaagttggggagctcccagttcttccccataggccttgctgtcagtcagccatgggtcccttttggtaccagagacttgtgaccctggactcgaacctcttctgcccaagcactcgcctgctggcaactctgggctggagagctttggccccagcttctggccccacagccccctgaggtccatgcagccctgtgccagccaggcctacttgagcacgagcatggcctctgtgccatccttggcggtcaagtagaggccatgtgtgaggtagtactcccgccgcaggaaggcatagaagtaatcagagatgagcaggatctgcccaacgttgaaggtcagtgtgatggcataaaagaaattagagttggcacttcctgcataaatccagaggtgccacaggacagggaagagcagggaacagacgatgatgatgcaggtgaggacaaagatgtttctcaggaatctgtagagatggttccacacggggaagaaggccatgtagagcgccacgtcccccactgtcgggtaggacttaaagatggcgatgacagcgatctggataaacatgaagaagatggggtgctcctttagctttatggctaaggggatggtgtagaagaagacgttgatctgaaacacacatacaaagaagaggctgaagtgctcaaacatctctgcaaagaagtaccagaaaatgaccaatgtttggagtgagatc

SEQ ID NO: 3758 - DNA, 418 bp, Homo sapiens
attcggcacaggcataaatgtgcaaactgcagaatttgcacagtcagctttggggacacagttgcaaattgcattgcattctactcagggctctggccttagagacaaaaagagctcaaactcaaacagtccaagcatagcacagatccaatagcagcccaagaagggtcctcaacccttatccttctttctggagtgctacaggcagacccagtattgtagatacatagagcaacaaaaagggatttccaggaagcaccatcctgctcagttcaaggttggatagaggtttccagaggctccttagtggttttcagggatggtctctctggtcacatccaccctccttgggaacgtttgctgccttccgggccttccacagacagggttattgaagctcatggtgctagctctctcc

SEQ ID NO: 3759 - DNA, 421 bp, Homo sapiens
  misc_feature (1)...(421): n = a,t,c or g
gcttttgatgaccaaatctctatcaaagacccctgttattataaaagagatattggggctttcacacaagttttgtttagttcacacagagtttgaaatagttttaaaattttactacaccaaatacactaaaatatttgagaattttagatttaaaaaatctaaatttctggatatgggggccggggaggcaaccctgtgtcctcaatcccacatgggtccaatgggccagagctagatggcaggcccctagctaggaggtatttctggttttcacccagaaggcttcacacattacttgcctggccatgtagatggtagtgtttgccacccttggactagttctaaggcttctccctccttctttccagttttcaaatgtacctctccttttccagagctctctggctgntttttttga

SEQ ID NO: 3760 - DNA, 1222 bp, Homo sapiens
tggtcgctgagaatatttattcaaaaacagggattgaaaaaactgtacagagtgtctgctgctgagaactgggcccctgccccatgccactcccccagctacctggcagtgccccctctttggggtgccccctgacaagcccagccagttcattccagtcaaaagggtatcagtggaagcagcaagaaatctgcaggtggtggggagagaagcctgggccccagctacccaacgggccctcctccctgactcccacaaggatgcagtaggccaggaagccctaagggatggggagtgcgtgagtgacacccgccatggtgggggcactagggagtctcctggctgctccctgtatccaagcacagagctgaggaggtagggccccctgccctggggctgccgcagctcagacccctgggccagaaactgcccccactctgagagaaagaactcccatagatggaggcagggtagggggtgcatccatgcgtctgggcgttagcggcgtttgggaccccaagggtggaagtctccttgggcgggtagggtgcagaggcagccccctgcttggtggtcctgcctgcccctgcctgtacctcagctggcctcagtagggggagaatttctgccgctcagccttcttgctcccattagctgctgccatcttggcagtgtaggccgccaagcccggcggcggcccaggcagtgatgaggtactgggccagggcgatggagaccggagagccagtgatggtgacatgccgctccccagcgccctctgcttggttcccgatcttgatatgtgcccctgacatctgccggatctcgctgatcttgctgccctggcgcccgatcacacagccaatcaaatcgttgggaaccaagaactcctgtgagctggtctgtgtgccgggatccagtcctggcaccacgctgggtgtggcaaaggggaccgcatggcttgagagctgctggagcttggtgacctcagctggggtcacagccccatactgaccctggacagagaagccctggttggcagagagaagaacagtacctagggagaggctcggatggtaggggatagtggctcctttgggtggggactccaggataacagcgcagatctggcgcacacacaggatgatggcatcaggcaccccagataccgtaacagctcgctctgtggagttggggagcaggtcccctgcccctcgtgccg

SEQ ID NO: 3761 - DNA, 61 bp, Homo sapiens
gggcttgctttcttctttaaagtgctgcatttctgatatatagatgtccgcaagggtgggt

SEQ ID NO: 3762 - DNA, 195 bp, Homo sapiens
  misc_feature (1)...(195): n = a,t,c or g
aagagaatcaggatttcctccaggccccaggatggctctttcagttgaagcgccagcaaaaggccaggcgcggtggctcgtacctgtaaccccagcacttcgannnnnnnnnnnnnnnnnnnnnnnnnnnnnnnnnnnnnnnnnnnnnnnnnnnnnnnnnnnnnnnnnnttctaaaaataataataataataatt

SEQ ID NO: 3763 - DNA, 455 bp, Homo sapiens
ttttttttgaattactttgtagtttaatgattactattgagcaaacaaatctttacagtaatataagtcagcaaaagttttttaaaaggtttaaatccctccttccttacatctatttcattgcttttttaggtttgggaagtaaagcaccagaggaagcatgtgtaaatccttgtataatcgcaggctgtaagtctttagcatctcaggaagttactaacttcaaactaaggtatatagggaggagtttcttacctaaatctagtgcttcttgaaccacaagtagaaagcatttaaaacatgaatgttgttttgtgttttttgaagtttgtaaatagaagacttgttgatgatccgatggcaaggtatttttctcttggtatgtattttagttatttcctcgtgatgcataagtgaaaagagtgaagtttctcagaatgagcaactgtcatcca

SEQ ID NO: 3764 - DNA, 1251 bp, Homo sapiens
aagatgccaaagcagttctagaggaagacgaagaggtcacggaggaggcagaaatggagccagaagataagggacattaactgtgagagaagctgtgccgcggagtcgcttacagaacagtttctcattagatgagtgtttctcctgcagcactccaaaacccactctgcactgcagcacagtgaatgatatgcactcaccattagcttcgacacagggactgagggagacaggtggggagcagctgacaggcattagggtctttgctgacatctactaaccttgaagagtttgatgttcagtgccataccttattaacttaaaaaaatagcaaatttattgttaaagtgctcccctttgtttccaaaagtgtttcccccaggcatcccagacctacacgtgtggatttgcagggagccactggagttggtgttacattttttatactttagcagcactgataggcaccctggaatcctcacttggtatccgagggctactaagactctttccttaggttctttcctctgagcaaacactgactggcatcctgctttccagtgcctgccagcctccagaagagccaggtgcctgactagtacatggggagctacagagccaaggtcaatgtgagtcaacatccactagaaatatccatgttgtgtagacctgtgcatacaacatgctaactggaaaagaggaaaaaagaaaagccacagtcctctccacaaaaatacctggtccaaacaagaaaaacaaaaagacaagcaaaactaaagaactgcagtcttctgatctttatttctgaagagctagcctttaacatacatgtttatatagtttaaatttcttactactgttagatcccaggaattcattaataatcatccttggctttccttttaaaggctattttgaaatggtcttttcactttcattcagtcatcaccccccaaaatgctctgcagcctctctgctctttgagaaagggcacaccatgcgctcggcaaccattcaaatgcaggaattaagcagcaatggctggagtgtccttctcagttatggaggacatcgtctcattagggaacttttacagttcaaattaatttgcagaagttgccataaatgtttgcataatgacatagctttaagcactacatgatttttaatctggctcacattataacaggaccaaatacacaagagcgtaatcaaatcatctgtaacttcttaatttacagtttacctatt

SEQ ID NO: 3765 - DNA, 451 bp, Homo sapiens
gagtatgaagcatgagtgataatgttggggaattgagagaatgatgctctgaaataagtgactttcattggctatgattgccaggctgtgacaattttcaaggatagacaacctcaaatttacttattactgtcataatgcagtaaaacacgccaaaaaataaaatatgatcaaatgcagttaccgtttattttggactgcatgacaatattcacttgcacaaaaccatataaacaacacccacctgtgtttgaaggcaaggtatctttgatcagaatctctgaaatatccctttgagttagctatcactatagcaaactttattaatttgtacctgacagtaattttaggatttatgattatttagttgaactaaagccataaatatatgaaggaagagttagccaagtaagtgaatagtgtgagtaaccatttcctttgggccaggagt

SEQ ID NO: 3766 - DNA, 729 bp, Homo sapiens
ggaatgaaagctgtggaagcataggtagctggggtgctctctccctcacacaggtggagagaggattgttgatcttttattaatatctctcgttcattccagggcatgcttccaaatctgctccgatgaatggccactgctttgcagaaaatggtccatctcaaaagtccagcttgccccctcttcttattcccccaagtgaaaacttgggaccacatgaagaggatcaagttgtatgtggttttaagaaactcacagtgaatggggtttgtgcttccacccctccactgacacccataaaaaactccccttcccttttcccctgtgcccctctttgtgaacggggttctaggcctcttccaccgttgccaatctctgaagccctctctctggatgacacagactgtgaggtggaattcctaactagctcagatacagacttccttttagaagactctacactttctgatttcaaatatgatgttcctgggcaggcgaagcttccgtgggtgtggacaaatcaactatgcatattttgataccccagctgtttctgcagcagatctcagctatgtgtctgaccaaaatggaggtgtcccagatccaaatcctcctccacctcagacccaccgaagattaagaaggtctcattcgggaccagctggctcctttaacaagccagccataaggatatccaactgttgtatacacagagcttctcctaactcc

SEQ ID NO: 3767 - DNA, 1731 bp, Homo sapiens
tttcttaattttggggctttattataatttttcttttcaagatgctacatagtcaaacagaactgggttggtcttttatggcataaaattaattcacagtcaaactctcaactagtactagaaggattcgctgaagagtttctctcttcccttgctccccacccacaactgctggtgccctcgcttctaaccctctgcagcccgatccatttgtcctgactccaggctaggtccccaaggggaggtcaggctcagacttggacctgggcgctggaagtgtgagtaatggttgagaggtggtataagaacaatctagaagactgactactcttcattaaaaaaggtaacctagagttgactgtcactactgagaatttccctccctatgacagttgttatttactgacccagaaaaaacacttcctggcagctcttctccagcatcccaataaaccccacctccacatgaccagactctccagagacagaggagcccacagccctccagcagcaataccagttcacccaacagagttcagcagcacgcagcattaactgtactcttgtgacaataagaaaacatgagatgaaatacattaaataagttaaatatgcattaaacatctctgaataacagtttgacttcactacatgaaccaatacaaatttagcttggtccctttaagtgaacaaagcactgccatttatttccaaagcgctgggtcaatcagtcaacacacgcctctcacttatgacgagtacgtctgatgctgccacagtgcaattcctttgggcttctgactctgttcatcagtcccaaggagctgatggcttggacagaactgaagacacggaaagcagcctgggccgggagtgggccacgtggggactactgtgtggagctgaccgcactccccagcatgctgggctccagctccccaagggccagcaccaacaggcgaggaagggtgtcattttaagagaggtaatccagcatcatgtaccaaggcctaccaatgtttaaaatgacatttacaatatgccattgtggcattactcatggtttcccttgtcattaataaagatcattcttttccccctcaatcagttactatacatttttaactttctaaaagatcgttacattatatttgtgtgtgtgtatctgtgtatgtgtgtgcagggaggggtaatttaaaggcaagacctgtgagatgtcatcatacattaatttctttttacacatggttatgataaatttaaatcccatgatatggtggatccaccaatccaatttaccatcctgtgcatgctacctctacaaggcaatcttcccaataattacaccaacgataaagaacaaaaccaccagagccaagagccgggtgctaaggccttcttccttcccagttggggctaatgctgaaatggggctggttgctctgcactgtcttcctcatccgcagtccatcttcttccttgaactgcttgttctcctcccgtagcctctgaacttcaccttgcagcctcttacattcttccataaccttcttaacttcggtgtcatccaaagaagaactcagagacttagacactattggtgtttctgtctttgatgcagttgtggatataattttatttatttctacatcatgtggtttatcattctctgctggcaattcaaacacacatctaagttttgaatccataaggtcttcctgttttgcctcc

SEQ ID NO: 3768 - DNA, 766 bp, Homo sapiens
ggtcctgcccagcagggacaatgagattgtagacagcgcctcagttccagaaacgccgctggactgcgaggtctccctgtggtcgtcctggggactgtgcggaggccactgtgggaggctcgggaccaagagcaggactcgctacgtccgggtccagcccgccaacaacgggagcccctgccccgagctcgaagaagaggctgagtgcgtccctgataactgcgtctaagaccagagccccgcagcccctggggccccccggagccatggggtgtcgggggctcctgtgcaggctcatgctgcaggcggccgagggcacagggggtttcgcgctgctcctgaccgcggtgaggccgcgccgaccatctctgcactgaagggccctctggtggccggcacgggcattgggaaacagcctcctcctttcccaaccttgcttcttaggggcccccgtgtcccgtctgctctcagcctcctcctcctgcaggataaagtcatccccaaggctccagctactctaaattatgtctccttataagttattgctgctccaggagattgtccttcatcgtccaggggcctggctcccacgtggttgcagatacctcagacctggtgctctaggctgtgctgagcccactctcccgagggcgcatccaagcgggggccacttgagaagtgaataaatggggcggtttcggaagcgtcagtgtttccatgttatggatctctctgcgtttgaataaagactatctctgttgctcac

SEQ ID NO: 3769 - DNA, 578 bp, Homo sapiens
attcggcacaggaaaggaattactttctctttaaaggatagctcccacgcatacgggttgagtgggtatttttcttttgtgctggaatccagaggctccctcttgttctcaaggaaaatgtcagataacccacctgaccctgcttatgcacgtcattcaggttgcaagacacagaaagcttgtgccttcagtcaaggggttccttcacatgatagtggtcataaccccctttgccctttattaagccattgtccctcaactccaaacctacctttctatgctctgctctgtgatgctgggactggactctgcaaatgccacttctcctttgcccactggctcccattagagtactctagagggtgcctacaaacctggggcatcaagaaggagcagctccttccagtgtgcttctggctcctgtcaggatcaccccagcaatgctcacattgtctgtatatgccaagcaccagctcgttttccggcattgtcagagccagcttcattatgcccctccccagcagagcactggctgacctcagaggcctgagtatttgattcatgcccctcacttctaa

SEQ ID NO: 3770 - DNA, 79 bp, Homo sapiens
gtgctgggagtttggaaagagattctacagaagtagaaatcagtactggagaacgaaaagggtcttggtcagagaggag

SEQ ID NO: 3771 - DNA, 318 bp, Homo sapiens
  misc_feature (1)...(318): n = a,t,c or g
caaaaacaaaaacaaaaaactccaatagcaatatcttacatctctgtaaaccctaggcctagtacagtatcttgacaatagtgggcatataataaatatttgttgatgatgatgatggtaaaagctgcaatattaagtaaattcagtgagagaattcatgaaaattgcaagtatctagtgaatattgggaagtagggatatctgggggcattaggagtgagganggaggagggtgggaggttaaatagggaacattgaaaaaaggaggaggattacttttattntaaggaggattgngtttgcttcctttggnttttt

SEQ ID NO: 3772 - DNA, 973 bp, Homo sapiens
ttttttttttttttgatttagcagttttcttgggtcctttactcttctgttgccatcctccttttgtcctgttcttgttagtttcaccctgcccatcttctgctggctgttcctctgcagcacagatggactgctccttttcaaatacttcagccattgtttgccttgtcaacttaaccaacactgtaactaaggatcctactgtgatgttgttgctatcttcatcatctaacacctgtgattttatatccatggtcacatatggaaaactcccaaggacagccataacctcttcatatttttcatcttcaaggaagtgcagtagagtgtgacgatctgattcttttaaactcaccaaatcctggatagttttaattttatacttcttatgattagaaacccgtctaagattgtcctcttcaatatgagggagctgcagaaggggagacttaaattgctgaagtccctgaacggccatctgagaaagcttcatgcagttttctagggatgccaaagttggagcacgaaactccctttcttcacggttccgggccattactattagttggcagattacattaaccatttcttgaagtagggcaggacacttttttagcatgaattgctgatcttcttcaagggtctcaggaattttcattctagcaagatgagacagtaaaagaactctggccttcaggctatatgggcaggtaagtggaggctcattcttctttaaattaatgctgccaatttctctgattagctgtggtattagaatattatccgttggtctgcttgtggcatctttattatactgaggatcaaattcagaagctccagccaaaaccatgataagacgtttcatatccatatttcgggttttataaacaaagtatgtataaatctgtgttgtgcgtattagaatctggtctccactatagcgtattgagcgataccaccaagagcccacaac

SEQ ID NO: 3773 - DNA, 529 bp, Homo sapiens
  misc_feature (1)...(529): n = a,t,c or g
ggaagagctagcatgagcttcaataccctgaagagcaatgggctacagatgttctctctgaggtccctctctgcctttantcccngcactttggagaggctganggccaggagttngaaaccagcctgggcaacacagtgagattctgcttgtacaaaaaactagccaggcatggtagtgcgcacttgtagtcccaactactcaggactaattaatccaaatttatccaattttgtctcctggagtannnnnnnnnnnnnnnnnnnnnnnnnnnnnnnnnnnnnnnnnnnnnnnnnnnnnnnnnnnnnnnnnnnnnnnnnnnnnnnnnnnnnnnnncgctaaaggagaaaaaaaaattctctctgaaatactcaaactacctccaccaaagaccaaaaggttggcagtcaggatacccccacctcacatatccccaaccccaagaattacttcctagatatattctcacattatcatataagtctccaatataagaganaacaagaattcaaggaaggtttataaacta

SEQ ID NO: 3774 - DNA, 1101 bp, Homo sapiens
aacctccaagacattttattttgacagaaaaggtgtgacacatccatcagaaatgggatcagaaatttttggtctcccagtccccagtcctgatttttaattcccaatttcaaaattctatactaacatccaaactataacttgacttttaaatttaccccactcctcgggaagagaagtgcaatgcaggcaggcagctgtttccaggagatcagaaaagggtaaatgaatactcaagatttacagcgtcaaaaggctatgttgaggataattcttatgactatgtaaaagacaaggtagtgaaattgtgagggccttgggcccggccactcacagaatgactgaagcatgctgcagtggagaactggaaatgtatctcttgttgccctccatctccacccaccctcaagactgggacttagaattcccacgtccagcactgttgtagatgggaggtacgttgtgctgaactgctgcgctggccacatcaagacaccacatgtgttcccaagtggtattgcagctgtcctgaggcccatctcttctccctctcatattgggatctcattgggagaaagtctaggcagattcctgctctgctgggccttctcttacgccagtgtggacttcacgggatagggcagacagagtattcgttgcatttatttgttctatcactacagaagaagcatttcaaaatgtgtacaaaaggatactctattcctccagtggtacatcccttgttcacagctaaacagcaataatttaacatcatcatagaggcagactggaaatatgactgcatttctcatttacaatcctgtgcatgtactcgccagaagggcagctgaagacctaaagctgtactggatacaacagattcgacctgaacaatcaccacacacaacattataaaaaactgtattagaaagtattggaaacaatattgcatattaatatgtggttacacatgttcacagtgagtgccatcgcaccaaaagcattatgtgcttcttttttctgatgcctgtacatcttaaataagtctaataattttggttcatcttaaagtaaaaatacattgaaatgaatgagagagat

SEQ ID NO: 3775 - DNA, 710 bp, Homo sapiens
gtctcatctcagcagagccagaatatggggacaaggttcagggtgccctgctgaatggtgtgaacagcaggatctcaaggatgtaatggaaagaactaccacactgaccatccagaatctaagagaccatctgggtgtttgggaaaccatctgacgaggcctgactctattccagttagattgacaataattgagcagcaggcatttttcatttctggtcaggaaagcattgtgcctttagcaaacaatcagtgtgcaacagtgatgtggtcatctagccagggaatggctgctccatcccctgcataatatattcctgcttcaaacacctctcagaaaaccagttccgcgagggtttttatatccccacaaagttgttgagagacaatgatgaccctggaagtggggaggaggacttctgagaaacagcaacctctctcctgattggggtagccatgagatttctctagctatatccaacttggcatctgtacatcatctttggaggaacatcttatttgtggaaggaccttgacaagccgtttgagatggaatgtaggccctgatgttatgcttcagtaaaaaaagatggaagcttccctgctataccaaaacatggagcaaaatttgcatttttctcaagaaggagagaaaaggagtaggactccagcaaagtttgtcagaaggaaagctagaaaagatttaaaaga

SEQ ID NO: 3776 - DNA, 430 bp, Homo sapiens
gaactgatgtttgaggggacagatgtgggtcactttccctggcagtgccctctagccttgctgccttggctttctgaccccttccaggcttcaggggcctgggagatctcatgcctcagcccaggaaacatttaatagggaaagcagagacatgtcatgtcagccccacagacaagaatttctagagcacttgtcctgttgttccttgccccgacattactcagtctgggccatggaatccatccaataaacacagcaacaccctatgctactgaccaagcaaagcttgcccctggtaccaaagagctaaatcatgaccaaagtgtgacatgaatgtaactgaaatgcgggttagttgctcaatgtatgcaaagtcccacggacaagagtaaagtctgataccaataaagtgaatgtattccaaagctaa

SEQ ID NO: 3777 - DNA, 1322 bp, Homo sapiens
ggctaaacaaaatcattcacttccctgattttgataagaaaattcctgtaaagctgtttcctctgcctctcctctacgttggaaaccacataagtggattatcaagcacaagtaaattaagcctaccgatgttcaccgtgctcaggaaattcaccattccacttaccttacttctggaaaccatcatacttgggaagcagtattcactcaacatcatcctcagtgtctttgccattattctcggggctttcatagcagctgggtctgaccttgcttttaacttagaaggctatatttttgtattcctgaatgatatcttcacagcagcaaatgggagtttataccaaacagaaaatggacccaaaggagctagggaaatacggagtacttttctacaatgcctgcttcatgattatcccaactcttattattagtgtctccactggagacctggcaacaggctactgaattcaaccaatggaagaatgttgtgtttatcctacagtttcttctttcctgttttttggggtttctgctgatgtactccacggttctgtgcagctattacaattcagccctgacgacagcagtggttggagccatcaagaatgtatccgttgcctacattgggatattaatcggtggagactacattttctctttggttaaactttgtagggttaaatatttgcatggcagggggcttgagatattcctttttaacactgagcagccagttaaaacctaaacctgtgggtgaagaaaacatctgtttggatttgaagagctaaagagtctgcagcaggattggagactgacttgtgactgcgggctgggggggcattcccagtaggaatgtgaagccagaggtttcggattcgtgacatccaccccctgggcaagtgagagcatctgcaaaatgcaaagagaactacctcatatgcaggatgagccaatggcagtctcaagaaatgtactcgggcgacaccttacctgtggaaagcaaatcttttcaaaataagccactgggactcggtaggtggagccccagctgctcttctagggacctatggggccttcgtggcatctctgtgctgtgtgctggggaggaggttgatgtaatggtgactcttttctgatcagcaccttggccgtgattcccaaggtcccagccaaagcaaagggccagttgtttcagtttaaacagacatgtctttagtctaataaaattagttaactgccagtaaagttatttgttagctttgatgaaagctatgttggtatctttccctaatcatcaaagtaaataaaaaatcatttct

SEQ ID NO: 3778 - DNA, 520 bp, Homo sapiens
gaggagatctgagggcaggcgggcagctgcagggaggagaggtgagaaaggaagcgtcttctagagacattggcccaggagctctgttctttcctaatctaagcctctgtcttcttcggcaaaccttgctttgaactctgccagtatttcattttaaagaatcccagagcgggagagagaagagaaaaaaattgataagagtgaggaaattgtcctgtagtctattgaaaaccagtcaaggtggttttagttcatagattttgttagatgttctttccacctggcctatgatgtttagatgttcatacttgactcacatttacccagcccctcctgcgtaccaggagctgtgttaggcactttatatacattattctatgtggccctcactgatgccccagggaagtatgcattagccttcccattttgcagttgaggaggctgagtagcctcagaagggtttaggcgaccttctgaaactcacagaagtcacgtgatgggagagaggattcaaagccag

SEQ ID NO: 3779 - DNA, 355 bp, Homo sapiens
aacaccctgagatttaaataaaacaataaatcaacccaagtttccccaaaatggtatccatcagaatatcactgaagagggcttctgaatgccatcagtcttacctagtaagatgttcctttacttgtggatttactatagtaaaaatttgatgcatgccatgaaaataaaaattgtggttggccctgtggtatattataccgacacatgtgtacattttctaggcatatcatgtcaaattaagtaggaggcttgtggcagttcaaagataaaggtgggtcaacaggctgttactgaggacagatacctatcccaacactgtactgaccggaatcagattgacaatggtcttttg

SEQ ID NO: 3780 - DNA, 535 bp, Homo sapiens
  misc_feature (1)...(535): n = a,t,c or g
gcatgagggacttctgtttttagcaattgcaaactcagaaatcaagtgacacctcctcctaaggatgagaaaactcagactaaatatgaaaaatatgcttcaaagcttgaaaaagctcatgatatagtaaatatgttctcagtcagagtccagggaaaggtagaggccacaggaggtgagcctatggtttaggactaggggtgtctgccagttacaaaggagacgattaagcagcaaggtgcttttggagcatcacaggactaggagggcagaaattagagtccgtggtctgccaactgagcacatcctggtgaaccttttacttgaggttggggatcttgaaggggaagcacctgaagagttaaatgtgaaaccnaaggcagacaggccctcagagagtgtgcagtttaccctcagatcatctcagtcactgaccctggttaaggtaatcctggattgcnatgatcaagtgtgcanaacctcttggaggcgacaatattatcttggatccaaattattctgcaacattttgcaa

SEQ ID NO: 3781 - DNA, 713 bp, Homo sapiens
acctttcaaacaggtgggggtgcctcccaggaggaccctgcctactcagagacttccccagatgcctctgctgcctgagtccccacaaagggagagcagaggcaagcagggcagtatggtccagctgggagccaagataccctgtccccacttagacgtccactggggaagggaaactgccgttcgcattcctggggacggagaagagcatgggaacatgggatgcagtctgtgccaggatctagaaccttctgctttctctcttcagtgagaaaacccaccctgttccctccccttcctccctggcaaggaatcctgagaagaaacagcctcccccagggagggttttgaagtgcgcctgaacccaaatgagctctggggccaggaaacagtgtatataaatatatagactgtgtgtatatattataaatgtatctatatatgtatatatgtacatgcacagctcagagcgtcctagcctgatacagggcctgcctggtgcctcctggaggcctggccacctggggctgtcacttgaagtcaagagtcctggtgttagggatgtagagggattgggtctggcgactgcgtcgtggcgtagtgttgaggacgtccacgctcttgcggctggaacgcaccacgtctgccacaaagctggtgcactcactgcagacatccttcaggacacagccgtgggagtagatgtgggggaa

SEQ ID NO: 3782 - DNA, 1320 bp, Homo sapiens
cgcctcttccgacggcccccatccagtcatcaccccgtcacggcctcagagagcagcgctcttccgacggcccccatccagtcatcaccccgtcatggtccccgggatctgatgtcactctcctcgctgaagccctggtgactgtcacaaacatcgaggttattaattgcagcatcacagaaatagaaacaacaacttccagcatcccatggggcctcagacatagatctcatccccacggaaggggtgaaggcctcgtccacctccgatccaccagctctgcctgactccactgaagcaaaaccacacatcactgaggtcacagccgtctgccgagaccctgtccacagccggcaccacagagtcagctgcacctcatgccacggttgggaccccactccccactaacagcaccatagaaagagaagtgacagcacccggggccacgaccttcagtgggagctctggtcacagtttagcaggaatccccttggaagaaacctcagccctctctgttgagacaccaagttacgtcaaagtctcaggagcagctccggtctccatagaggctgggtcagcagtgggcaaaacaacttcctttgctgggagctctgcttcctcctacagcccctcggaagccgccctcaagaacttcaccccttcagagacaccgaccatggacatcgcaaccaaggggcccttccccaccagcagggaccctctttcttctgtccctccgactacaaccaacagcagccgagggacgaacagcaccttagccaagatcacaacctcagcgaagaccacgatgaagcccccaacagccacgcccaccactgctcggacgaggccgaccacagacgtgagtgcaggtgaaaatggaggtttcctcctcctgtggctgagtgtggcttccccggaagacctcactgacccccagagtggcagaaaggctgatgcagcaagctccaccgggaactccaacgcccacgcgcctcacttccaggtctccttactgcgtgtcaggagaggctaacggacatcagctgcagccaggcatgtcccgtatgccaaaagagggtgctgcccctagcctgggcccccaccgacagactgcagctgcgttactgtgctgagaggtacccagaaggttcccatgaagggcagcatgtccaagcccctaaccccagatgtggcaacaggaccctcgctcacatccaccggagtgtatgtatggggaggggcttcacctgttcccagaggtgtccttggactcaccttggcacatgttctgtgtttcagtaaagagagacctgatca

SEQ ID NO: 3783 - DNA, 2106 bp, Homo sapiens
tttttttttataatttagaaatttattacaaaacttttaataaaaaatacaatgatattacaaatttggttttccaaagctttcaaatttttcttaacattatctttcgttttaagaacacttttgaagtcggcagttatttaaaatccttactagaaaaaaaccaaagcccaaggattttgcatttagtcatcatctaggtatacagcgtgttttccgaaaggcatcctttaaggagtttgggagatttgatgaaattgctcatggtaataaggcagttaggtggaatactattggaatcctaaacccggataaggtcatcttgggggctgggctgtgtttttcatggtggagggaactcctttataggcacagggcaccccggggccaatagagatgattacagatctctggtttcagaagttctgaccccttattcagctaccaaatacttaattgctaaaggaattactcccagcaggcacaaaacggtttctgaatatgacagaaaaggtacacaaagaatcatttaagacatcctggttacaacatactttatctttaaaagggtgtgagagtagttggggaacttagaaattctgtgacttaggtgtgggtggatcttatttaggaagactaaagctatggacacaacacgtgaaagaaccactcagaagcagccctaggaagccccaggtgcccacatcgaaagcactcccaggtgaaagcagccaggcaggcgtgggcattgtacaaccagcctcaggcctcagttcttgattgtggttgacggggcgtcaccatgaaggagcccatttagtataaagcttccaaccttttctcttaatcgtttctttaatcttttaaaccatcttcaagtgcataggggagtttccgatgccagaggatgaaagcaagtgctttctccaccctctcctcccagagtgaaaacaaatccttttgctgatacttgtttcaaaagcatccattgtaaagcttctcagtgacacaaaatactgagaggtaactttttatcaatcaaaccacataccccaatttaacacctttcagtgctctgaattcaactgacagactaaagggtgtttcctgtaacagtctgaaatattaagtgttttttttgttttgtttttaaatcttatttcagaaaacttcctcttggggtaggaaagtacacatgaagcagcaaagtaacgaagaaaaacttaaatagggccttcagagatcccacacactacaaagattctgccaagccataagataagtgtgaagcccagtatatgtccagcttttctcctcaggacatcttcagtgtttcttctcttttaaacaccacatcaggttctagccacagacttgtgttttgggtgtgcctgctttgaggggtccatgcccagtgtgtctgctggtgacccaggactcagcagtaatgactaacggccgcccttcaggatcacagatgtgcttggtggtggtggcaaagcatggcacttgtgtgcagtgatgagaagcagcacacggcaaggctgagccctttatcagcaggcctccgtagagcgtgtctgcgttgtcagctgccaatgggctgagtggctggccgtacccactcagtccaagagaggaaggaaacagcaggagaagctgtcagcttgccattcatgagctgctgctgcccaccaaagctgcttactggcaagaagagatgtggggaagacatgagctggtgaaacaccaacctggtgcacatgcctgccaagtctggcccctgaagaggagagggagtgcagagtccaaaattgaccggggctcctgctctggcatggagctgggtcagaggtgagagaggacctggatcctagggctcacgcaggtgtcgggcgggtgccagggtcttttcactccaactttttggctggcacccgtgtccgagcaacaaggatgggcacaagggccaggccggcaatgaggagggcccacaggggtcggtagaagagccagccagccgccacggtcagcagggtcagcgaggtggccacacagaaggcaaaggctttcaggccaatgttgaccaggtctcggaaaacaggc

SEQ ID NO: 3784 - DNA, 427 bp, Homo sapiens
aggagttggcgtccggggagcaagggccatggccaccagtgcaggagaaggctgctgcgctgaacctctcggctctccacagccccgcgcacaggcctccgggtttcagtgtagctcagaagccatttggagccacgtatgtatggagcagcatcataaacactcttcaaacacaagtggaagtgaaaaaacgaaggcaccgtttaaaacgacataatgactgctttgttggttcagaagctgtggatgtcattttttctcacctaattcagaataagtattttggtgatgtagatattcctcgagccaaagtggtgagagtgtgtcaagcgcttatggactacaaagtatttgaagcagttccaaccaaagtctttggaaaagacaaaaaacctacatttgaagatagtagttgcagcctttatag

SEQ ID NO: 3785 - DNA, 1844 bp, Homo sapiens
ggcgtcgaggcggggcgcgggaacgacggcggccatggcggctcggggccgggtgtcgtagctggtgcttgtgtcccgaggtgccatccgccaccttcttcactgcgctgctctcgctgctggtttccgggcctcgcctgttcctgctgcagcagcccctggcgccctcgggctcacgctgaagtccgaggcccttcgcaactggcaagccactatggaaggaggggtcaggattacagcagaggagactggcacacaagagttttaagtgacacccactcaatccaccccgaagctgttacacttaattaaccctcaaacttgcccagtgaagtttacaggctggtaacctacatctttgtctacgagaatcccatctccctgctctgcggcggctatcatcatctggcgctttgctgggcaatttcgagagaaccgtgggcaccgtccgccactgcttcttcaccgtgatctttcgccatcttctccgctatcatcttcctgtcattcgaggctgtgtcatcactgttcaaagctgggggaagtggaggatgccagaggttttcaccccagtgggcctttgccatgctgggagtcaccaccgtccgttctcggatgaggcgggccctgggtgtttggcatggttgtgccctcagtcctggttccgtggctcctgctgggtgcctcgtggctcattccccagacctctttcctcagtaatgtctgcgggctgtccatcgggctggcctatggctcacctactgctattccatcgacctctcagagcgagtggcgctgaagctcgatcagaccttccccttcagcctgatgaggaggatatccgtgttcaagtacgtctcagggtcttcagccgagaggagggcagcccagagccggaaactgaacccggtgcctggctcctaccccacacagagctgccaccctcacctgtccccaagccaccctgtgtcccagacgcagcacgccagtggtcagaagctggcctcctggccctcctgcacccccgggcacatgcccaccttgcctccgtaccagcctgcctccggcctgtgctatgtgcagaaccactttggtccaaaccccacctcctccagtgtctacccagcttctgcgggcacctccctgggcatccagccccccacgcctgtgaacagccctggcacggtgtattctggggccttgggcacaccaggggctgcaggctccaaggagtcctccagggtccccatgccctgagagaatttctagggaagtcatctcacttggccttctgaaggtcctccctaagagtctcctgacaaaagttacttattgaacacctctatgtgccaggctctgtgttgggtactttgatcaatgcccctgtttcagtctcatctgtactcacggcagccctgtggagtacggtgtactggcccagcttacagatgcagaaagcgagacgttctgccatcagataaagtcacgtggctctttagtaacacggacaaggctcctcgccaaggaactcgtggcagaagagggcagcagttggcagtagctgccgatgtctgtccccagctccaccattcctccctgtggctgtgccgtgctcgtggtttcagtgtccgtgtgtccatgtgtctgcccttcaggagctcgcagctggtgtgcttggcggtcccaggcctgtgtagtgtctctcccctgctgcgggcgcccccaccccgattcctctccccagaagcggtgggatgggcccccatgaactgcagcagcatgctgaggtgtccatgttgtctgcctttgtataaagaaacagcctctgaaaaaaaaaaaaaaaa

SEQ ID NO: 3786 - DNA, 491 bp, Homo sapiens
  misc_feature (1)...(491): n = a,t,c or g
gatccagacctggcggaattaggaccaggcacgagtgagcctgattgtgtaagagcatctgcactcagaaacccatcatttggataagtgtgaggggtgtgtattggctgttttttcattttaannnnnnnnnnnnnnnnnnnnnnnnnnnnnnnnnnnnnnnnnnnnnnnnnnnnnnnnnnnnnnnnnnnnnnnnnnnnnnnnnnnnnnnnnnnnnnnnnnnnnnnnnnnnnnnnnnnnnnnnnnnnnnnnnnnnnnnnnnnnnnnnnnnnnnnnnnnnnnnnnnnnnnnnnnnnnnnnnnnnnnnnnnnnnnnnnnnnnncacanactgggctcaaaccctgcgctcaagggattccgcctggctcagccttcccaaagtggttagggttatggtgtgagccaccacacccagcctggtttgtttcccatctgcttgctggtangttgcaaanatcccanaaccccgtttgaatgctaactgcatacca

SEQ ID NO: 3787 - DNA, 436 bp, Homo sapiens
ttggtatgaagaggataaaggaacagagcgtccaatatgccaaattttcctgcctttgaccactgtgcaggctgctccctccacctggaagtctgcttttacttccttccagaatggattttctcaaggttttatgacattttaaaaacacttatcagaatacaagcataaaaaaagagagaacatacggattcagggcttacctgtgtacaggatgcggctgatcatccccggcatcaccatgaggaacatgggcagcagcttcaggtaagcacacataatgcaagcggccttcacgtgagacatgtccttgccacacaaggcagcgctgcacaatgacctgccgggaagaacgtgacacactcatgaaacaagccaggggatgatttcaaaggcagtcagcgtccttttccagagtttaatgttgcaataagaa

SEQ ID NO: 3788 - DNA, 496 bp, Homo sapiens
  misc_feature (1)...(496): n = a,t,c or g
gggacctatgaaatggatataatggtagctattgtacctggtgtgcatagcgggcattcaataaatgctagccatttcccttaatgaatcactgcccacaaatctgggagtcctggggaaaactcaacaacatgcacgacactaaaggaaactgcagttgatctccgctctttagcagcttttcagcaattacaaagacacaatatatgagtttttgcatgttttgcatatgcttgtgaaaattatgtagtaaatangtgccaagtaaggtatgtagatagcaagtgctagtgcaatttataggtgccataatccctatggactgagtcagaaatggcctaatagaaggcagaagagaggccagttccaagcaagggcatanaacagaacaatctgcaagggantttggagcatatancgccngggttaagacattantgngaaaaagntggaanggaacaatnntgggcnaaggncctgggnctngacctttcgg

SEQ ID NO: 3789 - DNA, 333 bp, Homo sapiens
  misc_feature (1)...(333): n = a,t,c or g
gagaccatttcacatcattaccagttgttaactgatttttgtgggcataaaaagaatgatagtaagtagcataaaatatgaaaaagccatcttttcttgaccttttggctaagatcaagtagagtaaaatatgaaatatctagctgccaaagatgaagacttttagaacaaaatctcaaatctcatttttttatttcatcatgcataccaacaaagtagatatttttgcatgaaaagcttattattctattccttttagatctcctatttttcctaactatattttttgaaactgcatataattaaaactgcttaaaagttccgangggncaa

SEQ ID NO: 3790 - DNA, 387 bp, Homo sapiens
gatttctcaccctgctccttggtcttgactgcgtgaaattcctccctgatgagccgtacattaaagtccgcatctgctttgttgctggagccacgttactaatagcaggtaccccaggaatcattggctctgtgtggtatgctgttgatgtgtatgtggaacgttctactttggttttgcacaatatatttcttggtatccaatataaatttggttggtcctgttggctcggaatggctggggtctctgggttgctttttggctggagctgttctgacctgctgcttatatctttttaaagatgttgggacctgaggagaaactatccctattccttggagggaaagcctatttcagccgcggggtgttttccatgggccaagtcat

SEQ ID NO: 3791 - DNA, 630 bp, Homo sapiens
ttttccaaaccacattcctttcttgaatctatttacagtactgtttcaagatgttttctgaagggtgcacaggggctacattgaaaaccttctggttattgtttgctaactgctgggatggttttaatcagagaagaagccaataatttcagcttgggtgttagaaaagctcctgaaatgtctccaaactgatttaggagaaactgcttaacagaagaggacttattcctgtcctgaaacaaactccttagcatggacatatgctgtaatcacagaccaagataaccacattttttgaacatattatactccaaaggcatcttagatttctaaatattatcagtatcagatgacaaaacctgttcaacaaggaccatagcctcaatatgctaggttgacagcctccgccgttaggaatgttcttggtgtttggtaagttctctaataggacctactttttattacactagtttttcttaaagaaattttttgaaaggggttttattttaatgactcaggtaaaattttctgaggtaaaagacctcacatcagtctcagcagacatctgccccttcccatgatcctgacttgaggcaagtgaagggagtccctttgttgtgaggccaattt

SEQ ID NO: 3792 - DNA, 292 bp, Homo sapiens
  misc_feature (1)...(292): n = a,t,c or g
ctcgtgccgcacaatgatgttccagcatcacgggggattattgaaaggttgaagtttttaggtttaccttcatagcccactcaaatgataggtcagtgtttcctaaacgattcttcagattactcatgaccccacaggtgggacagaaggcctttgaaaagacccttggcaagtagggtctcgagtcagtcgactttgggaaatgcctgtcttgttgatgcatagnacattattagtgtctcaaagatgttgaaaagcctnggggaaacctagtgtttctcaggcttacttg

SEQ ID NO: 3793 - DNA, 472 bp, Homo sapiens
tttgtctgtattgaaactttattacaaaattataaagcagagctctgtaacaaaataatacacatttgggtttgctttaacctccaagtaagtctgagaaaatcttaataaaagccacttgaagtaacaattcacatccaagagatttccacaaatttatacaatgtatattgagcactagttcctgtacagcttattcttattagtttggatccaactattccaatgtattatgaaccagtcagctatctgtcttttgaaacaagtcttaactgaaatctcagagtaatcagcaaaagctacggaataattctaagaattagatgtttccatatcattaaaaccaaggatccatgaggggcagaagggaggattcaaagatttaaaaaaaatcaaattttagaccttggttaaatattaactggaatgggatcttggaactcccaactttaatttggtgtaataaaaatga

SEQ ID NO: 3794 - DNA, 456 bp, Homo sapiens
  misc_feature (1)...(456): n = a,t,c or g
ttactttcagaatcctcttaaacctcattattggtcattataaaattccagccacaattagaaggatttcccagagttagctttgtggttcttgaaaaagggctgtgtttctaacagttcccattaggtcaaagatttaaatataatgtacaagtgacttaatggagcccttcagaaaaataaagcatttatcattttcctgggaaggctttttacactgttaggttcaaaagtacggacttgccctaagaatattttgatcttttcaataagtgtttaaagatatcttatttactgttgttttgatgacatttgtcaaaatactaacatttggtatcttctttttaaaaaagttttttttattggtgagacagggtctcagtctgtccacccgggttaggatgtgggtggtgttaccncaggctcactgcagcctcaacctcccttggctcagtg

SEQ ID NO: 3795 - DNA, 599 bp, Homo sapiens
  misc_feature (1)...(599): n = a,t,c or g
gctccatctccctctccctctactctcctttctttctctctttcgctccctttctttctctctcttacacacctgttcacataaaaaacaaaaatgtaagcaccagcttgtgattaaaacaggcttcacaagcaccctgtgagagttactgacacatttgcctctgtcctttccttcaacacctctgtttcttttctccttcccacttgtaacttaactgagagagacctgatagggacacttggttcaaatctttcaatttacccgggaggaaagctgtggacccagaaaggttaaggaggatttgtccaataccacatctattgaacttcagtcggctagaaagtttttggataaaaaggattatgtttcctcaggggaagagtaaactcttagaatccatatannnnnnnnnnnnnnnnnnnnnnnnnnnnnnnnnnnnnnnnnnnnnnnnnnnnnnnnnnnnnnnnnnnnnnnnnnnnnnnnnnnnnnnnnnnnnnnnnnnnnnnnnnnnnnnnnnnnnnnnnnnnnnnnnnnnnnncccaagngtgngggancgccngtaatcccagnancaggnggtnnggaggnaacccttt

SEQ ID NO: 3796 - DNA, 377 bp, Homo sapiens
  misc_feature (1)...(377): n = a,t,c or g
gcaggattccccacctagcagagtagggttaactgatcatctgcctttccctaagccacaactctttcactgtaacccacactttctcctgtaggcaagtagagaagggcatgaaatgtgtcatatacggatgaaggaaataatgaattatttctgtgttagtcatcttgaaaatagatgatactgtgttgttatatttttataatgtctttgaacaatgggcactttagggaaatctgggaataaggtaggaaaattactttttacttaattattaaaaagtagggctgggctggggtggctttgtgcctgttantcccagctacttggggagggctaaaggtgggggaggatcccctttgaggccccagggaggt

SEQ ID NO: 3797 - DNA, 964 bp, Homo sapiens
agcctaatttttttaagaaagacatcttctcagaatccttttttagcttagaattgtaggtgaaatcttcagctgtgaataaactacatcatcacctatgtggaaaaaaaaacttcagttgaagactcagtttatgtatctcagtggatttagcatgcttcctgagaaaatgtgggcatttaatgaatttggatacaatgtactactctgtaagatgagttttaaataggcatttcttccggcatttatgactttatagtacacctttcttccctcctgtagaagatgcttataagatcaggatccgtattgatgatgagcctgccaatctggacattttggatacagctggacaggcagagtttacagccatgcgggaccagtatatgagggcaggagaagggtttatcatctgttactctatcacggatcgtcgaagtttccatgaagttcgtgagtttaaacagcttatttatcgagtccgacgtactgacgatacacctgtggttcttgtgggaaacaagtcagacctcaaacagctaagacaggtcaccaaggaagaaggattggccttggcccgagaattcagctgtcccttttttgagacatctgctgcataccgctactatattgatgatgttttccatgcccttgtacgggagatacgtaggaaagaaaaggaggcagtactggccatggagaaaaaatctaagcccaaaaacagtgtatggaagaggctaaaatcaccattccggaagaagaaagattcagtaacttgaagagaagatgtgaagtgtttatctgtgaactgcagtgctgtatcaaagcagtccagtaacctgcagtactgagtatggtgcttgctctttcacttaactgataagaagggacatgcctactaggagtttttaatgatgtggtatttaaagtattgtctcttagtttaagtatggtttattaaccc

SEQ ID NO: 3798 - DNA, 379 bp, Homo sapiens
tattactatactgttattttataaaaagaggtaatgaagctaagaaaagtagtagtttatccaaagtaatacttagttcccgatttctagataagaacagcttataagagcaactacagaaagtagttctaaaaaacaaatgagttaagaatcactgccgtaagatcaacagaggtcagggtcctgggcaacagctagcatgtgccttcaatgtagtaagcagtcagtaaatatttattaagaatgatacttggagctcttctgattaacccttgaacctaaaaattgactacagtaattctacagcattggtattttcaccgaagaattctttcttaggtaaaatattattacagtcatgtgttgcctggacaaaggg

SEQ ID NO: 3799 - DNA, 758 bp, Homo sapiens
  misc_feature (1)...(758): n = a,t,c or g
aagcagcttcacaacgacctcttagctcttcagcctcacatcaacttccagtgagagtgacacaggtcaggaggcagaatattccttatatgatttcctcgatagctgccgtgccagtactctattggctgagctcgatgatgatgaggacttacctgagccagatgaagaagatgatgagaatgaagatgacaatcaggaggaccaagaatacgaggagatctgagacgccatccctgcacgtcgagctggctcccgctttgatgtaacancgcntnnatgtttgtcacttnngcagtttccccacaggtacttgttggagcagggagccgacctattggggaccaggaagaagaagagtacgaaactaaaggaggacgccggagaacatgggatgatgattatgtgctaaagagacagttttctgcattggttcctgcttttgatcctagacctggtcgtactaatgtccagcagacaactgatctagaaataccacccccagggacccctcattcagagctcttggaagaagtcgaatctactccgtcacctcgattagctctcactttgaaagtaacaggtcttggaacgactcgtgaagttgaattaccactcaccaatttcagatcaaccatcttttactatgtacaaaaattgcttcaattgtcctgtaatggcaatgtgaaatcagataaacttaggcgtatttgggagcccacatacacaatcatgtacagagaaatgaaggattctga

SEQ ID NO: 3800 - DNA, 437 bp, Homo sapiens
  misc_feature (1)...(437): n = a,t,c or g
ggagacggcctatttaaattggttaaggacgtgtaatatggatatgtcctcagtgctaagaagcttgattttctgaaagcttagctctgatacgccacctgtgttttaaactttcggtggctatggctagccctactggtccagaccttgtttttcaatcttgtctgacaggactccttgttcaaatcctttgagccagtgaaacaggagttacttctcctcggggatatatcctgttttcttattcttttgctcacactgtttccagatctgggacatttctatttctggcacgtcaaaatctacctcctcttctagggtgtgggttgaaatcaggccattctttcttaacagttttcctcgatgttctgctttcctccgtgaacttngaagtcgtccctttcccttttgtaattcgttaacaatgtttcttttct

SEQ ID NO: 3801 - DNA, 468 bp, Homo sapiens
gctgctgccccaacctggcttgacaggcttggtctctgcaagtggctctcagccccttcttctttcctgcctcaccttccaattcgtttgccgccgccgtcccgcagctgctgtttccggagttgccccttccccatgttccggggcaggagtccgcaaagcgaagatccgcccgccggttccccatcatgtccgaactgactaaagagctgatggagctggtgtggggcaccaagagcagccccggtctctcggacaccattttctgccgctggacgcaagggtttgtgtttagtgaatcagagggatctgcattagaacagtttgaaggtggcccctgtgctgttattgcacctgttcaggcatttcttttgaagaagctcctgttttcttcggagaagtcttcttggcggggatttttcaaaggaagagcagaaggactcctttgtcataccttgtgtgatattt

SEQ ID NO: 3802 - DNA, 1187 bp, Homo sapiens
tcgagagcaaaactccatctgcgctcattcttacaccaaccagagagttagccattcagatagagagacaagctaaagaattgatgagtggcctgccacgcatgaaaactgtgcttcttgtagggggcttacccttacccccacagctttatcgtctgcaacaacatgttaaggttatcatagcaacccctgggcgacttctggatataataaagcagagctctgtagaactctgtggtgtaaagattgtggtagtagatgaagctgataccatgttaaagatgggttttcaacaacaagtgcttgacattttggaaaacattcctaatgattgtcagaccattttggtttcagccacaattccaactagcatagaacagctagcaagccagcttctgcataatcctgtgagaattatcactggagaaaagaacctaccttgtgccaatgtacgtcagattattttgtgggtagaagacccagccaaaaagaaaaaattatttgaaattttaaatgataagaaactctttaagcctccagtgttagtatttgtggactgcaaactaggagcagatcttttgagtgaagccgttcagaaaatcacagggctgaaaagcatatctatacattcggagaagtcgcaaatagaaaggaaaaacatattgaagggattacttgaaggagactatgaagttgtagtgagcacaggagtcttgggacgaggcctagacttgatcagtgtcaggctggttgtcaattttgatatgccttcaagtatggatgagtatgtccatcagctgaatattatttgggttgtgcccttctctggaattaatatcaacgcatctcttattgccttgttatacagtctactcaccacaatcaatatgaagtttactccataaacagaggtatggtacaagaggtaacgtgtcatccaaggtgactttcctggcagccaccagtaaactgactccggacagataggactcttttgttgccgccaaggcatacttacaatgacctcagaggctctagggccacgagtgtgaaaaccaaccaatggataattaagtaaacacagttctcttgttctactgttagtgtgagaacctattttatattttataatgtgttgcacgtgtgatgatataggacaaaattacaaataaagcataagacgagtg

SEQ ID NO: 3803 - DNA, 814 bp, Homo sapiens
attttcaaccttatggtgttggtggagtgctcatgtgaagagtgaaactgacttaagaataaaagaaaaagtgggcaaaactaatgctaaacttgagaccattgggcagaaatttgcctgtgtgtgtagagtaattggtcttgagtcaaagtaactatgcttatttttaacatcactgaatattttctagcgttacactctatataggcttgtagaaataaacccaggggtaagccccagaaattgaatatcagtcctaaagaaagcctatcaagagcatcctattctctttaagagctgctattcgaatttaggactgggctggtttgctgcttattctctccgagggcatagggcagccacacttgaattttgccaagtatggcagataattccaacttgtagtcaggatcatcaggtaatagcattataaggggagctgtacagactgtatactttctacagtttgttgaaatagaaacatttatatggatacatacatctgcaaaggttagggagaaaacggtagccctggcagagaagagctagttagtgtatttcaggatagggccaagggaagctgtcatttctctactaagtcctcattgtggaaaagccacaaatgtcccctagtacagtaataaggaaaaaaaggctgagcgtggtggctcacacctgtaagtccccaggactttcggaaggattgcttgagccccaggagttgcagatcggcccaggacaatataagaaaaccccatgtattagaaaaaaagaattagccaggcgtgatggtgtgggtctgtagtctcagctt

SEQ ID NO: 3804 - DNA, 3330 bp, Homo sapiens
ggggccgcgtcgacgcggaaaagaggccgtggggggcctcccagcgctggcagacaccgtgaggctggcagccgccggcacgcacacctagtccgcagtcccgaggaacatgtccgcagccagggcgcggagcagagtcccgggcaggagaaccaagggagggcgtgtgctgtggcggcggcggcagcggcagcggagccgctagtcccctccctcctgggggagcagctgccgccgctgccgccgccgccaccaccatcagcgcgcggggcccggccagagcgagccgggcgagcggcgcgctagggggagggcgggggcggggaggggggtgggcgaagggggcgggagggcgtggggggagggtctcgctctcccgactaccagagcccgagggagaccctggcggcggcggcggcgcctgacactcggcgcctcctgccgtgctccggggcggcatgtccgaggctggcggggccgggccgggcggctgcggggcaggagccggggcaggggccgggcccggggcgctgcccccgcagcctgcggcgcttccgcccgcgcccccgcagggctccccctgcgccgctgccgccgggggctcgggcgcctgcggtccggcgacggcagtggctgcagcgggcacggccgaaggaccgggaggcggtggctcggcccgaatcgccgtgaagaaagcgcaactacgctccgctccgcgggccaagaaactggagaaactcggagtgtactccgcctgcaaggccgaggagtcttgtaaatgtaatggctggaaaaaccctaacccctcacccactccccccagagccgacctgcagcaaataattgtcagtctaacagaatcctgtcggagttgtagccatgccctagctgctcatgtttcccacctggagaatgtgtcagaggaagaaatgaacagactcctgggaatagtattggatgtggaatatctctttacctgtgtccacaaggaagaagatgcagataccaaacaagtttatttctatctatttaagctcttgagaaagtctattttacaaagaggaaaacctgtggttgaaggctctttggaaaagaaacccccatttgaaaaacctagcattgaacagggtgtgaataactttgtgcagtacaaatttagtcacctgccagcaaaagaaaggcaaacaatagttgagttggcaaaaatgttcctaaaccgcatcaactattggcatctggaggcaccatctcaacgaagactgcgatctcccaatgatgatatttctggatacaaagagaactacacaaggtggctgtgttactgcaacgtgccacagttctgcgacagtctacctcggtacgaaaccacacaggtgtttgggagaacattgcttcgctcggtcttcactgttatgaggcgacaactcctggaacaagcaagacaggaaaaagataaactgcctcttgaaaaacgaactctaatcctcactcatttcccaaaatttctgtccatgctagaagaagaagtatatagtcaaaactctcccatctgggatcaggattttctctcagcctcttccagaaccagccagctaggcatccaaacagttatcaatccacctcctgtggctgggacaatttcatacaattcaacctcatcttcccttgagcagccaaacgcagggagcagcagtcctgccctgcaaagcctcttctggacttgaggcaaacccaggagaaaagaggaaaatgactgattctcatgttctggaggaggccaagaaaccccgagttatgggggatattccgatggaattaatcaacgaggttatgtctaccatcacggaccctgcaggcaatgcttggaccagagaccaattttctgtcagcacactcggccagggatgaggcggcaaggttggaagagcgcaggggtgtaattgaatttcacgtggttggcaattccctcaaccagaaaccaaacaagaagatcctgatgtggctggttggcctacagaacgttttctcccaccagctgccccgaatgccaaaagaatacatcacacggctcgtctttgacccgaaacacaaaacccttgctttaattaaagatggccgtgttattggtggtatctgtttccgtatgttcccatctcaaggattcacagagattgtcttctgtgctgtaacctcaaatgagcaagtcaagggctatggaacacacctgatgaatcatttgaaagaatatcacataaagcatgacatcctgaacttcctcacatatgcagatgaatatgcaattggatactttaagaaacagggtttctccaaagaaattaaaatacctaaaaccaaatatgttggctatatcaaggattatgaaggagccactttaatgggatgtgagctaaatccacgggatcccgtacacagaattttctgtcatcattaaaaagcagaaggagataattaaaaaactgattgaaagaaaacaggcacaaattcgaaaagtttaccctggactttcatgttttaaagatggagttcgacagattcctatagaaagcattcctggaattagagagacaggctggaaaccgagtggaaaagagaaaagtaaagagcccagagaccctgaccagctttacagcacgctcaaggagcatcctccagcaggtgaagagccatcaaagcgcttggcccttcatggaacctgtgaagagaacagaagctccaggatattatgaagttataaggttccccatgggtaataccattaacattttctaagtatagatttaaaactctggatggcggtgtgggggacaaatggttgctgaggttgatttgtactcctctgcttagggtaggaagtgtatgacgggtggtgggattccatgcaccgtggcgggtcagtgatggcagagaagtgggtggctgtgttcattagagacattctgcagctgtcgtttagagcccacatgagcttaacgacactagacgcagaaaatccacggtaactgcagacagcactagatttgaaagctggcactttagatataactttgcttatattctaactctttggtgcaaatagaaaaacatcagcttatcctcttgatatgctttgcgtctgtcgtaaataggtattcctttgaataattattcaggataataatgaaagaagttagattaaactacttgactgctgtactttcagagggagaaattctacttaccacaattcttgattttccatgcccttgatgggtactgttaatgtcactgtatatactctttattttacgctttgtctcatatccaaaatca

SEQ ID NO: 3805 - DNA, 555 bp, Homo sapiens
ctcaaccatttacaaatgtataaatcactcttagccttcaggccacacaaaaacaggtgctgggctggatttggcccatgagctgtatgtagtttgccaactcctgacctaaagcaaaagcaaagaggctgcagatgggagatttctgtcagtcaggttcccaacagcccatattacccacaaaacaaagacccagcacatggacagcagctacacccagagtgcccgctaacaatgctggtctctaaacactgaccattatctctgcttcctttctcccctcaatcttgaagagccagagtctacaagggcctgggggcgggaagggagaagagaatcaaaggacagaaacaggaaatcaactcactccgtttctccactacaggtttctgggcctgaacaagactcaacctcgagaggggaaggagagagaagtggggaaaggagataggggaaagagagggggaaaagggagggagagagaatagagattttaaactaggtaaggccagactttacaataccttaagctaatgggaaagcgttagtcaaccc

SEQ ID NO: 3806 - DNA, 475 bp, Homo sapiens
  misc_feature (1)...(475): n = a,t,c or g
acactcctttcctgttgtttccattcatgccttaatgaatgaggcctgtgtttatttcattttgagagccttctatgtttcaggcataatgctaggcgtggagaccatgatagacaaaacaccctgctcttgaggagctcccatcagtccccaaagccagcgtaagtgtggatctgtcagattggttggttggattgcttcggtcccagcttcaggcctcctcccttggtttcaggttaaaactattcctttctcagccacctgtctcccaagaactgtggccactgaaaatccttgggacttgccttggttctcacaagcacttttctcagtctgagtctggcacagagtatgggctttttacccttttgtaaaagccagagaaccagaggaagagagcacggtattgttaggactttnaaaagcagggaaggtgtggggttctaaggcactgctatttattagttagggcaag

SEQ ID NO: 3807 - DNA, 685 bp, Homo sapiens
gggaagttcccggcttgggagcggagggccggtcggaagaacctcgggtgctggcgcgcctgaagttgcagaccagactgaaatgtgcgagacatgtgcctttttcttaggaaaggccccaggtaccagaaaggttttcagcgcgccgacctacggggctaagagggctgaaataagaaccagtgactgagcgccgggaggtttaaggtttatggaagatgttcatcgcgccgtaccctactagaggtttggggacgtgggacacagcccctgcgttcccgccgcggaccccgtgataaatacacagacacacaaaatcactaccgccttgaatctggacagctacctcaggtggttaatatctaacaggagcagagtggagctcagaaagactcagcgtgggtgctgggttccggcgcgaccagcctgatacctaggtcagcatctcagccacacaagcaggcggcagttctgtcaggaattactacatctggtgattccacttctcatagctcaccgctgggagaataattcctcaggattaacaagatctattccagaggatcctcactgctgaagcgattttagaagacagtgtggtctgttgacagtatggaatattctttacccatcagatatgatctgtatgtgattggaaggaaataaaccaactgctaacaacaaa

SEQ ID NO: 3808 - DNA, 98 bp, Homo sapiens
tgcacccggccaaggatagctttaaatcaacaaagtaataagttttgttacagtgtcagcccacccgcaggtagacataccttagcttttacgtaggc

SEQ ID NO: 3809 - DNA, 517 bp, Homo sapiens
gcggccgctggtcccggcgcgccaccttccccgtgcaagacccggccagcggccgctctgggcatggtagccgactgcggggtgcgagaggccggccgccgtgcgctgcctacgaggctttctgccgctggagggaggtctccgccaaggagaggagttcattacttcggaagtggtacaatttaatgatacaaaataaggatgaccttgccagaataatcacagctgaaagtggaaagccactgaaggaggcacatggagaaattctctattccgcctttttcctagagtggttctctgaggaagcccgccgtgtttacggagacattatccacaccccggcaaaggacaggcgggccctggtcctcaagcagcccataggcgtgggctgcagtcatcaccccgtggaatttccccagtgccatgatcacccggaaggtggggggccgcctggcagccggctgtactgtcgtggtgaagcttgccgaagacacgcccttttcgggccttggccctg

SEQ ID NO: 3810 - DNA, 539 bp, Homo sapiens
  misc_feature (1)...(539): n = a,t,c or g
ggaaagagggagttaatctataatgaagatcaccagtgaaggggaaaggggtcttccctggaacgcttcagtcatatacgacattttaccccaacaataatggacctgtntaagggaggtatgtttgggagaagattccagaaggtcttgagacaatcccagatgaaggttggtntggggctgtgctgctggagcacccagagagtgaaaagaggttatctccctctgtnnnnnnnnnnnnnnnnnnnnnnnnnnnnnnnnnnnnnnnnnnnnnnnnnnnnnnnnnnnnnnnnnnnnnnnnnnnnnnnnnnnnnnnnnnnnnnnnnnnnnnnnnnnnnnnnnnnnnnnnnnnnnnnnnnnnnnnnnaannnnnnnnnnnnnnnnnnnnnnnnnnnnnnnnnnnnnnnnnnnnnnnnnnnnnnnnnnnnnnnnnnnnnnnnnnnnnnnnnnnnnnnnnnnnnnnnnnnnnnnnnnnnnnnnnnnnnnnnncatttcaatatttctgatcaataaatgtgcctgtccttcaaaaaaaaaaa

SEQ ID NO: 3811 - DNA, 773 bp, Homo sapiens
gagcaataaagtttaattaaccagtactgtgaggtcaccttcacggactagcatcccttccgtgagctgaaggactgaataagcagaagcacaggccaaacccatccctccatgctccccactgtgcagatgggctcactgaggctccggtgtacattgcttgctcagcactggatctatttcgggccaaagtgtcagcagaactgatacccacagggcatccaagtccacatccagactgggctccctgtaatgccatctcttaaaccgaaccactgcctgccgatggtgagtttccaatcacgagctgcactgggggtgctggaggcctggctgggcacacatcctggtgggtatgaaggggatttgggagtggcatctagaagatcagcatgaggggcagagaggagaaaaagaacccatggcttgcagccagcaggggaaacgggcccagtgcacagacggggcccctagtgaagcccatccaggccaactgccctcagtgtagatctgagtggaacaggacaagactgataagtgaagaaaatgagagaagctgagtgggcaggggccccactgcctcctgcctgcaaggaggccacgctgggtgtgcaaacggaatagcaagtacacaaagatcctcactgagggggcccgaagagacatgaggccagaggagtcagttattccttgccggccaatatgttaggaccagctgctccatggagacgatctggtccactatttcccagaaactggaatttgctgcttgc

SEQ ID NO: 3812 - DNA, 483 bp, Homo sapiens
  misc_feature (1)...(483): n = a,t,c or g
ggctatgccacgggagctgggcattgccaggagtagccactggaatggaaaccatggtgaccaggactaaagtcaccattttacccagggtggtgtgtcccacatggcaaagcaagcattgtgtcctgtacagaagactgtaaactctgtcctgccctgtgattctggtgccttctccaatcccagcctcagactctgggagacccttggccccctcccctcttcattggccaaggctgctcaaagccctggggacaccttcacgtttattattcaacagaggcagttgctaggagggaagcagccttccccgccctccaggagggggtgttntgggtggccccgagccctgtttgttttgttgttacctttgttcttcagttagttgacccaggaggggggcagggcaggcttgggggttgttgttcttttnggggggcaacgttactnttttgggggttcccaggttttnccttngcaaat

SEQ ID NO: 3813 - DNA, 728 bp, Homo sapiens
  misc_feature (1)...(728): n = a,t,c or g
gaataccctgaaaaaatgcacaaactactgtttgtccaaataaagttcattaagtaatgaacagtatccataagaaaatttttctttgaaaatgacagaagaaaaatttgaccctttcaaattacaaatgccaaaattggtctttaattctctttgaattaaagggatcttgagagaatttaagtacacaattcctgaatgctatgcctttcaaactttgcccatatgactgtaagtttgtcaaggtaaatctcccacacatcagaaagcattgggaaaatggttctcatttaaataagataccaataaggcagtctcaaaattaaatgtattacttcatgccaaaaaataagaaatgttgtcttttataaatgcttgtatcattgcaagacagccagtcactaagaacacagaaattagaactgggaaacactttcattaaagaagagaannnnnnnnnnnnnnnnnnnnnnnnnnnnnnnnnnnnnnnnnnnnnnnnnnnnnnnnnnnnnnnnnnnnnnnnnnnnnnnnnnnnnngatgaataggatttggaaatgctagaaagaatccagaaagaatgtatgaaactaagatgcaaaggaaatatgagattccaaacatgaccttcagcgtgagtctcagttactatatttacccttgtgtgtaagaatcagtgtattcttattaatgtggaaatgtaagtccctagggattcaagtgaaataaa

SEQ ID NO: 3814 - DNA, 528 bp, Homo sapiens
  misc_feature (1)...(528): n = a,t,c or g
ggcttctaagaagggcaagcagttggtgctggaccctgtggtggaagagaagatccagtccatcccactaccgcccaccacccacacgcggctgccggcctccagcatcaaaaagcagcccgactctcccgcggggtccacgacttctgaagaaaagaaagagccagagaaggagaagccgcccgtggctggcgacgcggagaagatcaaggaggagagtgaggacagcttggagaaatttgagcccagcaccctgtacccgtacctgcgtgaggaggacctggacgacagccccaagggagggctggacattctcaagtccctggagaataccgtctccacggccattagcaaagctcagaatggtgcgccctcatggggtggctaccccagcatccatgcagcctaacanctcccgggcaacgtnaagccactgccggcggccgtncanaacgtncaaggtgcaacngtccaatgctgggggggtnaaatccctntcttcggcnaancaaangccctcctgaatcc

SEQ ID NO: 3815 - DNA, 1048 bp, Homo sapiens
ttttttttttaaataataatctagaatttattttttctagaagagacttagacaaatccaatatccatcaaggtaacacgagtctatctctgagatggaaagtgtcttcctctccctgaatagagactttaaggatcactagtgaatctgggaataactggagagatactcccaattcatctagaatgactactaacaatggcactatatttcctttgagttctgcagtttagggcatagttagaaaagatttaagatgtcctttcccaacattctttccaatccattagcgtagaataactccagttcctggatgttccagtattgtagtttcaaaaaatggtagaagtactggcaggaaaagtcagggtggattccagtgaatttaagcccctgctatagaatctcttctgtgagcataataatggtgtctgggtatctgcatcacgccgagcctcctgctttagttggtggaatttgtgctgcgtccagccatatactccacagttgagtagaccctgagatgttgccgttagagcctggagaacataaagggccatgtgaagcttggtgtcctgtggcttagtcagctttatgatcattagaatgacagctgggccccagcagcaaaagaaggccactgggtagaagcgcacccgttggtccacaatgtgaatcactgcccactgttcactccccagaaagccagttgacttcacaaacttcttatacaatgtctgggctcggataagtaagaccataatggtaaggaggctgagtacaaagctgcccaggaaaatggcgataccataaaaataaagtgtgctacagacagatgtgttggcagaaggtggaagttcagccatggctgatggtggtgagtgcatcaagatacacttgtggctctgactgaagttttggaaacattcactagtatttcccagacagaatacaggtgtcatcaatagcagaggtatcaggcttgagaaaacaaaggccatttgaccaactcgacaagtataatctatcaccagtggagatgtgctcc

SEQ ID NO: 3816 - DNA, 792 bp, Homo sapiens
tttttttttttttctggtcaaactccctttttattaagggttatcaagctgtacacggtccctaccctgctccgctccgagttcgggcagcgcaattcaccactctcccaaagccggaccacagctgggtgaggggtgggacagagagtaggagcagtcccagcatgcagtgcagcagcccaaagcctcgggcgaggcatcgcccttcatcccccttcagggcacagcgagatgcgggccagagctcttttgctgggacgtacacagccaaggtcaccctccagcccggtctgtcccatgtgcaggtgatggggggtacgataagcagcaatgagggcccaggaagacctcagtctcctgggggcccatcctaaaaagatggcaagggcagcaaagtatttccatcctgctcctacaatttagaaaccttcttttttagtgtcaaaatatagcgttgaggggagctggacgctagggtcttcaccctaacgcaaagcaaaagccgaacggaacgggagcaagcgaacagaacaggagcaagcagcacacacaggccagtgatgtgcaagaagcggagagaggtgagccggctgcagcactgggcgagaactgcgggtgaggtaagggccacagcctgacctgctcatctattgagggggctagggaaggttgcaggggttgagggtccaggcccaacctccccactccacagttggcacaggttctccctgcttggcagcttctatcgtgggcagcctctggggacttgcaggggtaggtgtaaaggtcgac

SEQ ID NO: 3817 - DNA, 1961 bp, Homo sapiens
taaatggaagacagatatcaagaaatatcatcgtattcagtgtcctaaccagggctgtgagactgtctacagcagtgtatctggccttaaagctcacctgggctcttgtacattgggaaactttgtggctggaaaatacaaatgtcttctatgtcagaaagaatttgtgtcagagagtggtgtcaagtatcacatcaactccgtccatgctgaggactggttcgttgtaaacccaacaacaaccaaaagctttgaaaagctgatggaagataaaggcagcggcagcaagaagaagaaaagcggaggcagcagcacaggagcagaaggtctctaagaaggcggcagcagcctgggcattgagcttcccgagacagagctgagtcttagagtagggaaggatcagaggaggaataatgaggaactggtagtgtcagcctcctgtaaggaaccagagcaggagccagtgccagcacagttccagaaagtaaagcccccaaagactaatcataaacgaggaaggaaataggcagtcagtgtaaaagtgctcctaggaaagcagatgtgatgctgttgtcacggggacctgtgctgggaggactgagtgaagattctttcagctgtttgtgtaaggctgtgactttctcagctccttcctcctgtgtaaatttcactgtcttcccttcttacattttgattcccccctccccttttagtaggttttcctgctattcctcgtcaagtcctcttgtttttttatcttgcccaaagagctccctctcaagggccaactataggctcctcttggccctgtaacaaaactaaggaaacctctttggttgtcctttccttcctggggtatagaatgttcttggaagctccattgatttagtagctgctccatcatctagcttgtgaaaaccattccaaactaattttttaaaaccataactgatttgtcattttgtatttgtgatataacaagtctagaagttagaactgttgtcattcacataataagattactctgtctccttgggaaaaaaactttatggaggctgtttgtcctctcaatatggttttaagattgaaagtaagaaaacggatttaggatgaaaactctagaactaccctatgctgtttatactgggaaatgctttgtaccaagtagcagtgactagacccacagacatgaaaagcaaccttaggagtaaagtgacccaaacattaaaatgacaggaaagagaaagtagaagcagcaataaatactgccccaactttcctgggagcccgaggcctcatccatagctatgatcacttgccctctgaagcttatttttgcttctttggttttaagaattgagaaatatcacattgcccctgatgttttgacagtctcctagtgctcctggtagtgccactaagggaaaaccaaggtgcgcattccttctccctggactttaccttacttgttagtctacgccccactgtttccacccatccccttagccaacctctgtctttttgaattttctgagaatattgtcctatcctcttttatatatggagttctctcctctttatatcctgagactttgacaccagatgtagatatttatctggagctggaaagaaaaattctttttctgtacctcatgcctatctggtaatgtttaatgggttatttctctttgagggtggctttctctggaacattggttagagcagctttgttgtcgtgtttctggattctcttccccattttgcgtaaatattggtcttatatattcttgcctattttgtgggcatatgcccacataaaaaatgaacctgatatagacaagtactaccttttcaaattctgaaaggctattaccactttaactctttgtgctcctccaaatagctttaaaatgtgggcttttgtgaaggaccacttttcaaacaggggagcactggaaacc

SEQ ID NO: 3818 - DNA, 548 bp, Homo sapiens
caaattccaattaacagtttctcaaggcacattttgaacaatggttcaggtcaagacaaaaataaatcttgaagtaaaccgatggtcacaattattgaaatttctgagggatggatacttggagcccatctagtgagagggtcaatggctgcaagttgctgctaggcgctactgtatgcctgcctgctctcctgcaggtgtctgtggatgcttcctctggcctcattcatttgcacggtggcctcacgacacagcaaggccatgatgacatttgataggtccatctccttcgggtgcctggctgcctgaataaacccatttagccacttggtgatgccagcatatgctcctgccacctactgaaccacctctcctcttgccaacatctcacaattcccctcattcctcagcacctggcttgtgatgctgcttcacggggacgtcgctgcgccctgcacaggatggctgggctgtccccttccctgcactccctgtgtacctccagtctaatcatcaactcactgctctaccatgctgggtctatgagc

SEQ ID NO: 3819 - DNA, 1513 bp, Homo sapiens
  misc_feature (1)...(1513): n = a,t,c or g
tcacattctgtattcatacaaaaactttgtttttctctgacaaactgtacacatagaaacaaatttccaaatggacaggaacttaaatttgtggagatgccccatgtcttgtgagacttaaaaaaaagaaaaagatcccagcttttatcttcacaaaacaacatgggagttggggcaatgagggtggnacaggacagggccagccaggctggttagctgggcagcagtctcttcatcttgaaggacctcattgaggggttcctgggattcagggtgcccagaaaagagttcagggctacaatggtgcagggcttccttttgtttctctggtgagtccacaagaagttcttacatactttccagagaggcctcagggtactcagttccagcttctaccgaccccttccaccaccccgtgaagctcctcgcctcggcgggccagagttcatgttactccctctaccccagttactgccactccggccccctcgagaaggggtgccactgcctggagggcccccaaaaggttcatctctgtggtatccatcgtggtgctctccgtctaaggagctggaacgcccagatttgggcactctctgagcaggtcctgggccccctcggcctttgcctcctcggtcttcagaagggcctcctggggcctccatctctctgtgctcagaagtgcctgggccatcatgccaggggcgctttcggggaggtagggatgccatgtccatgccttggagagaagaggagcgttctctgctggctggggaatgaccgtcgtgagggggatgatcagggcggggagtatcacgaaaatgttcatgacctggcccaggctctctgtttccatcccaggaatctgcttccgccctccttcaaagcgagggaactcgtcaggagtgggaagtaaacccttccttcctcctcgtggggtaccccgacctcgacctctgagatctcgtcctcgggccggcttcctcagaagcatcaaaattctcctctggaccaaagtcttcaggaccaggaaaaccatcccttcctctggggggagcacggcccctcatgcctcggcggggctcctcttctgaaactttcttcttctgcgccctcgaaaacgtgggtcctcgggatcccgggggaaacgttcatctccgggcctgcggccttcccatgcccccggagggcctcgggctgcaccccggccatccccctcgctgaattccctgtgatcagggggaaacggaggcccagggccccctcgcctccacttctcttcttgcggtaaaggtcctcctcgcccctcaaattcacgtaaccggtggccaaagcgcttgtcagggtggaagtcatctggtctgctgaagtcatcggggaagtctgggtgagggccacgcctatcagggggacccctgcagtcctggccaccccggaaaggccccctctcgggcccatgctcaggcccgccgctctgctcatgccgcctctctgacatcgggcccatgtgatg

SEQ ID NO: 3820 - DNA, 298 bp, Homo sapiens
tttgtcagttacttatatactgcattggacaaaagaatactaagttgtgaagaagcaactaaattatgtggggagacttcaacaatatgagttatcttaacaaggtctgtaaagaagtctttcagccttggcttctcgtccttaaggatacagatgttgcttttccttctagtataggaagggtgtctttcacatgggaatttcatctttaatttatgaggtgtccttgccatcatttgctttcactttctaccgatcggtacttagtatgtctcagaagcaaaacagaacaagccag

SEQ ID NO: 3821 - DNA, 244 bp, Homo sapiens
attttataacatatatctcatctcatcctaattttaaagattatcccatatatttgctgaagtttaaacagtgtctttctaaagctttgcacctcatgaagacatatactgtgaacacactacagaccctcacaagtcagttactgaaaagggatccttcatctgtacctaatgcagacaatgcctttcacattattttatgtgaaatttcgagctgctgcccccaaagtcagaactcttattg

SEQ ID NO: 3822 - DNA, 515 bp, Homo sapiens
gacgcaagcagctggatctccggtaactgagacatagggtataactgttgtcgcggcggaggaagtgaggacggcgccaagggccttccgggccagtgttggatccctgtagtttgtgaagatggtgttgctaacaatgatcgcccgagtggcggacgggctcccgctggccgcctcgatgcaggaggacgaacagtctggccgggaccttcaacagtatcagagtcaggctaagcaactctttcgaaagttgaatgaacagtcccctaccagatgtaccttggaagcaggagccatgacttttcactacattattgagcagggggtgtgttatttggttttatgtgaagctgccttccctaagaagttggcttttgcctacctagaagatttgcactcagaatttgatgaacagcatggaaagaaggtgcccactgtgtcccgaccctattcctttattgaatttgatactttcattcagaaaaccaagaagctctacattgacagtcgtgctt

SEQ ID NO: 3823 - DNA, 641 bp, Homo sapiens
ttaactggcaaaggcgagttttacttttttttcctttaacagacgtattgagatatagtttacacaccataaaatttccccatttcatgtgcacaatgtttagtaaatttacggagttctgaatccatcaccaaaatcaagctttgaaacattctgtcaccagtagaaggtcgtaactgcaagttgtccagattcctggcgttttgcacaaagaattggacaaaacgccctgcaaagcaaagaaagaatgaagcaacaaaagaaggaaagcaggaatttattgaaaacaaaagtacactccacagtgtgggagcaggcctgagcagctactcaagagcccccaatacagaatcttctttggtccaaataccccccagaagtttcccattggccacttcatgcatacttcatgtaaatgaagtggtagccctcaatcagtctgattggttgcagaaagcagccaaccagaggctgaagtgaagttacaaaggtcacactcctgtgcaaacatctgattggttgcaaaaagcaaccaatcagaggctaggatgaagttacaaagttatacttctttgcaaatgaagacttgaccagcaatcagtcttacttgttgcagacagccaatttcccatctgcctcac

SEQ ID NO: 3824 - DNA, 677 bp, Homo sapiens
  misc_feature (1)...(677): n = a,t,c or g
gagccatggctcgcagacactgcttctcctactggttactggtatgctggttggtggtaactgtggcagaaggacaagaagaggtatttacgcctcctggagattcacaaaataatgcggacgctaccgactgccagatctttacactcacccctccacctgccccgaggagtccggtcacaagggcccagcccatcacaaagacacccaggtgtcccttccatttttttccacgaaggcccagaatccattttaggtttccaaacagacctttcgtcccttcaaggtgtaaccaccgttttccattccagccattttattggccacaccgttaccttacttataggtatttccccagaagaagactccagagaggaagctcatctgaggaaagctgagagggaagagaaacccaaacatactgaagcaaaaaaaagcctatccttcagaaaaaagcaacaaaaagatttctgttttatctttcgaaactaaaactattggatttgaagattaagtatccctaaacatcactgaactagaaactgttctctttgtcagcagtgaagatattggatcataggttattgatggttgcaaaattggacaataaccacgttatttttatcctcaacctcttatggtcacaggatatttatgcaaatantttctttaaatgg

SEQ ID NO: 3825 - DNA, 37 bp, Homo sapiens
ataccctgccgtgtgaggtgtcagtgtgcccctgctg

SEQ ID NO: 3826 - DNA, 1085 bp, Homo sapiens
  misc_feature (1)...(1085): n = a,t,c or g
gccatgagcttcaataccctgatatttgatgatggcctctcgatagcgttccacttcgtaactctcggcgttgtaatacttcacctgatgaattcaaaccaaatttatttggcatgggcacagcacatggcactcgggtcattccccccaactctcaatcctccttcctgagttcaaacatcacacacaaacatcacacccccagctctctgtcagccccagtggtcctggttacactcctccacatctccacgcctcacaccactgccaccgggccctctgttaccgtctcgaagtttaggcagagagtccactgcttcgtgcccgggtagcgttctcctgtgtgttcatagcacgacgaaacttggttctccactcagtgaccacaatggtcagggtgaggtaaagactcatgcacaggaacacaatgaggccaaacccaggcgttgaagaacatgctgaagtagatgatgccaatgatgatgtcggccagcgtggggatgacattgaacaccaggtagctgagcagccctgtgacactggatgtgccccgatccgcgatccgcagcacctcccctgtgcggcgccccaggtgccagcgcagtgagagctcgtgcaggtgggagaagatgagcagctccacccgccgagacgtgaactgctgcacccggatccacaggaaggtgcgcaggttgctcacgaagcctgtactgccagtgccacccccctggaggaacttgaggaagacgtaactggtaacagtccaggccagagagttccaaggtgccttctcagtcagcaagttcactgctggcccaagtctgcccttgcccaccaccactgtgggctgttccaagacaccagggccaagttctcagctgcaaacgccacagtccagaggagcaggagaccagggctgtgcctgaacttgatccagatgcccattgccagacgctgccgtgcctggctccgctccacgacaagcagccacaggccacaggcgctcgtgccnnnnnnnnnnnnnnnnnnnnnnnnnnnnnnnnnnnnnnnnngtattaaattngtnatcatgtaatancngtttt

SEQ ID NO: 3827 - DNA, 378 bp, Homo sapiens
  misc_feature (1)...(378): n = a,t,c or g
gtgagacccggcgcgttgctgtgaagacggacgggtctggaagaagtggggtgcggtgagctgagcagaccttttccgcttcgacgtggggactgcattgaccccggcctgctggcggggcgggtaacgggttgagccagggtggggctgctcatcggcatggagctnaggtctgaagacccagcacaggcgattcctttctgcgacgagacaattgctatggtaaccaaagtgctgggtcagcggggattgaggctccaggatcaagactggtgtctttccggaagacccttggctaaggcttccccggaaccggcttcttccctgaatgaatccgccatctccttgccggggtctttgacacccgaacaagcgaaa

SEQ ID NO: 3828 - DNA, 2114 bp, Homo sapiens
gattccggcagtgacagcagtgaggatgatgacgaaggcgacgaggagggagaggacggagcccttgatgacgagggccacagtgggattaaaaagaccactgaggagcaggtgcaggccagcactccttgcccgaggacagagatggcgagcgcccggattggggatgagtatgcggaggacagctctgatgaggaggacatccggaacacggtgggcaacgtgcccttggagtggtacgatgacttcccccacgtgggctacgacctggatggcaggcgcatctacaagcccctgcggacccgggatgagctggaccagttcctggacaagatggacgatcctgactactggcgcaccgtgcaggacccgatgacagggcgggacctgagactgacggatgagcaggtggccctggtgcggcggctgcagagtggccagtttggggatgtgggcttcaacccctatgagccggctgtcgacttcttcagcggggacgtcatgatccacccggtgaccaaccgcccggccgacaagcgcagcttcatcccctccctggtggagaaggagaaggtctctcgcatggtgcacgccatcaagatgggctggatccagcctcgccggccccgagaccccacccccagcttctatgacctgtgggcccaggaggaccccaacgccgtgctcgggcgccacaagatgcacgtacctgctcccaagctggccctgccaggccacgccgagtcgtacaacccaccccctgaatacctgctcagcgaggaggagcgcttggcgtgggaacagcaggagccaggcgagaggaagctgagctttttgccacgcaagttcccgagcctgcgggccgtgcctgcctacggacgcttcatccaggaacgcttcgagcgctgccttgacctgtacctgtgcccacggcagcgcaagatgagggtgaatgtagaccctgaggacctcatccccaagctgcctcggccgagggacctgcagcccttccccacgtgccaggccctggtctacaggggccacagtgaccttgtccggtgcctcagtgtctctcctgggggccagtggctggtttcaggctctgacgacggctccctgcggctctgggaggtggccactgcccgctgtgtgaggactgttcccgtggggggcgtggtgaagagtgtggcctggaaccccagccccgctgtctgcctggtggctgcagccgtggaggactcggtgctgctgctgaacccagctctgggggaccggctggtggcgggcagcacagatcagctgttgagcgccttcgtcccgcctgaggagccccccttgcagccggcccgctggctggaggcctcagaggaggagcgccaagtgggcctgcggctgcgcatctgccacgggaagccagtgacgcaggtgacctggcacgggcgtggggactacctggccgtggtgctggccacccaaggccacacccaggtgctgattcaccagctgagccgtcgccgcagccagagtccgttccgccgcagccacggacaggtgcagcgagtggccttccaccctgcccggcccttcctgttggtggcgtcccagcgcagcgtccgcctctaccacctgctgcgccaggagctcaccaagaagctgatgcccaactgcaagtgggtgtccagcctggcggtgcaccctgcaggtgacaacgtcatctgtgggagctacgatagcaagctggtgtggtttgacctggatctttccaccaagccatacaggatgctgagacaccacaagaaggctctgcgggctgtggccttccacccgcggtacccactctttgcgtcaggctcggacgacggcagtgtcatcgtctgccatggcatggtgtacaatgaccttctgcagaaccccttgctggtgcccgtcaaggtgctgaagggacacgtgctgacccgagatctgggagtgctggacgtcatcttccaccccacccagccgtgggtcttctcctcgggggcagacgggactgtccgcctcttcacctagctgttctgcctgcctggggctggggtggtcgtgctgaagtcaacagagcctttaccctgtgcaaa

SEQ ID NO: 3829 - DNA, 309 bp, Homo sapiens
acgagattcgttgttatgatgatgatttgagggccaggtaaactggggctcaggaggtgaaatgactggtctgctatcgcagtgctgatatggacagagccaggagcagccccacggactctcgttagagctttcctcacacttacttgtgtagccttgggcggttgtgtccctgtcctggggccttcagtttccccatttcatattaacaaagggctgagatttgagtcagcttggccatgctgggtggggtacaccagagcctggagccagaattcctcctggattccttccctgtttttcagtttt

SEQ ID NO: 3830 - DNA, 559 bp, Homo sapiens
  misc_feature (1)...(559): n = a,t,c or g
ttttgtgcgtgtgtgtgggtgggggttgtgtgtgcaccttgggtgatgaaaatatgcagtagatctgttagcagatttcaagtctgtaacacagtaggatgacctgtagtcactgtgctgtacatgagagctccggaacttactcatcgtgcgtcggtaccctttgatcagcgtctccccatttccctcctnnnnnnnnnnnnnnnnnnnnnnnnnnnnnnnnnnnnnnnnnnnnnnnnnnnnnnnnnnnnnnnnnnnnnnnnnnnnnnnnnnnnnnnngcgtggcttttcttgtcctgggcaccgaaaagggtgcctgctgtgggaaacccagggcagatgcccctggcttttatagccccttcaccacagtgcttttataagccctgcaaaaagggtagaaatcattgcacgtttacagaacttgggatttgtaaggggtgaggaggatagaaggacctttgcttttatttttgttttctaatcacagaaggaaaaaatgtcctcattgttaaaataacggaaaagccaaatgtttaggaaaatgtaaagtncaagt

SEQ ID NO: 3831 - DNA, 356 bp, Homo sapiens
  misc_feature (1)...(356): n = a,t,c or g
tttttttttttttttttatattcatgttcattttaatattaagggaatttccatttccaaagcatcaccgcccatcacagtagttccacggatcccagcttgagaactattaaatgaaaaaccaaaaaatgcaaatagcaggatagaaaagttgtaggtacattaaaatggttacacctaccaccaccactggggaatcctgtaagatgttaatggctgggaatgggggctcacgctgcaatcccagaactttctggggccgaggcaggcagatctcttgaaccctgtctctanaaaaaatagaaaaattaggnggacatggtggccagtgcctacagtcccagctacaaagtggg

SEQ ID NO: 3832 - DNA, 559 bp, Homo sapiens
agcagttcatagcagccatcatcacccaacagcggtgcagccccacggaggccaggtggtccagagtcatgctcatccagccccaccagttgcaccagtgcagggacagcagcaatttcagaggctgaaggttgaggatgcgctatcttatcttgaccaggtgaagctgcagtttggtagtcagcctcaggtctacaatgatttccttgacatcatgaaggaatttaaatctcagagcatcgacaccccaggagtgattagtcgtgtgtcccagctattcaaaggccaccccgatctgataatgggattcaacaccttcttgccccctggctacaaaattgaggtgcaaaccaatgacatggtgaatgtgacaactcctggccaggttcatcagattcccacccatggcatccagccacagcctcaaccaccaccccaacatccttcccagccttcagcccagtcagccccagctcctgcccagccagctcctcagcccccacctgccaaagtcagcaagccctcccaactgcaagcacatactccggccagtcagcac

SEQ ID NO: 3833 - DNA, 477 bp, Homo sapiens
  misc_feature (1)...(477): n = a,t,c or g
gatccattcgaatcatcttattacttggcagttctgcatggcctacactccacagcaagctcaggaaaaggtgagatcagtcccattgaagacctcaagttctctgcataaaaaggagaggggccaagaaagtgggtgagagtagataccttttaccacaggtaggaatatcagtagaaaaggtaaggcagtactggagaaaatagctgtatattctgtcttccctcagctccaccccttgctttgctggtctttatatgtgctaatgtttgaaatttgcctataagtaataataatacttataaagtccctttaaggaactatatccagagatatctgatgtctttcttcttcaaggtgggtcattcctcagtcttcaaccctggctacacgttaggaatgatccgcaaagctttttaaaggctggggtgcaggggtntcatcacaagtcaattaanttggagttgagcaggacgc

SEQ ID NO: 3834 - DNA, 121 bp, Homo sapiens
acgagctggacatgaagccgcacaaggaacgttttattcctaagaaaaagtttcctaaatttggattgtggagcggactgtagaatgcgtctgacagttcagttcaagcacaagaagtggg

SEQ ID NO: 3835 - DNA, 866 bp, Homo sapiens
tttttggaaagaggttttagtgcggccgcagggagcaccacctcagcctcagggctagtgaggacacaggccgtcctccggcggggagcacggtggggtcagggtgctgtgtggtcccgcaaagaggcagctgagcttgggcctcaggtcgttccacaccttgctcatctccttgtgcccttggatctgagagttgacgaaggcgcggaggatgtgggaggtgaggggcaggtagacgtggatgagctgcgtctcctggtgcaggcagtacagggagaagtagttccgcagctccatcgtctgaatcgcgttctcctgctccacgatgcgggactccagctgctccacggactccggctcgcggttctgcgcggtggcgctcatcatctgcctcttcatcaggctgtacttgtgcagggcccgctggtgcttgtgcaacacgcccttctcatgccgctcgcacaggtccttataggactgcagcagatccaagaagaggttcagcttctccaccacgtcgttctcttcctgcttaccctgttgtgcagccttgtcggcgagcagcgcgaattccacagacaggcctttcagagcctgcttcagggacccccacgtgctgctattcagagcggcccaggagggcagcggggtcgtgtcagaccctattgcacttagctccttcccgaatatgagaagatctgccgcattgtcgatggccgcgatcgatccgctcggccctgttgcgaagcttgtgaaagctattgtagatgttccggatcagctcccggctgatggcaaactgagcctggatgtcagctgggaggaagtccttggccctggtagccagcttacagttcaggaattcg

SEQ ID NO: 3836 - DNA, 298 bp, Homo sapiens
gctcaatttcttgttcttcatgttggctgcagttgcacttcatgacctgggttgtctggttttgcactgtccccaccagtccttttatgcagctctgcttttctgtctcagccctgccaatgtcttcctggcagctggttactcagaagctttgtttgccctcctgacattcagtgccatggggcagctggagaggggccgagtctggactagtgtactcctctttgcctttgccactggggtacgctccaacgggctggtcagtgttggcttcctcaatgcattctcaatgccaagg

SEQ ID NO: 3837 - DNA, 468 bp, Homo sapiens
gagatcttttttttaagcactaaataaaaaaaaaatgaggggccatcgaaaacttgacttgctacgtcacaggctactgtctaactgaacttcacaaggagcctgcagatcccattataggaagtaaaaccctggatatctcatcccatcaaacccaacagcacaacacacggtctgacagccagcctgggtgctcgggcctgctcgtctctcaaatgctgcccccactaaaacatcacacacctcaaatattccaaagggaggctagaagctggccttatggggtaaggtcatctaaaccatcaaagccgacaactttccagaaggggtagcaggtaccataaacacttataactttaaacaaggggttgctctggaagaacctttctagtcactttattccacaaatccagaatgtatctctgaagattcccatcctcaccatgactaaatacctcagtcaccaat

SEQ ID NO: 3838 - DNA, 1667 bp, Homo sapiens
  misc_feature (1)...(1667): n = a,t,c or g
aggccgccagtgcagccggccgcttccgctcccggcgcaggctgcagcttggccagagcggagggggctcgggagaggagtggacgccgctggcaggatggtgctggagagcgtggcccgtatcgtgaaggtgcagctccctgcatatctgaagcggctcccagtccctgaaagcattaccgggttcgctaggctcacagtttcagaatggcttcggttattgcctttccttggtgtactcgcacttcttggctaccttgcagttcgtccattcctcccgaagaagaaacaacagaaggatagcttgattaatcttaaaatacaaaaggaaaatccgaaagtagtgaatgaaataaacattgaagatttgtgtcttactaaagcagcttattgtaggtgttggcgttctaaaacgtttcctgcctgcgatggttcacataataaacacaatgaattgacaggagataatgtgggtccactaatactgaagaagaaagaagtataataataataacaatattttctcattctttgtgtatagaaaattttaaaatggtggtcttaattattactactggttgaacaattatttcttccaatttattttcttcctgcactactgtttgtatttgatcctttgtctattcagtcacttaattagaaattaaattgtcaagcctcttattctgacttcaaagaattaatgtatcttccaacaataaaatcacttctgattttaatctaggaaaacctaaattgtggctatggatccaaagctgtttgtttctttgaatatcaatattttcaacaggatcttgtatttaaaattcccacctacattgttaaatatgttattttttcatatctcttttggttttgataatctgaagtgtttttttctcgttttggccttccaaactgcatttggttaggtgaattaagaaaaatattgccatcaagaattacttgtgttttcacagagatagactctttgctttatagagattgttgtgtatttaatatgaatatcccagctttagaaaagaagtaaactggatacaaaaagttccattgaggaacagttatttacagtataaaagatttgtttactttacaaaaggcnnnnnnnnnnnnnnnnnnnnnnnnnnnnnnnnnnnnnnnnnnnaaactgactcagtgacagctggggtggaatggcaagaacacttacaaccaaactcatgggctgctgcaatttgaagatcaattggtaataaacataagacattaattcatattaaaatagttcagtgttcaaaattgtgtttatgtggatatttttctctttttaacactataaaccattaaaatacagtcatcccttgtatacgcctagggactggttccagggccacacatataccaaaatctgcccatactcaagtcccacagaaagtcttgcagaacccatatgtagaaaagttggccctccagttgaccctccgtacacatgagtttcacatcccatgcacaaatgctgatctgtgtgacctcacctgcannnnnnnnnnnnnnnnnnnnnnnnnnnnnnnnnnnnnnnnnnnnnnnnnnnnngtaagggtcaactgtacaaaaaagtttgtgaaataaacgtactggagaatctttaaaaaaaaaaaaaaaaaaaa

SEQ ID NO: 3839 - DNA, 646 bp, Homo sapiens
tttgatgagtaggtgagtttattgggacttacacacaggtcaatcctgggcggcgacaagacagctctagagatctgagcttcctcccaatgctaaactgctttcatgctaattttctgactgtttacttaccgggtaagagcgatgggactgttttcattggttggttctcacatactctctgggaagtttgggttctcagggacacctgctcctcagctggggaccatggccatggcccaccacctgcccttcagtgttcaagcaggggacatgcaccctttagtaacctggaggggacccatcacatgacaaccaccccaacgaccatcatcaggaagccgctgcctgactgagatatgcccccaggaggacaagggagagtggatgctggaaagacagggcaggggaccatcaccagggaaagacttcattcttcggaggacattgaacctggggctgggtctgtagtggagccgctgtttcttctcctgtatccaactgttctaactcttgggctttctccattttcagctctttcttttcctggccttctcattgctggttccttcaagcctcctctctattcttccgtcaatatattcttttttttttttttttttcccttattgcaggctccaatgtt

SEQ ID NO: 3840 - DNA, 824 bp, Homo sapiens
ccaaaatgcagacattttattagggggataaggagggcaaggtaaagcttatggaactgagtgttagtgactttggcatttgtgtagctgagcacagcaagcgaggtgttaatgcagatggcaagtgcaccaaggagaaggcaggaacactggagcctgcaataagggaggagaggggactggagagtgtggggaatgggaagaagtagtttactttggactaaagaatatattggggggaggaatagagggggagcttgcaggaaccagcaatgagaaggccaggaaaagaaagagctgaaaatgcagaaagccgaagagttagaactgttggatacaggagaagaaacagcggctccactaccgaccccccccccaggtttgatgtccttccaagaataaagtctttccctggtgatggtcccctgccctgtctttccagcatccactctgtcttgtcctcctggaagtgtatctcagtcagccagtggcttcttgatgatggcggtggaggtggtggttgtagtgtgatggatcccctttaggttatttaggggtatatgtcccctgcttgaaccctgaaggccaggtaatgagccatggccattgtccccagctgaggaccaggtgtctctaaaaacccaaacatcctggagagtatgcgagaacctaccaagaaaaacagtctcattactcatatacagcaggcaaagagacagaaaattaactgaaaagcagtttagagactgggggaggccggatctctagagccatcctgctgagtgccctgtgtgtaagtcctaataaactcacctactcaccaa

SEQ ID NO: 3841 - DNA, 466 bp, Homo sapiens
  misc_feature (1)...(466): n = a,t,c or g
gcaaaagcaatgatgctaataggatttctttatcttgagtttcatgtcttagggttggagaagggaccaagcctcccctgaaagctgaggggtttatggtcaagaagaaagagtaactatggccacctttaggtcaccagccaataacactgcttctctatcctgttctgctgtgacatttgtcccagcaggtgttccagtctgtcctacagtagtgagaccacctgatatggtgaggaaggcaggtaattgatcttactccatcatatcatcacatctatttccaccccccgcccttgggagacaaggtctcactccatccatttaggctgggaatgcagtngtgcaatcatannnnnnnnnnnnnnnnnnnnnnnnnnnnnnnnnnnnnnnncactgtagttttcccaagttngctagggactacaggcacatgncaccacaacctgggttaattaaaaaattt

SEQ ID NO: 3842 - DNA, 444 bp, Homo sapiens
  misc_feature (1)...(444): n = a,t,c or g
ccttcttccactccccgcggcgcagcggctcgactcgcccgtagaggaaacgacattcggagctgcgctcccgcccacgccggccctgacgcgggctcgtcagccagtaacagggagcagaggtgggagttagcgaggcgaccacgaaaacggtgaaggtcggaaccgacagcctcctccgagaagggcaggagctgggaggaggcggcacggccggcggcagaaacagcagcggcggcggcggcggcantgtngaggaggtggtgacggtggcaacggcagcgtcggggacgatggcgcgactcgtggcaagtgtgcaagggacggggagganggagttccccttcgagaggaggcagattcccctctacataagacgacacccttgacggtnattcgggccgggccgggctgntgccncggctcccctggcagctgtttccc

SEQ ID NO: 3843 - DNA, 551 bp, Homo sapiens
  misc_feature (1)...(551): n = a,t,c or g
gggtgggaggtgggagactgcgctcactccacttgccctggtttcaccaaaaaagatcaaactagtacacgtgtgnaccctggggtcccccactgcaagtgggagaagatgtggagggagccttgactgagagtccacgcgtggccccgcttctccccacacaggatgactctcagccacagcccaggcccctctttgtacccactagaaatgagagccaggagcaagggctggctccctcacccagccggctgaccagggggtgggccgcaccacggagctgccacctgacccatgtttcctgtgtcgagagccacaagaaccagtccatataaaatggctctttcccagagaagctttgtagaggaaattccattttcagcaaagaaggtggacttggggatgctctggaagatgagaaaggaagccaagagtcaaaacagcctccgctggcaagagccctgtggtggcggctgagctgcacctaataaggggcatgagncctggtncaaggctggtgggancaccantctacctactgntctccacca

SEQ ID NO: 3844 - DNA, 552 bp, Homo sapiens
  misc_feature (1)...(552): n = a,t,c or g
ggtcaactagagagagaataacagtgtctccctcacgcccttattgtgaggcctggtaaggtgactcatgaatggggcttagctcaggagatgctgtccacccctcccaggcccaggcaaccttgtccagggttcccatctctcctgggatgcagctgtggagcttcacctggagaagacaggtccatcaccatgttttattcactgactcaggaaggactccaggcagcagactatgggatggcaggattctgtcctggacagctctgctagagaagcagaccgggggcagggaaaggctccaatgactttcccgacctggctttgccaaggccctctgctcccgctctttccttttccattgggtgagctgcttccttcagcttcttctcaaagctgatacacacaaggagacaactatcccatgctcccctgcatccttcctgacatgggactactccagtccctttccangcaacatgggtgtgctgtctgcatctgccanaatccctttgtctaacttcatcanccactttctggaaggcaaatgag

SEQ ID NO: 3845 - DNA, 759 bp, Homo sapiens
  misc_feature (1)...(759): n = a,t,c or g
gggctggacgtgccacactggggtcttctgaaagtaggcgcagcatgctgcagctcctcatgcccggccctaaggttttataataatcaagaagcacatgaaagaggcctcttcatcaagcattcttgactaagttatgaaaatggaattgaagtttattttcccccttcatatggtaagtccagctgtgagcagagtgttctgttcttcacttccagcaagccagagttttataaatggacgctgacatggactacgaaagacccaacgttgaaactatcaaatgtgtggtcgtggggtgacaatgccgtggggaagacgcgcttgatctgtgccagggcgtgcaacaccacactcacgcagtatcagctgctggccacccacgtggccaacagtgtgggcgattgaccagtaccggcgtgtgccaggaggtcttggagcgttctcgggatgttgttgatgaagtgagtgtttctctcaggctttgggatacttttggtgatcatcacaaagacagacgctttgcatatggcaggtctgatgttgtggtcctctgtttttcgattgctaatcccaattccctaaatcatgtgaaaagcatgtggtatccagaaatcaagcacttttgccctcgaacaaccgttatccttgttgggtgccaactttgatctccgctatgccgacctggaagctgttaatcgagccaggggcccttagcaaagnccataaagagaggggtattttgcccccagaaaaaag

SEQ ID NO: 3846 - DNA, 429 bp, Homo sapiens
  misc_feature (1)...(429): n = a,t,c or g
gggctcggcgtggatcccagagatgaggcccaggctcctgctggggccgcagggcccacatcacacaggtcggccctgtggcccaaagcgataggtgcagcccaagnccggcgggggggtggaaggtgtagagatcaccgcccctgccgccccctatgcgcagcagttggaagcagggcagcatgggcggtgccccctctgcaccacctcttccacttcaagcatccatttcctttcccactcctgggccacgcaccgctggcttaagttcgcttcccagtctgatgcaaacttgagttgtgctgtatgcggtttcaactttgagcacactacctgaatagcccaaattcagagtgcaagcagcctaggactcaatgcaaaattggttaagccgacttgcaaatgaaaaattccaggaaggtctccgtg

SEQ ID NO: 3847 - DNA, 319 bp, Homo sapiens
aaaagtaatatctcaccccatacatgtttgataaacagtcgtggcagcagtattacttaacacatacgcaccacagggcttcagtaatttccatgtgaactactcaggtacagtcaaaacaaatattctttatccttttactatgcgcgagacactagggctagacatacaaagaccccttgcccgtggctcccatttcaaatatatctcatgaccaggggtgtggggagcacggacagaggagggtaaggagtttaaactgtgataaaacacattaaggaataggttattaccaaggggctggggcatgggtgggctc

SEQ ID NO: 3848 - DNA, 422 bp, Homo sapiens
ttctaatcatcattcaaaagagcagtaaaaaatggttacttgttcttgtacaagctactaattagactatagtaggatattttaaagagctgaatcacttttggtattttggtataaatattttcatttgttatgtcccagtatattcttactggaaaattcttgttttgatctgcctgaagaaaatatctgttttctatataaaaaaattttttaaaataattgtaaagttagatttaaaattgtaaaatataaaatcacaaaggaatgtaccttatgaatgttgttgacattttatgaaattatgtggattcatattactgttacaagatagaattgaatgcaaaaagaccaaaacctcaataaaatttgaggaaaacgtgttattatgtaattgaaataaaaacattttataattgtgc

SEQ ID NO: 3849 - DNA, 466 bp, Homo sapiens
ggggcgttgggaacggttgtaggacgtggctctttattcgtgagttttccatttacctccgctgaacctagagcttcagacgccctatggcgtccgcctcgacccaaccggcggccttgagcgctgagcaagcaaaggtggtcctcgcggaggtgatccaggcgttctccgccccggagaatgcagtgcgcatggacgaggctcgggataacgcctgcaacgacatgggtgtccttaagtttgctcgcttggtcaagtcctacgaagcccaggatcctgagatcgccagcctgtcaggcaagctgaaggcgctgtttctgccgcccatgaccctgccaccccatgggcctgctgctggtggcagcgtggccgcctcctgagagttggccctcccttgtgccactgccaggggaggaaaggccttgatgttccagacaataataaatgcgcctgtgacttaaaaaaa

SEQ ID NO: 3850 - DNA, 1230 bp, Homo sapiens
  misc_feature (1)...(1230): n = a,t,c or g
gcggccgctgcgctggacaggttcgtggccagaaagctgcagccgcggaaggagttcgtagagaaggcgcggcgctcatagaggccgcctggccgctgctctgagggagcgcgggggcccctcggtgctgctgccccgcgggtgctgaaaactgtcaagggaggctcctcgggccggggcacagctctcaagggtggctgtgattctgaacttgtcatcttcctcgactgcttcaagagctatgtggaccagagggcccgccgtgcagagatcctcagtgagatgcgggcatcgctggaatcctggtggcagaacccagtccctggtctgagactcacgtttcctgagcagagctgcctggggccctgcagttccgcctgacatccgtagatcttgaggactggatggatgttagcctggtgcctgccttcaatgtcctgggtgaggggttcctagaccattccagggttgggggcaaaagatcattgggaacaacacaggacttccaattctagcccagccaccaacttgctgtttgacctgggccagcctctacccctctctcagcctcagtctggggactaaacatattggacttgtgccagacaaaggcagagaaaccccagttcctcctggatctgtggtcctgctgtcaagatgcttggccctcccacaggcatctgggagtttccctcagccactgcctggagcggttactgctcagcccttccacaaatactcccgaaagctaagccaagtggacatgtggctagcagtaggggcctgggggacaaaaccagaattctgcaaaatcttgtattttatgttgaaaacatcaatgtgatttttgtgttctccttcgtaatacacgtatgcttgagttaagataaaaataggcctctgtgtcctcatctgtaaaatgaggataatactaatggggataatagtaatcttataggagttgtncaganggaatttaaatggcatttaatatatgttaatcaagcttaggaaggtgtgttctagtngggccggggcgcagtgggcttcatggcctgttaatccccagctttcggggagggcccaagtttaggaggactggctttggaaccttcttgaggntccaaatggttcccncctgncctcaggccttccccaagtgcntaggggtttaccagggcaccaggccncccccacccngccgggggggtacacttttnttttnatcct

SEQ ID NO: 3851 - DNA, 449 bp, Homo sapiens
ggacatgaaaaacattttcagtacccccttgttcacctaccaacatcgggaaataaaaccttctatttatgtccattttctagaagcaatgccataccaacttgatcatgagaagcattttttcctctaattggagatgtattaatttaactgttttggtgactaagtcatacccctctcaacttgagtgacagtgtttttttaaagctaaaaccagagatgtcctcaggggctgtcgaggcgtggtaacattttgcccctttgcagaatggcccgagggtgactgtgacttccagattcttgtacctactttaaaattttgtgtgtgtgttcttcctcctggacaaatcttctgctattaatcattgaagcagttgcggttcttccctctagaaaatgcactgccgaaagtacagaaaagtaaactggatgtagtttttttttttttt

SEQ ID NO: 3852 - DNA, 503 bp, Homo sapiens
gtttttctttttttcctttgttattcttagctcaacttccacagctgagtaagaagtttttcacatacttacaagagtgttaaaaattttattccttctcagcaggagagagttggcccttcttgtgactttgtctctgattcttgggcaagttggcttgggaatgctactggggaaaaactcactaatctttcatcatcatgaaaaagcaacaaacagaacaggaactcaagtgattcaaaataaaaggaaggagcctgtctaaaacagtggcatgttcaagtaacagacaatcttaaataatgcagcaattttgttactctgtccattctgtatccaaaagaatcttccaaaattataataaataaaatgatatggtcaacactttgcaacgtgccattatcagcctatattactcaatgagacactaaccacatgttagtaactgtaaagaggtgttgtatggtcatgcgttaaaatatggatgtgatattggtataaaa

SEQ ID NO: 3853 - DNA, 110 bp, Homo sapiens
gagatttgtgagtggatgggcagatagatggaaatgaagtcatgtcaatatttacccccatgagagagtctatactgtgagagataaaaagggcttaaaacagagccctg

SEQ ID NO: 3854 - DNA, 960 bp, Homo sapiens
ttcatcttttcactttcaaaagcttttgaaagtaattcaacccagtgtagtatcttatctttgttaacaaactgatacaagaactctctccttcagaaacaccatccagttcatcttcctatatagaaaataggatgtacatggtatcacatgaagactgactactgaaatatttgctctgctaagctggtagaaatttcttgtgatgtgtggaccattgatgtacatggactataagcactcaaatttaataccacattaatatgtcagagtttttggttaattttgtaggagacgaactgccagacagatcagatcatgtttctgaaggtgaagtagagttaagttggatatccgtgtcttacgttttgcttctcctggcaatatcctttgcaagctgtgcaccccgtttgcccttgaacattttctctgcttcctgacgctcttttagtttcactttctggaaatccagtactctgacttgcggaactttataaatcacatacaatctgtaatgcttcttattggttaccggatttcttaggatacttaggtaagtcagcgatttgagagatgccagagggtccagatcacccagttccacgagactattattggtgagaatgagttctgtcagacagggcagagcctgatcaagtccctcacctatacggcatattctgttgttgttcactaacaatgttttcagtcttctcaacaaaggaaaaccatccagtttcctgatctcattgtcagaaaaatcaatagcatcaaactggtctaacgtagcacctagattttcaatgacgggaattttatacccccggaggtccagctcccggtcgcgcaccgcgttggtgtactgcgccgcctgctcgatcagctccgccgtcagcttgaccatcctgcagcctcccgttcccccgcgctgtggaaagcccgtggcctcccgcggaattc

SEQ ID NO: 3855 - DNA, 167 bp, Homo sapiens
aacagtcctcccgcctcagccttccaaagtgctgggaccacaggtatgatactgtacccaggcatacaaacaatttttttttcccaaacaaactaggattgaaaatacagtactgtcaggatgcaaaacccatataaatgataggcctactttttgtatacttggat

SEQ ID NO: 3856 - DNA, 390 bp, Homo sapiens
tttttaagggtaaacaagctttatcccacgtaaatggcaatgcagatataataagcaaatgatataataaggaaattaatataataagcaaattgatataagtaaatgacataataagcaaattgcaatgggaaggggagaagggaaaagagatatacatatatttacactcaccagactatggaggattcaccaccagactgggaagcaacagcctgggctccagagtcggacactacactcaccagactacagaggattctcatgaagtttccgcatggtctgggaccctagctcttattgtaacaagttgtttggcatgagacccagtcacaagggcccttcccgactggactcaaggaacacaaaaagcgtcaacttgtgttccca

SEQ ID NO: 3857 - DNA, 570 bp, Homo sapiens
ttgcggaggtgtaggtctgcagtgagtgcccgcatgtctctgcaggcgggaccacatactggccattctggcgctgcgccgactgggccgccagcggaaccagcatctcttgcagcacaccgaagacctgctgagagctgccggcccggggcggccgggtgcggagccccctcggggccgcgtgctcttcgaggagatcaaggtgcccagtgccatggctgtgctgatcacctgcgtctagttctctctggctcgagggggggcccgccgctggcagggagctgtggtcagtgggggtcagccaggagcccagggagtcactctgggccctgcccccaactctgacactgcagttagggaatttttgtcgtcagcagccaagcgcagctgtcaggccagaaggagcagccgtgcaggaggcatttcaggcatcgttgaggggagtgttttggggccgcagagctctcaatgctgccttatcggcgggggggcctcccgcccgactgtccagcttcaccctccagtctgaaagtgaagagcagagtatttatttaaaaaataaatgtgaat

SEQ ID NO: 3858 - DNA, 57 bp, Homo sapiens
ggtaactacttaagcagaggagagttaccgcttagctatacataagaacatgctttt

SEQ ID NO: 3859 - DNA, 610 bp, Homo sapiens
tttttttttttttttttttaagaattcaagttagttttattcaaaggtcttactgagaatcctagacccaggtcccagcccgggagcagccttagagagctcctgtttgactgcccggctcagtgtctcggcccactgcttggttacgggggccggggctcaggacctgcacagtcacatccatccagctggctccgaagttacattacagcagaatcacatcaaggtttgggcataagagcacttctggttacagattacagaagcataatcgctaaccttggccaacattttctcatgtgcacgaaaagccaaggaccagggtccttcaccttttaaggaatacagtgactcaggcaacagacgcggggccgtgtgttctttcctgttttgttttcaaagcgtctctctggagagctgcagtgtcacagagtaagggcccacagaaatgagcacacacttaggtttgctgctgacacgccctgcctctcctcatgtggttcatgtggccatcagccggggctgaagacccctggcacacacctgcaccccaaacggactacaggtgccgctttcatttcaactctcacccatttagggttcggagccc

SEQ ID NO: 3860 - DNA, 647 bp, Homo sapiens
gccatgggcgttgggaacggttgtaggacgtggctctttattcgtgagttttccatttacctccgctgaacctagagcttcagacgccctatggcgtccgcctcgacccaaccggcggccttgagcgctgagcaagcaaaggcctcaatccactaattccttgcgctctccgctgggcccgctgtctgttctccgacgcctacccgggacgcctccctgggatgcttctggcgcgcagtggtcctcgcggaggtgatccaggcgttctccgccccggagaatgcagtgcgcatggacgaggctcgggataacgcctgcaacgacatgggtaagatgctgcaattcgtgctgcccgtggccacgcagatccagcaggaggttatcaaagcctatggcttcagctgcgacggggaaggtgtccttaagtttgctcgcttggtcaagtcctacgaagcccaggatcctgagatcgccagcctgtcaggcaagctgaaggcgctgtttctgccgcccatgaccctgccaccccatgggcctgctgctggtggcaggtggccgcctacctgagagttggccctcccttgtgccactgccaggggaggaaaggccttgatgttccagacaataataaatgcgcctgtgacttc

SEQ ID NO: 3861 - DNA, 691 bp, Homo sapiens
  misc_feature (1)...(691): n = a,t,c or g
ttttttttttggtttcaactgccagctttaccaatgcagcatttattttaaaattaaattaaattaaaaaaaaaaagattgcatcaccaggtagttttctcgattaaggaggcagcctgaccagggtgggccgtggccgggcggcagcagcatcacactgggccatttaaggcagctccttctggcggggcatctgtcttcccgtcctttgtcactgtccccagggtggccaccatggctggggctgctgtgactgccatgatgggccctagggggaccgccacggccagtgcagaagagactgctggggtgggtatggcggggccagccttgctcagtgctgtggtgatggccacagtagcctcggggggcacagccacggctggggcagcagtcacttcctttggcgcggggcaggcagggcttaacagccggctgtcagcacacccgaccctgcaggctgggccgtgacgacggtgcaggcagggctctaagtggcaagttttacgcagacagccccgtggaaaaaaacaacttactttgcacaatgatattccctgcttttcagagcagttttttaggggttgtttaggagaagtgggtaaaggtttgttttggttttgtttttgccgacagtcagtctctctcatgcgnaagccggagtgcagagcacacagccaggacagcctag

SEQ ID NO: 3862 - DNA, 444 bp, Homo sapiens
  misc_feature (1)...(444): n = a,t,c or g
ggtcggcgtggagattttcatagtgccgaatatatgcttaagcaaataaggcaacacagttagcatggctgcgatgttagagccaatgtccattgccagaaactgagttctctatcagcaagagatgtgctcatcttgttctggactatatctcctcagggactagagggcagcctgctaaatggtatgcactcaataaatatttttggaatgaattaaagagtggcatggcttacagaagtatagatgttagtatagtcatccgttgagcctttgcttttttttctgggaacactgaaggaagactcacagccacccatgggtgtttgaccctccacttgccttgcccacctcaccccgggaaataatcttcagtctcatctgtggaacagacaagggcaccatctatgcatccgncaaggaagaaaactgtcccgtgtgccc

SEQ ID NO: 3863 - DNA, 1315 bp, Homo sapiens
ttttttttttttttgctgttgccaactgtttattcagggccctgaacgggtggtgcgtggacatgcaacacactcgggcccacagcagcgtgaccggccgctcccaagccccgggcgcacaaccacagccaggagcagcccctgccaccactgggccaccgtccagggccccacaggaccagccgaaggtgccccgggccgaggccagctgggtcaggtgtacccctagcctggggttgagtgaggagcggcacccccagtatcctgtgtaccccaagttgcccaggaggccgagggggccttgggctccatctgcactggccaccccgtgccaagcatcacagctgcgtgagcaggtttgtgtgtgagcgtgtggcggggcctggttgtccccttcctaaggcgtaactgctataagcatctccacctctcccgctcgggaaaaagccacagagcctggcgatgtcctcaaggggtcccggtggctccagtgcacccagcacacctcagcgcctctggctggcaagccaggagaagaaggtgcgaggccgtgggcgaggtgcctggaggacgcgcatggtgcgtggggagcgccaggctttgatggtggcgtcgtcgctggccgtgagcagcagctcctgctcctggggactgaagaccactgagttgaccacatcctcgtgccgcagcctggccagacagatgttgtagtggcggtcccagatgtagccgtgccggtcctccgccccgctggccacgaagtccctgctgacgtccaggaagatgaagaagcactcgtcgttgggcgtgtaggcgcggtgcgcacgcagagcccgcctcacctcccgcatggtcttgaggtcgaacaccagcaggtcaatctcctccgcgattggtggcggctgcatggggtcggccaccaccgcaccgttgggccaggcgcggctgttcacgtacaggtacctgttgtcgggcgacaggcccatgcccgatgatgtgtccgtgtatgtctatgacggtggtccagcgcgtcgaagaaggcatcggagccccggccctcagcccaggcacgggccctgccgtggtcatctggtgtggcaggatctgcttgatgccgatctggtgtggggagtaggtgaggcagccagtggtgaagatgaggtacttgctcttggcgctgtggcactgcgctcgggtggcttggtgtgccctgggccagcagctcggccaccttggtctctagatgcgctccgacagctagtgtgcgcccgcccctccagcacgcggtccagaaagtgccgcaagccctccttgg

SEQ ID NO: 3864 - DNA, 661 bp, Homo sapiens
gccacgcctgaggagttctttctcaagtggccagcagccggcttcgagctcccagcctttgatccgaggactgtctcccgctcagggcctctctgcctccccgagtccagggccctcctgagcgccacgccggagggtggttgtcgcagtgggattccctggggccgggaagtccacctttctcaagaagcacctcgtgtcggccggatatgtccacgtgaacagggacacgctaggctcctggcagcgctgtgtgaccacgtgtgagacagccctgaagcaagggaaacgggtcgccatcgacaacacaaacccagacgccgcgagccgcgccaggtacgtccagtgtgcccgagccgcgggcgtcccctgccgctgcttcctcttcaccgccactctggagcaggcgcgccacaacaaccggtttcgagagatgacggactcctctcatatccccgtgtcagacatggtcatgtatggctacaggaagcagttcgaggccccaacgctggctgaaggcttctctgccatcctggagattccgttccggctatgggtggagccgaggctggggcggctgtactgccagttctcgcgagggctgagccccgcccagctcccctccacaataaacgctgtttctccttgaaaaaaaaacaaa

SEQ ID NO: 3865 - DNA, 457 bp, Homo sapiens
tttttttttttaatgactgaataaagctttattttaatgtaaaatatgaaaagaaaaatttatatactcatatataacaacttccaaaatgttttctgtggtacaaatggatcatcttaaaaagtctgtaaagaattcatcctccacccccatatgccaaaatatgatttcacataatttatcttcagaacttatgaacagacttgggaatcacaaaagcacagggaaacaccagaaaaagtgatgggtacaaacaacaggttttgttttaggttccagtagtaagcagccctacagatgggaacagggaggaacactttctgaagggggcccagtcaggagacagggttagaagagtctttgggggttggttcatttccctggtaggcccagcttgtctttaaaagtcaggctgtgtgtgattctgtgactatttaaggacatgagggagaaaaga

SEQ ID NO: 3866 - DNA, 238 bp, Homo sapiens
  misc_feature (1)...(238): n = a,t,c or g
gaattttagagcaaaaactgcacagcccattaatgatagggttgggacaagttgttttaatctttccagtgcaatatgctgtctggactgagtaaaacgggcatttagggtgttcccgaaccctttcttaggtagatagtttttgcaggcagtatacaaagctgtatgtatgatagtttagacctcttatttncctttttatatattaatagttactggatagccaggaatacatacg

SEQ ID NO: 3867 - DNA, 493 bp, Homo sapiens
gtgtgtgcccagcactacctagtactgttggggaacatcaatttgcagttgtggtctctgcccttgaaggtatcttctccaggaaattagcagtattattttcacttctaagcaaacatgagcaaaagaggacctgttcattaaaaaacatgctgacttttttagtttcaactgagatatgccactgtagaagtgaaagtaatttcacaattaaagaaatgcttcaacttggtaattaatatggtcatacagggacttggtgtagcatgcaagggaagcagaagacctgggcttttgtcgaagttctgccatttaggtatcagctgtgtaaccttggaataagtcacttaactctttctcttagttttctcatttgtaaatttggattaaagtgtttattatgataatcaattaagaaaatctcttaacacttcatacatacagagaacttatcattaagttaaaactggcaattaatgcacctttatatata

SEQ ID NO: 3868 - DNA, 1254 bp, Homo sapiens
cgcgttccttcttcaccccatctgtactggaagggaccctggagccctggggaccaccccctttcaagtcccaaacactgagtcctctgtcatgtgtccttgtccctaggctacaatgctacacttggctcaggctgatcaccatgctagtcacaggagggagagagaggcagtgtacttgcccccatctcctggagggaggtgcgttggaaattctaggcccttcagcagagacccatttgtgcccagaccacaatatttcttcttcctcagggactacatgccacagacctgtatccccagtggcaactcctgttagctcccaaacttaaacagtgatctcttctaaatatacaaggcatctacccagccccaatagtgaataaaagtcacaaatttaagttcaacaccctaagcaatttctcaaagccagtctacctgactaggtctatccacgcacggttcccaaccccaagggggaattaggggattagattaagagtaggtaaagacccttttgttctttcctgttgtaggggaggaagctgttctccccaccccagggtgcctttgggaggttaaggctaggttaggccctgcactccacctggggacggcccctcatcacctgaagtcctctgctgtgttgactggaccctcagttcccacactgctaattactatgaaagctgctctggcctcgtcttctagcttgtgcctagttgaaagtctcacctttacaggatcatttgtaatgctggtgtacatgcagggaactcacaagctgtgtcaggtatgcaggacaaggaatgtctgctctggggggcacaggccaactatatggagggagggtcccaaattagcaaacccttcatttaaagcaaacccttgtcaagcctaccagagcagctgatacgtgtgcataacagtgaggcattgtgtcctggatcgtctgggagcccagtgtcaagtctgctggaatgcaggaagtagaacagaatcgccacaggactgttctggggccagcttcccttaactctgtagcctggcagtctgacccaaagttgccctcacccaaaggttctggctcttccctccctcacttttactttcccttcccccataagttggaggataaaatgggtatcaatgctaatatttccagggagaacatgaaaccagaggtttctttctttctctgtaatctgctatgaaagaaaataacaaatgaaaataaatgtgtactacactttg

SEQ ID NO: 3869 - DNA, 356 bp, Homo sapiens
  misc_feature (1)...(356): n = a,t,c or g
ctcttatggcagagaaagtttgtgaactgtctggtttccggtcttataaagacactaatcccattgaaccagggccctaccctcataacattatctaatgttaattacatcccagagatactatctctaaatattnnnnnnnnnnnnnnnnnnnnnnnnnnnnnnnnnnnnnnnnnnnnnnnnnnnnnnnnnnnnnnnacacctcccttgagttagccttgtgggggttgccctggtacaggttaccatttacttctgataagactctaatttacttttggcaaaaactgactaaccacatataaataagtgattttatttaccttttcccccatttggtgcatacaatttaccat

SEQ ID NO: 3870 - DNA, 595 bp, Homo sapiens
gatgaataacaggataacacgttgttacattgtcacaactcctgatccaggaattgatggctaagatattcgtaattcttatccttttcagttgtaacttattcctatttgtcagcattcaggttattagcggctgctggcgaagtccttgagaaataaactgcacactggatggtgggggtagtgtaggaaaatggaggggaaggaagtaaagtttcaaattaagcctgaacagcaaagttcccctgagaaggccacctgggattctatcagaaactcgaatgtccatcttgcaaaacttccttgcccaaaccccacccctgggagtcacaacccacccttgaccaatagattcatttcactgagggaggcaaagggctggtcaatagattcatttcactgggagaggcaaagggctgggggccagagaggagaagtaaaaagccacacatgaagcagcaatgcaggcatgcttctggctcatctgtgatcaccagggtaactcccagatcttgacactgtagtgcattttcactgctgacaagaaggctgctgccaccagcctgttgaaggcaaggtttaaggttgagaaggc

SEQ ID NO: 3871 - DNA, 498 bp, Homo sapiens
gcaggaagaaacccatcacacctctccttttaaaaatcttaagcagctcttgtttaatcttacctgtattttttaaaatttttgttcgaagagagggtcaagaaagaaaattctaaaccggccaagagacttatttctcctacggagggtccccacctgccccacagcagcagtccatggccataaagtcacctgggtctcggggctgcctgcaagagtgcagaaacaggagttcaggtgccagcccccgtaacttggagggcctcgtgcagctttcctgctggagcgtgtgtggattcaggggcaggggataagtcctggaccaaccatgactgtgctgacccttcttctctggaacaggtatggatatggcagggtgacagtcacttagttctaccatctctgtgtcccatgggtgtgtcagtgtctgagaccatggtgggttcagtctggtggctgtattttaaaataagcaaaacgtcatatggtaaaaaaaaa

SEQ ID NO: 3872 - DNA, 420 bp, Homo sapiens
aagaaaagtgtctggcagtcctgagcaagccgtggaggaaaaccttagttcctattccttagacagaagagtgacacccgcctctgagaccctagaagacccttgcaggacagagtcccagcacaaagcggagactccgcacggagccgaggaagaatgcaaagcggagactccgcacggagccgaggaggaatgccggcacggtggggtctgtgctcccgcagcagtggccacttcgcctcctggtgcaatccctaaggaagcctgcggaggagcacccctgcagggtctgcctggcgaagccctgggctgccctgcgggtgtgggcacccccgtgccagcagatggcactcagacccttacctgtgcacacacctctgctcctgagagcacagccccaaccaaccacctggtggctgg

SEQ ID NO: 3873 - DNA, 399 bp, Homo sapiens
aagcttggcacgaggaccagtacccggcagtgtcacctgctcctggatgtcttcaactccaccgagcatgagctgaccgtcagcaccaggagcagcgaggcactcatcctgcacgccggtgagtgccagcgaatggctattcaagtggacaagttcaactttgagagtttcccggagtcccctggggagaaggggcaatttgcaaaccccaagcagctggaggaagagcggcgggaagcccgaggcctggagatccacagcaagctgggcatctgctggagaatcccctccctgaagcgcagtggcgaagcgagtgttgaaggactcctgaaccagctcgtcctggagcaactgcaggtggcgcctctgcagtgggatgtgctggtggacggacaggca

SEQ ID NO: 3874 - DNA, 257 bp, Homo sapiens
  misc_feature (1)...(257): n = a,t,c or g
aacgactcaacccatctgtgtggaagccttctctggtctgcggctcaggcggcctcgagtatcctccacagaaatgaacaagaaaatgaccggccgaaaactgatcagactgtctcagatcaaggaaaagatggccagagagaagctggaagaaatagattgggtgacatttggggttatattgaagaaggttacgccacagagtgtgaatagtggaaaaaccttcagcatatggaaactgaatgatctncgtgacc

SEQ ID NO: 3875 - DNA, 519 bp, Homo sapiens
ggcgacgcaataggtggatttaaaactcttataataagagtaataatagtaataggaacctgcttactgctcccttgtctgatacctgtatttctccaaatgataaaaaacttcgtcgcttaaccttagttcaccaaaatgcttcagcacaagcatactatataaatcactatcaatctattgcacgaaaatacataagtagcaaaaataagagtgagaactcccactgataaaaagtgagagtctcaaagaggggaaatgagggaagagagagaccctctcatattgttttatattgttttatactcagtacctgttttaagaaaaaaacaacaagaaagtaaaaccaaagacaggcagcccagcaccaggcccgaaaccaggcctgggctgcctggcctaaaccagatttcatttgtagattgcattgttcatgcttggctaaagcagaacagtattatggtgcaacaggcactaaaaagaactataggaagatgtgagtttggaggagtacatggg

SEQ ID NO: 3876 - DNA, 2228 bp, Homo sapiens
ggtccctccagcattttgcagctttctcctgtcttgaagaagtagaacggtgcccgagaaacgtttttccccttcgagactcaggaggatgaaagtcatcacttgtgaaatagcctggcacaacaaggagcccgtgtacagcctggacttccagcatgggacggctgggaggatccacagactggcgtctgccgtgcgtggacaccaatgtcaggatctggaaggtagaaaagggaccagatggaaaagccatcgtggaatttttgtccaatcttgctcgtcataccaaagccgtcaatgttgtgcgtttttctccaactggggaaattttagcatcgggaggagatgatgctgtcatcctattgtggaaggtgaatgataacaaggagccggagcagatcgcttttcaggatgaggacgaggcccagctgaacaaggagaactggacggttgtgaagactcctgcggggccacttagaagatgtgtatgatatttgctgggcaacttgatgggaatttaatggcttctgcctctgtggataacacagccatcatatgggatgtcagcaaaggacaaaagatatcaatttttaatgaacataaaagttatgtccaaggagtaacctgggaccctttgggtcaatatgttgctactctgagctgtgacagggtgctgcgagtatacagtatacagaagaagcgtgtggctttcaatgtttcgaagatgctgtctggaataggggctgaaggagaggcaagaagctaccggatgtttcacgacgacagcatgaagtctttcttccgtagactgagtttcactcccgacggatctttgcttctcacgccagctggatgtgtggaatctggtgaaaatgtaatgaataccacttatgttttctccaggaagaatcttaaaaggcccatcgctcatcttccatgtcctggaaaagccactcttgctgttcgctgctgtccggtctactttgaactgaggccagtggtggaaacaggtgtggagctgatgagtctgccctaccgcctggtgtttgctgtggcctcggaggattccgtgcttctgtatgacacccagcagtccttcccttttggttacgtgtctaatatacattaccacaccctcagtgacatttcatggtccagcgatggtgccttcctggccatttcttccacggacggttactgctcatttgtgacatttgagaaagatgaacttggaattcctttgaaagagaagccagttttgaacatgagaactcctgatacagcaaagaaaaccaagagtcagacacatcgagggtgtttttccaggacccagaccggtagagggaacccctgccagcagaacccaagaccccagcagccccggcacgactccccctcaggccagacaggccccagccccaacagtcatcagggaccctccctccatcactcctgctgtcaaaagccccttgccggggccttcggaggagaagaccctgcagcccagtagtcaaaacacaaaagcccacccatcccggagggtcactctgaacacactgcaagcctggagcaagacaacaccccggagaataaacttaacacccttaaagacggacactccaccaagttctgtaccaaccagtgtgatttccaccccttctacagaagaaattcagtcagagacgcctggagacgctcagggcagtcccccagagctaaagcggcccagactcgatgaaaacaaaggaggcacggaaagtctggacccttgatgggacctcggcttctgctcgaagcctaccaggctcccggtgtgtgcagggagacggtaaagctggaggtgcctgagaccagggcttccatggagcgggacacactgtaaatggatttctataacagaagtgacatgtgtaactgatttttctccagaaatatggatgctgttgtattcagtatccatttttaacttgggacatgaacgttttaacatagtaaatcctctttttgatgagtttctgaaactggagcggttcaacgttatccagtgtgaaaatcagtgagtcctccctggcatcctcgtgaaagtgcacacacttcatggagggactccttttcaataagaattaggaagatgagaaagtaatttgagattttactctgtcgaattttagagtatttgaagtgattgttagatttcacttctaaggagttgattgattaaactttgg

SEQ ID NO: 3877 - DNA, 617 bp, Homo sapiens
  misc_feature (1)...(617): n = a,t,c or g
ctgtttttctcctaaaagagccagtcgatgcataaatctccagaaaaggtctgtgttttaaagagttcactgcagttctggacaattttgatgatgtttgatatttcccagacaagcctcttttttccttaagtttttccaaatacaactctacttcttctgccttgaagttatagatttcattgtaacaatcagcgcttttcagataccaggttatattcaaagacaggtcacaaggttctccatcaaacttcaggaagatagtggtatttctgaagaggatctttccaaaactaaaataatttttccccgacggtatcggaatgtgccatttggaccggtcggcagcagctacggttgccggtcccgcactgaaaaacgacagtggtgacgggtgagctcccagaagcagaagaatgacaggcaacacctgaagccacgcagccgccgccatcttcacagccgtggagtgcctaccgaaagcatttcaccctcttccggttcgtcccgccttcttccggctctgctctaagggcgggattatccgggtcctggaaaaggtcgcgganttgtttgctgtgcggcgtagggccccctctctcaganagtcgtctgtg

SEQ ID NO: 3878 - DNA, 1241 bp, Homo sapiens
tgtttgtgccctgaaattcactgaatatcatagtgaattttaatgacttccacatgataatatagtcttttggatactgacaatcacaaataattatcaagcatctgcatactccgtatctataggcgtcagaaacagtggctttccaagaagtccacctatcgggcatttattgggattcagtgcacaacagatggaagacagcaccaggttcccaaatcatgcaatggaaggcaagtaagcctgtttgcaaggtttcaccagagacaacacttccagcagcttctccgaggatgcaggaatatctctgagcacctctgtgaagttaccccttgcctcttcatctaagcctaatgaaaatgaagctttgcccaaccagccaccttctcagcagatgaggcacaactaccgcttattagccagtactgtgtctgcagaaatggccagggaacaggcagctaatttggggaactggcccagaccaatcagaaggcacacctggacaggccagttgtccttggggaacagggccagttgcccagcgtgaggttgccagtattctttgtagaaaatcagtgcttgcaataaaccaactggctgcaactgtagaagggacaattagtgtcctacagcaatttaatgaactattagaccatcctctggatcccgggaggtcttgatcacagctggtagaggtggccactcactgttctatgtcttttaggttaacagttctttacataacagtgaagagtcctggtgcctcaggaaaagcaagatcaacctaccaaggaagagttgatggagtcataattttcctacttaacacccactgcaaatttaaatatgtgttctagggctgtttgttaattctattatggtctttactaattgtgattcccagttctgggtgaataaaaagtttttgttttaatgtaattgtgatcaacactatgcttgaagacatagacaaagctatttctaccaccatgatgtttacaaaatatctggtatttacgcctatatggccattaaaaaaactagatttgtggataacaaaccaccaagttttaattgtttttatttaataagggagaaataagacagaaaaagagaattaatactctttttcccagactgagaggcgggcttctaagtaaaggtatgtgaaaaactgagtaggaggcttgtagtactaaaatgaacctcccaaaatttattcttttctctgagggatttat

SEQ ID NO: 3879 - DNA, 441 bp, Homo sapiens
aaatactgacaaaagttgtcacaatcaacttctttggatggggaaattaactaaaggcttgtaacaatccaaggagtgtttaatcaagaaaaacagctgaatcttggtaagaatagcaagctttgtggcattttaacttgccatatacccatctccctcttctcagctccatgataatcttaaaagccaacagctgctcaaatcagggtgaaaaccaggcagcctaggcagccattggagggagcagatcagggttaaggctcccatgtcccacagttctcacattgtcattatttgacctgtctggcacttccctttaaactcccattctaagtacttatatttatttcacctgactcaggaccttgctcagtgcaagtagactttttaaaaaacctggtatttatcaaaaacaatcagcaacatttatttagcatcaca

SEQ ID NO: 3880 - DNA, 966 bp, Homo sapiens
  misc_feature (1)...(966): n = a,t,c or g
tttttttttttttttttttcctgtctgtaaccatcagatttatttttatatttattaagcagtaagcaaacagagttgggggagatgacctaaaatggttttcttttggaataatattttttaaaaaatcaaataactgttatcactttaagttgcatgaggctgaagctgcacctggagaggaatttaattttcatgacatgcaaaactgattaggcagtgaactctttcctcccgcttcccctgaacacatttataaacttcaacgggggtgaattccatctaatactctgaaaaccatttctcatctcacagtttacccaaatcatgtgcatgactgcaagaggaaataaacaagaaatctttaagcatagataagccacaatggatagttaatcttgtacagacaatccagcattaaggctaatttgatcttttaaacattttatgggaaacagctgttgagttttctctagaaaagcccacaaggttccataaccccataggcatacagcctcgacaggcagggctccatcaggctcctcttgaactgggcactccttcacggaaggcaggaatgcacgtgtcttcacttcctgctgctctgcacgcacgtcacgatatctggcagaaggtggtttctgttttccttggtgacattcctcaagacgggtagtgccaactgctcaaaagaagtcaggtcgaccacatactgcccaactcggcattcacgttttccaggtggaggctctaacccaactctcgataaaggcccccgggtgccggacaacgtgacgacatcgaatcctattcttctccctccctgtctgacttcttcggtataaaatccatcaacaggcacaccagaggattttaaaacctcactggctttatggatcaatgttgtttttccaactcctgggggccccgttaggaacacgtgccgggccatgntggtgggcgggc

SEQ ID NO: 3881 - DNA, 668 bp, Homo sapiens
ggaagggagggcagagggagagcagaggaaggaagagaggaaagtaggcgagaggacaactctggagccacagcctaccgtggccaagccccacttacaagatgtaggcgatgacacctatggaccagcaatccacagccttgctgtagggcttctgggccaggacttcaggggctgtggagggaagaggacgtggtggtgacaaatctctgcccttcaactcctggttccccccaccatcacagccccagcccagggctgtccgcacccacgtatccccggagttccacaggcggtggagagcacactgcccgggtccctccatcttggagaggccaaagtcggagatcatgattttggagtcttcatccaggctgtagtacagcagattctctggcttgaagggcaggagggaagagaaggggcaatcagagatggttggaggctggtagaaccttctgccgctccaagcaccttctgagaaataatggatccccaaaagccactgtggcttcatggctgtcataagaaaatcaaggaagctctcaagaaggccaaaaattccaggaaggacaaggctcaagagggtgtgggggggaactgtctctaaacctcaggtgtgcactgtaaagccctaaaggaatgtttgaatgcctattttatgccag

SEQ ID NO: 3882 - DNA, 282 bp, Homo sapiens
aacttccataatgagaaatttacatgactttgctctacaaaatctcatgcaaattggacctcagtattcatctgtttttaaaagtttagtggcttcttctccagccctaaaagcccgccttgaggctgctataaagggcaatcaggaaagtgtcaaagtcaagataccaacatctaaatatactaagagtcctggaaaaaactcaagcatccaattaaagaccagtttcctctgattttttttttggaatagtaagcaccttaatataataaatacttgatc

SEQ ID NO: 3883 - DNA, 733 bp, Homo sapiens
  misc_feature (1)...(733): n = a,t,c or g
cctttcctgtccgaggccaatgcagagcggatcgtgcgcacgctctgcaaggtgcgtggtgcggcactcaagctgggccagatgctgagcatccaggatgatgcctttatcaacccccacctggctaagatcttcgagcgggtgcggcagagcgcggacttcatgccactgaagcagatgatgaaaactctcaacaacgacctgggccccaactggcgggacaagttggaatacttcgaggagcggcccttcgccgccgcatccattgggcaggtgcacttggcccgaatgaagggcggccgcgaggtggccatgaagatccagtaccctggcgtggcccagagcatcaacagtgatgtcaacaacctcatggccgtgttgaacatgagcaacatgcttccagaaggcctgttccccgagcacctgatcgacgtgctgaggcgggactggccctggagtgtgactaccagcgagaggccgcctgtgcccgcaagttcagggacctgctgaagggccaccccttcttctatgtgcctgagattgtggatgagctctgcagcccacatgtgctgaccacagagctggtgtctggcttccccctgggaccagggccgaaggcttcagccagggagattcggaacgagatctgctacaacatcctgggttctgtgcctgaggggagctgtttcgagttncactttcattgcaaacagaccccaactggttccaattt

SEQ ID NO: 3884 - DNA, 145 bp, Homo sapiens
agagaaaaaatatcttttttaattttcaaatgggaggatagagcctctcatttctaatatgtatttccttctgcaaaaacatggcctaggcccatggtcttgaactactggacatctgaattttagtaggtgctggattcaggca

SEQ ID NO: 3885 - DNA, 831 bp, Homo sapiens
ctccactttctttccctctccgttttggtgggctggttgaagatgaaatccactgaggagggaagtccagcaccctgtgtgccagtccagaactggcccatctgtagaccccctgaaaatcatatgggcttggatttggatattctcaacagaaagggttaaaggctgatggtacctaaagcctggtacttgaattttgatcaagataagctgccttaagttctcttcattacacaaatgatcctagataattgatagatcctgtggttcaactggatttctagatagaagctggattcatgtgatgccagaggagtaaaatttcaagagactgaaaccagatctgagtttcgctgttccagtctggacctctttggtgctgtaaatcctggatatactgtagatgagtactgcgtttttcttttatggcctctcttcagcttctggagacctcactatcctattatgtctttgtgtgaagacatgctgctttgtaattatcgaaagtgtcgcatcaaactctctgggctatgcatgggtcactgcctgctctcacatcttctgtgatcagcatgggcagtggtgagtttagtcgctcaccagctatctgtcctgcctgcaacagtaccctttctggaaagctagatattgtccgcacagaactcagtccatcagaggaatataaagctatgggtattgggcaggactgcggaccagagatcgtgttgggacattaggctcccgaggcgctgggccttctgggacatattcaggtacattcagggaacgtcttctattcaaggattacaattttcaggcaagggtttaggg

SEQ ID NO: 3886 - DNA, 671 bp, Homo sapiens
  misc_feature (1)...(671): n = a,t,c or g
tgacattatggcgtggctcaaaatcttttttacttttggaaggccctgcttaggaaacttgctgctgctcttaattcacggacttggagagacaaaacttaaaaaagctgttgctgggttcaggtgctgtgggagaacccgcaaaaaatggtctgaactgaaaatctccatctccatcgccccgatttcgaacaggtgtattatccaaaggaaacttggagttgttacctaatgggaagccaagaacaccagactgtgcaatcatggatggttcaagggtgccttcatggttagcaatagtgatgtttcgtagcctaaggctatcatagaggccttggagcttttgatactgacgattgcgctccataagtttctcagagatgtcactgaactttttcttgtattcttctagtactttcttcatggaggtaacctcccctttcatagaggtcaattctacatccttgctttgtatttgctgagtatatatcttctccatctgtttcagatggccctcagccttgctgaaattgtattcttgatagagacgttcctgatgtaccaagtgaagcacnnnnnnnnnnnnnnnnnnnnnnnnnnnnnnnnnnnnnnnnnnnnnnnnnnnnnnnnnnnnnntatgtccagaaggccagcgctcgggagctaatgtc

SEQ ID NO: 3887 - DNA, 424 bp, Homo sapiens
  misc_feature (1)...(424): n = a,t,c or g
gcaaacagctttacttggaataaccaaaaactggaagtaacccaatggacattggaacaacatggaattgaaaagtacattgtgatatattcaggcagtggaatattactcaccaatatgaaataatgaaatattgatacatgcaactacatgagcaaatctcaaaatatgctgaatgaaagaagcgaaagagtaaaatctttattattcagtttacataaaattctagacagtgctcactaatttgtggtgacagaaagcagatcattggttaccgagatgggggtgatggatgaagaaggccatgaagaaaggactgcaaaagactacanggaaactattgggagtgatctatatattcatcatcttgattgtggtgattgttttgtgagtcaaaatgtatcaaattatatgttttaaatat

SEQ ID NO: 3888 - DNA, 425 bp, Homo sapiens
gggattctagacagttctccctgcccctagtatgcagcagcatttgtttccccttggtaatacacccgagtcagtaaaccccttatttgcttgttggttcagtgcccagaagggcccaaaacagcaggtgagcctcaatgtacaattcagtgagctgttgtcttgtgttccccggaaggcattcctcctgtaaaaaccaagccctccaaaccagtagaactccagttgaggggacaggtgagaggaaccactcctacttctatcccttgattcctggacccgtgaatcctggttataggagagacaacacatgcaaagcagaaccttgggggcagcacccaaaagttgtctcccaagtggtgctgtaacggagtcttcacgaggccgtttcactctaatgtttgtccagctgcttcctcctgctg

SEQ ID NO: 3889 - DNA, 85 bp, Homo sapiens
ggtgctcatgttttagagactaaatggaggaggagatgaggaaaagattgaaatctctcggttcaccagatggtgtagggccagc

SEQ ID NO: 3890 - DNA, 338 bp, Homo sapiens
ttcaatatacagaagcaattgtatttatatacacaatccaaaaacaggaaattccattttttttacagtagcaatacttagaaataaatctaacaaaagtatgagacttagcaaaaattataatccactgttaaaagacatgaaaaacccaataaatggaaagacatctcatgttcatggactggaaggcttaatatggcaatattctccacatttgctttatgtcatgaatacaacgcttatgaaaatcccaactgcctttattttagtatagaaattgacaagctgatcctgcaattcatatggaaatacaagggacctagaatagccaaaacaac

SEQ ID NO: 3891 - DNA, 701 bp, Homo sapiens
aatgatggaatggttttcaagaggccaagtaggaccagctgtgggtttatcccattttacctaaggattttacacaatacattgagtgcaggaatggcacgcaatgattgcactcagtaatataccaaaccactcctggctttgtttagaccctagacttgggccctcaaccttctcgtaggacctcttgcgaggattttccccttttacagattcacactcagtcccgaacagaaacacttgagcacctacaatctcacagccaactccctgccaacgtccagtgactcacagttaagagagcttcagcagcagctctgaccaaagtgatgaccaactacttaacatgaattagaaacagagcagaaaaaacacacctttagcctgctctgcgtaaagaaccaagtctccaccatgaacaccaagccaccaactccccgtccctcagtagtcctgtgtactcccaaagccccaaaatttaccccagcctcaagcagccttgtttaaaaaattaaggaagggcctgtgataagcactgcaagttaaacagaaacaggggacttaagtgcagagtttgtcactctatttctgggaggggatgggctgcacagtgtgcaatggggctggctggtaaagggaggaccaggtgacagccagccacactgtctcaaggatgaacctggccctgctagcattatgcc

SEQ ID NO: 3892 - DNA, 508 bp, Homo sapiens
  misc_feature (1)...(508): n = a,t,c or g
aaagtaaaaattggcatcacttcgagagccatcaaacccacactgggactgattgatcctctgcacaccctccacatgcctgcccgagtggtcgccaacagtggctttgatgtgctttgccatgccctggagtcatacaccaccctgccctaccacctgcggagcccctgcccttcaaatcccatcacacggcctgcgtaccagggcagcaacccaatcagtgacatttgggctatccacgcgctgcggatcgtggctaagtatctgaagagggccgtcaacaagcactgacaaatgaagaagaagaatgagtctcagggcaccttcctgggagtggccctcgccatccaggggaccagcgcgttgcctcccccggcgcttttacatcacatgaggcagctgacagcgttatttattatggcctttgcttgaaacagttgatggaggaantattgttttcctttcagtttttcattttaggaggacaagggcgttcgttttgaattaa

SEQ ID NO: 3893 - DNA, 634 bp, Homo sapiens
  misc_feature (1)...(634): n = a,t,c or g
taaagacccactttgatgctaacttttacatttctagcccctggactttcaccttctgggaaaacaacagattatgcctttgaggtatattcactcaatccattatttcttttatgaatgactagaaaaaaataaaactagaatattttgctaatgaattattattttattttaaatctgttattaattcacattccataatctctatttgatcagaccatatttagcaaagtacctggttggtataatggaatataaaccttctgagatcatggctaatgtctagagtgctgtctttgtagagtcactaaaataggataaattcccaattctacaaattctccagtacatatatgttatgtgttaaatctttagttttttaattataacaatcccaaaagaggtcaaagtaaagtaacaattctggtgtatttttatcacactgtaattacatanttacttataattatttgtttaagtccctgtctcctcctagtccagggattttttncagnnanntannnnnnnnnnnnnnnnnnnnnnnnnnnnnnnnnnnnnnnnnnnnnnnnngtgatctcagctcactacaacctccggctnctnaggtcaagcgatttnctgcctaagccttttt

SEQ ID NO: 3894 - DNA, 754 bp, Homo sapiens
gtactggagccgcccaaacctgcggcggtcgcagggtccctgcggtctcccggtgggggcagcagctccaggggctggtgcgtgtacaggtccgactcgatcaccacattcttggtcaagaggtgctgagagcttttggctcttcttctggctggactggatactggggcagcgttcctttcactagtgcggggatatcagctttggagtaaccaacagctgctaggccatcatcaacatccagatcgaataagaatttccggagcgtgtctgccaacaccagccctgcatcttggatcctgggcagtgcgggtgtcggctcccagtatttctgccatctccaggtgtcgctctggaaacatctgggccgtgaaagtgaacaccgctggggacgtgagcaccacagaaaggcccatggggcaccagtgggtgatccacattgtaatcctttgctttatacatcttcactaaacctgaaattgggtaagacattccatggcacagatgaacaccagcatttccaaagccgatgccagcaaaagcacttgccaagtgcatatgagaccttgcttcaagatcatcgggatttctgacagccctgtgaatgatataaatacctaacaataacacatcaacattggcaattcctacagaataaggagctgccttagggaaagatatggtgaaaaaaaaagaaatgctactcggtaggaagaaaaatcaggcaagttattcaaacgacgcctcgtgccgc

SEQ ID NO: 3895 - DNA, 405 bp, Homo sapiens
ctggaattagaagatcatcaaagcagactggagcagaaactgagagagaaaatgctcaaggaggagagccagaaagatgagaaggatctaaacgaagagcaagaagtattcaccgagctgatgcaagtgattgagcaaagggacaaactcgtcgattccttagaggaacaacgcatcagagaaaaagccgaggaccagcactttgaaagcttcgtattctccagaggctgtcagctgagcaggacttgaggaggcccgtagtccctctccctggctgcacgttgggaccggatcaggccaagtgcaccacacaccctcatgggtctttctgcaggatttatcatccctggaacttaagttataccttactgcattttttaaaattaaaattctcttgcacgcaaa

SEQ ID NO: 3896 - DNA, 322 bp, Homo sapiens
ttttcaactgacagggtcagtaatggagtaaaactcattgtaatcgtgtaacttatgtgggttaagaaattgaactttgctagtaccccagaagctcctttatgtcccctcctgattttaacgcttaatcaccttcatcctcagttttatggtaatcacttgtctttgcagttttagtctgtaaccatgcatccctaaataaatgtttagattgcctattttaaaaatttaatataattggttcaatgtgtgcatttcatgtatgacttcttttatgtctgtgatgttcatcagagttgtttcatttgtagttattttaata

SEQ ID NO: 3897 - DNA, 506 bp, Homo sapiens
ttttttttttaagtttagggcatttatatatctgcaacccaataaacccctggtaccatgcagctcccccaaattcagtgcaacccaaagctgctgaaacaagtccagccccagaaggtgtagtggcactgtggtgttaccttatttttatatgacccttcaaaaaggacactgaaaacccagtgcctgtttgcagagatcatgtgtggaaattgaaaccctgtctttaaggaatgaccaaattcatgctacttaacctgaaaacttgggggcaaagtggttgtgattatctgaagggctgctatgtagatgaagtattaaacatgtcgtaggcaaggtttagaggagaatgtggtacttaaccttctatagatcccacaatgaaatgacctgccttgtgaggtagtgagctccctgtcaagagagattttcaagcaatgggtagaagaccacttggcaggagtgttggaaaaagtgggctaaaccagatttttccaacctagtat

SEQ ID NO: 3898 - DNA, 775 bp, Homo sapiens
cggcacgaggcctttctttctttctgtaccttcaagttcttgatttttaaaattccaactctagagaaaaccaatatatggtggtgctgggctttgaagatagcatatcagacgccttggttctgtttgtacacttagccttacatttcaggaggaggcttttcattaggggcttaagctagctcctttggcttttaaaaacaattttttttcaaatttcttcattacctaagggagcctgcatctaaatttctcaactagttcagcctagctgaatttttctagtgtgtaatacactttgcttccttcttattgatgaaaaccagggggatgagtggcttccatggagagatttcctgatttctcagggaggaaaaaagtgatgacatttaccactacttttatgtttttcccctttttccaaattgataaggatttctggttcctagtgatccgggattgggcaacagtgcagaactgccagtcatgccgtagcgtgaagaaagaatgtgagtaactgttgttttgcaaggatttgtagggttatgggcagttgttgtttgaagcattgctatgacctaattcacaaggtatctttcctctcttggtgttctaggtaagccaatgagctttaatctctacttgctataaccgtgtgcttagaaaaagaggtgagagtagtggttttccttcaaactgtccacattcatgaagattatgaattgttaggacagccagggcaagatagaccctgtctctacaaaaatttttttct

SEQ ID NO: 3899 - DNA, 691 bp, Homo sapiens
ttaagggtctcactctattgtctaggctcgaatgcagtgacgtgatcatggatcactgcagtcctcaacttactgggctcaggatgaaaggcttcctagcacaaacaccacccctgggagttcccggtacatcaataccagcctggggatcacgttctcatcaagagttggaagagggaaagcttgaaccagcttaggaggacctcatctggtactcttgatgaatgaaacagcaatctgaatggctgaaaaaggatggacccagcactccagggagaaaacttggcattctttgggaatctaacaggatgcagtgaacccaagccttttgaagagctcaccaatcagactgcccttgtctatccatgagcagatgtttgatagtattgcggaggccctctagtgggtatgctgccaagcaactggagtggcacttgggctctaatccagttgtctatccctttcaccctggcatttcatcagccaaacaaaaaccaactaactcagaaaaaaaggaaagcccctcaagggtcctttgaccccgatatctacatagatgctatcggggtcccctgaggggtaccaaacgaattcaaagctcgaaatcaaatagctgctggattcaagtctgtccttttcttgtggtctactataaataaaaatgtagactggataaattacatatactata

SEQ ID NO: 3900 - DNA, 1343 bp, Homo sapiens
  misc_feature (1)...(1343): n = a,t,c or g
atggagtattcagagaaacttaagtctgggtgcaaaatcggaaatagcaacagataagctttcttttcctcttaaaaatattactcgaaagaatatcgctaaaatgatagcaggcaacagcacagaaagttcaaaaacaccagtgaccatagaaaagatttatccatattatgtgaaagcacctagtgattctaactcaaaacctataaagcaacttttatctgaaaataatttcatggatattaccatcattttgtccagagacaatacaactaaatataacagtgagtggtgggttctcaacctgactggaaacagaatatacaatccgaactctcaggccctggaactggtggtcttcaatgacaaagtcagtcccccaagtctggggttcctggctggctatggtattatgggattatatgcttcagttgtccttgtgattgggaaatttgtccgtgaattcttcagtgggatttctcactccatcatgtttgaagagcttccaaatgtggatcgaattttgaagttgtgcacagatatttttttagttcgagagacaggagaactggagctagaagaagatctctatgccaaattaatattcctatatccgcttcaccagagacaatgatccaaatgggactaggagganaaaaccaaatttgaaacctttaggaacacagactgcaaataatgttaacatttgaattttttttaaaagcacaatattctcataagagctaagcatttctagttcgacggaaatggtttgtttctcttctgataggtagacaaaaaggagctgatatccttctgcagtaaaagctaccttgcaagttaaggcactgttgaaaatgttatttgtaactccatttctctgaaatcagggctacttgctttatgttttagtcaacagtgtctcgcattctgattgatcatgtgaaggaatcatttatgggccccgtccctaagagaaacagaagaggagtcagaaagaaagatgcctgtgttttcctctgtggggcccgtgcacttcctggagagatgctacaatgcaatatacagcgctccattcccactggggaagctgctgtgatgagactagatgagccttcaacacactcagaaaatgcaacagcaatagggggcagacagctcctacctgtgtttctaggagcaaaagagagggaactaattgcccgtgaagacgccagtggaaggatcagcctcattctaagcaaaaacatagtattagtgatactcttactgccttatcttaaccaaggactaataggatacctttccattaaacaccagtgacttctcaggaaaaaaaaaaa

SEQ ID NO: 3901 - DNA, 931 bp, Homo sapiens
agagtgtaagagtgctggacaggaacctccaccctcatgtcacatttcttcaatgtgacccttctggcccctctcctcctgacagcggaacaatgactgccccgataggtggaggctggaggaagaatcagtcctgtccttggcaagctcttcactatgacagtaaaggctctctgcctgctgccaaggcctgtgactttctaacctggcctcacgctgggtaagcttaaggtagaggtgcaggattagcaagcccacctggctaccaggccgacagctacatcctccaactgaccctgatcaatgaagagggattcatgtgtctgtctcagttggttccaaatgaaaccagggagcaggggagttaggaatcgaacaccagtcatgcctactggtctctgctcgagagccaataccctgtgccctccactcatctggatttacaggaactgtcatagtgttcagtattgggtggtgataagcccattggattgtccccttggggggatgagctaggggtgcaaggaacacctgatgagtagataagtggagctcatggtatttcctaaaagatgctaatctatttgccaaacttggtcttgaatgtactgggggcttcaaggtatgggtatatttttcttgtgtccttgcagttagcccccatgtcttatgtgtgtcctgaaaaaataagagcctgcccaagactttgggcctcttgacagaattaaccacttttatacatctgagttctcttggtaagttctttagcagtgttcaaagtctactagctcgcattagtttctgttgctgccaacagatctgaactaatgctaacagatccccctgagggattcttgatgggctgagcagctggctggagctagtactgactgacactcattgtgatgagggcagaatcctgtacgtcgac

SEQ ID NO: 3902 - DNA, 1612 bp, Homo sapiens
tgaagcttacactggagaatttaattggagggctttgagacagctcatgtaatggaaagctcttaagaactaggtttagaaggtgcagagaccagggcaacttcagggatccaggtagcaggaaggaatcggtagcctctttggtatggccactatggtggtagacactgtctacgttgtttgctgagtcttctggctttcttccactcttcctgctcttggacatcagactccagggttcttcagcctttgggaatcttagggactttgcaccagtgggtttgggtttgccaggggctcttgcgctttggccacagcactgaaggctggctgcactgtcagcttccccagttttgaggtttttgaactcaggctgagccactactggcttctctctaacccagcttgcagacggcctattgtgcgcttcgccttctaactgtggggccagttctccctaataacctccctttcatatatacatatatcctactaattctgtccctctggagaaccctaatacatgaattataactctaagtttcagttctggccatagcattatgtcacaccaacaccagcatcaaatattttaggttgcctaattaatgtatctgtaaacctatagccagcttgggtggggctattgagagtcagcaccagcactgatcatatataggatcagcctactggggttggcccacgttgtatgtagctgcgaatagcaaggaggggaacagcaacatccctagggaaaccgatcacagaaaggcagctcactaccccacagtaaaaagaaccttgagtttcccagttcagtcccctgctgggtgcatgctacccccctcctcctccccagaggctctggacctacacagctgctgaaaaaaagaaaatgtccttacctacaatgaaccatcacaggcacccacctagaaattaaggtactgtggtcatttatcttatcccagaataacaggagtgtgtataaacaggaagctttagtttagataaataagattatccattacaaaaattttatattgaataacctgtaagtaatttgaaaaagagacttctggctagttttcacttatgtccaagtcagtgggggtaaatgcattgtgattcactgtaggttttagactcttacagccttaacaaccttgtaaatccataactagcatcttcctatctggcagaccctttacaaatgcattatctcaagcctcacaacaattctttgaggtagacatagaaagtgaaagttcagaaagggtttaaaaaaaaaaaaaaaaaaaaaacttgtccagagacatagccaattagtggaagagggtttgaacccaggttcctaactacaaaatccacgggtttaactgctgctcctcctgaaatgaaatatctacaagaagtagcaggcattgagaaacagatgggaagatagtgttttgatatgattttctgtttacaggaaggccttaactacgtcctgttcacctcatgcttattgggtaactttccagtaaaaaacaattgcactttgttttcttttccaaaaagaggcagaaactgatttcttcaaagtaaaaaggcaccagggacccattct

SEQ ID NO: 3903 - DNA, 413 bp, Homo sapiens
gaaacagtcctatgactttgtttccaaacttttctttggcagcgctgtgcgttccagaaagggtgggcaagaatgcgagggggtaaatcagaagaagtttcatattaagaagcctaagtgtgcccaaatgtgagtgggtcacacgagatgcactaagcgtctcagtcagctaataacaatcagctcgtggcccacctggccctgctgtcgccccgaccttccagctgtgagcctacggcagctggggcaatggtgtacccaacctgctccttgctcacctctggcatggctgggtccgagctccagaacatggcatctctcctccctgcaccaccttccctgaggggtggggcctgccaagggctttgggactcatcctgacctgaggtattgttcaaggagtttgatcccag

SEQ ID NO: 3904 - DNA, 407 bp, Homo sapiens
gagcaccatgagcttcaataccctgattactcaatccatgccccccacacaccaccaccaacaccacaacgtgggcagggatggccccatgcccagctcccggcacacctgacatgaacctaatgtgctgagtcttgtaagagcagtttccctatttctgttcctccctcctcactgtgttagcctccttcctcccagcctcactcacctcgaagctccatacttccaaagcctgcttttagtgccacctcctccaggaagccttcctggattccctctgccaggatgcttctaagagtttccagagcaatccatctgtgctcagctctctgtttgctccctaagtgacttacagataaaacatagattctcctctggttggttcctggcccagtgggattgacgta

SEQ ID NO: 3905 - DNA, 477 bp, Homo sapiens
gggatccccaaaaaaccgaggctgggagctagtggcccttttgctttctaggacttggggggccggccctccctcctaagcataacaaaggtggtgttgctccagctcagccccaggggacacagatgcactttgggggtgagggcaggtaatgactccatcgcaccctcagttcagctggacagaggctcaggtgaccccagccttcactgtctcccgctctccagggagcttatcttcgccccatctcccaaataagtgggcccttgtgctgtgaggaagaccaaagcctcagggaagataaggagatatgggagatggggagggggagggacaaggggcagagagtagggtctagctggctatctctggccttactaacacccccctggaggcatgccccttttctccagcacacaagcacattggggcacctggaaatattggttccaggctcctgttctctggacttcagat

SEQ ID NO: 3906 - DNA, 302 bp, Homo sapiens
attgtccacaactggaaggcgcgatggttcatccttcggcagaacacgctggtgtactacaagcttgaggggggtcggagagtgacccctcccaagggccggatcctcctggatggctgcaccatcacctgcccctgcctggagtatgaaaaccgaccgctcctcattaagctgaagactcaaacatccacggagtacttcctggaggcctgttctcgagaggaagcgggatgcctgggcctttgaagatcaccggggctattcatgcagggcagcccggggaaggtccagcagctgcacaa

SEQ ID NO: 3907 - DNA, 164 bp, Homo sapiens
gggcacctctgtccaacctcctttctggtagattcctttctcctgcttcatataggccaaacctcagggcaagggaacatgggggtagagtggtgctggccagaaccatctgcttgagctacttggttgattcatatcctcttttcctttatggagacccattt

SEQ ID NO: 3908 - DNA, 317 bp, Homo sapiens
gaacatcttccagaccctaaaatacttctttgaaactgagagagaaactattgattatctagcccaaccttttatagctaaatgaccttgaataggtagccttttcttttatctgtacaagcttactgcagaatctcaatttgtgtgagtgacagcaggtgtagcagctccatctgtatttgtcagattatagtttactaactgaatgaactaaaaattgggatatttggggcttgaatttttattctgaatgtacagtctgactttatccccaccgggaaattaggaattataaactcaggccctaattctaacgg

SEQ ID NO: 3909 - DNA, 519 bp, Homo sapiens
ttcacagtatgggttgctctttccatttggtttgcaggcttttaattctgtagcttcaatgacatgcaccatcaggcgcccaatgcctgaagtcttttgggagcgggcttggtaagctttctcacgcttcttcttctcggtgtcgatgtactgctcagacgccgccttgatcttctgcacccaggtggtcctctcattaatgttgtctgttcggagggtgtagacccgatcaatgtgggaaatgtggaagacaggctcatcgctggaagggtctgtgggcagtttcaccaagacttcattcaggaaaatgggctgaaagaattagggccaaaacacaggctgtgagatgggctagaacactccacccgcctatgtccagagaggagttctgtttgttctgaagagccttgttgaggaaggagaaaggggtcttagtgtcttaaggttcttcttacacagaacaaatgaaacctccctttgtaaggaacaatgaagcctccatttctggaaaagtccatt

SEQ ID NO: 3910 - DNA, 445 bp, Homo sapiens
  misc_feature (1)...(445): n = a,t,c or g
agaggatgtacggagagtggatggcccttctcactagtatttctttttgaaagatgtatgtggctgggcacgcgtcggcctagcagatctgaacccaggtgatttctgttctcaggaagcttttaggtgacaaggatcaggcatgtgaacaaataaccatactgtaaagctggctgtgctgggtcgctagagcaaactcagacacacactctgcgctcttggagttgggaaacccnacctgcgttggctttttgtgggaggtggccttgattgggccttgaaggatgggtgagatttacagaaggttggaatgaggcactccaagcaaagaacagcagaggctcagcagcaagaatgcaaaaagggagttcactactgactcaaatacccggagccctggggtttagtctcctccctccacaagtcacatgtaaaagtccagtca

SEQ ID NO: 3911 - DNA, 307 bp, Homo sapiens
agaagagactgaagggcaaggagggaaaggaattggttcccaggtccatggacctcttgtgaatcccccattgctgtggggtctgaggaaacacagaggaggtgtcagctgctctgcctgcccccactcccctgccaacaacgtagtaacctctgtgcctaacctctgagccctggcctccaaccctgggagggaggtacttatgttatccgcattgtgcacgtggagctcagaggggcagccacttgccaggccagcaatccaggctgtctgtctccagagcccaggcccccagtcaacaacttgc

SEQ ID NO: 3912 - DNA, 702 bp, Homo sapiens
  misc_feature (1)...(702): n = a,t,c or g
acaggcccagagccactcctgcctacaggttctgagggctcaggggacctcctgggccctcaggctctttagctgagaataagggccctgagggaactacctgcttctcacatccccgggtctctgaccatctgctgtgtgccccgaccccccctaccctgctcctccaccaagcctgatgccaagggctataaaccactggcccaacagaagcttggttcccagagaactgggtccctgcctgggacatgctccttgctacagccccttgtgggagctcagagggcatgggctgctccccctacggtccctcgcccagtggttctgtctctttatggcaggaagcaatgaggctccccaagaacacacctgaggaaaaggacaggcgcacggcggccctacaggagggtctgaggcgggcagtctctgtgccgctgacgctggcggagacggtggcctcgctgtggccggccctgcaggaactggcccggtgtgggaacctggcctgccggtcagacctccaggtggcggccaaagccctggagatgggcgtgtttggcgcatatttcaacgtgctcatcaacctgagggacatcacagacgaggcatttaaggaccagatcaccatcgtgtttccagcctcctgcaggaagccaagacccaggctgcactggtgctggactgcttgaaanccgcaagaat

SEQ ID NO: 3913 - DNA, 611 bp, Homo sapiens
  misc_feature (1)...(611): n = a,t,c or g
ggtgatgtttactttgactcaagcgggggctcccggggtcagtgttcaagaaggaaagcagttgttgaagctacagaagcccaggccagggctcccactggctgtagctgtgctctgggtccccaggtccctgcgcagccaccagggccccaccagaccatgggttccttattctggacaaaccctcctctgctggaaccctggactttggccccagtccctttaagagctgaaagggctgtgctgagagcactggcctctgcactcaactggaaccaattttcaccatgattttaaaaattaaaaaaacctggcagagcccgactagaaagggacggcctctcccctcctacctgccaccgctggggaggcacagagctcgccagcgtccctggaagtcccctcaggaaatggaaagtggagtgcccttggtctggtagcaccatgtggggagggacccagctnggcgcangcccctggtgggccttttagaatccagacctccctgccggaatgccccgaaggcgngaggccgggctgtgctgcaggaaacccaatctncagatgccaaaggaacttgaaggggaagctganaaatcggctgtgtnccc

SEQ ID NO: 3914 - DNA, 1269 bp, Homo sapiens
acatgaagatggcctcaagtacggtgtgatctttattccatgacaatcttcaactcaacacaaatttcatctttacataggatggtaattgtacaaagaaataaaatgttttttaaaaatccgattaaaacactgattccacccaccccccagccccactccagtgaaggaggtaatggagggtaaggtcagggcagaggagaggagtccccatctgcactgagcggccgcctcccgcccctcctcaggacccacagccagctggtgcgtcgaggcccggctggcacttcctgcacaggaggctgccaacaagaagtgagtgggcactgtcctctctggctgttcctggggcaccaagcacaggtgacagcttaagtctaatgagctttcaagttcaacaagccctgaacgttctctgccagatggaagccccacgggcaagaaggacagggtccctggacagcgaggttgaaaggaccctggaggagagctggcttgtggctatggcccatgttgcacacgtgtgtgcgcgtgcgtgcgtgtgtcgggggcagcatgcaggcccgacactgggtaatcaggctgccatttggtccaagaaagcagaatcttcccagaaagacaatgccagcagctccccaattgtcctgtgggaatctgggcatgaaggctctcctgcctgctcctgtctcaggcaggcgggactgcaacaggaacacatcaggcgcaggccaaagggcagctgagaatagtttgtttggcaaacagagcttaactggaagctggatgcccagaaaggatcaagagcagccccaggaactcctgagcatcaatgcagggccccgggaggccctggtgaggcccagggctagcccctgcttccacagcaaatctggggcagttgcagctgctcaagcccaaggagctgaggagagctgccagagttcccaggcaggtggggagcctgcacccaagggcttgcccatggtgatagcccacttccagttccagaagaaggcaggcctctaggaagcacccacaatctacactttaaaaaaggagaaaaaatgaaaagcccctgaaacgcagatgccagttcctcaggggacttttcatgtcaggcagttttctgctgagatgctggatttgtgaccaaaaaagggctggtatttatttttagagcaaaaaagcctatttgtgtctctgggagggcttggatgatgtggccacactcgcctgccccaaccccaggggctgtcgtcattctaa

SEQ ID NO: 3915 - DNA, 80 bp, Homo sapiens
tcttgccgcttgtccagagcgtaattccagtggcaggaatttcaggttccgtggcaaagggggcctcctcacacaagcac

SEQ ID NO: 3916 - DNA, 486 bp, Homo sapiens
tactgaaatacacagattcacttcagctcagcgtttactgagcatctgccataggcgcagcctgtgcttggagctgggatttaaacagctccagtccctggcctgccacagaaagtgaaggccagtggggacaggcatgtaagcccgtagcagcagcacacccggccacagcggccaagtgcagcaagtactcacagaattccagggcgatgccaagaggcttcagaggggccaacctgtgagccagaacttgaaggaccaacggattccccagatggacaagaacagaatggtgtataccaagcaagataaagtgtatggaagtgacagaggccagcaacaatgggcacaccacagggcaaggcccaggacacagcagggctgaactggcaccctgaagggggcttagtgtctgcctgtgaagggcctcaggtcccacaccaaagattttggaatctatcccaaagagatgccaaagagagagtt

SEQ ID NO: 3917 - DNA, 406 bp, Homo sapiens
gggattgtgatgtgcacctggcatgggtgtgtaacatcacaactggatctttgacgaacctataactggggttgcagcttaaggtggccaccctgcgagactgtgccctatgtcagggacactcagaagggcctctctgacagcaaatgccaggggactttatgagccacatttttaaaagcagcaacaaataaggattcccaaagcccatgccccccactggctaggcctgcctctgatgtccacgacaacattcacagctaagcttggtcactggggacatgtatttgctcaaaaacagcaaggtacatttttaatactaatggcatcaaaatgaatcctaaagccactgtaaataaagcattgtagggccaatgccacaacagacataagtagatcaatggag

SEQ ID NO: 3918 - DNA, 361 bp, Homo sapiens
ggtgggcacaacgggccgagccatcagtgggtgcaactttacaaagtccaggaccagggatggcaagtcttgggatgaattgtagccttggctgcgcaatgaatctgtgatacactggcgtgggggacgaaggtggtgaacctcgggactctaccacctgcctgccctctccacaaggccagaccctttgacccttccctgggctctgtctactcagcactggccccaggcctgggcactcaccgagccaggccggggctcaggcaccccaccctcatagcgaccccagcgccgggaaccatcctggtattccatatagggtcctgcaaagacagcctggatctctgccaggtcatagcgg

SEQ ID NO: 3919 - DNA, 620 bp, Homo sapiens
gtcggggaaaaagggtgtttattaaccaacggcagggggaggagctgagcccaggctccccactctgtcacatgcctgttccacccacctggttgtaagtgggggcattcctaaagaagtgtagccattctcacaataaatacattcattgtggggtggaggtgggagaggttgggtgaagggcagtaaaaacccgtgggattccacgttctcagctacaaaaataacagtcatcctcacccgaggggaatgggggagctcagtcagaattgattgtcccatataggcctagagacttcagaggcccctggcccctgaaagtgccccggtgaggtaggacaggggtaggagctaagcgtccaaactcccagcctctgccctttgcatagttccaagaatgggcttcatgtgccagttgagacatcagatttctcctccctttccctgctgtagtctagaggaagcaaatgcttgattcccccaaaagagaggctggctcattgagtgcagtgttggtcatccatcctaggcaagggcctgtgaggacagttaaatgggagggggatctccctctgaaatgtccacggactaaacccaacagacaggtccactcgtgccgc

SEQ ID NO: 3920 - DNA, 623 bp, Homo sapiens
ctcccaaagtgctggattgcaggcatgagcgcctagccaggaagctatcttttcttgagttatgaaactttgcaacagttgttcaaattggtgtttgtccttcctatagctttcatattttcaaattaattctgtatggctatataatttatgttttaaaaggcaattctcttgactttggaaatatggaagtctctcctttaacctattcttgttcccattcccagtctcatttgaaatcattccttttattgttagtgtgtgtatttttgttgggtgtgcttttaatgcatcccaagtatgcatcattttggataaaaaatacatccaaattaagatgttttaacacataggacaaacttgtgcactttttatgccaaaaaaaaaaaaaattgggttttccttcatgggatttctagaaacactgcctacactttatgaaaactacatagtattcacctgtgacaggtagagtttatcactattaattttatgaggctatttattactttccaatgcatccacttagaacaagctaagagtaaggctgctaactttaattccttgcctgattttattgtacagtgtgcacaagcacaatggtatgcttgtatatagaaact

SEQ ID NO: 3921 - DNA, 513 bp, Homo sapiens
ggggatttcagagtatatagctgaaggtgatattttatgtaaatatgttttatggaaacttattgctcatcgctgtttcctgttaattctcctaaaatataattaaacttttggaacttttttatagcttttgtgctagactaatttttgtctctaatgaggttatataaatggcagcttctgacgttttcaatgtaggaagtcatttaaaacttcatgtatattgtgaaaatgtagtctgctttaagctctctaaagtggtctaagttactggttcctaagtatggatgagcaatcaaaatcatctggaaaatttgttaaaaatacagtaatgaaggcacctcactgtcctttttcccaaacatacttctgcattctgtttgagtaggtagggactacacatttttcacaagtatcctcttgggaatacccaggaatgcttacttgagcaacctcttactaatatgtaccttgataaggtggctaggtaaacataaatatacaaaaacccac

SEQ ID NO: 3922 - DNA, 626 bp, Homo sapiens
tttttttttttttttactcgtgttgcaattttactgtaagtttgaaactgtcaatacaaaaagttacaaagaattgtttataaagaagaagaagaaaaaagcaaacccaaccaagctcaagcctagatccgtatttggattcagctcgtctcggggcggagccaggcgtcacggcctccggattaaagtatccccccggggagtgtgctctgtgaatctgggtggggagggcgctcggtgctgttcccagcaacccaccaccctcctcctagtgcttgcaagaataggcagggaactcagctgactgcatcagaacctgagaagctggaggctgaagccagacaccagcctctcaggacttggggacactatgagcccactcagccccacaggtctgaatctttggggaggggagggttccagtctgcactctgcccttgaccatcagggcagggggatcacactggctatcggcatcatctctagcagtttctccagccccagccctagaatcaggccaagctctcagcactgcgtgggtttgatcttgaggattctttaccaccatccaggactggggggctgccgctcatgggttttgttgttaagagacagggtctcgctcc

SEQ ID NO: 3923 - DNA, 931 bp, Homo sapiens
ccctgaattgtagccttttttaaagtgcttgagacagcagatgttgaggtttccatgctgtttacaagtccttttctatctgagttcctccaacatatacaggcccagacaattttccactggccaagagctgactgtgacaacttggtgattctgttaagccttttgaaaggtggtcatcagaaggagaaggtgacttctgctgtgtgcgctcctgtctgctttggaccttttcaaagggcagcacagcaggcagcccttccttctcatcttctccaaggctcaggtagcagaaaaccggctgcctgtgtgttccatatgggccacgactatagtataccctgcttacaaaaataagactaacatcaaaaactttggttttgctctttacaatttttgccaagcactgggtgacaagatgtgtttaattttttaaaaatgtctatgaaaattgacactggaaaaaactgtttatctctaggtcttgttttgaaaggattgttgatgagtctacttgcttttcctagttaagacactagcaatggtttctacagtatttctctatatgttgttttcaggttttagaaagggggatgatcttttcaggtatcaaagtggtaaaagcagtattcagatgggttgtttctaaactacaactcttggccactagattcctttgacttactgtatcagaatgtagcagccgacactggcaatccagagtgtcagttaaagaacaacagaatagctcagaactcaatgataccagtctaatgtatatgaaagacttgttcctgaactaattaatctatagaatcaacatcaaaaggcagacaagaaacttgtcaagttccccacttttgaagtggaataagaagtcatatacttgtgagatcagcaggctgactttctagcagccctcattgcagat

SEQ ID NO: 3924 - DNA, 571 bp, Homo sapiens
  misc_feature (1)...(571): n = a,t,c or g
gtggcttttctgtcaatttctgcagctttttcttattctccaaaaaccagaaagtggtaatatttgttagtgatcaaatcaaagatgatatttaaaaacacatgttgacaggaggacctagaggcattatgagtattagaaagtctgcaaattaggttgtttgctttgtggtgaggtgtgaaacaggatatgcatttttgaaaatgtatctttggatttgctgaactgggctcaaatgtggtcaaattgagagagcttatgatgccagttttactgcattctttttagttgtgttccccaaaatcctgccccatgacctttaccagaacaagtaaacacatcctaaaaacaaagttatgttctagtatggttttaaaagtcttcccttttggttatttggaaaatagtgcaaacgtgcggtctagtggttatggccaaaggcagagcaaagggagtgcggccttagccagccccagccagctgccattgctcccacgctctgtgtggtcttgacccaatgcccagaaaagcaaggttccccactttctacctctttatttttaattntact

SEQ ID NO: 3925 - DNA, 161 bp, Homo sapiens
ggaaaacgttacttccttgaagtatttgttcagtaagtccgggcacactttgaggatgtttaccacaaggtcagccaccagatcatcatcagctgcagttttcaaacccagcaagaggtcaagggacaccagatgaggctacagcagtagacaagagccac

SEQ ID NO: 3926 - DNA, 234 bp, Homo sapiens
ggaaagttttttcttcagcagttctaaatttcatgggttattcgtatctgctcagtgggtgcttcaaagtccagcaagtagctctttaaaatatttattcttgatctttagaacactatgaatagggaaaaaagaaaaaactgttcaaaataaaatgtaggagccgtgcttttggaatgcttgagtgaggagctcaacaagtcctctcccaagaaagcaatgataaaacttgac

SEQ ID NO: 3927 - DNA, 416 bp, Homo sapiens
  misc_feature (1)...(416): n = a,t,c or g
gatatttaaggctgagactttggaagctgaggcaagacaaagtcagtgaggatggaagcttcatggagctgaaagaacttcatgtgttcaaagagttgaaagaacttagcgtggctgctctggagaaggtgagggggacccacgccaaataatagagggctgtggctaccacgtgaagggttttgtgtttttgtgcatttattgaatacttactgtgtgccaggtacgtgtcaggcattttcacatcaattttttatttattcctcctcccagtcttaatgaggtgatgtttttcatccttgattttgagttgaggtaactaaggctcagagagattaaaccttgcccaagtgagtgtagccactgagtnggaagagctggagattctggaaccctgggtgtttctgactttccac

SEQ ID NO: 3928 - DNA, 543 bp, Homo sapiens
gcagggcccctgatgagtggagtaggctggatccaagaccctagggtgctcaggcaaactgcacgtgtcaccgctcctcagctgctgcagctggtggccacgtggcagtgccagggtcacactcacagagatgaggagaagctgggccccctttgatcttcacagtagcctatgagatggtccccagatcctccgatgcttcaagaggagctgggcaccacagttaagtgaagtttcctcaaattttaagtgttggtcatttgtgtttaaaaatgtgaaaacaaaagaaataaaagtgcagccagacaaagcctctctgccctgcacatggctgctgaaaggctgaaatggatggaggtggtctcacccaggggatcccagggactgacgttcctatcgcagggaaggtgtcacacacggagctacggaacagcaaggccggagcaaacaaagccagcccagctgcctcggctattcccaaccaggggctacactggagacattttaaaaataaaggggggtaggggaagaattctcccgcaa

SEQ ID NO: 3929 - DNA, 481 bp, Homo sapiens
  misc_feature (1)...(481): n = a,t,c or g
gagagtttctaggcttcccactatttattgatatatttatttttgtaaaatattgtagaataccaaatattttatttttatgtctgtgattcccttttggatagagagtcttctgggcttcagagtatggctcacatataatatatggcctgtatttccatctctctctttttgcatcagaatattctattggtttaaggaatcttgccatagcttgccataattttgtatatttgtgtcttgcaggcatgctgtgcctacaagcatgctttgtagtatattttctgatttgtaaatagtacagttttaactgaagtgtagatgttccaggaaatatttaaccaatacattgtcatgcagtttcataaaagtgatgttgtcagtttattcatggaggaaggcaaatattgttcagggctgtggaggaggaatgtggattggccacctcagtaaaaagggngatgccattttaaatggaatc

SEQ ID NO: 3930 - DNA, 949 bp, Homo sapiens
atggctgcggggatgtatttggaacattatctggacagtattgaaaaccttccctttgaattacagagaaactttcagctcatgagggacctagaccaaagaacagaggaagcattagataccatctccagcctggaacattgagcaaatttggctgcattggggcattcacttggtttcttcaaagatgtctgttggagctattcccatacccactgaaggatctgtagtcttgtcttcattctatgtagccatgttcaaggatgtaacagactggttttgagatacatgaagctgtgtcttaagttactctgagtttacacatgaaaaggtgaacatcatccaaaaaccctgggacacagtttccctgagaactgcctgccgaatgacctgaaggctgaaattgacaagttggccactgagtatatgagtagtgcccgcagcctgagctccgaggaaaaattggcccttctcaaacagatccagggaagcctatggcaagtgcaaggaatttggtgacgacaaggtgcagcttgccatgcagacctatgagatggtggacaaacacattcggcggctggacacagacctggcccgttttgaggctgatctcaaggagaaacagattgagtcaagtgactatgacagctcttccagcaaaggcaaaaagaaaggccggactcaaaaggagaagaaagctgctcgtgctcgttccaaagggaaaaactcggatgaagaagcccccaagactgcccagaagaagttaaagctcgtgcgcacaagtcctgagtatgggatgccctcagtgacctttggcagtgtccacccctctgatgtgttggatatgcctgtggatcccaacgaacccacctattgcctttgtcaccaggtctcctatggagagatgattggctgtgacaaccctgattgttccattgagtggttccat

SEQ ID NO: 3931 - DNA, 516 bp, Homo sapiens
gtgaatttcttactctagaaattctgcagacacttattgatcacctgccacatgccagacattccacttggctttaactaaaacgtgactgaaaattaaaaataattgtgtgttgtgattattcaaatgtccatccgatcagcctcacccagtgtggaagatgcgatggaaaccactgtctgtagatggggcagtgagggaaggctgggaacaaggggatgaaattttctgtagcatctgctgttaacagcaaaacatataatattaaaatgtgcataacttggccatttgtcactggagatgtgtctgaataaatatacccacaccacaggagaaaaaagatgtctcaacaaacacagcatggatttcaaataattttctaaagtaaccagatgcttatgctagtcttgccaccatctatgtcatatctttgagtctttgataaatgtactgtttactgtttggtaacttctgagtcccctctaggtgggctacctaatgttggtaagagttcac

SEQ ID NO: 3932 - DNA, 816 bp, Homo sapiens
ttttttttttttttttctggtttcgggttttattttagaatttataaaattccagtgtcatccatattcatgagcctttacacatgtttgcatataatctccaaattccaaagttaaggccaagggatggattgtagctatggaaacagatgatatggaagacatccaacaaggaggaaaagcacacgcacgcctcacccctgcctcatctctgcccagggctgtcctgacagcacagacgcttcagggagacaggcctggggacagtcatgtcatcacccttgcaacaaccacccaaaggaaaagagagcgctgaacagtttaggaaagggctcgcgtctaagacatcaagcgacatacagagatgtgcaaaacttggtgagaattaaaattgacctttgggagagggtaggggcaggatgttttatgacactgtagaaaagacaggaggaacccgctgcgatggagattggggggagctggaagcaagcagccaacaggacagagttccagaactcatgcagatggggaagaggtgacagcccttccccactggcctcccccgtggaggtggagtagacagatcccgggaaaggcaggaaaagggccttgctttctttccctgtttcctaagccgtggtcaccctagcctatgaagctggaagctatattccttccaatcccaatttaccattcctgtaaacaggcccattcagggctgcctgagcaaatggggacttgccgagggcagctgcaactagacttggctaagccgtctgggtctactcaagaattcgagtctgaagatgaccaagc

SEQ ID NO: 3933 - DNA, 1266 bp, Homo sapiens
  misc_feature (1)...(1266): n = a,t,c or g
gggaaaagttaaggagcaaaatgggggttggaagcaaaaaatagggccccacctatttaggacgagattgaagactgacccttgaggcacacttgcactggagatgggtttatttcacgctctgtgcttgtgtgctagcggagggagagctcagggtggcttaatccagaggccctgtcatggcccgcccccagccatgggaaagcaaacttcatcctaaggtgtgcagcccaggccctgcccctttacagtctaggccgcctgccatggggtgcagcctctccaggggctgcgtcagacttgcacgctgcccacatccagattcctgcaaagacgaattgggtgcacagcaccccaaccacatacacgaggaagaagatgcggtcagcagtctcaggccagcttctctgtgacccctttactcctctggagggctctgtggggagagatacagggaaaggagctgttcttcaaggtcccctcaacatgagcggaagagcgaaccccaggggtcatcagcctgtatcgcttcctttcttagattctcagctgatgaaaatttgggtctggcccatttcaggccatcttcagttgaagaaacaccctcttaggctgtgcaaggcatgggttatcaggggattgaggtcacctgggacttcagggaggctcagcttgctccctgccccagacctgtttcttctaagggaggaggacatggtggagaccaggggacaggagagccagcagggtggatgcaaggggcctctacccacacctgggacctccgtgccctcaccccagccctaggtgtgcacctagggcctcattccttaccccccagcccctgcccaccttcagcaggatgaggccctgggttgccgtgctctcgctgttcccctctcggggctgggctggggccgctcttggccccaaggttgccccgggccagcagcccagccagcagcacagtctctatggtgctgaggaagagcagcagcagcaggatggtgaagtagtaaactgggggaggcagggcacagggagatgctcaggggccagtccctgtgtctctggtgcccagcgagctgagcaccagtgggtgaccggggagaaacagggcagactgggtaagggagcaaggcttactgagcagtgggttgcaggaggaggagctgggcagggcctgcaccaggnaggagtggaggacgaggtaactcagcagcaatgtcactttgtagctattcgctcaatggcccggaggnaagc

SEQ ID NO: 3934 - DNA, 649 bp, Homo sapiens
ttttttttttttttttttgaagtggtgcaaagtacatttatttttacaatgaaagctcatctatgaatctgataaaggccttccttcaactggagacaatttgggatgttgcaaaacaaggtttgggaagcccttctatggatcggttttgtgtccaagtctgtccctgccaaaagccatcaaaagtctccatcacccctgggctccagtctgctacccccagacttggcagctgggatctctccttcctggttcatagttctcattcccacccctcagcgatggagttagagttccaggcccacgtggtgaacgagattgtgagtgtcaagagggaatacgtagtttatgatctgaagacccaagtcccaccccagcagctggtgccctgcttccaggtgacggtgagtcaagtcgggaggaggccgacagagggctgctggaggcgggtgggagtgaggatgcacggccagaggcatggccccatgcccccgatgcccacctccttcccccccgccgggaaggccctgacttttccccttccagctgaggctgaagaacacggcgctcaagtccatcatcgctctcttggtgcctgcagaggcactgctgttggctgacgtgtgcggggggttgctgcccctccggg

SEQ ID NO: 3935 - DNA, 265 bp, Homo sapiens
  misc_feature (1)...(265): n = a,t,c or g
gccctcttcatgcaaataacatcaggcagaacagagatttattatgtgcaaatgacagtaacctttataaaatctagaaaataatttttccccaatttcccctcgaatccaaacattcttctgcagtctgagtggggttgataggctgccnagatgttgaagggcctcagtgggaagggacttngctaacagttcccagtgccagtgttctctatagcgtgtcttgttgagcactggtgccctggnttgcttgcccacaagnccg

SEQ ID NO: 3936 - DNA, 346 bp, Homo sapiens
cacacacttagttgccagtatttgtgttcacagattttgtgagtcaaggattcagaaagggcacagcaggaacagctttgtaactccatgatgtctggggtttcagttgggaaaactcaaggttggaatcaacagttggtcagtggggtcatttgaagcggccacactatgatagccacaagtgcgtactgagcagttgaagtgaggccagtctgaatggagactagtgtgttgattgaaaataggactgtaagtataaaatgtgcatcagatttcgaagactttgtataaaaaaagaaactaaactatcttaatggtttttatattgattatattttagatagat

SEQ ID NO: 3937 - DNA, 636 bp, Homo sapiens
gacagtctgggagcccagagctctgggaggagtgggaaaatgctgcttcctgctgcttgcttctaggcacctgcttccgccatctcacttaccatggctagagatgggggtgagactggggaaggacaaaagcagggaacagataagggatggaaatcagaagggaatatagaaagaactctggatgtggagaaatgccggtacctgagcattttgtatcaatgggagtaccctctgtaactgctcagtaggttacaaatgaagagtccaccagtattagaaacaatttaaacttgccagtaccaactgggatgtgtgccttcaatttgaaaattgtatgttttattttttaaatttgttaacagcattaatttatagagtattgatgtcatttatgtttctgaggtgtttcaacacaattttggatcagctgcctgtttgcaaaaacataatatatttctgttaaacagttcttcacctaacagcatattgctcttataactggtagagctgtttcaaaggaagttggtttctggtccaagttttgacctaaaccatgtccatcttctattaccagcacttacaagcactgtgaaaactgatcatgacaaataagtaaaatttgctacattaaac

SEQ ID NO: 3938 - DNA, 90 bp, Homo sapiens
gggataactgagggcagtcaagtaaggctccatgtaggtggtatcctttgagctaggaggaaagtagtgtatgtttttgtggaatggttc

SEQ ID NO: 3939 - DNA, 362 bp, Homo sapiens
gggagagtgttccgtgcgcgcgggaggaggatgtgccctcggttccgtgcgcgcgggaggaggacgcgccctcggtgctgttggggtggtgttctgcaggtgggttgaggccgtgtctttcctcactgatcgtctgtctggcggttctctccgtggttataactagggcaccgagtctccctgtcactgaagaactgcttttctccttgtcattctgtctattcttgattcagatattttggggtctcttgttaggagcaggaatattttcgtaggaaaaattcctggtagtgaaattgttgggtcacaatacatggcccttgtatgactaggctgaccttgctggagttgatggagtccag

SEQ ID NO: 3940 - DNA, 1268 bp, Homo sapiens
tgaatgctctcacctttatttctctcaatatacccgtgatacagatatttcatatgtaacaaagataaggatgtgtgcaggtataaaacagaggcagaatcatggctaaaacatctagcccagcaatgaactcattatccctgaggggtaggggccggggaggagaggagtcacaggcagttcaccaacacctggaaaatcgatgacttcatggagaatgaatgactcggggggattcagatcatgaagtcatgagaagaaggcctttctgcccagggatgatgtttctcagtatcaataatcagttgtgggtttttttcttctatttcttccagcagcttattgagttcatcattaaagtcatctattttcaacctgagtgtccggagggtgccactggaacatgtcaaggtttcaaacagcatcttcactccactagaccccaagggattctgacccaggtccagagtgacgaggctctggttgcagctgaagggcagagcagaggtcttcacaactgaacggagggatggaacatccccacaaccacagacatctcaagttgcacagtggtttcctcaaagcctcacacaggaacttcattcccttaactcctatgtgattcagccccagatccaaacacaacaggcttgatttttcttggagaagctttgtgagatcgcagcagccatcgcctagttatgtcgcagttccaaagcaccaaggtctgcagtttacactcggggtacctcaagccctcacacagaaacttcacccctgtattcccaatggggttcttggccaagcacaggtgtgtcagctcccggctgacaaccaacacagcagcaaggtccttgcaattggcttctgtaaggtgacagttttccaacgacaacctctgcagaaagcacttggggtgtctcaaagttgtgtacagcaacttagcaccctcatccagaagctcattgtcggagaggtttacgcacgtcagggactggttgacttcaagggccaaggagagatcagcccactgctgagtggtagcggaacaagacaccaacccgagatatcgcaggttacattctggatgtctcaagacctcacacaatgcgggaaacatatcatcctggtcattgccttgaagggtcagatacgttacagtcttgtgacctcgaagagctaggcagaggttccgatgagcatcagctggggaaatgtttttgaacaccactctctggagatgacaggtgtcagaggctatttgttcc

SEQ ID NO: 3941 - DNA, 1096 bp, Homo sapiens
  misc_feature (1)...(1096): n = a,t,c or g
tttttttttttgagatggcacagaataagcaatttattgcaattgaattatccaatgtggttgactgaatataaatatttttattacaaaatattccaggtaaaaattcggagctgcttacaagcttctttagctttaagctcattgcatttcttcatgtctagagcatgggtgacgggctcaggtgtgcctggcctgccccgcaggtccntccttctccgtctgcagtgggtcccactcagtgaggacctctgaggacacctcagtgaacagatggtcccagtcccagccgacatcatcctcccggacttcgtgctccggcgcgagcactttggtgaggagtttcaggtcgatctccccatccagtgtctgaatggctgagtacttcatgaggtcattgtccaggtcacggtaggtcatcacccgctttatctggatgctgggaggggctgccacctgcaaaacaaagtcttcttcctgtacttcctccagatccggaatgataggaatatctcctccataatctgatccattcaggctctgtggtctgaggcggaaatcttctatttcttcagaagccttcctcctaaacttcgaagccttcacggaatcacctgcccagcctccctgtcggcagcgaggtaatttagcagaggaagtctctccagtcagagtcaaagaggaattcttgccattgaggtgattctcggcctgcgctgactcctgttgagctcggcgacccatcttggccctcggaagaaagccgtccctgcctgcctcccttccatgcataaaacagtgcggcttttgcaggaacttctgcgangangtntnccaaaggnaaaantntnggatnggancgaatncgaacccggncggggnttccctatnaccctgtgatcgatctgttctggggaaattcgcactcggggctctagaaaacggagaaaggctcggaaatttcccacggtcctagacgccggcggggacagggtgttttctactttctgaggattttaaagaaagcaaaccccaggccagcagcgcggagcccacagtggcctgggggcggggcggtgaggctgcctccttctgg

SEQ ID NO: 3942 - DNA, 118 bp, Homo sapiens
gctggtccgagccatgcggctgtcctttgtcggggagctgggctgggagctgcacattccaaaggcgtcctgcgtgcctgtgtaccgggctgtgatggccgcggggtgccaagcacgg

SEQ ID NO: 3943 - DNA, 864 bp, Homo sapiens
gttaacagtagaaggctcagtttctctgctcatcacacggccttcggcactgtagctttgggtggtgggctgcagattaattttgtaaccaccttaagaaaaatacggaactctaactccttgccactcaagaaatgtcctccctttcagaatatgccttccgcatgtctcgtctcagtgcccggctatttggtgaagtcaccaggcctactaattccaagtctatgaaagtggtgaaactgtttagtgaactgcccttggccaagaagaaggagacttatgatttggataccaatcataagtctccttcttcttggtatccaaatcaccacacttacgctgaactcatgcagaccgctccgatttcttgggactctacagagatgagcatccaggattttatgggatgagcaaaaacgactaaagaagcttcgtggaaaggagaaaccaaagaaaggagaagggaaaagagcagcaaaaaggaaatagtgttgggtccctcaagagggagactttcttcctcagtggcggagagaagaaagtgcatttattgtctttccacatattggaggaatgtcatcttcctaaatgaagtttatttggaggaacacagtcatctccttggtgaaatctaatccggttacattgtggctggtttcttgaacacattctaactgtgcaaaattatcttggccttggccgtgtaatgtgaggtttacctgattctctaatgaaataaatacctaagttattgtttgatgatttgtttggggtgggatgggatgctgggggaatggaggggaaacctcattaagtgagcatcctatagtgcctcatttctcccttcttgcttactgactcacc

SEQ ID NO: 3944 - DNA, 254 bp, Homo sapiens
gtcgactttttttttttttttttaagtttcttgtgatcacccaggagctaaaaagttattttgtttctatgttaacttttgggaggggccctttgttttgaatccgttaattatcttcacaatatctaatcatatttcattttcagcttattataaatgaaagtctagattagtgtcatctgatagaactttctgcaatgataaaaatgttctattctatatgctccaaaatggtagctactagccacgtcgac

SEQ ID NO: 3945 - DNA, 181 bp, Homo sapiens
gcatcacctagattctacaaataacatttttctctatttgttttacacatgtcaatctgcctatccatccctctatccattcatttatccattttattaatgtatttcaaagtaagttgcagacatcattacatttcacttctaaacacttcagcatacagctgagttttatgcaagaaac

SEQ ID NO: 3946 - DNA, 217 bp, Homo sapiens
gagaacactgactctgtcgaacatcaccaggaatgacacgggggtctaccagtgtgagagctggaactcagccaccagcagcatcagcaaccccactctcatcaaagttacatatggcccagaccctcctatggtcaaccctccagacccagaggtcacagctggggcagccctcaccctgtcctgctttgctgactcaaacccccctgcccagtac

SEQ ID NO: 3947 - DNA, 496 bp, Homo sapiens
gaggaggttgggaaggggagaaaagggatgaggagatattttcttgagatttatctccttgagataatgcttgagaaagtcatccagccatggacttcttggagtaatacttacaaagaattggatgcattttgcatcccttaaggcaaaaaccccagtgctgttacaactgaaaatcattagccttgttctctgatagatacttacaagcccaactgcaggcaatcaaaatttatagcagatgagttctaactccatcaacctgtaatgtggtccatcttagggaaagaataggaaaacaccttggtttaccacaggctttgcttacagtttctgctttctgtgacctattttttgtatttcagcattttgtgaccgacttattcttagatcattggttttccaaaggctttgtggccatgaagccctttgagtgaaaactgtgcagaagcccagagtaaaagtgaagctgctctggatgaagtagtgaagcaag

SEQ ID NO: 3948 - DNA, 2023 bp, Homo sapiens
  misc_feature (1)...(2023): n = a,t,c or g
ataaccagtgcagagtaactgcaaggcaccaagaccacatccaaccagcccattttcctcctctccaccactgaatgggatctgggagaaagcattagtaacagcactcatcaactgcttccctggaacaaaacatgacaaaacacacggaaggttttttcattatggttctcggtgtactttattctcctgctgtctagctaagcagcccacacaggacagaaatgggtagcactgaggaatgatcagattttttttctatccccaatatttctgccccctccctaagccctgacccaaccctatcttaataatcacgaatggttagtacatcattctgtctctcaaagaacaactgaaatggaaacaaggcattagaggaccaggcctcttcttaatagggcttaggagctggtatgagctctttattcacaatggagcgtctctccttcaaatacctggatttttttttttttgtacactggttcatagatcggcacttgactttgaacctggcaccaaaaggcacaatatctgataccctgtacaagagctattagagatgctgccatatggatgggcaaaactgagccaatcccacttaggaatggaaggcttggacatggaagggaggatataaacgaggagttggagaaaaacgcaagcccagtttttgctagagtggaaatgaaagtgggaatgagggtcttgtttttagtcctctaaggaccaggaagcaattttaaaacttccttggtttttctgaaagcagcatattcaaaatgccagcaaaaactcctaacaactgcaaaaccaaaagaggatcaaagctcaccaacatcccttcttattgctgaaaggctctaaaattcaggatgccctgttcccttgtaaaagggaaaataattaagtctgatttatggtaatcataccacatcacacttctaaaaaaatattcaagtgtgtgaccaggggacgtttgacaccattttattaaccttcaacttcagtggaaaaataaaaccttttccaagtgccattttcatcacaagacttctagttagtgtgtgtgtgtattcacacacacacacttttttttgtttttgttttgttggttgcttttgaagtgcagcaagagaccaataccgcattgtagtcaatcaaataaaagaacagaaggccaagcagtttccaaatggttattttatcagattgtttgaacatttaatttatcctgtttgcaatccaaaatagttacctgaagtttgctgttttgtgtgtatgtgtttacttttattgtatatttatttttctaaactctttggcacaattttctgggggcgttcagactgccacaatacaagtcaggagagggcgttttctttgtgctgccaattctgatcatttaaattttggtttgtttgggttgtgatttttttgtttttgaagtctgcgttatttgtaacaattgtacttatatttttctatatcctctaacgccagagttttctttttctccccctccttcccacttctacattcacagttgaaccatattattaggaaaggcgccttgatgaaaagatcaggataggagctctgaccattcgtcagtgttttccctagagtnnnnnnnnnnnnnnnnnnnnnnnnnnnnnnnnnnnnnnnnnnnnnnnnnntaaagagcgtctttcctctgtgtgtgtnnnnnnnnnnnnnnnnnnnnnnnnnnnnnnnnnnnnnnnnnnnnncatctcttgtgctgcatcagtagacagaacttcggttagttttatgaaatgcaacatctaaccccttgttttctgggaaaaagaaactgcaatgacttgaagttgagaatgtggataccgcctcactcacacacactcattctcagactgtaaaaaatccctgaccctccttctagctggcaagcatacagtaccatgtggcaaaggtacagcgaaggtgggcttgagacccaggctccatctttctcctcagtaagcaaaggccaggctgc

SEQ ID NO: 3949 - DNA, 386 bp, Homo sapiens
  misc_feature (1)...(386): n = a,t,c or g
gcccaggcaaagtgaaaatattcttagcactcagactgtacttagagtgttttctcagtccagtctgtacagtctgtaggcagaaggcctcagaagaaagtcatggccactcagtgcccactgtgggctttgtaagtcctggctctcccgtcaaggttacccagaggtaaaagcttcctgggagtggggccaggtgtgtttggcactccagatagaaggcaaaatgctcagattcgggcctgtgcacttgtatgcaacctgtcggtcgatacctaggcatttatttttccctgacaatgaacgacctttccctcacccacccttaagctcaaagagttttagcaaaattctcttttaaataaacagaatgccantaagagggtgac

SEQ ID NO: 3950 - DNA, 1139 bp, Homo sapiens
  misc_feature (1)...(1139): n = a,t,c or g
ttttttttttttgcttccaactgttttattgctaaactatcatgatacaagccgtataaaaatactttacatataggaaaaataaactacattaaactggagattaaaaacatttgcataggaatgtgatgtattcaaacgcctttaacagtcaggattttctaaacctaagcctgccagcaccaccatgttggagagacctgtttgttggagaattggttttctctcctctgagggctgtagaggccaagaggggtgagtgaggttctttgacaagatgtccaggatgctaagcttgtcccaacagccatagcctcggtctgctcaggccaatcagaatgctgtgagcacctgctctaatggaaacaacatcatttgcatccattccattcaaagcttgaactcagcagggagtttattctggtcagccaacagctgcataaaggtagaatgttaatacccctttcacttccagttcccaggaccttgatggctcagggagcaactctctgttatcaaccaccagaaaagtttgtttttaaacagactgagttaaacagtgatgttggctgtaagtcaaggcactcacaaaagctgagggaaatggatgtttatgatcacaattttataggatgctgctttttcttaagcatttaattggaatgcaggaaaatacttgctatgcaattggctgctttggttccacgaaacgtaatgccctagcctcgagcctaggagacccaaggttaagatgcgctgggtcaccgagcaccttgcctccgggaaacaagttcgggaaaggttagccccagcttgtcaagaacgtcacaactcccacccaggcctcttgnaaacttgaaatgaaaacattctttcaaatctgagcaatagaaagcacttggaaaggtcnttttttttttttttttttttgacatgataaattcagcctcactgtagtccagagtgagaattagaacataccaacttccaatctgcctaaatgtgacagcctctgcccaagactggctcactgaggcgtcttggctactggatgtaaacaaaaaatgcaatatccgtgcctcccagttctttgaaggaatcaattcatccttggttatatctatgctggaaaactgtgg

SEQ ID NO: 3951 - DNA, 141 bp, Homo sapiens
gaaaaaacagataccttgaatgataacattaatgataaaaattgcatagcataacagctattcacatggatgtcagattagtcactgttcagctttctctttaatactacccaagtatttcatagtgtttaggatttactt

SEQ ID NO: 3952 - DNA, 607 bp, Homo sapiens
gagcagctgtctgaggctgcactgatggcctcctcggtggacgtcctcgtctccatctgtgtggtctttgccatgtcctttgtcccggccagcttcactcttgtcctcattgaggagcgagtcacccgagccaagcacctgcagctcatggggggcctgtccccaccctctactggcttggcaactttctctgggacatgtgtaactacttggtgccagcatgcatcgtggtgctcatctttctggccttccagcagagggcatatgtggcccctgccaacctgcctgctctcctgctgttgctactactgtatgggtgaggcccccagtccctcagggcctattcttactgaccccttactgccttccacattaatgctgctgagatagaactctgcagtgactcccaaggagaggatatggaggtctgaggtgatgccgtgtgtgatccaattcagtggtgtgccaaggtggccttaaaagctcatcttatcctgactcatattagtagagttctaagggcagcccatgcctgttaatttccagtaatttggggagggccgaggcagggagggattgctttgtgggccagggagttttgaggacc

SEQ ID NO: 3953 - DNA, 694 bp, Homo sapiens
tcatgcctgcctgataccctgcttggtcaaatccccggctgcttccttctgcacccagaaattccttcccactcatgttgttcccacacacaaaccaagagccaaaaatgagtgtgtctattttatatttaaacccagctgtttggaagcaattataaaacttctcccacacaccaagaaccccagaactccccacccagaaggaaaggagacttagggtcctggtcccacagtctttaatgctgtagagtaggagaggggacaggcagagtgagggtggtaaaggactactcttgtccctgagaaggcagaggtgctggctggcctgcccttccccaggcttggataccttgggcctttcccttattcctgcaccaacagcaaactcagaaggaaaaaacaaaacaaaactctaaaggtaaacgcggtccttctccctctctcatgtggctcctcctgcccctacctgggagaaggttcaagtattgcgctgatgggtttgggcaaggaccacagaggctggcatggagaggccctgcctcctcctactcctcctgtctccttacctgaaaaggaggggagggatggataaaggaatgggtaaacaaaattaattggtaacacataaagttagtaaatgaataaatacaattaaataaatgaataaataaacaagcgaagaaaaaaatatcaa

SEQ ID NO: 3954 - DNA, 356 bp, Homo sapiens
  misc_feature (1)...(356): n = a,t,c or g
ttggccagaagcctctgctctgctgggacacaaccagctcccagcacaacctctctgccttcctggaggtcagctgcgcccctggcctggcctctgcaactatcggggcagtggtggtcagcgggtgcctgcttcttggacttgccatcgctggccctgtgctggcctggagactctggcgatgccgattggccagaagccgggagctgaacaaaccctgggctgctcaggatgggcccaagccggatttaggcttgcagccacggtacggcagccnttagcgcccccaagccccaagttggcgntgcattcctgcccctncacttcccnactattgagnacatgtttgtgggcca

SEQ ID NO: 3955 - DNA, 806 bp, Homo sapiens
gccttcccccacagctatcttcactctctgccttccccatctcagatactgtcaactccatccttctgtcaggccaaaatccttggagccatcctcaactgctctttttgtcttacatcccacatccagtttgtcagaaaagcctattagagataccttgaaaatgcacccagaatctgggccgtttctcggcacctccaccattgcccccggcctaagaagctctcttatcttgcatcttgggctggactcctacaacagccacaacctccctgctggtctcccagcttctagccttcccccatctcctgtcgttttcgacacagcagccagaaggatcctttaaaaacagaggttgatcctgtcgttcctcaaaatcctccaatggttttcctactgcactcagagtaaaagccagtctctgccttagatgctctgggatcctgtaccctctttggtctcatgtcctacaatctgcattctggccataatggtcttctctgctgttccttgaacattccaggaacattccccccatcccctcgtggcctcaggactggctgcttcctttggtatgctattctgatacacactaagcaccctccctcacctgttataaaaaattcgctgggaggccaataggctgaaatggctcctgcactttgggttcctaagtcagcaaactgaaactcaactcagagtgaaagtgttgtgtgtaacctaggagcaggaaacttcagcttaaccagtcagaaactaccgactaacctcctaacaagagatttatggtcagttaacctttaata

SEQ ID NO: 3956 - DNA, 1943 bp, Homo sapiens
gtgaatgtggctaggcgaggagctggagttgctgttcttaatggaaaactgtttgtatgtggtggctttgatggttctcatgccatcagttgtgtggaaatgtatgatccaactagaaatgaatggaagatgatgggaaatatgacttcaccaaggagcaatgctgggattgcaactgtagggaacaccatttatgcagtgggaggattcgatggcaatgaatttctgaatacggtggaagtctataaccttgagtcaaatgaatggagcccctatacaaagattttccagttttaacaaatttaagaccctctcaaactaacaggcttagtgatgtaattatggttagcagaggtacacttgtgaataaagagggtgggtgggtatagatgttgctaacagcaacacaaagcttttgcatattgcatactattaaacatgctgtacatactttttgggtttatttggaaaggaatgcaaagatgaaggtctgttttgtgtacttttaagactttggttattttactttttggaaaagaataaaccaagaattgattgggcacatcatttcaagaagtcccctctcctccacatttgttttgccaatttgcacattaaatgactcttccctcaaatgtgtactatggggtaaaaggggtagggtttaaagatgtagacagttgggttttttaagggccctttttcaataactggaacactctataacaaaggatacttatttaaatagatgacattgactatttttgtttttattaaaaggaagcttacatgcctaccaatatttaatcttttatgattgcctttttataactttttatattctcagcagagtgctttaccaattgaagtaaaatgtggcagggctggagttattgaagcagagtggcagtcttcagtttgcagagtaggggtctgtcttttaaactctgagtgcaaacttcagagttcttgccttggctgcagtttttttccttcaagaatgcagtactaacatttatttgagtggagttactgaacagtaacatagctgtgatttttggtatttgaaacactggttttaaatattttgacttgttgagggtatgttttatatagcaagacattatatagcagtaaaaaatggtgttttatcttctatataattcctgtttttattattaacaaaacagtcctaaatagcagccctcaattgtgaaaaaatttactttaaactacattaggttgtgaatgcaggttttatcagaactatgtttttgttcagtttatctgttcatatggataaatattggttgggatgacttggtgtctaatgtgtagtgctacacacctaacttatggggccaaaatagcatgtcctaatgcttgctgctgatttaaacacattaaaggtactttgcaggaaatccttgcaccatgggattaatatccaattgctgcttgtacactcattcattactaaaagttttgagaaatttttttttccagtaatgagcttaagaaatttgtggaaaataactcacctggcatcttacatctgaaataaggaatgatataaggtttttttttctcacagaagatgaagcacacaggaacctaatgggccaactgggatgaggtgactattctgagatgactattcagtggctaacttgggttaggaagaaaataattaggtattttctccaaatgttcactggtactctgccactttatttctctcatctgttacacaaagaaccaccaggaaagcaaatcagtttggttggtaactctgtaattcctaactatcactggtttggttctggactaaaactacattgacagattgaatttgcctaatatgatgactgtttttaatatggatctgtatgtgttctattcagcacaaggaaataaaattttagttgaggattcagcactaa

SEQ ID NO: 3957 - DNA, 451 bp, Homo sapiens
gacacgatgattagttgtctcatcaaggagagcttagaagaggtccctgcagagaaccacccactctggctgaaggaccagcctttgtgatccaaccagcacacctcctattatgaggtcatgtcttgcttatcctgagaccgctggttggcagaggtcttgaactattaagagtacatgaagttaatctatttatttgctcatcgatctctttttatgaaacactgtagaaccctgaggtgcaagcagcatcatttgagatgcctctgaggcaggataatgcgtgggagagacgcgttcttcccgacaccatcctggtcatttggggctggcaccatgatggctctggaatgttggtggctgttcccaggtgaccaggcagagagagtgatggttccccttggggcctgcggattcttggtggaaccagcagttgttccaggaaggaaac

SEQ ID NO: 3958 - DNA, 426 bp, Homo sapiens
gaccatccctaggtttcacaactagtaagctgagattcggactccaacgtgcatgttcctttcccagtagcacactgcttctcctgaagccgaagttccccttcagagaattatgtagatctcataattccctaggcaaaactggagctctttgaatcccagcctagccatccacactataccagtttaaggtgcaatcttgtgattattgccgctgatcacgattcttgataaggcatccacaactgataagtctgacgcttctgttttacaccaattgccagttgtctcagagtcactgtgaaaggagggaaaagcttatctcttataaagttggttagcttcaaaatacagtgatgtattttgggatatttctgtggaaaggttacaagggtcaaatgcatcattaatgtgaacttaatatta

SEQ ID NO: 3959 - DNA, 1011 bp, Homo sapiens
ttttttttttttttttcgggggctcaataaaaacttttaattacatttcagagacttcgtacagtgcaacagtgaatattcactgttaattttcacaagagtccatttcatcaaacgttcagagagtctgccttttcattcccttgttcctcagtgctccaatcaggtttccagtctcccagaggtttcttttagttttgattaccgaccaaaactccagtttagggagaatggaagtccaccgtcccatccccaccaaaacatatttcagtcaaacccaatcccagtccctaaagaattaggaaagtatgggccaagggtccttttaattatacacacatcacccttaaaactgcgtgtgtgtacgagaaataaagaaaaacacaagaggggctgtaaaatactgcacaagacaacaaaacagaaggaaagtcttgagggagaaacactaagacgcgagcggcaggatcctacctcctgtccgtgacactccccattgacaccttccccactgtgccatggcggggaaggactaaagtcgagtctctagggtctctagaggtcttgctaggatgagcttaaagagatggggtgagggtggggggaactgcttccattatatttgtggttctcagggttaagcagtgaggaggggcaggaagattcagaatgatccgtgggtccaaccctttggatgtgaacattcctggatagaaactggaggactctcttgacaaagtgcaggaagggataaacaaaaataagatcaagtgaaatgggaaaaccctcaaagagatcaagatgggcagtggtggtggtgaaggtagagaagcggttttcagaacctgttctggccaaggtggaagaatgtgcggcagccatgaagaaatatcaaggcttcaggtagctagcacctttcaaactggcaccatggcctttcccagggggtgggaccaatatgtttttggaggatcatccaggtcacacgtctcaggtagaaatgcagggttt

SEQ ID NO: 3960 - DNA, 539 bp, Homo sapiens
  misc_feature (1)...(539): n = a,t,c or g
gtcctttacagtgggcaagaccatcatgatgcccttaagaagacccccaacatcttcttggggaaaaagttggctcttcagagctgtccccaaggctccctcttttagccctcttgcatagggtcatttgcatgagaacagattcctttgtgtaaagttggcctgcctgttctctgtccacgtttatagtccttcaagtcttcgtgttggggttgctagggcagatatggacccgggcttgcaaataagctcactggcattttaccagcctgtgaggaactttcaacttgggtaagtagactgaaaggaatctggtctggacctctgggaagaggggtcccgcaagcctgcttttgggggctgactcttcagggcagccatcaaagggggagaatatgtgaagggggcttccatgggaagcttcgatgggccaaccaaccttccattcttcctctccaatctctgttcacccacatgctccaaccangggcttgtgttctgggcaaatgactntnngccacnaaacaanttcntgctta

SEQ ID NO: 3961 - DNA, 341 bp, Homo sapiens
ccgcggaacctgccttcaaggctcagtccgcacacaaagaatctggagctgccgaggccactccctaccactcacccatcaatcctccactgggctcaggaaagacgggccattgtagcaaagtagccagtcctgtagccccagctggacctcctggtgaggcagcttgccagatggtggggatcgctcagtcctctggggcagaacagggtgagtggggctgtctccctttgattcacttagccctctttcttctttacacatttgcaaaatgtgacagtagtcatattactattcattctaataacaagtccttgctggctattaaacctctatactag

SEQ ID NO: 3962 - DNA, 570 bp, Homo sapiens
  misc_feature (1)...(570): n = a,t,c or g
gcacttttcttttgtggctttcacgttttggtaagacttggccaaatagctgctcgagataatcaatcactggtggacaagtttctgctgagtgaggtttctgctgagtggggcgactcaaggcacggtcacgtaggcagcacctgtacaccgcatcctcatacagctgcgggaccgtgcctctgactgtgtgcgtgtgtgtttatctaagtgtgagatgcatccgggcatgtcagggtgtgtacatgttgggaagactgtgtagatttcttgtgtgccgctctctgaatggaggagaggggaagcgtcttacctcgctgaatccctttccattgctggaaagaacaccctgggcaggagcggccccaagaccccgcccaggccctcggaagggagcctgaagggttaatccgtaccctgtattaaccagggtcaacccagcggctgacccgcctcttccctgctcctttgccgtttctagcacctggcttacttcctggcacacagtgagcactcaataaatgtatgctgagaatggctgcgagcggnttcaaaaaaaaaaaaaaaaaa

SEQ ID NO: 3963 - DNA, 331 bp, Homo sapiens
ggcacaagcctcttgatgcataaaaacagctgggctcccttggagacagagcgccatgggaaaccgggtctgctgcggaggaagctggagctgcccatcaactttccagaagaaaaagaaaacaggaagccaaacaagacggacactgaagccgcagccacaacagctgcagcagaatctcccaaagggccatgaaacaacaggacatacgtatgaacgggtgttacagcagcaagggtctcaagagaggagtccaggcctcatgtcggaagacagcaacttacattatgcttgacattcaagtgtgcagccgtccccatgcccgggaagt

SEQ ID NO: 3964 - DNA, 1056 bp, Homo sapiens
ggcgcagttactacccggggaagtcgggcgagcagtggtcggggacgctcagtcatgcctctgtgcagccgggcctgagatgtgagggccaggcgccgcaggagccaggcaaggggctcctctgggaagctccatctctgttctggaaagcccctcaggaagcgctcaccctgtagccggtctgtgcctgccccaggccagagcaggggacgaaggtttacctcttcccctcctggctttccagcctcaccttctccctgcatcacagagagaagcaagcagaaggcccggaggagaacaagatccagctcctcctcctcttcttccagttcttctagctcctcttcttcctcctcgtcctcctcctcttcctccagtgatggccggaagaagcgggggaagtacaaggacaagaggaggaagaagaagaagaagaggaagaagctgaagaagaagggcaaggagaaggcggaagcacagcaggtggaggctctgccgggcccctcgctggaccagtggcaccgatcagctggggaggaagaggatggcccagtcctgacggatgagcagaagtcccgaatccaggccatgaagcccatgaccaaggaggagtgggatgcccggcagagcatcatccgcaaggtggtggaccctgagacggggcgcaccaggcttattaagggagatggcgaggtcctagaggaaatcgtaaccaaagaacgacacagagagatcaacaagcaagccacccgaggggactgcctggccttccagatgcgagctgggttgcttccctgagggcccccgctggccaaggcctgtggacgacgctggcggcccagcctgggcaggtttcagggtgccagtgggaagcctgatgggtgctggtggcctttcccccgtggattggtctctggcccagcccagtctcttctcaggggcagggggtggaggttggggtcaccggcctgcttggcacccccatctgaaagagcagcacttctcagctattaaaggccccctggatagacaaaaaaaaaaaaaaaaaaaagcatt

SEQ ID NO: 3965 - DNA, 702 bp, Homo sapiens
  misc_feature (1)...(702): n = a,t,c or g
ggaggggggtcttcctatccccctccacctctccccttggtgcctaacccaggactttgtccccagagacccactgtgtgccccctggagctcctcctagagcagagtctgctgctgtctgttctgcagagggtagcctgaggcccaaggaggttgtcagggacacacagcagggggaggcagcccagatccctgctcatgcgtggtttgggcctctgctaacagctgggccacatgcgtgtatctagagcctgggtcccctctgtcctcatttccctgtgcatattcagggacatgcctcgtcagggtttggcaagaaaatggggcatttaataatctccccagtttcattccttggtccttactccatgccaggacttgtgcacatctttttggagccctgtctcacttgattgacagccnnnnnnnnnnnnnnnnnnnnnnnnnnnnnnnnnnnnnnnnnnnnnnnnnnnnnnnnnnnnnnnnnnnnnnnnnnnnnnnnnnnnnnnnnnnnnnnnnnnnnnnnnnnnnnnnnnnnnnnnnnnnnnnnnnnnnnnnnnnnnnnnnnnnnnnnnnnnnnnnnnnnnnnnnnnnnnnnnnnnnnnnnnnnnnnnnnnnnnnnnnnnnnnnnnnnnnnnnnnnnnnnnnnnnnnnnnnnnnnnnnnnnnnnnnnnnnnnnnnnnnnnnnnnngatccgtctca

SEQ ID NO: 3966 - DNA, 313 bp, Homo sapiens
gcggcacgagcctgttcattatgcaattccctaaatgtagtatatccttcatgatcttattctcttgtctgtgctgcaggctaatgtttcatatgcatgtattttatttttatttaaagttatttttacatggcagtggaatgtgccttcatctgtcaacattaaccccattgggacttgcagggcactcccttaaaagggaactgtcgcttagggggattagggcaactaaaccgggacctcttggaattacttcttcactgtgctttctgagggaaatgctgattggttactgctaaagattccacttaac

SEQ ID NO: 3967 - DNA, 371 bp, Homo sapiens
cggacggaccttaagttctgtccacctgcctcttcctccatcctcactacccaccttgtccttcgggctccttccctccctgctccgcctctcatcggccctctgtcctctccgtccggagaggggaacgtgaaggaggtgaggagggagtagtgcaggaggatttgggtctctccttctttcccttttccattctccgagggcttaaccagctggtgaaggttcttaaccagcaaaggaggaagcagccggggccggtgagggtgaggccggcagccaggcaggaaggcagcaggaggaggaggaagcggaggcggcaccttctgagaggcgcatgctcagtgagtcgtgaagatggcagggctggcgga

SEQ ID NO: 3968 - DNA, 372 bp, Homo sapiens
  misc_feature (1)...(372): n = a,t,c or g
aagctcagaggggcagtccgtgttctgagagtcacagtggcacttgtatctcaattttaaccagaggtttacctggtagcctgagccatgtccagggcaggcctacccttgggcaggacagggggctggccttgccagtgtggacatcgctgcttcccaggtggcctgggattcctgaggatacatccatgaacacactgcagattgcttcaagtgatggacccttgtacattaaaagatggcctaattagggccgggcacggttggctggggatgacaggcatgaatcactgtggttcagccaccatctgggagtttttaaaaggctcccatgttgagttccntgttgattgggccaggncaggggggacc

SEQ ID NO: 3969 - DNA, 586 bp, Homo sapiens
acaaaaaaagaaaggtaatgtcaacaaaatgatattggtagattaaatggaataatttgcttaattggacatctttatgcatatatattgtattttaaagcttagttttaaattttgaaagcttaagaaatgtgttgatggcctaattataaaactgataacctcttttgcgaactcgcatatctgtgtagtttttctagtcttttaataagtgtctgtacaaaactttctcataggagtctggaaatggagaagctatgttttagcatctggcataaattcagttgctgttctaccatttcaatctgttagcgtatttcttagctgtttgtacccattgacattttaggtaagggctaagagagagttttttccacaagattatcctttgtaacactgctctcaggcaaagaaattttgttgtcagcgttattagccattcacttattacgtacattgcttcaaatttttataaggtgaagttatttcaccatagaaacaagtgttaagatgtttcctggtcaaccgatcaaagccaacatatgtacctttagttgcctcaagtcctcgagtgtttcaagaggag

SEQ ID NO: 3970 - DNA, 533 bp, Homo sapiens
  misc_feature (1)...(533): n = a,t,c or g
gagacaaagtccatttggatggaagtgggagcagggcgagacgggccattttcactctgtggtcaaaggaaatgactggtctgactcggtctgggagcggggcacccagggtctaaggataactctggggccatgacagccatgagtctcacagaggaccccgagacttctgtgctgcgagtaaccggacttgttctgagacctttgccctagaggatggccaaggggctcctggtgacctatgccctctgggctgtggggggccctgctgggctccaccacctgtacctgggaagggacagccacgccctgctctggatgctgaccctggggggaggtgggctgggctggctctgggagttctggaagctcccaagctttgtagctcaggccaacagaacccanggacagaagcagaaccccagaagggtgacaccccctctgaatcccattcnctttgctgcccaagttgataattggcatctattttggccttgttggcactgaataacctttcttccatggtcaattct

SEQ ID NO: 3971 - DNA, 1033 bp, Homo sapiens
  misc_feature (1)...(1033): n = a,t,c or g
tctgaaataaatagataaataaacaaaataaaaacaaataagtaaatgaaattaaaacaaaacccaaaatacggtcttaaaaaaaggacatttagtaaaataatagggaaatctaaggacattaacaagtgagtcttctttattttctaccttagttgatttaatggaaatccagtgatttccatattctccccatttgcacaaaacaaaaattcatagatactttgangagttggaagggaactgagaaggcctgtatcccaagcaactatacagtacagaatcttgggaaaagcttgccttagagatgaccatttcgggttttgcttgaattggaaatcttctacctgtctcaccttttagacatccttaattgttccctaaattgttcctaaatttgcttccttgtaatgtctttctggacctgccatctcttgctacaaagaacataaaaaaccaaaaaccatttcttgatgagattctgcccttcatctcctatctctctaagtctttcatttgccacatttaccatcactttgtttaaggaggaggcactgtagtccgagtgaggagggatgaagaggtgaagagatgggtctctacttctacctcttgcattgaccatactggtgactttggggtgagccaccctttcccattagggcctctgtttctttcttgtcaggtgagggagatggacttagatgacttggatgatttttttttttttgagacgaaatctacttnnnnnnnnnnnnnnnnnnnnnnnnnnnnnnnnnnnnnnnnnnnnnnnnnnnnnnnnnnnnnnnnnnnnnnnnnnnnnnnnnnnnnnnnnnnnnnnnnnnnnnnnnnnnnnnnnnnntactgaccccagcctagatgacctttaagcttgctttcaacctgcattctggagttattagcttttcagctgaggtttttattaaatggttttatttgtcatcttctgtctgcccccttgtggacattgttttgggaagaaaataaaatatttaattgctcgaagaacaat

SEQ ID NO: 3972 - DNA, 134 bp, Homo sapiens
ttactttcattactgcctcagccacttgtggaagcatttttccggtgttgtggtattgttacattttatggacaatgtttttgtgacgatggacaaacctgagccccaacacttgaaaacaaaattatgttttc

SEQ ID NO: 3973 - DNA, 1419 bp, Homo sapiens
ttaacatcctctttaaaatatttatatggatcaactttattgaaagtgaataaacagagataatgtggcaaaaagaaattttcccaatattaaacccttgatgatacttttaaattcactataaggaaaagaatccaccagtagtaggtagctacttatttttgctgagtgtcctctgcttttctgcatgctccacaatcttttcttccacataaagccccttccgctttcgtactgcgttcatgtacttccgggcttggttctcagagtcagccttctccccaaagtgcaagtattcctcctcagtagttggcacccagaaggggtcactgggaatgatctcccaatggctgaatactagttgtgggctggccaggccacttgtcctcttcctgatttcatcagcaaaaccaaagctttcagcaacaggcagcacagccttgatgatgaacatgtctgtcccttctttcatttcttcttgaagtacccgaccttctctctttgacaagacagcatagactcgaccgagaacatcaccagtggccatgatgtcacatgtgtacatagctgccatcaggcgctgaggtttcacttgcagtgcatagcgacatgcttctttcatggtggcaattagctgtcctgagaaaggtccatagcaatcagtgagtggagattctcctttctgtgatgtcctcttctcaaaggcctcagagcagccatcttgtagctcttggttttcatttccaccagaacaggtttcattttcctcctgtccctcttttgccagatcacttgctccttgttcctcaaatttacttaggtcccatttttccagaacaaaacagacacccatgagaggctcctcacacatggggccagagagggttgctagttggaagccactcacaatgctattgcccaaatctcggtatctactggcttcttttgaagctttgtcagctggacctgtccatactgagttctgaaaatcttcacttttattgactagtatgttgggcccacattttcttgggccaaatgaccagatttggtcaacaatgttcctccatcttctccctgttaggtgttgctccagttttcctttgaattcccaaattttctcttgggtcttctgatgaatcatgtgagtattttcgccctcattcaaagaggatgtcaactgctccatagaacgaatcaaatcactattttcttccagaatctgggtgacttcttctggaaggggcatggctcgaacactgagcgtggcaagtttattgggagttgttatggtgattagcccgtcagagtcaacttggattccttcagggattttgctttgatcttctttcatttggtgtatgactgcaactttttgctgtttgcctatttcttcattgaccatgtcaacttttgggg

SEQ ID NO: 3974 - DNA, 1466 bp, Homo sapiens
  misc_feature (1)...(1466): n = a,t,c or g
gcataccgggccagcatgggggcttcgtggtgactgtcaagcaagagcgcggcaagggtccacgcgcggcgcgagaaggggtcccacgaggaggagccggtgaagaaacgcggctggcccaagggaaggaagcggaagaagattctgccgaatgggcccaaggcaccggtcacggactacgtgcgcttcctgaacgagcggcgcagcagactccgcacgcgccacccggatctgccctttcccgagatcaccaagatgctgggcgccgagtggagcaagctgcagccaacggaaaagcagcggtacctggatgaggccgagagagagaagcagcagtacatgaaggagctgcgggcgtaccagcagtctgaagcctataagatgttgcacggagaagatccaggagaagaagatcaagaaagaagactcgagctctgggctcatgaacactctcctgaatggacacaagggtggggactgcgatggcttctccaccttcgatgttcccatcttcactgaagagttcttggaccaaaacaaagcgcgtgaggcggacttgcggcgcttgcggaagatgaatgtggccttcgaggagcagaacgcggtactgcagaggcacacgcagagcatgagcagcgccgcgaggtcctgngagcaggagctggcgctggaggagcggaggacgctggcgctgcagcagcacttccaggccgtgcgccaggcgctcaccgccagcttcgcctcactgccggtgccgggcacgggcgaaacgcccacgctgggcactctggacttctacatggcccggcttcacggagccatcgagcgcgaccccgcccagcacgagaagctcatcgtccgcatcaaggaaatccttggcccaggtcgccagcgagcacctgtgaggagtgggcgggcccacgatgcagaggagaagctgtgggcgcggccctgccacaccccaccccgtggacgagaggctgggggtccaccctttggggcctggtcccatcctgcaccttgggggctccagcccccctaaaattaaatttctgcagcatccctttagctttcaatctccccagccccctgaacccggaaaaagcactcgctgcgcgatacacccagaagaacctcacagccgagggtgcccctcctcggaggacagccacgcgctacactggctctccgggccacccccaggacacagggcagacgaaacccacccccagcacacggcaggaccccccaaattactcactacggggggctgtgccataggccacacaggaagctgccttgtggggacttacctggggtgtcccccgcatgcctgtaccccagatgggtgggggccggctttgcccatcctgctctcctccagccgagggaccctggtgggggtggctccttctcactgctggatccggactttttaaataaaaacaagtaaaatttgtgtttta

SEQ ID NO: 3975 - DNA, 755 bp, Homo sapiens
gcgcgcgtgctgcaacccgcgcccgcttcggagagagaaatgctggggtgcagcttcaagcttaggaccacccaccatgcctatccaggtgctgaagggcctgaccatcactcattaagaacagaggaggctgcctgttactcctggtgttggtgagaaggcagatgtagacagcatccctccagacactctgctgtttcctgcctaggcgtggctgcagccatggctaggaaagcgctgccacccacccacctgggccagagctggttctgctcctgctgcagggacactgagctggctatctcggcgcttcgggcaagaactgcaacaggctctcctgggtcctgcaggtgtacagccgggcccctgccttgtgcctcagctctcgagagctgctgctgccgggtgacctgatccaacctgataaggtgccatcttcagctaccacttgcaaggccctgaggcgaacagcagcacggcacttgcccacccggctgctgatggcctggtgccagctgggagtcctcccggcacttcgaggccactgagccacccttccagccccagcccaccatggacaggggtatccagcttcctcctcaacctcgtcctctgcccctgagccagtgacgccaaggacatgcctgttacccaggtcctgtaccagcactagctgttcaagggcatgacagtgctggaggccgtcttggagatccaggccatcactggcagcaggctgttctccatggtgccag

SEQ ID NO: 3976 - DNA, 669 bp, Homo sapiens
gcatctttattaaatactaatattcccattggaaataagaaagaggaagaagagcttagaagaacagctccatcaccttggtcacctgcagctagtcctcaaagcagtgataatagcgatacacatcaaagtggaggtagtgacattgaaatggatgagcaacttattaatagaaccaaacatgtgcaacaacgactttcagacacagaggaatccatgcagggaagttctgacgaaactgccaacagtggtgaagatggaagcagtggtcctggtagcagtagtgggcatagtgatggatctagcaatgaggttaattctagccacgcaagcccagtcagctgggagccctggcagttgaggtacagtcagaagacattgcagatattgaagcccctccaagaggaaggatgacgacgatgatctgggtcataatcctcccaaaagcagttgtggtacagatcttcggaatagaaagttagagagtcaagcaggcatttgcctgggggactcccaaggcacgtcagaaagaaatgggacaagcagcggaacaggaaaggacctggtttttaacactgaatcattgccatcagtagataatcgaatgcgaatgctggatgcttgttcacactctgaagacccagaacatgatatttcaggggctctctc

SEQ ID NO: 3977 - DNA, 153 bp, Homo sapiens
gtcattttgcatcttgattgctttttagggcctggggccaatgtcaacaactcttaggtagcaaaagaagaattagaacatgggcatcttttttatacctctttcagataaaagctatgatgttcacctgtaaaatatatggtttctctcttt

SEQ ID NO: 3978 - DNA, 336 bp, Homo sapiens
  misc_feature (1)...(336): n = a,t,c or g
gctctttctactcggagctgatgaaaggactgggtgcaggggggcgcctctgggagctcctggagagagagcccaagctgccttttaacgagggggtcatcttaaatgagaaaagcttccagggtgctttggagtttaagaacgtgcattttgcctatccagctcgcccagaggtgcccatatttcaggatttcagcctttccattccgtcaggatcctgtcacggcactggttggcccaagtggttctggcaaatcaacagtgctttcactcctgctgtgnttgtacgncccctgcttcttggaactattagtnttgatggccatgacaatccgt

SEQ ID NO: 3979 - DNA, 529 bp, Homo sapiens
ggagtgttctacgtgtcctctctggagggaggctgagctggagatgggagggagtctttgctgccagcgccctgcagggtaatccaaccatccttggtgacatcatgttttctgagtggatgtttgcttcagaagctgcaaaataatctcaactttcagccccaacttctccccaggagggcagcatcctgtgaatttggccaaaacggaactcacaccacagctcattaagggagcaatcagcgagggtaccaaaatgctgcctccctcacactttccaccctgcatcccccatcaaaactctcatagcctgtgtctctctgggtgccagagggagagaaaatgcatgttccaatggggtattgaggaagggagaggagaaagaggggcaggtcgaaggagcctggtagagaaagggggtgacccacctggctccctccagggctggggtctcttgtgacaggcactgggctagtggaaagcagcttcgggaccttggcagacccaagttgggccaactggagagaga

SEQ ID NO: 3980 - DNA, 424 bp, Homo sapiens
caagcactggcctccagataaacagtattaaaacaattacaactcatccagctcacagatgctgattcactgaacccctgttccaccgaccagaaacagctttgattggacaagaggctgaattcagtaactttctcctgatgagaagaccaccagccatggactggttcttgctggtttacagagactgcacacctgtgtaccttcatgtcctgaaaagatcttttgacataggggctaggtataatacatttcatctattcatttcaaaatgaacatcggtcataagttacatgtatgtttatctaacatgcctgtgtcaggaccactttcttgaatactcagctcctcctgtaacttgttgaacatgtatgtttagccaaccttttcagcataaaactcctaccccaacccctcctccttc

SEQ ID NO: 3981 - DNA, 1230 bp, Homo sapiens
  misc_feature (1)...(1230): n = a,t,c or g
tgacgtgttacctgctatttttattccccatttgccatcttctgattgggggttgatgttttacagatttttttttcaaaggctttatttcagtttctgaggttaggatgcccctgtgcccctcgctccacacctgggcaggtctaaacttccttccaggatggcctccacacacagcctcccacctggggtcacctggcttcctgggggacccgcaatgatggggcagggagcagcagtccgggtgcggggatcgggggacctcggcgggggcatccacaggggctgcaagacctctggtcagcatggcgtgggtggggagagcgtttctccctgggggtcctgagccagtgactcctgttagggacctttgtcccacctccgcctggtggnaccggcagggaccttggttctagccagtcctggnagcctccattcccccacctgcccctccccgctctgtggtgtggctgcccaggagagaaggggcccagggaagggaggtctccggcaggggtggggagtgacaggccagggcagcagggctgagccggagctgctcacagctgccaggcactggtcatcatggccacgaactcctcatccgtgttcatggaggcactcacgccgctgtagtagtcctggaattccgccagcgtgacntgcccgtccttctcagaggagtcgaagttgtccaggaagcggcgcagcacctcgtcctcggtcaatccccactgcgcaccttggggtgggcacggccactgtacaccccgcggaggtcgtccaccgtcacgacgccgtccccactgcggtccagcttggcaaatgcagctgcgatgacagcctcccgggcctgggacatggggggccgcagcgcccgaaggaactcctccagatccagcgtcccgctgccattgcggtcccacttcctgcacacaccctctgcctccgccctggtccagcaccagcccgagtttggccagaccctgccggaactcatcagcgtccagggatctgctcccgtcccggtctagttggcggaaaaacctggccaggccctggatgcccgaggccccgcgggacaggcactgtgcccggagtttctccatggtggcatccacggcgtccatgcttggtctgggctctgggcagctggaagggagagaggtcaaggtggggactcccgcaagcccaccctggccgactgccccttgttcagatgctcacctg

SEQ ID NO: 3982 - DNA, 454 bp, Homo sapiens
ttgctgggtgcccactgccccgtagatggattatactgcattgaatttaccgtaggtcccaccccttcatactcacttagaaaaggcccgcatcactcatcctttgcatgactgcccagagtgtgaacttgctatctctgtattgaagttgtgtttcatctccaggaagtgttggctgcagcaaagattggatgtgacaccagaaaaaaagagtcattggcaggatcctttaaggattctgctacatcactgcagaagtgttctgtctcccagcacagaaagtctgccttagcacatactgttctgagcagttacagtttttaaaaaaacttcccctcccttatcttaggaaacagctagcccatttctcctcttaattaacccctaatcatgactcagttactcagttacgctcccagcccgattcttgtggaagccctgcaaagcaagccag

SEQ ID NO: 3983 - DNA, 446 bp, Homo sapiens
  misc_feature (1)...(446): n = a,t,c or g
ggagagagctagcacatgagcttcaatacctgcagggcctggaactcctgattctccttttcttccttgctgtccttgaagtcctgtgtcccctttgcttcctttcaggcctgtggctcctggactcccggggctccctggaagtcctgctcgcccaggggagccagcactgccaggctcacccttggcacctgggtgtcccactgcaccaggagggcccggaacaccctgcagtccaggttgtccttgatctcctttagctccagggaaaaccagccaaacctggtgggcctgggcttcccgaagtcacctttactcccctgggctccaggaggccccatgacccctgcatctcctttcatgcccctgtcccctttgcttcctgggagaaccaagtctcctttctctcccttaattccagtttcccttttggggcaatganaccc

SEQ ID NO: 3984 - DNA, 448 bp, Homo sapiens
  misc_feature (1)...(448): n = a,t,c or g
tcaggcgccaggtccagttctgtgttcatggaacacgagctggtgctggacggggctgtggtgagtgccagcttcgatgacagcgtggacatgggcgtcgtgggcaccacggcgggcacgctgtggtttgtcagctgggccgagggcaccagcacacgtctcatcagtggccacaggagcaaggtgagggacttccagcctgggcagaggcggggcatccgaacctggtgccctccctgcctgccggctccatctccaccancccagatgattccaantcctgccgtcactggctcgcancggccgccttggggttcccatcggggaagtcttgggtgtgcacgtcccctcaaanccgtcccggttgtgtctgcacaagcgagccgcctggcaggccttgcaggtcttctcaaactgtcctttccctgctattgctttgcgttttttt

SEQ ID NO: 3985 - DNA, 2060 bp, Homo sapiens
ctcccagcccgtctccccgctccagtttagaacctaattcccaattcccggaccgggcccagccctgggctcttactgtccgcttttgctgggacctgttccacaaatgggcgtcttctgccttgggccgtgggggttgggccggaagctgcggacgcctgggaaggggccgctgcagctcttgagccgcctctgcggggaccacttgcaggccatcccagccaagaaggccccggctgggcaggaggagcctgggacgccgccctcctcgccgctgagtgccgagcagttggaccggatccagaggaacaaggccgcggccctgctcagactcgcggcccgcaacgtgcccgtgggctttggagagagctggaagaagcacctcagcggggagttcgggaaaccgtattttatcaagctaatgggatttgttgcagaagaaagaaagcattacactgtttatccacccccacaccaagtcttcacctggacccagatgtgtgacataaaagatgtgaaggttgtcatcctgggacaggatccatatcatggacctaatcaagctcacgggctctgctttagtgttcaaaggcctgttccgcctccgcccagtttggagaacatttataaagagttgtctacagacatagaggattttgttcatcctggccatggagatttatctgggtgggccaagcaaggtgttctccttctcaacgctgtcctcacggttcgtgcccatcaagccaactctcataaggagcgaggctgggagcagttcactgatgcagttgtgtcctggctaaatcagaactcgaatggccttgttttcttgctctggggctcttatgctcagaagaagggcagtgccattgataggaagcggcaccatgtactacagacggctcatccctcccctttgtcagtgtatagagggttctttggatgtagacacttttcaaagaccaatgagctgctgcagaagtctggcaagaagcccattgactggaaggagctgtgatcatcagctgaggggtggcctttgagaagctgctgttaacgtatttgccagttacgaagttccactgaaaattttcctattaattcttaagtactctgcataagggggaaaagcttccagaaagcagccatgaaccaggctgtccaggaatggcagctgtatccaaccacaaacaacaaaggctaccctttgaccaaatgtctttctctgcaacatggcttcggcctaaaatatgcagaagacagatgaggtcaaatactcagttggctctctttatctcccttgcctttatggtgaaacaggggagatgtgcacctttcagggcacagccctagtttggcgcctgctgctccttggttttgcctggttagactttcagtgacagatgttggggtgtttttgcttagaaagggtccccttgtctcagccttgcaggggcagggcatgccagtctctgccagttccactgcccccttgatctttgaaggagtcctcaggcccctcgcagcataaggatgttttgcaactttccagaatctggcccagaaattagggctcaatttcctgattgtagtagaggttaagattgctgtgagctttatcagataagagaccgagagaagtaagctgggtcttgttattccttgggtgttggtggaataagcagtggaatttgaacaaggaagaggagaaaagggaattttgtctttatggggtggggtgattttctcctagggttatgtccagttggggtttttaaggcagcacagactgccaagtactgttttttttaaccgactgaaatcactttgggatattttttcctgcaacactggaaagttttagttttttaagaagtactcatgcagatatatatatatatatttttcccagtcctttttttaagagacggtctttattgggtctgcacctccatccttgatcttgttagcaatgctgtttttgctgttagtcgggttagagttggctctacgcgaggtttgttaataaaagtttgttaaaagttaaaaaaaaaaaa

SEQ ID NO: 3986 - DNA, 516 bp, Homo sapiens
  misc_feature (1)...(516): n = a,t,c or g
ataaggaatacctgaggctggctaacttactaagaaaagatgtttatttggctcatggttctgcagcctgtacaattatggtccagcatctgtctctggtgagcgcttcaagctgcctccaatcatggctgaaaacaaaggggagccagtgtatgcagatcacataaggagaggggagccaagagaggaaaggaggtaccaggctcttttcaacaacccattctagtgggaactaagagttagaactcactcacccccacaagaatggcaccatgctgtcctccatgagggatctaccccacaacaaaaannnnnnnnnnnnnnnnnnnnnnnnnnnnnnnnnatcaaatgtcaacatgagacttggcggggccccccaaaccatatccaaaccattgcacacccttggcccagcaactctatatctaagcatctaccctgaagatacaaattcacaatacgaaataacaggtggacaaggttattttatccaccgaggccctagttgtaaaaaaa

SEQ ID NO: 3987 - DNA, 325 bp, Homo sapiens
  misc_feature (1)...(325): n = a,t,c or g
gatagtcatggaaatgtaaataatgggtcaggaatgggaaaaaaggacagttggaataatagaagaaataaagctaaagtcgaattatgaaattttaccattataagttgcagaatattaaaatatcgaaggcaagaaataataaaataaataatacatggacattttctcagaataaaagataattattctccccccccaatccctacatatatattttttttttctttgaaacaggtttttactctgttgccccggttggagtgtagtaagattatagctgtctcatctcaaactgctggggtcaaatgatcttcctgncttt

SEQ ID NO: 3988 - DNA, 341 bp, Homo sapiens
gctcgacgttgggaaacagaatgggccagggaggttgagtgactgaagaccaagggttggtgcagcctcctcgccgcgctgcggggtctgggccgcacaggcttctgcccttctcggtgtccaggctccttgggtgatgctggagttgtcatggccgcagttcagtgtgagattttttaccaggtattgcgcttaagggacatgattttccattttcttcgcccggacaacttgaatgaaatgggcactgttgattccacttctgtcgaggagcttcggggctcagagaggtgatgacgtgcccaaggtgacgcaactcgtgaacagccgtgcctgccttg

SEQ ID NO: 3989 - DNA, 1173 bp, Homo sapiens
  misc_feature (1)...(1173): n = a,t,c or g
attcggcacagagcaggtgaggctcactcccatccataattcagcacatttggtctctgaggcaaaataagtccaccattatggttaagactatttattggatacaaatgctattacagtcacaaacaattgtgttcctggctgcggggaagcgggtggcatgtgggttttggggtttttgatcagtaggcgctcccaagtccacaaagaccagtccagcggcgtggcctctgactcatctccagtngtttgtcacctctggccctgttcctgtcattccctatttgtgtgctatctctaagcctgaccgtggttttcctcctgtcaaaagtacaccactacaggaaagcaggaaggtttgggcctgcaatgtatgcatattggggtttctcttagtggtctcagactacgtttgtggtgactgggtcctgcttcagccctggttgaatatgcccagcctgtggcatgctggtggtcatcctggcagctggtgggtggcctggtatgctgcccactcagcttgagactcaccctcatgcattcagccagtaggtctggccaagcctgaactgaaggaccatggtcctatcccagcttcatcagagcaatccattgtgacctgagaatccatttaacctctcggtctagaacctccttctggaaagtgaggtattaatacttgactcatgttatcgccaccccacattctaagtcatggttgagtagtaatttggacagtaccttgtaaattgtgtgagattaccttaatataaggtataaccttaaaatattcatgaatcccccaggaggttaaaggttataacttttaggtatggtatcgtaatgtactgtcccccagcaaacatttaaaaagccaattttaaaaaatgtatttctgactaagttacattaaggtctctgcctctgtatcttatgtttcttccaggtgcaccctgaagaccacaaattaaataaatatcatgactggctttgggaaaatcatgaaaaattaagtctatcttaaactctgcagctttcaagctcatctgttatgcatagctttgcacttcaaaaaagcttaattaagtacaaccaaccacctttccagccatagagattttaattagcccaactagaagcctagtgtgtgtgctttcttaatgtgtgtgccaa

SEQ ID NO: 3990 - DNA, 614 bp, Homo sapiens
  misc_feature (1)...(614): n = a,t,c or g
tttggattgttgtcaaataataatttattttaaaaaaatctcaaaacatgttcaaacacattcagtagcaaagatccaccattggcacacacattaagaaagcacacacactaggcttctagttgggctaattaaaatctctatggctggaaaggtggttggttgtacttaattaagcttttttgaagtgcaaagctatgcataacagatgagcttgaaagctgcagagtttaagatagacttaatttttcatgattttcccaaagccagtcatgatatttatttaatttgtggtcttcagggtgcacctgcttccactcattgacacaaaaaattcggtaagagtcgttgccatatttaccaatcccatgaagctcaattggatacttccactgctttgtcaggtattcatctgagaacttgacaatggtttttgcccgaagatcgtagagaccaagaggtttaagaagttctgacacatctctccagtctgcggttctgctacctcgctgangatactctcngaacntccaagcccggtatgcatttgccgnggccgttggaattgngcgtggagctcctggtccgaaanggttctgacggttnaagggccg

SEQ ID NO: 3991 - DNA, 1530 bp, Homo sapiens
  misc_feature (1)...(1530): n = a,t,c or g
ggcacgagcaaatntggtgagacttctcttaagccagaagattttgattttactgtactttctaaaaggggtatcaagtcaagatataaagactgcagcatggcagccctgacatcccatctacaaaaccaaagtaacaattcaaactggaacctcaggacccgaagcaagtgcaaaaaggatgtgtttatgccgccaagtagtagttcagagttgcaggagagcagaggactctctaactttacttccactcatttgcttttgaaagaagatgagggtgttgatgatgttaacttcagaaaggttagaaagcccaaaggaaaggtgactattttgaaaggaatcccaattaagaaaactaaaaaaggatgtaggaagagctgttcaggttttgttcaaagtgatagcaaaagagaatctgtgtgtaataaagcagatgctgaaagtgaacctgttgcacaaaaaagtcagcttgatagaactgtctgcatttctgatgctggagcatgtggtgagaccctcagtgtgaccagtgaagaaaacagccttgtaaaaaaaaaagaaagatcattgagttcaggatcaaatttttgttctgaacaaaaaacttctggcatcataaacaaattttgttcagccaaagactcagaacacaacgagaagtatgaggatacctttttagaatctgaagaaatcggaacaaaagtagaagttgtggaaaggaaagaacatttgcatactgacattttaaaacgtggctctgaaatggacaacaactgctcaccaaccaggaaagacttcactggtgagaaaatatttcaagaagataccatcccacgaacacagatagaaagaaggaaaacaagcctgtatttttccagcaaatataacaaagaagctcttagccccccacgacgtaaagcctttaagaaatggacacctcctcggtcaccttttaatctcgttcaagaaacactttttcatgatccatggaagcttctcatcgctactatatttctcaatcggacctcaggcaaaatggcaatacctgtgctttggaagtttctggagaagtatccttcagctgaggtagcaagaaccgcagactggagagatgtgtcagaacttcttaaacctcttggtctctacgatcttcgggcaaaaaccattgtcaagttctcagatgaatacctgacaaagcagtggaagtatccaattgagcttcatgggattggtgcaccctgaagaccacaaattaaataaatatcatgactggctttgggaaaatcatgaaaaattaagtctatcttaaactctgcagctttcaagctcatctgttatgcatagctttgcacttcaaaaaagcttaattaagtacaaccaaccacctttccagccatagagattttaattagcccaactagaagcctagtgtgtgtgctttcttaatgtgtgtgccaatggtggatctttgctactgaatgtgtttgaacatgttttgagatttttttaaaataaattattatttga

SEQ ID NO: 3992 - DNA, 333 bp, Homo sapiens
  misc_feature (1)...(333): n = a,t,c or g
aagacctgggcccctgctcagtgcctttgctctagaatgggtccagcttggctttggctactgggaacagggatcctggcctctgtccactgtcagccccttcttgcccatggagataaaagtntgcaggggcctcaaccccccaggcatcagctctcagagccagcccccgcctaccacagaatcacacccaccattaccaattttgctttgcgtttgtataaagagctggcagcagacgcccccggaaacatcttcttctcgccagtgagcatctccaccaccctggccctgctctctcttgggggcccaagctaacaactcagctctgat

SEQ ID NO: 3993 - DNA, 999 bp, Homo sapiens
ttttttttttttattttctacaagtcttgtttattgaaaggatctgaaaagcgtaataaggctttcaatgacatttaatacattttcaagaaattaatatgaaacattaaaatttacttcaaaaatccaaagttttctagatcattcccatctcacgctgctttagaggtcagttcacaccttctgtgttcagatgagcggctggaattctgaacactgccgtcttccagccctaacgctgggcgctggtccctctctcctaaggcccacggctgggcttcccctgtgcccagggtcatggcggacttcaagccaggccggctgcccagaatcacactcagggtttttggacgctcaagtccacagatgctgaggtgcccagacgagggtgagcagggagacacatgcctcggagaacgtgcccaggctgggccaggcggctgcgggaaagctcctcacgggcagaggagaacgtcttgtgccttccttatcgatctccagcagatgagggcaacttcgtgtgcaaaactcagagagcagttactcaaaaaaaagacacccgggcagcagtaaccaggacaccagggtccgacccacggacctccacacacctgtgcccgtggaagacgcgggcgccggggtaggcagcatcccacgtgctcccacagctgctggtgctgggcaggctggagactcacgggagaggcaggaggagaatcagcgtgttgagtccctcgctgtgttagtgtgaaaaattctcattacagttgcaaataaaagggatcacgatcactagccccggaaaccctcatctcccggaccatcaggatcgcactgaacagaatggtcccctaatggtccctgaggacagcgtcttgcagaacataaatgtaaacattgaatggcagacaactcccttccccttgaaatcttcacaaaagtgtgtacgagaaagtatgtacatcagcacttcagaaagtttaaaagagtctctaaaaa

SEQ ID NO: 3994 - DNA, 218 bp, Homo sapiens
  misc_feature (1)...(218): n = a,t,c or g
ctgaatgtaactgatttgatttattcctttcacttaaactgtgtaatgcctcagtttcatgtgtctacagaggacgctcacccttggaaccacctggaaagtgtaacagcagggcattgaggttctggccaaggagccatcagcaatcccattaccaatgcttaaagtgagtctcacaaagggaatttgggccccagnncaaacacaaaagctctttt

SEQ ID NO: 3995 - DNA, 342 bp, Homo sapiens
aggaactggtagctaaataagaagaggaagagaggcctgagctagcattagcatgctcggcctccttgccatgtgatgccctgtgctacctcaggactgcagagagtttctaccatcaagaaggccctcaccagatgcagccccttgagctcggcctctgtaactgtaaaaagtaaatttattttctttataaatgacccagtttcaggtattctgttataagcaacagaaaataggctaagacaggtgccatgagtgagagtgaacctccagagtttatgatcatttgatacctaggagctgtgttggacttgacatagccaaaccttgatcagactgttg

SEQ ID NO: 3996 - DNA, 1144 bp, Homo sapiens
  misc_feature (1)...(1144): n = a,t,c or g
tttttttttttcaattaaataattttattggggggaaaaaaaccactttgagcaccaaagcaagaaaagtgtattattcaatcagtttcccagatcacatgccaagaacacaatgctcactgtggtgcctggcagacggtccacaaccagcgggtgcgttcagcttgaatggaccggggtcccacagtgtttgtgccnacaagtcaatgggccttgctcacgatcgcgtctggagctggtcctggggggaatattttcccagaaactttgttaaccttctcctgcactgttccagtgccataacttttattttaaaggttaataaaatttcgacagctacaaaaactaggatcttacaggatccactcacaactttatcccaaaccctctgtaaactggattcaggcaaacatcccgcaaagcacctcttgaaccagagatcataaggaagtttgggcgccgcggaacacatcctcagatgagtcagcagtctgccatcttccagattcaagtattgttcaaacgcttttggcaactggggcaaggaatcccggtacttggtatttaattggttcacaaagcgtcgggtgatccagtaacagtcgacactatcttccaccatttcctccatggctttagctatggcaagaaacacttcatcatctggctccagtggaaaagagggacttcgaggtaacttcccagactccagctgatacatgcggagatagacttcagcctgaggtgtggcatcactaacaaagcgaacgactttcagggcatgaaggacatccaagtactgctccttacgatacatcatcaccttggcatgggactcgtggtgtggaggcaagattcctagaagcaccttccataccaatgcacggtacatggacgggagagggaacctctgactaaaagtacaaagtttctcagtatccagacggtcatcttttaggagaatttctaatgatttcttttcttcaactccacgaaaccccactttctcataatatactgaacgaaagtttctctgagagtcctcagtcatatttcattctctagtagtgcaaacacacccgggttgagactaagtggtgggagaagcagaggaagccgtgccctgtgcgctgaccgaccgccg

SEQ ID NO: 3997 - DNA, 229 bp, Homo sapiens
ttttttctaaaaaagaaagagtgaatggataaaatggagttttctaattcaggtgtttacttttgagagatagaaattaaatccgtagttcttgcaactttttttttttaaacccaaatcctttctacaattagtaattaaagtgaaatgaggaaaaggaaagagtagctttggaatctcactcagttgcttaatgctaaaataatctatttaaatttttttttctatg

SEQ ID NO: 3998 - DNA, 1009 bp, Homo sapiens
tttttttacactttgaggtgtaactttattgtacagaacattttataaaatacatttttgtgatcatttacacatatacaaagacttaaatggttttagcaaataataatttttctaaaacacaatcacagtttacataattctgaggtaaaggtcttgaatctatcctagatgaaaagtcctagcccatgagggtctctaacagggggatgtgtccactgaaccttgagttctggcacccagacggattgatgagagggcaggctacacctgccttcatttcagagatgattcaaaatttcagaacttaatgctcctggttcagttctactaagttaatgcttcttttttttcccaacatgtaactctctcagtcttgtcagaacacaacttctgctatggaggaaatatttccatcaggaaagggccaagttagtgtcttaacttgactgccttgaatggggactctggaccccaggaagaatgtatttaggctcctcacaaaaaagagtgatggctgggcaaaacaaatgtactgcaagacccatcttccctccagttaatacactcccaggatgggctgcagagggggagactctgagagaagctggaggcccacaaaagtccactgaccctctttctgtcccagaaatgaataaaggacccagttgtgctttccttccaaaatcctcaacaaagttgtttgtgctccaagaaaatgtgggaataaaaaaatcatgtcccaggtcatctttgtgtgtgtgcgggggaggtggatgggaggaaaaggcatgtattaatagatactgctgctataaaatgacgataaattatagcccttgatctgtttctgtaaactatgccagcttcttcaggttattggcaactacccctaatatacctagcccagatcctttcataaagtcaagtgctatatttccaaaataatcctatgaaatcatgaaggttgtgaaggtttaatatgaagacaccctctcttttgtgtgct

SEQ ID NO: 3999 - DNA, 190 bp, Homo sapiens
ggaattgaagtgtatttataataagctagcagttttgatttttatgtattttttagttgtgctgtaatgggccatcaaaaaatgacaatttggtaatttttaggatttcctactggccttatgtggcaggtactagatatcattatatgtatttcatctttctgaccaaaagaggcttttttagaggaag

SEQ ID NO: 4000 - DNA, 528 bp, Homo sapiens
gcacgaggaaacattgtctggcttgcactgtaaaactagttagctgaagacgacttctcaggtttcttcaggatgcctgcagcacttgtggagaatagccaggttatctgtgaagtgtgggccagtaatctagaagaagagatgaggaagatccgagaaatcgtgctcagttacagttatattgccatggacacagaatttccaggtgttgtggtgcgaccaattggtgaatttcgtagttccatagattaccaatatcagcttctgcggtgcaatgttgaccttttaaaaattatccagctgggccttacattcacaaatgagaagggagagtatccttctggaatcaatacttggcagttcaattgtaaattgtaccttacagtggacatgtactcccaggattccatagatctccttgctaactcaggactacagtttcagaagcatgaagaggaagggattgacacactgcactttgcagagctgcttatgacatcaggagtggttctctgtgacaatgtcaaa

SEQ ID NO: 4001 - DNA, 733 bp, Homo sapiens
  misc_feature (1)...(733): n = a,t,c or g
gaccctcatgcaactgcctgaactttacagaagtggtcagaaatcagaggcatacttaccccataccttctggatcaccttattggatgctttttatcaaagcctggtctgcttctttgtgccttattttacctaccagggctcagatactgacatctttgcatttggaaaccccctgaacacagccgctctgttcatcgttctcctccatctggtcattgaaagcaagagtttgacttggattcacttgctggtcatcattggtagcatcttgtcttattttttatttgccatagtttttggagccatgtgtgtaacttgcaacccacatccaacccttactggattatgcaggagcacatgctggatccagtattctacttagtttgtatcctcacgacgtccattgctcttctgcccaggtttgtatacagagttcttcagggatccctgtttccatctccaattctgagagctaagcactttgacagacttaactccagaggagaggactaaagctctcaaggaagtgggagagggggctgggaaagatggaatcaagtggacatcaaagtatggttaaccattcaggtgggcaagttcagggaggaggaccctggctgggcctttttgttgtattttgcattgaagtcaggcagttccntgtttttgaggcagggaattttcctgtgtggaantgtttagtcaggtatttgnaattaggcnttaggtg

SEQ ID NO: 4002 - DNA, 265 bp, Homo sapiens
gttgtattagatggaggatgtgacatttcagataaaaagcttacaactttaaaggatagagctagagagaagatccagatggcccattccctttctgttggtgggagtgggtacgtatgtcccttactcatccgggaagtattcatacaggttttgatcaagctgcgggtgtgttttgtccagtgcttttcagaagcagatcgggacattatgacacttgctaaccattggaattgccctgtgttatcatcagatagtgactttt

SEQ ID NO: 4003 - DNA, 579 bp, Homo sapiens
acagatgaatcgaaagatagctccggccctgccaactcaactgcagacctgctgaaacaaggggcagcctgcaatgtgctcttcatcaactctgtggacatggagtcactcactgggccacaggccatctctaaagccacatctgagacgttggctgcagaccccacgccagctgccaccatcgttcacttcaaagtctctgcccagggaatcactctgactgacaaccagagaaagctctttttcagacgccactaccctctcaacactgtcaccttctgtgacctggatccacaggaaagaaagtggatgaaaacagagggtggtgcccctgctaagctcttcggcttcgtggcccggaagcagggcagcaccacggacaacgcctgccacctctttgctgagcttgaccccaaccagccggcctctgcatcgtcaacttcgtctccaaggtcatgctgaatgccggccaaaagagatgaaccctgccccttgcccagggccagtgcatggggaagggcttgtggggaaggggaccatgaatcctgacaatcttgaaccagaagaggacttttgggt

SEQ ID NO: 4004 - DNA, 245 bp, Homo sapiens
aagcagaaacacgacgggcgggtgaagatcggccactacattctgggtgacacgctgggggtcggcaccttcggcaaagtgaaggttggcaaacatgaattgactgggcataaagtagctgtgaagatactcaatcgacagaagattcggagccttgatgtggtaggaaaaatccgcagagaaattcagaacctcaagcttttcaggcatcctcatataattaaactgtaagctctgtttatatt

SEQ ID NO: 4005 - DNA, 370 bp, Homo sapiens
  misc_feature (1)...(370): n = a,t,c or g
agccaaaaggcccaagatcaaggtgcgggtggggttggtttcttctgagggtcataagggagggatctgtctcaagcctctctccctggtttatagacggccatcttctccccatgtctttacatggtcttcatttctgtgtgtgtctatgtcctaatctcttctttttttgttgttgagatgggagtcttgctctgtcacnnnnnnnnnnnnnnnnnnnnnnnnnnnnnnnnnnnnnnnnnnnnnnngaatgtaggtatggtgaagcccaacaggtcaggaatgaccatcactaaaaagatagtttattactcacagttcctgagaagagggggcactctatgccacaagggaccactntnggaagcat

SEQ ID NO: 4006 - DNA, 488 bp, Homo sapiens
  misc_feature (1)...(488): n = a,t,c or g
gtattatagtgcttaataaatggctaatttagaaagacttgagattgaggactggccaacagggtcaaaatgcaaggcctgccgatcgtccaggatgtaccaggtgtctaccttcaaggatcatttggaggaaggaggtcatgatgaaagatgaagtgagtgacctccaagttggatgacctccatcaaacaagatgggcaaattcccaaatgctactggtcacaggtgcctgaggagaacaatctgctttcaaagtacaattaaataggaaaatgctcagtgatctcaaggggtagacccaacccggtgccccatctgctcaagtttaaggcagagcaattaagacaagtgctggggaaaatgtttatctctaagtttaacagaaggttcctttttggaaatcccttttgcccgaactcaaaaggggggcgttctccagacacagatgatcttcaacaaaccttttgttttaaggtttggnatcccg

SEQ ID NO: 4007 - DNA, 456 bp, Homo sapiens
actgcatagggtcggcgtgggcacttcctgctggaagggaaaagtggggatgaggggagcactttccttctctagtgcatagcaacctcgacaaatacaatcacacatattgggaggccaagaaatggggccttaggtgtcaccaaccatgctgtccttcaaaaggaaggatactgatgtaattgtcattaggcacattaacagtttgagaaaggggccttaagtgaatagtaccccatgcaataaagcaaagagggtgtgataggtcagaaacccaagtccaattgaagggaccattgacaactgcaattacatgccatctacagttcgaagagaagggcttaatattgattagcactctctgctttgataagtacaggagtcctgataaaaggcacaactgtatgcaactgaaaatgtgtatataacacctaagattatgcacgctaactttac

SEQ ID NO: 4008 - DNA, 431 bp, Homo sapiens
  misc_feature (1)...(431): n = a,t,c or g
gaaagaatagagaaagtgaaatagatgacatttggcttccatctcattccccaccgccctcgcccagcgtcctcttcccagcccttcattttctcttgggtaggggtgtgtctatgagagagaggatattgcttgttactgatggaagccagaatcctccccatttcttctcccgcaatccagactctcactagaatatctaaatgatgtcctctgaacttaagtcctttatttctgtatgttctcaaatggcagatccattcaaaaaattctggagccaattatttaagttccagataacaagggccggggcactgtgggcttcatacctattaatcccaggcactttgaggagggctgaggcaggatgggatcgctttgagtccagggnatttacaagggcccagcttttggacaaaaataggtggggg

SEQ ID NO: 4009 - DNA, 376 bp, Homo sapiens
attttcgaagttttcacagttctgcaagtttccaacttgtgtgtaaataggtagaataaccccccccaggatacggcgcccgtccaccccttaaggagtgagaggggatcaggccgagcgagcactgacctttgacgtcctttgttgtgaggaaagtccatctatgtgttagttatggaattaaacactaatacaaacaaattatcataaaaatgaaacaaaaacaaaaccccagctgtttatagactccccttcccagatgtatagctgggagaggtccgtctcacactggcttccccctctctctggcccacactcctgtcaccatctccattgcacccatagtggaaatagctaggaagtgaaaacagctagg

SEQ ID NO: 4010 - DNA, 341 bp, Homo sapiens
  misc_feature (1)...(341): n = a,t,c or g
gctgcctacaaaataaagtagttgtgaccatagcatgtgggcagatgtgctggcatgggcagtagtagacacgggggaggtctatgtctggggttacaacggaaacgggcagcttggactcggcaacagtggcaaccagccaaccccttgcagagtggcagctttgcaaggcatccgtgtccagagggtcgcctgtggctacgcacacacattagtattaacagatgaaggccaagtgtatgcttgggggcgccaattcttatgggcagttnggcactngcaataaaagcaaccagtcctatcctactcctgtcactgtggaaaaggacaggattatcgag

SEQ ID NO: 4011 - DNA, 270 bp, Homo sapiens
agcacaagattcctgtgaaatccaggtctaagtgttttgactacagaagtaatattatgtcataggtgagagctgtgagttgctgaacccaaagtgagttcaaatccaagttctgcctcctgcaacctttgtgactttgagaagttccagcactgctttgtgcctcagttttgtcatctgttaaatgggcataatcacagcttgtgcctcagagttgttgtaaattaatacatgtaaagcactgaaatcaaaaaaaaaaaaaaaaaaaaa

SEQ ID NO: 4012 - DNA, 432 bp, Homo sapiens
  misc_feature (1)...(432): n = a,t,c or g
tgaatgcagtatttaccactcatgttgccaaacaactaaacaaacaaacagacaaaaactcagttgttcaatgagtgttacaggagattttgttcttcttagttgctctggatccttctgttggccacccttgtagggcctgctgctccagcggcttgcagctagactgggagtggttactgggctgcatcttgctgaagtatgtcacccgtcagtatcccaaggtgagcaatgtattgtccctgtttgtctctcacccatgccataggnatctgtgtgtctggcggtatgtgctgggctcattctataggtgagacagtcaagggctttgggggtcagtggccctgaagncagacgggtaccaccgggaaatactgtagctcctcntgcttncaggggcatgtttttccccctctttcaaaaatctaactt

SEQ ID NO: 4013 - DNA, 615 bp, Homo sapiens
ttttttttttttttgcataaaggaatataaaactatttattaaccactgttcaccagtatttacaataaagtaaacaatatacagttggataacattttgattactacaaagttgttcttcctgggcttttgctgaaccagtaaagcaaactcaagattgagcctccatgtaatgaattggggtaaagaaaaaacatgcaggtcaataggttaggttacaaaaggttgttcacacatttatgacagcaggtcctaaactgccaacacctctaaccatctgattaggtttctatgagccaagtcttacatattccattcatcatgaccttttagtcaatgtagcaacagggattccaacattttgctaaggaatggcccgctagggaaaacttttaaatgttcatttaacttagttttgtttagctagttaaaacacactagcatttgtctagtttcctcatctggatgaggaaacctgctgtgatggcagtgataaaatttttcccctttaggaattttgcaaataaaccactgcaattatagacactttaaaattatccaatttaaattgtcctatctagaattacttatttcacttgaaatgtatggtttcag

SEQ ID NO: 4014 - DNA, 92 bp, Homo sapiens
ctgaaaatgtaggagggtctattttatccctataacttaatccaggtaatattgggggcattggatacctctttgttttttcacagattcct

SEQ ID NO: 4015 - DNA, 494 bp, Homo sapiens
  misc_feature (1)...(494): n = a,t,c or g
gggcaaagttggtttgcagcaagaagatagtgggagggggccaggctgcaggagaaggagaaaagtttagaagaaacaaaccattttgcttctaattttgacagtatcactttcctgttaaaacatacaataattttaaaaggtgaatgcctaaagttccaattttagcaaatatgggaacctcagcaatgctaattttcctagaaaaacccagggctcctttggagctagagttttgggagaacagttcttcacaataaggcaatggttttgagaggccaggcaaataatctttctcacccgtagaacaaaaagttacaaaaggcataatcggaaatagagactactgtacttgagtttatggggtttgtgttgtttgaaggttcaatgcttgcacgtgtttaattaatttcaacagggaaagtggtctgtactgctttcaaccntgccactggtccttgcntttaattttgttaccccccccactgaggcaa

SEQ ID NO: 4016 - DNA, 615 bp, Homo sapiens
  misc_feature (1)...(615): n = a,t,c or g
ggcggcaatgaggtcagtgactgccgggagtcctgcaggggcggggcggcgcaagccgagggagcccggctgagtggcagccagattgaagatggatacgtgacaatcccagggaccgctgcactgacttcatttccttagacaagacacagtgtagggcccggcccgtgttggccccaggactcctttggaatatagctgtggacaatgaatcctgcgagcgatgggggcacatcagagatgctcgactgcagggtcctggggtccctagagtggtccctgcagcaacccctggcaatgagctgcctgatgatgagtcccaaggtacattgttctactgttttatacccaggtagaagttacacagcaatttagcaatgttgttaacagacatacagnnnnnnnnnnnnnnnnnnnnnnnnnnnnnnnnnnnnnnnnnnnnnnatataaacgtgcaattaaaattcaaagtttattttttatcacaagcacctttgaaatgtacgtggaaaacgccggctgctcgtgagaatcatgtgtgacttacgttccttatgttttatggaactctcggaacagtgttttgtttttgtttagtttttgttttcgtttttt

SEQ ID NO: 4017 - DNA, 816 bp, Homo sapiens
caatgtaagagagaggtgcactgagagtacgtcttggtcccctccaccctgagagcatctgacggtcctcagtactgaactcccggaagctgctctgagcccggtgacctcatctgggccaggtgtggtgcctgagctgaatgctcaggtgcttacagtgttgcaatccctaagagagtagagtctggaggagaaaccgtgaaaaagaccttacacaccaccaagaacttccgaatgggcgtgaatccaccgtttcttctctttgcaaaaagaaccaccacagctgctcaaagaacacagtgaactcatcactttggttcatcaaaaaatcatcgcccatgcgttattcctgagtgcattttcttacaactttttgactgcttccttttcttcttctcttaagagttgtgggcttaagaatgggatagagtcataatggcaacctccaagccctctcaattcttgattaagaacacaggtagacatgaatcccaattgtctattgctatcttatttatatgattcgggaaaatacagcatgtaaaaatattgctgaggagcctcagtgattgggtacaagaagcaagagtacagaaattatttttgccaaatttattttgtaaatatgagggtctgtaccctaaatttaaaaaaaaaaacacgtaggaactaggtattttgttctcttcttagtaaatttgtagtggttgtatactacactagctgcaattttcacatttttctaattcagaaaggtttttcttatattaggggaaaaagtatttattttaatatataaaatcactctgaaaatca

SEQ ID NO: 4018 - DNA, 349 bp, Homo sapiens
  misc_feature (1)...(349): n = a,t,c or g
gtacatatcttgccagaatctctcttatgatacttagaaagttttcatgtacttggagctaaattagtccccaaaccaaattcattattttcttcttaaaaatgtcttttacttccttgaatctgcttctgtatttcccatgtaaatttacaatgtattttgtccagttactgaggataaatacctctacttttgcacctaggacatttagggaggccattgtttactaaattcatttggatggctggtcttctaaaggaactaaaatctaggcatctcctcttcatacctcctggccacggtctttcattttccaacggggnttttnggttaggtagganttttacgg

SEQ ID NO: 4019 - DNA, 392 bp, Homo sapiens
agctaaatagccttaaatttgcatactaaaggaaacaactcgggtgaaaatgatatagcaaaagttacatcataaggtacagagaggaaaaagtctggtggtgttagagggagattaaaaatggatgccaaattaaacataaaattatagaagtctagcataggattctataaggagactaattttatttaggtagggaatgactacctatcttttaactggatctctgagctctgggcagagcccatactgaatcctgggtctccaaaaagggagaattaatatgagattaggctacgtggtgcttttacagtgcactcagaaaaaaaaaaaaattaaagacatttctaagtgtctaagccacattcttccttaaaaacccaagagtaacc

SEQ ID NO: 4020 - DNA, 819 bp, Homo sapiens
gttttttccttagtcgtttgtaaaaaatggtgctacagatcaatagcatctaagagtcaatataccatggtatcaatcattgtaaagatatattcccaatttctgttctaaggttactctgaataaccaatctgagatttaaaatatttaaagtctgagtaaaatatttctaatacatcatgaacagaacagttttgagacaaattaattttgtaaaaaatggtttatcaattccatttttgtataaaacacacgggagaaacctagccaatcaacacacaactgtcaccacatgaaaaggtacttttatcaaacttcgagtctaagaacatacaaatgtttcttttatcatgtctacagtaattgtctatgcttttccatttaactgttgttaaaaattccacatatccccattatttcttctgtcccagttacagtacaatgacggggaggaagagggttggttaaagcatccctctaagcagttttctgctgtcccttctttccaatcagagatttgtggatgtgagggatcacaccacccccagctatggtagccttgataagagaatccaactcttcatcaccacggattgcaagctgcaagtgacgcggagtgatacgctttactttgagatccttagaagcattacctgccagctccagcacctctgcagtgaggtactccagaatcgcagcactgtacacggcagcagtggcacccacccttccatggcttgtggtgcgagtcttcaagtgtctgtggatgcggcccacaggaaactgtagcccagctctctgtgagcgagatactgcctt

SEQ ID NO: 4021 - DNA, 2972 bp, Homo sapiens
  misc_feature (1)...(2972): n = a,t,c or g
acgagcagcgacgnccccctggtcccacagataccactgcctcccgccctttcgctcctcggccgcgcaatcgggcacccgcgacgacgagtacgactacctctttaaagttgtccttattggagattctggtgttggaaagagtaatctcctgtctcgatttactcgaaatgagtttaatctggaaagcaagagcaccattggagtagagtttgcaacaagaagcatccaggttgatggaaaaacaataaaggcacagcatatgggacacagcaggggcaagagcgatatcgagctataacatcagcatattatcgtggagctgtaggtgccttattggtttatgacattgctaaacatctcacatatgaaaatgtagaggcgatggcctgaaagaactgagagatcatgctgatagtaacattgttatcatgcttgtgggcaataagagtgatctacgtcatctcagggcagttcctacagatgaagcaagagccttttgccagaaaagaatggtttgtcattcattgaaaccttcggccctagactctacaaatgtagaagctgcttttcagacaattttaacagagatttaccgcattgtttctcagaagcaaatgtcagacagacgcgaaaatgacatgtctccaagcaacaatgtggttcctattcatgtttccaccaaccactgaaaacaagccaaaggtgcagtgctgtcagaacatctaaggcatttctcttctcccctagaaggctgtgtatagtccatttcccaggtctgagatttaaatatatttgtaattcttgtgtcacttttgtgttttattacttcatacttatgaatttttccatgtcctaagtcttttgattttagctttataaaatcatccacttctcccgaatgactgcagctttttttcatgctatggcttcactagccttagtttaataaactgaatgtttggattcctcagttattgtttacttttcatcatggaagcctgtcactgtatgtaggacataatagaacttatcacttgaagctcagacctattggtcttgatcaaatcaaactaagaagaccttagaaataagctaccattttgccacagagcagcttataggtaatacactcttctctcagtgcagtgtacatttccacaaatctaagaattgccctataaacatagcagggattttgagagcttgaaaattttccattattctggacatgaatttctaaaatgccttaataggtttatgtagttgagtaaattttgttttttaatttttgtaagcatcaaagttgattagagaggggggcactttttctggagaattctcttagtaaacacaaaagattgttacggtttcattagtagtatggttgtggggccataagttaaacagtgctgcctggtaggctgggaactgaagagacttgtggtattccatctcgggtgcctctgttggcaatgatcaggcagcccaaaagatttaaatgatctataataatttccaagcggtagattatgtggcattttattgctcaggcaataattggtttaatgctggtagtgtcaaattttgaagtgttaattttgtcttaggaccttccagtaagtgaaatacaacctagttttatcaccatatccaccagcaggcatccataattattttaacaatgctaatatttgagttttgcagtatattatagaataatatagtccagttaaatctttggtttcagtatgtctgaagagtacagtgagaggttaattttctgctcaagtggtaccacttaaaggcatgtattcttttagtatgtaaaatgaaatagtaccttgagtttaaatagaatgcatttaggcattgtagagatctgaaatagttttcttccactgcgttgttgaaatcaatgaagcaattagtttctcattcagaaatgtgcacactaatatttagttttgctttctcgtggataatattaagcacttactctgcagtttcctggaagttgtgtcaactgcagtgatactattcaggatggtgggaaatccccaaaaatatgtatgtgtgggcttgcttagattactatatttcatagttaatcttttgtctcttgcggtgcctcatgatgtgtgggggcacacggaaggcattgcagtagtcagtcattttggttttcttctatagccattttattattttagtgtattagttatgaagataatattatctatttgtaaattgctactttgtattttatgcatgctctgtaatttgatttttttttagttattgatttggattatattcacattctaataaacagttatagggggattatttcttatgctgtcagattacatttttcctttgagtgctttgggtgcagccgtggaatcctgatgtaaaagcataggttcttgcattactgagtaaacattgaattgggagcatcagtgtgtgaattcagctttgattttagaactgcagttcaattatgctttccttggaaaaagtatgtccaaaaacattaggaaagtagtgtgtattttcatatataacagtgtcaccagacccaggaaaagaaaccatctctattttattgaaagttggtggtagattttttacaaagtaaggagaaaagagaaaaactaaatagtgaattgaaaatgaataaagtaaacttagaatttttaccccaagtgtaggactttaaatgttgctttgagtatggctggatcttgggagaattccagggaaatattaggtattagaaaatgactttgattgcatttcagcaggtgtctttattctgagtagtatcttagggagacaaactgtctcaagccaaggaaacattgaattttttaaatattatggacagttcagggctttaaggccagtttaggagtattttgctacttgaccntgattttcngttattttaacntttgatttttttt

SEQ ID NO: 4022 - DNA, 129 bp, Homo sapiens
gatcctaggctccctccatccctggtatgtggtcctcattttcatatagaccaagagctagagctccagttaccatttcttaaagtatattttaatgccaaatagtgaataaaggtggccagaaaattc

SEQ ID NO: 4023 - DNA, 512 bp, Homo sapiens
ggagactgcatagggctcggcgtggtgtgtcgacaacatctgcacctgtggatagggccttaccacaacaggctcttgcttctcctcccgggactggagggagctgctggaactcatgtgctccctggcactgacttcagaatctcgaccagattcatcattgactagtaaagacattaagagtgagacagtatgtcacagtctcccagtgtaagatagcagcacagacaagagtggtacctgaagttaaatctcaggattgacaaagtggccatttccttgtgatgttttcttaacaaggtcaatatgggcactggattctcctgatggacatcagacaaaagagcccacaactgtggaatatagaatttattctggatattgtagccttatgaacaaactacctgaaaatcatctaaaatgagctgaaatagttaaaagtacaatacaggatgtaagacaatttcatttaaaacatcctcttagaaagttataaaagcctgacattaaaa

SEQ ID NO: 4024 - DNA, 368 bp, Homo sapiens
  misc_feature (1)...(368): n = a,t,c or g
gtctcccactttagcctctagctatcctcccaccttagcctatagagtagctgcgactatgggtgcatgccaccatacctggctgatttttttgttttttatgttttgtagagacctcgctatgttnnnnnnnnnnnnnnnnnnnnnnnnnnnnnnnnnnnnnnnnnnnnnnnnnnnnnnnnnnnnnnnnnnnnnnnnnnnnnnnnnnnnnnnnnnnnnnnnnnnnnnnnnnnnnnnnnnnnnnnnnnnnnnnnnnnnnnnnnnnnnnnnnnnnnncttggcaatccagggnatcttccanccngggagacacantangctcgtcgcaaaaaggnnaaancnangntnaanngtnanaccctanggaa

SEQ ID NO: 4025 - DNA, 358 bp, Homo sapiens
gcaaagactcagtgttgagactcacatgtctccccgaagggaaggaggaggcattcaagtagaaacacatttacgtcaacaggttttctgaacccccggtgaattttgagttcttagtgcaaccttcccctgcttcaccgttcctgtttcttctctgtgcctctgttttccggttggggaagtggaaaggatcctgactctggaggaaagtgggagaagaaccagtggggcccgactgcatcaaggagcctccccttagcagagaaccgtctgggtcctcctcactcatacgtgctgtctgtgtggcaggggtgctcatgggggagatgttgaaggagggtgttaaggaagggtttct

SEQ ID NO: 4026 - DNA, 398 bp, Homo sapiens
tcgtgtctggcctagtgtatgattatgcatgagtcacgcaatgttctggtcctggattccaggagtagaggacctagctttagatcaattagtttcagctaaactgactagaaccgggtcaaagtgtaattctccctccagctcccccaaaccccagagttttggggttgtggttgatgcagtgtgggatgtccctgagaggtagcaagtctagggtggtgagttcctgctaggcaaccaaatttaagctcctcactttttgtgacacatggtgtcagatatggggtcccgcacctatatctggatgaagaggtagaaactctggacctcattaatgagttatttcttggccttcttctaaggactaggagagctccttatctgtctgagaatggggg

SEQ ID NO: 4027 - DNA, 856 bp, Homo sapiens
gatgatgtaaagttacacaagcttgtctggatttcccatcatagggcctttgtattcacttatttaataatagttcagaagaagctatctcagctgtacaagaagtaattcagtttcagaacatttctcactccaacaaggtgcattttcccctctggcgctcagttgtataaatctgacctctttccctctcactcagagatctcttttatgtatttcccaggttggctggcatagtcaccttagaatagcccccaaatgtggaaattctgttgtcaggagtcatcatttccagtaagaaactcactgagtgacagaaaatgaagactaaagatcaaagattactaaattaatttgcctaaaaccaattcacctaaaaccaattagtctaaaataaatatttatcaaatctgcagcatttcaaaaggatttagcagattcacccttttagttattactgttgtctgtataacttttcattgtaagtcaactgaatatgcctcatgcctattcatttgtttaagatatactggcctttttaacagtaggaatgtagaagttagacccaaagcatcaaaatcacattgaactcccattatatttttcaaggcatttaatttgtaaaggaatattggattaagaaacaaaaaaatgatacacaaaatgtctgtaccaattgtatttattgctagaaactttaaactttttaaaaaagtttttgaatggtagataacatagaaaaagacatccataaaggtaggaagcaatctcatcatttacaaagtgctgcaaatttgataaatttatgttgctgataataactcagaagtactcttggatgaatagatataaatcc

SEQ ID NO: 4028 - DNA, 842 bp, Homo sapiens
tgtcggacctttactatgtgacatgttcattcagtagtattgcagtgtctatgatttctttgtgatggcttgactgatatttagatgacttcaatagtgccatggcatttccgtggcaagtgggccggggtttacgtttgaagaaatcatgaatggttttattctcaggcatatgatatggaaggttcagtgcagactctcgaataaggcgctgagtctcactatgcagttgttttaatgcttctttacttaatctggctgcctttctttccttcctcgtggttccttttgataactcacttccttcctcaaatgaatggaccccactctccaaagatggttcttttttcttgtgcttttttactttgttttttacagctgctcttattgattctaatgactcttcatcttccaatggagagttattttcatcctccaacccagtttcaaaaaggtctttatccacaagaagacagccactgtcattaaatggctgttctacatcatcttcctggttttttgtttccttcttttttagctgtctaattttttccatttttctctcctctttctcaagtcttctttttgattttacttttgcttttcctgcagttccttctttatcatgtatgtgctttttggaactctttctgtcagtggtaaagtctgtagagtttccagactgaagactcagctctaagcaaggtttcacttgcgcttcaagattttcctgatacaaagacttttccatgtaactttcatcactgtctgccacagttttgtaaatccttttgatttttgtatttttcccagcatataaattctctttattttcctcctcg

SEQ ID NO: 4029 - DNA, 491 bp, Homo sapiens
gcagagaaggagtgactcttcagtcagtggctctcagtgggcacaagaatagcagcaggaacaagattttgttatgtgtcttaggtcattttggagaatcagccttcctttctgtggtgctagctggggttagtcctgacggatcctaaggactgggtgcctaggggccattcctccctggggtctcagtggtgacagggctttccttaccccaagccagacaccaacctacactttaaacatagctcttggaggcccagttcattattgcagtgttatgtcagttgcacatttaagacttaccggcttttagctactttagggaataatttattggccaaagaaagtaagtctggttataaaatggcactttccagggaggtaccgggccccaaggtggaggctgtcgaggggacccgtttccaaggtccttcttcctagagtatgtgctgaagggctgacacacacgtgcagtgtgaagtcactgctga

SEQ ID NO: 4030 - DNA, 105 bp, Homo sapiens
gcataatggcaggaagtgagcacagtcttcttggctggagaatctcagttgcagtgtttggggcagactgactggaaatgatgctatgtcggggaccatgtttga

SEQ ID NO: 4031 - DNA, 495 bp, Homo sapiens
gacaattcttcaaaattccttaaaataaatgtgtgtgcatgtgtgtctgtgtatatatatagcctatgtaatgtctaatatagatctataatatatattagataaatatacacatacttatcatatatatatgtgtgtgtgtgtgtgtttctcctattggttctgttctctggagaacctaatacagaaacaaatctgtttattcttctagcctctgtatcatcaggcctctttgttagagcaggtgagctttaccctaactaattcagaggttgattcgttttcatgcatgtagatacttgtcatttagcttctattatctgcctgtattttaaggttctttgtcttaaaatgttatgactccagggatgttatatattaagtatattaaccttttgactattatatatcctggcaaacatcttgtaatcagtcacttgtctctttattttatttggagcggtttcaacctagagcatgggccccaaaccgggg

SEQ ID NO: 4032 - DNA, 510 bp, Homo sapiens
  misc_feature (1)...(510): n = a,t,c or g
gggaagaattaattgccgattcttagatcttgagtgttaatcagttctaacactgaccgtcctgaggaaaatgcctatggcccagggtgacctgctggttttcctttcacaccttctctttcatgattaccattctttaaagggaagacatacctttcacctaccccttatcagagtgccaagtagggggataattaaaatactgctggggctgctgggaaagtgagtgactctaatgactgggcaaaggaaccttttgcaaatgtttcccatttttgcattcagtaaaattggggcagggtggctcatgcctgttaatccaagcgctttgggaagggctggggcaggcagatcagttgagcccnggagttcaaggaccagcnggggcaacatgttcaantcctcntttttacaaacaaaacaaaacaaatttggtgggacgcggtggcacgtgnctgtagtttcagttatttgggnggcactgaagtgtgggaggattgcctgagctta

SEQ ID NO: 4033 - DNA, 14903 bp, Homo sapiens
  misc_feature (1)...(14903): n = a,t,c or g
cagcggtgcgagctccaggcccatgcactgaggaggcggaaacaaggggagcccccagagctccatcaagccccctccaaaggctcccctacccggtccacgccccccaccccccctccccgcctcctcccaattgtgcatttttgcagccggaggcggctccgagatggggctgtgagcttcgcccggggagggggaaagagcagcgaggagtgaagcgggggggtggggtgaagggtttggatttcggggcagggggcgcacccccgtcagcaggccctccccaaggggctcggaactctacctcttcacccacgcccctggtgcgctttgccgaaggaaagaataagaacagagaaggaggagggggaaaggaggaaaagggggaccccccaactggggggggtgaaggagagaagtagcaggaccagaggggaaggggctgctgcttgcatcagcccacaccatgctgaccccgccgttgctcctgctgctgcccctgctctcagctctggtcgcggcggctatcgacgcccctaagacttgcagccccaagcagtttgcctgcagagatcaaataacctgtatctcaaagggctggcggtgcgacggtgagagggactgcccagacggatctgacgaggcccctgagatttgtccacagagtaaggcccagcgatgccagccaaacgagcataactgcctgggtactgagctgtgtgttcccatgtcccgcctctgcaatggggtccaggactgcatggacggctcagatgaggggccccactgccgagagctccaaggcaactgctctcgcctgggctgccagcaccattgtgtccccacactcgatgggcccacctgctactgcaacagcagctttcagcttcaggcagatggcaagacctgcaaagattttgatgagtgctcagtgtacggcacctgcagccagctatgcaccaacacagacggctccttcatatgtggctgtgttgaaggatacctcctgcagccggataaccgctcctgcaaggccaagaacgagccagtagaccggccccctgtgctgttgatagccaactcccagaacatcttggccacgtacctgagtggggcccaggtgtctaccatcacacctacgagcacgcggcagaccacagccatggacttcagctatgccaacgagaccgtatgctgggtgcatgttggggacagtgctgctcagacgcagctcaagtgtgcccgcatgcctggcctaaagggcttcgtggatgagcacaccatcaacatctccctcagtctgcaccacgtggaacagatggccatcgactggctgacaggcaacttctactttgtggatgacatcgatgataggatctttgtctgcaacagaaatggggacacatgtgtcacattgctagacctggaactctacaaccccaagggcattgccctggaccctgccatggggaaggtgtttttcactgactatgggcagatcccaaaggtggaacgctgtgacatggatgggcagaaccgcaccaagctcgtcgacagcaagattgtgtttcctcatggcatcacgctggacctggtcagccgccttgtctactgggcagatgcctatctggactatattgaagtggtggactatgagggcaagggccgccagaccatcatccagggcatcctgattgagcacctgtacggcctgactgtgtttgagaattatctctatgccaccaactcggacaatgccaatgcccagcagaagacgagtgtgatccgtgtgaaccgctttaacagcaccgagtaccaggttgtcacccgggtggacaagggtggtgccctccacatctaccaccagaggcgtcagccccgagtgaggagccatgcctgtgaaaacgaccagtatgggaagccgggtggctgctctgacatctgcctgctggccaacagccacaaggcgcggacctgccgctgccgttccggcttcagcctgggcagtgacgggaagtcatgcaagaagccggagcatgagctgttcctcgtgtatggcaagggccggccaggcatcatccggggcatggatatgggggccaaggtcccggatgagcacatgatccccattgaaaacctcatgaacccccgagccctggacttccacgctgagaccggcttcatctactttgccgacaccaccagctacctcattggccgccagaagattgatggcactgagcgggagaccatcctgaaggacggcatccacaatgtggagggtgtggccgtggactggatgggagacaatctgtactggacggacgatgggcccaaaaagacaatcagcgtggccaggctggagaaagctgctcagacccgcaagactttaatcgagggcaaaatgacacaccccagggctattgtggtggatccactcaatgggtggatgtactggacagactgggaggaggaccccaaggacagtcggcgtgggcggctggagagggcgtggatggatggctcacaccgagacatctttgtcacctccaagacagtgctttggcccaatgggctaagcctggacatcccggctgggcgcctctactgggtggatgccttctacgaccgcatcgagacgatactgctcaatggcacagaccggaagattgtgtatgaaggtcctgagctgaaccacgcctttggcctgtgtcaccatggcaactacctcttctggactgagtatcggagtggcagtgtctaccgcttggaacggggtgtaggaggcgcaccccccactgtgacccttctgcgcagtgagcggccccccatctttgagatccgaatgtatgatgcccagcagcagcaagttggcaccaacaaatgccgggtgaacaatggcggctgcagcagcctgtgcttggccacccctgggagccgccagtgcgcctgtgctgaggaccaggtgttggacgcagacggcgtcacttgcttggcgaacccatcctacgtgcctccaccccagtgccagccaggcgagtttgcctgtgccaacagccgctgcatccaggagcgctggaagtgtgacggagacaacgattgcctggacaacagtgatgaggccccagccctctgccatcagcacacctgcccctcggaccgattcaagtgcgagaacaaccggtgcatccccaaccgctggctctgcgacggggacaatgactgtgggaacagtgaagatgagtccaatgccacttgttcagcccgcacctgcccccccaaccagttctcctgtgccagtggccgctgcatccccatctcctggacgtgtgatctggatgacgactgtggggaccgctctgatgagtctgcttcgtgtgcctatcccacctgcttccccctgactcagtttacctgcaacaatggcagatgtatcaacatcaactggagatgcgacaatgacaatgactgtggggacaacagtgacgaagccggctgcagccactcctgttctagcacccagttcaagtgcaacagcgggcgttgcatccccgagcactggacctgcgatggggacaatgactgcggagactacagtgatgagacacacgccaactgcaccaaccaggccacgaggccccctggtggctgccacactgatgagttccagtgccggctggatggactatgcatccccctgcggtggcgctgcgatggggacactgactgcatggactccagcgatgagaagagctgtgagggagtgacccacgtctgcgatcccagtgtcaagtttggctgcaaggactcagctcggtgcatcagcaaagcgtgggtgtgtgatggcgacaatgactgtgaggataactcggacgaggagaactgcgagtccctggcctgcaggccaccctcgcacccttgtgccaacaacacctcagtctgcctgccccctgacaagctgtgtgatggcaacgacgactgtggcgacggctcagatgagggcgagctctgcgaccagtgctctctgaataacggtggctgcagccacaactgctcagtggcacctggcgaaggcattgtgtgttcctgccctctgggcatggagctggggcccgacaaccacacctgccagatccagagctactgtgccaagcatctcaaatgcagccaaaagtgcgaccagaacaagttcagcgtgaagtgctcctgctacgagggctgggtcctggaacctgacggcgagagctgccgcagcctgggaccccttcaagccgttcatcattttctccaaccgccatgaaatccggcgcatcgatcttcacaaaggagactacagcgtcctggtgcccggcctgcgcaacaccatcgccctggacttccacctcagccagagcgccctctactggaccgacgtggtggaggacaagatctaccgcgggaagctgctggacaacggagccctgactagtttcgaggtggtgattcagtatggcctggccacacccgagggcctggctgtagactggattgcaggcaacatctactgggtggagagtaacctggatcagatcgaggtggccaagctggatgggaccctccggaccaccctgctggccggtgacattgagcacccaagggcaatcgcactggatccccgggatgggatcctgttttggacagactgggatgccagcctgccccgcattgaggcagcctccatgagtggggctgggcgccgcaccgtgcaccgggagaccggctctgggggctggcccaacgggctcaccgtggaactacctggagaagcgcatcctttggattgacgccaggtcagatgccatttactcagcccgttacgacggctctggcccacatggaggtgcttcggggacacgagttcctgtcgcacccgtttgcagtgacgctgtacgggggggaggtctactggactgactggcgaacaaacacactggctaaggccaacaagtggaccggccacaatgtcaccgtggtacagaggaccaacacccagccctttgacctgcaggtgtaccacccctcccgccagcccatggctcccaatccctgtgaggccaatgggggccagggcccctgctcccacctgtgtctcatcaactacaaccggaccgtgtcctgcgcctgcccccacctcatgaagctccacaaggacaacaccacctgctatgagtttaagaagttcctgctgtacgcacgtcagatggagatccgaggtgtggacctggatgctccctactacaactacatcatctccttcacggtgcccgacatcgacaacgtcacagtgctagactacgatgcccgcgagcagcgtgtgtactggtctgacgtgcggacacaggccatcaagcgggccttcatcaacggcacaggcgtggagacagtcgtctctgcagacttgccaaatgcccacgggctggctgtggactgggtctcccgaaacctgttctggacaagctatgacaccaataagaagcagatcaatgtggcccggctggatggctccttcaagaacgcagtggtgcagggcctggagcagccccatggccttgtcgtccaccctctgcgtgggaagctctactggaccgatggtgacaacatcagcatggccaacatggatggcagcaatcgcaccctgctcttcagtggccagaagggccccgtgggcctggctattgacttccctgaaagcaaactctactggatcagctccgggaaccataccatcaaccgctgcaacctggatgggagtgggctggaggtcatcgatgccatgcggagccagctgggcaaggccaccgccctggccatcatgggggacaagctgtggtgggctgatcaggtgtcggaaaagatgggcacatgcagcaaggctgacggctcgggctccgtggtccttcggaacagcaccaccctggtgatgcacatgaaggtctatgacgagagcatccagctggaccataagggcaccaacccctgcagtgtcaacaacggtgactgctcccagctctgcctgcccacgtcagagacgacccgctcctgcatgtgcacagccggctatagcctccggagtggccagcaggcctgcgagggcgtaggttcctttctcctgtactctgtgcatgagggaatcaggggaattcccctggatcccaatgacaagtcagatgccctggtcccagtgtccgggacctcgctggctgtcggcatcgacttccacgctgaaaatgacaccatctactgggtggacatgggcctgagcacgatcagccgggccaagcgggaccagacgtggcgtgaagacgtggtgaccaatggcattggccgtgtggagggcattgcagtggactggatcgcaggcaacatctactggacagaccagggctttgatgtcatcgaggtcgcccggctcaatggctccttccgctacgtggtgatctcccagggtctagacaagccccgggccatcaccgtccacccggagaaagggtacttgttctggactgagtggggtcagtatccgcgtattgagcggtctcggctagatggcacggagcgtgtggtgctggtcaacgtcagcatcagctggcccaacggcatctcagtggactaccaggatgggaagctgtactggtgcgatgcacggacagacaagattgaacggatcgacctggagacaggtgagaaccgcgaggtggttctgtccagcaacaacatggacatgttttcagtgtctgtgtttgaggatttcatctactggagtgacaggactcatgccaacggctctatcaagcgcgggagcaaagacaatgccacagactccgtgcccctgcgaaccggcatcggcgtccagcttaaagacatcaaagtcttcaaccgggaccggcagaaaggcaccaacgtgtgcgcggtggccaatggcgggtgccagcagctgtgcctgtaccggggccgtgggcagcgggcctgcgcctgtgcccacgggatgctggctgaagacggagcatcgtgccgcgagtatgccggctacctgctctactcagagcgcaccattctcaagagtatccacctgtcggatgagcgcaacctcaatgcgcccgtgcagcccttcgaggaccctgagcacatgaagaacgtcatcgccctggcctttgactaccgggcaggcacctctccgggcacccccaatcgcatcttcttcagcgacatccactttgggaacatccaacagatcaacgacgatggctccaggaggatcaccattgtggaaaacgtgggctccgtggaaggcctggcctatcaccgtggctgggacactctctattggacaagctacacgacatccaccatcacgcgccacacagtggaccagacccgcccaggggccttcgagcgtgagaccgtcatcactatgtctggagatgaccacccacgggccttcgttttggacgagtgccagaacctcatgttctggaccaactggaatgagcagcatcccagcatcatgcgggcggcgctctcgggagccaatgtcctgacccttatcgagaaggacatccgtacccccaatggcctggccatcgaccaccgtgccgagaagctctacttctctgacgccaccctggacaagatcgagcggtgcgagtatgacggctcccaccgctatgtgatcctaaagtcagagcctgtccaccccttcgggctggccgtgtatggggagcacattttctggactgactgggtgcggcgggcagtgcagcgggccaacaagcacgtgggcagcaacatgaagctgctgcgcgtggacatcccccagcagcccatgggcatcatcgccgtggccaacgacaccaacagctgtgaactctctccatgccgaatcaacaacggtggctgccaggacctgtgtctgctcactcaccagggccatgtcaactgctcatgccgagggggccgaatcctccaggatgacctcacctgccgagcggtgaattcctcttgccgagcacaagatgagtttgagtgtgccaatggcgagtgcatcaacttcagcctgacctgcgacggcgtcccccactgcaaggacaagtccgatgagaagccatcctactgcaactcccgccgctgcaagaagactttccggcagtgcagcaatgggcgctgtgtgtccaacatgctgtggtgcaacggggccgacgactgtggggatggctctgacgagatcccttgcaacaagacagcctgtggtgtgggcgagttccgctgccgggacgggacctgcatcgggaactccagccgctgcaaccagtttgtggattgtgaggacgcctcagatgagatgaactgcagtgccaccgactgcagcagctacttccgcctgggcgtgaagggcgtgctcttccagccctgcgagcggacctcactctgctacgcacccagctgggtgtgtgatggcgccaatgactgtggggactacagtgatgagcgcgactgcccaggtgtgaaacgccccagatgccctctgaattacttcgcctgccctagtgggcgctgcatccccatgagctggacgtgtgacaaagaggatgactgtgaacatggcgaggacgagacccactgcaacaagttctgctcagaggcccagtttgagtgccagaaccatcgctgcatctccaagcagtggctgtgtgacggcagcgatgactgtggggatggctcagacgaggctgctcactgtgaaggcaagacgtgcggcccctcctccttctcctgccctggcacccacgtgtgcgtccccgagcgctggctctgtgacggtgacaaagactgtgctgatggtgcagacgagagcatcgcagctggttgcttgtacaacagcacttgtgacgaccgtgagttcatgtgccagaaccgccagtgcatccccaagcacttcgtgtgtgaccacgaccgtgactgtgcagatggctctgatgagtcccccgagtgtgagtacccgacctgcggccccagtgagttccgctgtgccaatgggcgctgtctgagctcccgccagtgggagtgtgatggcgagaatgactgccacgaccagagtgacgaggctcccaagaacccacactgcaccagcccagagcacaagtgcaatgcctcgtcacagttcctgtgcagcagtgggcgctgtgtggctgaggcactgctctgcaacggccaggatgactgtggcgacagctcggacgagcgtggctgccacatcaatgagtgtctcagccgcaagctcagtggctgcagccaggactgtgaggacctcaagatcggcttcaagtgccgctgtcgccctggcttccggctgaaggatgacggccggacgtgtgctgatgtggacgagtgcagcaccaccttcccctgcagccagcgctgcatcaacacccatggcagctataagtgtctgtgtgtggagggctatgcaccccgcggcggcgacccccacagctgcaaggctgtgactgacgaggaaccgtttctgatcttcgccaaccggtactacctgcgcaagctcaacctggacgggtccaactacacgttacttaagcagggcctgaacaacgccgttgccttggattttgactaccgagagcagatgatctactggacagatgtgaccacccagggcagcatgatccgaaggatgcaccttaacgggagcaatgtgcaggtcctacaccgtacaggcctcagcaaccccgatgggctggctgtggactgggtgggtggcaacctgtactggtgcgacaaaggccgggacaccatcgaggtgtccaagctcaatggggcctatcggacggtgctggtcagctctggcctccgtgagcccagggctctggtggtggatgtgcagaatgggtacctgtactggacagactggggtgaccattcactgatcggccgcatcggcatggatgggtccagccgcagcgtcatcgtggacaccaagatcacatggcccaatggcctgacgctggactatgtcactgagcgcatctactgggccgacgcccgcgaggactacattgaatttgccagcctggatggctccaatcgccacgttgtgctgagccaggacatcccgcacatctttgcactgaccctgtttgaggactacgtctactggaccgactgggaaacaaagtccattaaccgagcccacaagaccacgggcaccaacaaaacgctcctcatcagcacgctgcaccggcccatggacctgcatgtcttccatgccctgcgccagccagacgtgcccaatcacccctgcaaggtcaacaatggtggctgcagcaacctgtgcctgctgtcccccgggggagggcacaaatgtgcctgccccaccaacttctacctgggcagcgatgggcgcacctgtgtgtccaactgcacggctagccagtttgtatgcaagaacgacaagtgcatccccttctggtggaagtgtgacaccgaggacgactgcggggaccactcagacgagcccccggactgccctgagttcaagtgccggcccggacagttccagtgctccacaggtatctgcacaaaccctgccttcatctgcgatggcgacaatgactgccaggacaacagtgacgaggccaactgtgacatccacgtctgcttgcccagtcagttcaaatgcaccaacaccaaccgctgtattcccggcatcttccgctgcaatgggcaggacaactgcggagatggggaggatgagagggactgccccgaggtgacctgcgcccccaaccagttccagtgctccattaccaaacggtgcatcccccgggtctgggtctgcgaccgggacaatgactgtgtggatggcagtgatgagcccgccaactgcacccagatgacctgtggtgtggacgagttccgctgcaaggattcgggccgctgcatcccagcgcgttggaagtgtgacggagaggatgactgtggggatggctcggatgagcccaaggaagagtgtgatgaacgcacctgtgagccataccagttccgctgcaagaacaaccgctgcgtgcccggccgctggcagtgcgactacgacaacgattgcggtgacaactccgatgaagagagctgcacccctcggccctgctccgagagtgagttctcctgtgccaacggccgctgcatcgcggggcgctggaaatgcgatggagaccacgactgcgcggacggctcggacgagaaagactgcaccccccgctgtgacatggaccagttccagtgcaagagcggccactgcatccccctgcgctggcgctgtgacgcagacgccgactgcatggacggcagcgacgaggaggcctgcggcactggcgtgcggacctgccccctggacgagttccagtgcaacaacaccttgtgcaagccgctggcctggaagtgcgatggcgaggatgactgtggggacaactcagatgagaaccccgaggagtgtgcccggttcgtgtgccctcccaaccggcccttccgttgcaagaatgaccgcgtctgtctgtggatcgggcgccaatgcgatggcacggacaactgtggggatgggactgatgaagaggactgtgagccccccacagcccacaccacccactgcaaagacaagaaggagtttctgtgccggaaccagcgctgcctctcctcctccctgcgctgcaacatgttcgatgactgcggggacggctctgacgaggaggactgcagcatcgaccccaagctgaccagctgcgccaccaatggccagcatctgtggggacgaggcacgctgcgtgcgcaccgagaaagcggcctactgtgcctgccgctcgggcttccacaccgtgcccggccagcccggatgccaagacatcaacgagtgcctgcgcttcggcacctgctcccagctctgcaacaacaccaagggcggccacctctgcagctgcgctcggaacttcatgaagacgcacaacacctgcaaggccgaaggctctgagtaccaggtcctgtacatcgctgatgacaatgagatccgcagcctgttccccggccacccccattcggcttacgagcaggcattccagggtgacgagagtgtccgcattgatgctatggatgtccatgtcaaggctggccgtgtctattggaccaactggcacacgggcaccatctcctaccgcagcctgccacctgctgcgcctcctaccacttccaaccgccaccggcgacagattgaccggggtgtcacccacctcaacatttcagggctgaagatgcccagaggcatcgccatcgactgggtggccggaaacgtgtactggaccgactcgggccgagatgtgattgaggtggcgcagatgaagggcgagaaccgcaagacgctcatctcgggcatgattgacgagccccacgccattgtggtggacccactgagggggaccatgtactggtcagactggggcaaccaccccaagattgagacggcagcgatggatgggacgcttcgggagacactggtgcaggacaacattcagtggcccacaggcctggccgtggattatcacaatgagcggctgtactgggcagacgccaagctttcagtcatcggcagcatccggctcaatggcacggaccccattgtggctgctgacagcaaacgaggcctaagtcaccccttcagcatcgacgtctttgaggattacatctatggtgtcacctacatcaataatcgtgtcttcaagatccataagtttggccacagccccttggtcaacctgacagggggcctgagccacgcctctgacgtggtcctttaccatcagcacaagcagcccgaagtgaccaacccatgtgaccgcaagaaatgcgagtggctctgcctgctgagccccagtgggcctgtctgcacctgtcccaatgggaagcggctggacaacggcacatgcgtgcctgtgccctctccaacgccccccccagatgctccccggcctggaacctgtaacctgcagtgcttcaacggtggcagctgtttcctcaatgcacggaggcagcccaagtgccgctgccaaccccgctacacgggtgacaagtgtgaactggaccagtgctgggagcactgtcgcaatgggggcacctgtgctgcctccccctctggcatgcccacgtgccggtgccccacgggcttcacgggccccaaatgcacccagcaggtgtgtgcgggctactgtgccaacaacagcacctgcactgtcaaccagggcaaccagccccagtgccgatgcctacccggcttcctggggcgaccgctgccagtaccggcagtgctctggctactgtgagaactttggcacatgccagatggctgctgatgggctnccgacaatgccgctgcactgcctactttgagggatcgaggtgtgaggtgaacaagtgcagccgctgtctcgaaggggcctgtgtggtcaacaagcagagtggggatgtcacctgcaactgcacggatggccgggtggcccccagctgtctgacctgcgtcggccactgcagcaatggcggctcctgtaccatgaacagcaaaatgatgcctgagtgccagtgcccaccccacatgacagggccccggtgtgaggagcacgtcttcagccagcagcagccaggacatatagcctccatcctaatccctctgctgttgctgctgctgctggttctggtggccggagtggtattctggtataagcggcgagtccaaggggctaagggcttccagcaccaacggatgaccaacggggccatgaacgtggagattggaaaccccacctacaagatgtacgaaggcggagagcctgatgatgtgggaggcctactggacgctgactttgccctggaccctgacaagcccaccaacttcaccaaccccgtgtatgccacactctacatgggggggccatgggcagtcgccactccctggccagcacggacgagaagcgagaactcctgggccggggccctgaggacgagataggggaccccttggcatagggccctgccccgtcggactgcccccagaaagcctcctgccccctgccggtgaagtccttcagtgagcccctccccagccagcccttccctggccccgccggatgtataaatgtaaaaatgaaggaattacattttatatgtgagcgagcaagccggcaagcgagcacagtattatttctccatcccctccctgcctgctccttggcacccccatgctgccttcagggagacaggcagggagggcttggggctgcacctcctaccctcccaccagaacgcaccccactgggagagctggtggtgcagccttcccctccctgtataagacactttgccaaggctctcccctctcgccccatccctgcttgcccgctcccacagcttcctgagggctaattctgggaagggagagttctttgctgcccctgtctggaagacgtggctctgggtgaggtaggcgggaaaggatggagtgttttagttcttgggggaggccaccccaaaccccagccccaactccaggggcacctatgagatggccatgctcaacccccctcccagacaggccctccctgtctccagggcccccaccgaggttcccagggctggagacttcctctggtaaacattcctccagcctcccctcccctggggacgccaaggaggtgggccacacccaggaagggaaagcgggcagccccgttttggggacgtgaacgttttaataatttttgctgaattcctttacaactaaataacacagatattgttataaataaaattgtaaaaaaaaa

SEQ ID NO: 4034 - DNA, 580 bp, Homo sapiens
tataaactggcagttaaaaaaattgtaaagaaatcaacttgctcattttcattgtgtatttttgctctcaagcattttgcatgaactgtgtgtggattcattgcctacattggatgatgaagacttgagtgttgctactaagtgtgtccccgagaaagtgtcagagcctttacctggatcttcgcatgaaaaaggaaacagaatagtcaatggacaaggagaagggcctcctgcaaaacatccttccttgaagcctagcactgaagtggaagatcctgctgtgaaaggagcagtacaaaggaaagaatcgtacatgacattgagagcagaacaagccttaccagtggcttcagaggaagagcaagaaaggcatgaaagaagtgaaaagaagcaaccacaggtcaaaaaaggaaataatacaaacaaaagtgaaaaaatacaactttcagaaaatatatgtgatagtacatcttctgctgctgctggcagattaacccaacaaagaaagattgggaaaacgtatcctcagcaatttcccaagaagctgaaggaagagcatgataaatgcaccttaaaacaa

SEQ ID NO: 4035 - DNA, 504 bp, Homo sapiens
gaaagattgttctctggggccggactgagaaatgcctgaaggagacgacggaggagatccggcagatgggcactgagtgccattacttcatctgtgatgtgggcaaccgggaggaggtgtaccagacggccaaggccgtccgggagaagaccaccaaggccttcctgccgcgtatgctggagctgcagaatggccacatcgtgtgcctcaactccgtgctggcactgtctgccatccccggtgccatcgactactgcacatccaaagcgtcagccttcgccttcatggagagcctgaccctggggctgctggactgtccgggagtcagcgccaccacagtgctgcccttccacaccaagcaccgagatgttccagggcatgagagtcaggtttcccaacctcttccccactgaagccggagacgtggcccggaggacattggaactgtgcagctcaaccaggcctcctctctccatggacatgcatgcctcgttatcttgaaaa

SEQ ID NO: 4036 - DNA, 1493 bp, Homo sapiens
ttttttaatcttgcactttgaaaccgcgggaccgaggcagggtgcgcgcgtgtggttggtgccttttttttttttcttcccctccctaaactcctcatgtcagtctgtaaacattacctgagaattccccagccgaaacggctgctggggcaagaaacttcttgttagaactttccacctccggcttccccctccacctcttttaccgtcccaaccttaggagacgctttttctcccccagaggagaatttatctttttttttttttttttttctttttctcacccggtgctttgcatttgggaagaggtgatttcaagagtggccaggtgggacgcctctctcctccttattcggtttactatttattgttcggggtgttttttaattcctgtattgctcggcccggggagtttcgccccctgcccggctccgcggcggagcaatggctgtggaaacggctggggcgcgctggtgatgttccctctacagatgatctatctggtggtgaaagcagccgtcggactggtgctgcccgccaagctgcgggacctgtcgcgggagaacgtcctcatcaccggcggcgggagaggcatcgggcgtcagttcgcccgcgagttcggaggccggcgccagaaagattgttctctggggccggactgagaaatgcctgaaggagacgacggaggagatccggcagatgggcactgagtgccattacttcatctgtgatgtgggcaaccgggaggaggtgtaccagacggccaaggccgcccgggagaaggtgggtgacatcaccatcctggtgaacaatgccgccgtggtccatgggaagagcctaatggacagtgatgatgatgccctcctcaagtcccaacacatcaacaccctgggccagttctggaccaccaaggccttcctgccgcgtatgctggagctgcaagaatggccacatcgtgtgcctcaactccgtgctggcactgtctgccatccccggtgccatcgactactgcacatccaaagcgtcagctttcgccttcatggagagcctgaccctggggctgctggactgtccgggagtcagcgccaccacagtgctgcccttccacaccagcaccgagatgttccagggcatgagagtcaggtttcccaacctctttcccccactgaagccggagacggtggcccggaggacagtggaagctgtgcagctcaaccaggccctcctcctcctcccatggacaatgcatgccctcgttatcttgaaaagcatacttccacaggctgcactcgaggagatccacaaaattctcaaggaaacctacaaccttgaatgaacacttttcaaaaggggcggacattagagacaggatgaaagacattgctttgaggagccacggagttttggggggccacagcaccttggggcacacaacccgagcaaccttgttccatttggcatggcttctgcttggggttaagcaaggacaagct

SEQ ID NO: 4037 - DNA, 267 bp, Homo sapiens
  misc_feature (1)...(267): n = a,t,c or g
gtacatggctaactggaaaaataaataaaggtaccatacaggaaaaacaaaattgccctgtggggagaacatgtggtgtcatatggtgtgactaaataggatccagtaagataagacaaggtagagcatcttgggagtgattccatgtttcaaggttaaaatgttaactacattaaaggtagtaaaccagtgaaagaatcctcaagatccccagtgcagaatgtttgcccaggggataggaggtccactgttttggtattcnttagc

SEQ ID NO: 4038 - DNA, 740 bp, Homo sapiens
ggctttggccaagtaatttttgcctccttccctcgcgtggcctgagtttaggagcaagggtggccagagtcccttacccacagataagcctcccctcatgaaatgccactcaccccgggctaccattgacatcagggctgcatttccagccagcctggaagtaaaatttgagaggaagacaatattaatctgtgtccccacctagtgagctgtggacaggtttaagttgggtctccttcttcttcaccacaaaaacaggctctaagaaatcatgttactaaaaaatcagtgtaaagtctgtttaaaataaaaaagaatgttttctatgtctgtatatcttttgtgaatatttattaggatttcttattaaaaaagtgcaatattaataattgtacattgtcatccagaaacaaaactattggggggactttattaactaacttcctgcagttgtgttcctgtaaactcagtagtgattattatatttttcctatttttaatagaacctggtgtttaactctggatccattcactgtacaggatgtgttgtaaaaactaacatgggatgctgaggcagtaagagggaattcatttgtggcataatagttatgcatggaatgataaagacagacaaattccatactactactaatgtggttaattatttctagttcgatagtgattgaaaatcagtggtcactatttacatttcctaaagagcaagcatcctccagctccat

SEQ ID NO: 4039 - DNA, 467 bp, Homo sapiens
  misc_feature (1)...(467): n = a,t,c or g
gaagctattcactctatttaaagtctgctcttgtttcttgccttttcctttgtttacttaatcttttcatgactaatgaattttctgcctagaaattgtaaaggaaaagacaggcaagattttttttagagatacggataccttgtatgatactgctcacaaatttcctgacagaagtgttttcgcttatgcctttttagcaagaatagcaaaatggatatatatgtatgtatgagacactcctgggaaattacaatagcatccctgttgttatgcacagagtacttatgtcagggaccatatagaatgagaatttaggccagggcgcagtggctcacaggcctgttaatctcaacactttnggaaggctgaggcggtgcggatcacgaggttcagggagnttcgaggaccatcctgggccattgatggaaaccctgttcttttactaaanacacaaaattttggct

SEQ ID NO: 4040 - DNA, 380 bp, Homo sapiens
gtcttataggcatctggtggatagaggcaggggatgcacaggacacccctctttcccacctacccacacaccaaagaattctccagctggaaatatcaataatactgagattcaaaacccctggtctacatgtgcttgaggaacagtgaagagataatggagcctagccacctgtctaccatttgttttatgtgaccaatgcctcaaggagttatagggctgggctgtgaacagttagtaagtggcatatgattaattattcagtcctgagttattcagcgtacttcagtgaaaatcacagtctaaaccagggacttaataaaggattactgacaaaagagaactatatatgaatgaaacatcatctttttgtacttgac

SEQ ID NO: 4041 - DNA, 707 bp, Homo sapiens
  misc_feature (1)...(707): n = a,t,c or g
tcgaggccaagatgtatagcaaaggaaggaaaaattttactgaattccacccttgagacctaatttagcggtattgctaaatttcatcttcacatttttctgtgcacagactggacatatagatgcattttttcttctgcaaagtggacccatctacggtttggcagttttctttttcccttcctgtattcctgtagtgtggacatcttttcctgtcggtacatgaggctctaaggcatctttcttccagtcctgggaaaaggaacatttggcttgaaggatcctcggaaggagggactgcccctcaggtgtgtacattctcacgaccggcctgatccctgtgctggagaaagaacacgacccccgagtgataaccgtctcctcaggaggaatgttggttcagaaactgaacaccaatgatctccagtccgaaagaacaccatttgatggaactatggtctatgcacaaaacaaggtcagtgagaggcagcaagtggttctgacggagcggtggcgccaagggcacccggccatccatttttcttccatgcatcctggctgggccgacaccccaggtgtgaggcaggcgatgccggggttccacgccaggcttcggggaccgcctgcgctccgaggcccagggcgcggacaccatgctgtggctggccctctcctgctgccgcatccgcaacatnccagcgtgncgc

SEQ ID NO: 4042 - DNA, 294 bp, Homo sapiens
  misc_feature (1)...(294): n = a,t,c or g
gaaaaatgatttttttcttgattatatttcttgcatacggttaatggtagaactttgggaaattattttctgaaaatactgatttgtaggaaattctcagttaacgttttaaaaattatgtgtacatgctagttttaatttagggataggagtttttttccatctatgggaggataacagccnagtggggttttttaaaaataacgttagtggatgttttttttcccggatacccaaaaacaggtgtccnggccggggntcactttgggggagggtttnaggccgggtgggtcc

SEQ ID NO: 4043 - DNA, 433 bp, Homo sapiens
gtggagctggtcggcgatagagaagagcgagtcgtcgtgagcgcggtcggcggtttccagccaatggattcttggtcaacttgtggagattggctgacaccctggagaagccgaaaccagagagccttttgttttctcttttttcctgtctatgctctgtctcacttaacactacgttttctgctatggtctgtggttgatgacctcaatatgagtttcgattgttaacgtgtttttgtttgggaagtaattttgtttgaaaatgctctcacatacaggaattagggcctagattgtaagctcttgcagcagtcacatttgttcccgggctttgggtggttatttctaaatttttgagggtgctttgctatttcttgtgtgacccggatagctccctgggaactttggggtctgtgtgtgacacatgagactc

SEQ ID NO: 4044 - DNA, 622 bp, Homo sapiens
tagtttgtcaaatccagcatttgacggtcctctgggtgacccggagaacaccaaggctgtgagaaatgggaggcctcctggcagctccactccccagacccgcctctgccagggctccaggctcagcaggcgcctgtgcgggacagggcgacggttcaagaccaagtccggctgttagaccagaccctccaatccaggcggcctccctgctggggtcctgtgcggtcaggagtcccagggcatcccagggtggctgtgcaaacccttgttcccaaagatatggggcttgtcccccagctagcctgcccatgcggtggccacagcctcgggtgagttccggttccaaagtaccggctctcccttacgatcaagtgttcgaatgtgcttgaagcattccacgacacaccaaggcctggacctgacttcattgacgcctacttaggaaaaattgaggcagtctgccaagctttcagcaactgcttaaaaagctcaaaatggcaagtttttcctcgtgaacgtccttgtcttcagaagtctttttttagactatctggaaaagcaggcgatgcaaagacaaaagcccctccccggggggcggggggcaacaccctgacagcaacaa

SEQ ID NO: 4045 - DNA, 332 bp, Homo sapiens
ataccagagccacctgcgctctcccgtgcgcctagctgaccacccctctgagcggagttttgagctacctccctacacgccgccccccatcctcagccctgtgcgggaaggctctggcctctacttcaatgccatcatatcaaccagcaccatccctgcccctcctcccatcacgcctaagagtgcccatcgcacgctgctccggactaacagtgctgaagtaaccccgcctgtcctctctgtgatgggggaggccaccccagtgagcatcgagccacggatcaacgtgggctcccggttccaggcagaaatccccttgatgagggaccgtg

SEQ ID NO: 4046 - DNA, 592 bp, Homo sapiens
  misc_feature (1)...(592): n = a,t,c or g
ctcaacagattttattctactactgaaatccagtctgcagaaactaaaagttgtatagtggatatgaaatttatataaccaccatagttcagtatctcaggggtaaaaataaaatgtgactatttatttccacaaaactgaacctatcaattcaagataacttttgctttaaaactcacgactccttgaatcaatagtcaatttctggatctttctcctcctcctaggtcctcttctccctgaaggctgtcacagttcctgtgcagagagagaggggcactgcaggcacccagggcgctggactgccttttgtcagtctcatttgcagggcccccagctgggaggaacccgggagggaaggagggaaaaaagttttttcctcctctacactccccatgcatgactaaagagtaagaggagtcaggcaagggcagacatatatagtacccaggaggtggacaaacaactgccttggtggaaactctgcctttctggacttatcctggtgccactgagactgtgcaggaagaataagtggatcctcctattaaaggngattcatgaagctgcctgagtggactgagtggtcatt

SEQ ID NO: 4047 - DNA, 2182 bp, Homo sapiens
catgtgtggctatggtgaggtaggcaagggctgctgtgctgctctcaaagctcttggagcaattgtctacattaccgaaatcgaccccatctgtgctctgcaggcctgcatggatgggttcagggtggtaaagctaaatgaagtcatccggcaagtcgatgtcgtaataacttgcacaggaaataagaatgtagtgacacgggagcacttggatcgcatgaaaaacagttgtatcgtatgcaatatgggccactccaacacagaaatcgatgtgaccagcctccgcactccggagctgacgtgggagcgagtacgttctcaggtggaccatgtcatctggccagatggcaaacgagttgtcctcctggcagagggtcgtctactcaatttgagctgctccacagttcccacctttgttctgtccatcacagccacaacacagggctttggcactgatagaactctataatgcacccgaggggcgatacaagcaggatgtgtacttgcttcctaagaaaatggatgaatacgttgccagccttgcatctgccatcatttgatggcccaccttacagagctgacagatgaccaagcaaaatatctgggactcaacaaaaatgggccattcaaacctaattattacagatactaatggaccatactaccaaggaccagtccacctgaaccacacactctaaagaaatattttttaagataacttttattttcttcttactcctttcctcttgatttttttcctataatttcattcttgttttttcatctcattatccaagttctgcagaccacacaggaacttgcttcatggctctttagatgaaatagaagttcagggttcctcactctagtcactaaagaaggattttactctcccagcccagaaaggtgattctttctttaccatttctggggactttagtcttaattaggtacccttattaacaggaaatgctaaggtaccttctctgtggaacaatctgcaatgtctaaatcgccttaaaagagcccatttcttagctgctgaaatcagtgctctttcacttcttcagagaagcagggatggtacctacccggcaggtaggttagatgtgggtggtgcatgttaatttcccttagaagttccaagccctgtttcctgcgtaaaggtggtatgtccagttcagagatgtgtataatgagcatggcttgttaagatcaggaggcccacttggatttatagtatagcccttcctccactcccaccagacttgctcatttttcgagtttttaactagactacactctattgagtttaattttgtcctctaggatttatttctgttgtccaaaaaaaaaaaaaaaagaaaagaaaaattaaggagaatttttggtgttaatgctgaggaattgcttgagtggttagttgttaccaatttctcttttgaacctttggagctaaggatgctgagtctagagaaatgctagtctcaagccctgttaagtccctctgtttctagcccgtagttcatagcatcagtgaactggagccacaacagcaaattctatcagctgtgtaccatacagcttgtgctgaaggcgaatttcttgagccattactcagtataaagcactgagttctatctttaggatttatctttaagagcaaatttctggtcagctgtgcttctgcaacctaaaatatttaaagggaggtaggtgtgggcaggaggaggaatgataaattgggccagggcaagaaaaatctagcttcatataatttgtctgggactatacaccctatataatgttagttttacagaagtaatatgacttttgattgctacataccacaaagagtttatgaactgagatcataaagggcaactgatgtgtgaagaaagtagtcagtacatcctggctcatgctctgaaagaatatccagagaggctctctcaaagatcagggagatgtattcccatgccatgcaccctgcttcccagcatttctgcatggtcaagtgagctttatgctcatgagctttaagtatataattatccaggattttaaatcctcaacttgttctagcttgtgatccctcaaagttgggtcatacgttagtgctagatactagaaattttcacttttccactgatcagagagacagacattaaaaacaaaaata

SEQ ID NO: 4048 - DNA, 816 bp, Homo sapiens
attgagtggggtatatgcataagtgggagagaaaaaccaaacaatctacttcagttcagtgtaactatttaattgtgtgggtccatagactttttaatgaagatttctgactttgccactgtaaatgcctttaatgagcattaatttttgaaagttttacagagttttattagttttactactttatcttattgatctctgcagacttgtgctggtgcaagtacatgctgacaggcaatttgcactatatttggctgcagattcaaataggcagttctcttatttggtcgacttttgtgaatgtgtgacataaacagatgtaatgcatgtcacagtgacggagataacactgccatgataaaagtactcatgtttcccctatttggaaaaaaaaattgcttttagtatttttccaagttttcaaaagtgcccattttatgctgctgtgtggtttgttaaatctaaatgatttttaaacttttctcatagaaacttaactttggcaataaacattttttaaggtctctcctcttccttccccaacaatgtagttttctagatgagatttcagtatgattttatcagctatttcttatatatcataatctggcaatttctgaaaccagtcagaaaagacatatatttccatgcctttttaaagaattatttttacctggtttataatcacaggtggtggtcccgtcacttggttttaaaataagctagaaccaggatgcttccttattggaaaggctttgccagtccttaaggtacaatgagtgatgctgcaacttgcaaatgtaccagcatttaaaa

SEQ ID NO: 4049 - DNA, 554 bp, Homo sapiens
  misc_feature (1)...(554): n = a,t,c or g
ccctgtgtaacaactaaagtagaattatctctcatatgttgttgtttttcctcaaaattaccaaacaaagcaaaaaataccttgttttttatagttgagatgtcaagaagttaaattgaggcttaatgagcataggtagcttgtccaaggtctcatgaccagtcaagggcaagctggagttaataatctatatttatttgactcagcactgttttcatcacaacttgttttcccagcatcatgtagtgcatttagttttgtctttctcagggtatagtcaatatgcctgcaggagtttctatagcgagacatagaatagtattctgatcagttgccaaagaatctaggaaattagttgtattttgtgcaagctaatttaaaaacatgatggggctgttttaagaccagagtgggaaattcatggagaggaacttatactaccaaaagagcccaaatggacccaaatccatggggttaattggctttcacagcctttgggccntcccggggttcagcttctccantttagttttatttggcnggttcccgtggcc

SEQ ID NO: 4050 - DNA, 862 bp, Homo sapiens
gagagagagagagagagagactccaatttttgttgggatgcgggcattttgaatgtgatcatctttgctgaatgtcattatttgataacattttgtttatgttacttaaacatcattggataaatttgaactccatgggattttatctgtggattcagcttctgttggacaactagcctcatctccagtatcctgctggttcactctaattggtcattcctaatgcattagattatcaaaaagtataaattccgctgtgagtgagtgggtgttggcagtgtttgtataccatgatgcatggagtgtttgacgaagaaacaaaaaacaccaaaaattgcgagcctttaccctcctctatttctttaatctgttgtttgaagaaccgcattttgagggtgtaaccagtagtcacctctgggccaggttggaaaagaaatcaattttttaaaccactaatgcttgccaagaaatcgccttatgagaacatggtgtgtgtctctgacaatgcgtggcacatctaaattgatcattcataattttatctacccagtcatgtactggagagtggcaaaagtctgaggcacctgcatatctctagtccctgtgttctgcacatccccacggtggggacgccaccaagcctcagactcttaccatcccggtgcatgcaggtctccatgaagaagctgggactcattcacatttcaagatccaaatgctgtgcaaacagtgtaagcttagattttctgtaaatgaagggtcatttctctttttttttttttttaaagaaaatgtgtctgcaacatggattccaaagcattttcagcatcaaacatgaaaacattgatgaatgaggaacaat

SEQ ID NO: 4051 - DNA, 844 bp, Homo sapiens
  misc_feature (1)...(844): n = a,t,c or g
gcgaatggagagactgacatttcatctatcaagtatttttactggaattaaggaattcaagatgaatattgaagctcttcgggagaatctttattttcagtccaaagagaacctttctgtgacattggaagtcatcttggagcgtatggaggactttactgattctgcctacaccagccatgagcacagagaacgcatcttggaactgtcaactcaggcgagaatggaactgcagcagttaatttctgtgtggattcaagctcaaagcaagaaaacaaaaagcatcgctgaagaactggaactcagtattttgaaaatcagtcacagtcttaatgaacttaagaaagaacttcatagtacagcgacacagctggcagcagatctattaaaataccatgctgatcatgtggttctaaaagcattaaaacttactggagtagaaggaaatttagaagctttggctgaatatgcctgtaaactctctgaacagaaagagcagcttgttgagacctgtcgattgttacgacacatatctgggacagaacctctggaaataacctgtatacatgcagaggagacatttcaggtgactggccaacagataatttctgctgctgaaacattgacattgcatccatctagtaaaattgctaaagaaaacctagatgtattttgtgaagcctgggaatcccaaattagtgacatgtcaacactgctgagagaaatccatgacgtgtttgaaggaagacgaggagagaagtatggctacctttcactttcccaaagccccatgaaggaataatgccaaccctgaatccttttaagcccagacaagccttnctcc

SEQ ID NO: 4052 - DNA, 217 bp, Homo sapiens
ggatcaaaacaatattttggtgaactaaataaaaccagtttgctttcttgtcaccaaaaggactctctttcccactcctcaccaattcaaagcaacacacctgtactcatgatagaggtgaaggaagggagaggaggggtgagcacacaggtgtacatgtgccaatgcacactcaatcacaagcgtttgtgttatgtgtgttgggggatcctatacc

SEQ ID NO: 4053 - DNA, 428 bp, Homo sapiens
caaaattcattgcagaagaattcatcacctaggcacatagtcatcaggttatccaaagtcaagatgaaggaaagaatcttaagagctatgaggcaaaaatatcaggtaacctataaaggaaaacctatcagattaacagcagatttctcagcagaaaccctacaagccagaagagattgattagggtcctatctttagtctccttaaacaaaacaattatcagccaagaattttgtgtccagtgaaactaagcctcataaatgaaggaatgatacagtcttttacaggcaaacaaatgctgaggagaattcgccactaccaagccaggcactattaaggaacttgcttaaaagggagctctaaggtcttggaaaaaaatcttcggaaattacacccaaaattgggacctcctttaagggccacaattc

SEQ ID NO: 4054 - DNA, 1096 bp, Homo sapiens
catgtttgctcctgagtttggaccagaaaatccctttaggacacagcaaatggctgcccctagaaatatgctttctggatatgccgaaccagctcatatcaatgatttcatgtttgagcagcaaaggagaacttttgcaacatatggttatgcattagacccttcattagataatcatcaagtgtctgctaaatatattggttctgtagaagaagctgaaaaaaatcaaggtttaactgtatttgaaactggtcagaagaaaacagaaaagatggaaaaagtttaaacgaaaatgatgcatccaatattgatggttttttgggaccatgggcaaaatatgtggatgaaaaagatgtagccaaaccttcagaagaagagcaaaaagaattggatgaaatcacagcaaagaggcagaaaaaaggaaaacaggaagaagagaaacctggggaggagaagacaatcttacatgttaaagaaatgtatgactatcaaggcaggtcctatcttcacatacctcaggatgttggtgttaatctacggtcaactatgccacctgagaagtgttatcttcccaaaaaacaaattcatgtgtggtctggacacacaaagggcgtcagtgcagtcagattgtttcctctctctggccatttattgctgtcttgttccatggactgtaaaattaagctatgggaggtttatggagaacggcgctgtctgagaacatttattggtcacagtaaggctgttagggatatctgcttcaatactgcaggaacacagttcctcagtgcagcctatgacaggtatcttaagctctgggacactgagacaggacagtgtatatcaagatttacaaaccgaaaagtaccttattgtgtcaaattcaatcctgatgaagataagcaaaatctctttgtggctgggatgtctgataagaagattgtgcaatgggacattcgaagtggagaaattgtgcaggaatatgatcggcatttgggagctgtcaacaccattgtttttgtggatgagaataggagatttgtgagcacatctgatgataaaagcctaagagtttgggaatgggatatccctgtgg

SEQ ID NO: 4055 - DNA, 446 bp, Homo sapiens
  misc_feature (1)...(446): n = a,t,c or g
actggaaccttgtaggatgtgctttgccgggtggtttggaagtactaatgcatagatgaagcgaatcaaaatgtcagaagttcttgacggtagtgttgtaataagattctaggttttagccttaaccttgtccaagctggagtggacaggcacctagaatactttgcaactcccttcatgagaaggtggatgagacaggattaagggagatgagctaagacggatcaggaccctactctgaacatgtaggacaaggattgatttcatatgaaaattgtgggtatgcaagcattttgtatgcctgcactctaattttggaaaaatagtatttttttgaaattgggaatgttagggcaaacaaaaggaagtgttcattttattgtggttcataactaagagacttcatgcctgtagagattggggagactggaagtntgagtgagtca

SEQ ID NO: 4056 - DNA, 1559 bp, Homo sapiens
ggcgctctccagggtcttcaaagcttcacctttctccaaaggcagatgtgaagaacttgatgtcttatgtggtaaccaagacaaaagcgattaatgggaaataccatcgtttcttgggtcgtcatttcccccgcttctatgtcctgtacacaatcttcatgaaagttccgccaagacgtcaccaagtgtcttttcctaggtattatttccattccaccttttgccaactacctggtcttcttgctaatgtacctgtttcccaggcaactactgatcaggcatttctggaccccaaaacaacaaactgatttcttagatatctatcatgctttccggaagcagtcccacccagaaattattagttatttagaaaaggtcatccctctcatttctgatgcaggactccggtggcgtctgacagatctgtgcaccaagatacagcgtggtacccacccagcaatacatgatatcttggctctgagagagtgtttctctaaccatcctctgggcatgaaccaactccaggctttgcacgtgaaagccttgagccgggccatgcttctcacatcttacctgcctcctcccttgttgagacatcgtttgaagactcatacaactgtgattcaccaactggacaaggctttggcaaagctggggattggccagctgactgctcaggaagtaaaatcgataggtgtcgaacttggctgggagaatggctgcagatttcctgcagcctgaaagaagctgagctgtctctcttgctgcacaacgtggtcctgctctccaccaactaccttgggacaagggcgctgaatgaaccatggagcggatggcattgtcctgcagtcgtatagtatagcagtgcaggaacaaacagcacttgccagcaaagtctgtgtgtactgttaagtgtgtgggaggcagagagaggagcaggggccatgggcttcacagcatgggcacacatgtgggaactgcagacattcctctcacagctagaactgaaacaaaccctcttgctaggggtggtccgtgtgaggtgtcatcctgtccccctcataattactaatagctggaactggcagcagcctctactgggcttttactgtgatgtgttcagttcatgtcctaggaagtcagcttttgccccagggtgggaatccttatttggcttaggactgatccactttccatgttacttacatctgtgggtttttgttgttgctgttagaaaatttttggctggtgaaaacagcactcctttggctggagcacttgtgtccatgcatgtacttgggtgtttccctccatcctttctgatatgaccaaaaatcaagttgttttgttttttgtcaccttcactggcatgggctaaccacttctttttcaaaccctctgaacacctttttctgatgggtaacttgcaggaatattctattggaaaagataacaggaagtacaagtgcttcttgaccccttcctcaatgtttctagccttcactctccattgtcttttctgggctgtattacagcccctctgtggatcttcaactctt

SEQ ID NO: 4057 - DNA, 696 bp, Homo sapiens
acaggaagaaacaacaggaacacatatagctggaatgcagatgggatctgtgctacttacgctagccatgggatgattagaacaagataagagacatgaggaagacttcttcaaggaggtgctcaagccatgttttggaaaagagaactcaaggtctggcagggagaaaggagcaagagtagactttgagtctttgcttcagatgcagatcaagatgtggcaacctgttgtggagaactgggtcccttgagcctgtgctgtctctttttttctggtggctttgtcatttggaacaatgcataatgggctggaagctgagaaactctgagctgagggcaagtagagctgcagctgtctggcgccactgtaatgctgtctcctcctctgagtgagttcatcctggaaacattttctcccataagacatgcacaggtcttacgtttacatgtttcactgaaagaaatttgattccactgctgggatgacaaggaagactgaagaaacctaatcctaggtgctgccactgggacaaacaagaagcaccagacacagtgctgttttagggtggggcagaattatgctgagggaaaagttattatcactctttaaggccaaggaaaccacaatttttaaagaagcttctagaaattctacccagtagaaaataaagataaacttctgtaaaaaaaaaaaaaa

SEQ ID NO: 4058 - DNA, 267 bp, Homo sapiens
taagaagctgctacagctataatgtaaggttaagagtttattctttcaaagcaggtctcctcatctcttaaacgctatacatatgaagtagataaaaactggtttcttttttggtagcatttaggatctacaaaagtgatccttcaattacttggaatttcaaaaaattgaggttacctagtaacaatgcaccagtagaacacaaaatactctgactttgtttagtctgtgggaaaagaaaaatctttaaactggaaagattttgtc

SEQ ID NO: 4059 - DNA, 94 bp, Homo sapiens
gggcccctagaccccagctcaggtccagcccatggatgctttcaatatgtgtttttagcataaatgaagagatctatttagtgccagggcatta

SEQ ID NO: 4060 - DNA, 1257 bp, Homo sapiens
  misc_feature (1)...(1257): n = a,t,c or g
tatttttttttttactgatatattgtagtttaataaaacatagtttatacagttcattgaaaaagtattttaatacaaacaccacttatacacaaaaccaaatgttgatattcttgtttttaaaaattcttgatttctctaaaacactaagatgctatctcaatagagattgcttcacattttccagtttcttgatctgtgcatgtcacatgtaaagatccatcccttttcatagtaagaacagctaatatatcacgtaatccattttcttttttatctaaatcctggagtacaacctgtgcaaacttggtttcctctttggcagagttcttcccatcagactcatagagttcaaggcacactgaagatatgcttccaggggcttgcaatgtgtgttgtcttcgagctggcaaaggagtccctgatggaaacagcactgtgaatctactggctcctgattcgtccacacccttaactaaaatatctctggctgaacactctatcataagagagtcttccaccaacaggttttctttcccaataagaattcctgcttctatagctgcaccaatagggatcacttcatcaggagggatagaattgagaagctcaacagctgggaaaagatctttaatcagttgctgtagctttgggattcgagaagaccctccacaaaggacaaccttgttgatatcatctgctgtaaatccattttgatctaagagtcctctgattgcttctatacacttattaaaaagtggagaacaaagaagttcaaatcttgctctggacacattgcaatcaaaatcttgaccttcatataatgagtcaagaaaacagttggcacttcccaaggttgacaaagaatgtttcgctacttcagcactgttcgttaatttcatcatgntcgcgcatttcctctcacatcatgtttgaaggatctttggaactcagaagctagatactgtgctaaggtttctgtgaaatgtgcaccaccgatgttatcatcagtgtttgttgaaagaacccgatatattccactgttaacttccatgacgctgagagataaggatgttcctccaagcttaaacaccaaaatattgctttttccagtaggggagtcttgtccaattccataagcaagaagagctgcagacggttcgtgaattaatcgcaaaacattaaatccagcagctctagctgcttctccaagagcatttttttgcttttctccaaaatcaaacgggctcgtgccgc

SEQ ID NO: 4061 - DNA, 425 bp, Homo sapiens
gctctgtctcaaaaaacaaaaaaaagggaagaaaataagaatccatgaatcaatggagggcaattgagttactgtgatataatatgaaatatatttagtccctggttcctcacagagcttaaactctcagaatttcccaagtgataagagtgtctattgttataataagcccttattagcacaactgaatttatgttaataaagtgactcagggtgggacacctagctagcctcatgatgaggctggccatcagaaagaccaagtgattagaggatgagagggttggaactttcaaccccacccaccaaccactaggaaaagtggaggccgaaggagtccggagatcaaactgtaagactcttgaacaatgagatttgatgagcttctgagttgctgacatgtgtaggtgctggggagggtggct

SEQ ID NO: 4062 - DNA, 1092 bp, Homo sapiens
  misc_feature (1)...(1092): n = a,t,c or g
gaattcggcacgagcgaggctgtgtgccctctgccagcgaccccgaagcagatatctcagtggggttagtgagaaggttgaagggtatgtagggcccagggtgggtgtccctggggagccctggaaatgtgcatatgtgcatgtgtctgccggggtctccctctgctgcctgctgggaccctggccactcatttttctcctccttgggagctgggctcttctgccctggctctgcacataaggnttagccagcagctccagaaaaatcccgattcccgggatctgccacgagtcactcctactccaccctgatggccagcagaggaagggccactcttctcatgggcacagcatcctttgccgggggggcatccagcccgggtggccacccctccttatctctgggtggtgcacatgcccttctttccccactccctgccacgagccactgcacaggaggctatctgtagccccaagctgcctttctgttggacaccaactttagtcttgggctgcaagcaagcccagctgaggcgaagtggactccaggcagggaatgggttgcccaattctggtccctttcctttgctcagcccccctctgttctgctgattgtagggatgtgcagggctgggagttggcactccccccgagtggggaggtgacagcttgtcacagtagccaggcttgggtgggttcagcactagctcgggacggtgtgtcacacgtctatagtaaaccagttctctgggaggggaaaaaagccctgatttattgcatttgggcagcttctgtggtgtaaattctcccagcagtgtcccatgtcatgctgccagcatcactgaatgcactgaactcagagttgggaagagatgcacataatcgctctcccggcacacctcatgcctcttccctgcctccccattcccctggctgcacttccttgccttctatggggttgaaatgttgaagtctcaactgtctctgttcacaagagccaccaaaagttaggggacttcagtcctagcccccagatggccgccctgaagctctctgggctcctcagcaataaagcactttattttcaaaaaa

SEQ ID NO: 4063 - DNA, 344 bp, Homo sapiens
gggcacgagcactcaagggctgcagagagtacagcaacttgcgaaaaacacaagaagtcagcacgtcctgagctctatgatgagacgagctttgaactcgaagattaagtttcctggtcctgaatgacacataaagactttgcgagaaagacctccctccttgcctcacaaggaatataaatggatttctcccccttcctcaggacaattttggttcccagaccagcttgattgaactgagggagacgttgttgtttttaatgtctccagcttggactgcagagacccaaacatgattccagatttaagtctctcttcttccaagtattctactagaaatacac

SEQ ID NO: 4064 - DNA, 1425 bp, Homo sapiens
ttttcagaaagaaaggaagatgtttattgctttccataccttgtggaaggactagatatctcgctgtctttttgacctcctgtttcctttatagaacgcaaggcatttatgcattttggacaattcatttaaatgcacatattcaagataagaacagtatgtctccctttctttgcatatttatgacacattttatttgcacaaataatactgcatcagtttcattgagaaaagttggaattttgttatcaaaatcattggatgggaaactgcattttcagaacccacttcttttcctctttcactaacggtattccttacaacttgtaaacattcatgaagaactctatcattgtgatccatttttaaaccaatgcacccacttggagttataatttccccataaaaactttccatgctgatcactttttttcctttaatacgctttgagcatcagggcacactgctccatccatcgcaggcgctgcgggtggagtttctatctcagtgcacagcatgaaagcttgggtccatctgtgccacacaaaaccaagcctctcttgaagtgatttgtttacagtgtcatttgatggagtggaatgttctgcaactcattcgaactgttacagaagctttgctaaaaggtcaccactgctctctagaatttccaaatctggggcaccctctgggaggcttgttaaagataaggttctccatgggctttttccatacaaactagatcagattaacaagaggctacttttccatagaggtttgtgttcatgttgagaaggagagcaagaaagagagaacacaagtaaattacagttagttacctcaaagtgtgcaagcccactttctcccaattcagagggcatgtaacaagtgatagtacaatttaataggcctaaacaagtgtgttggtcttgaaaaagtcagaatttgcttttaaatgtccttcttgaatcaatgcattcttcaaatatagtcttgggagtcgattctaaaggacactgaatttcaccatttactcaaaattcaataggaaaatgacaactaattccttaaggtaatagaggctgtgcagggtaagcattcaaccggcactgcaccaacaaggttcaaattgttgtaactaccattttagtctagacctaaaagtgtcttgtgcttgctttctgccccttttcttatgaaacaaacatcttgaattttccaaacctcaaaagctcagctgtaaaactgtaggagaccagcaagaggaaaaggaaaatttccttcaaagacgtctctagtcgcagttgatcagttctgctttccccctcgaaacattaactatgtcttttgacacttgtctgtgaaaaacgtccaaatgtgacaaatggtagaaacaacatttctttaccctcctgcctggaacttccc

SEQ ID NO: 4065 - DNA, 179 bp, Homo sapiens
tctaaatgaggagatttttagctactcttaacacaaaaaaacaacaataaaagtaactatgtaagatgttggagacgttaatattcttcactatatgacctttttctctctatatgtatctcataacatcatgttgtataccttaaatatacataaaaattatttataaaatacttttt

SEQ ID NO: 4066 - DNA, 552 bp, Homo sapiens
  misc_feature (1)...(552): n = a,t,c or g
tggagaatggcagtgggatggcccttcagcccctacaggcagctccagagccaggggctcagggccagagggagaagaacagccagcacccaccagctctggcccctcctgggcaccaaggccacagtcatgggcaccagggtggcactgatatcacgtggatggtcctcctgggagatggtctacacaacctcactgatgggctggccataggtgctgccttctctgatggcttcttcagcggcctcagtaccaccttagcggtcttctgccatgagctgccccacgaacgtggctaccagccctgcttcgtcctccgtgagccccgtcctacgccccatgtgctcctgcaggggctggggctgctgctggggggcggcctcatgcttgccataaccctgctgtaggagcgctactgcccgtgaccactgagggctgatggggccagtggaaaggggtcgggttgcccttccttcccnccaaccacaggaatggaggcgggacacagggccagtaggagcaataggattttaataaacagaacccatcccg

SEQ ID NO: 4067 - DNA, 545 bp, Homo sapiens
agatatgcaaagcaggagataataaggagaaagcccttccctttcgagaagcccttccctttcacagcccttccctgcgattctgcagtgaaaagtgatgcccagagatccacacacagaacccttctaaccagccaggtcaagacttatcatcttatctcctctggcaggtcccctgtaatcaaaagagaggaagtgtctatctaaacaagacccttttgggtccttaggattcatgggcaaaaatcatcatgggcccccatcaggaaaaggaaaatcaggcaattaaaccaaggccaaggcaactaaaatgtataatgtggacctgactcatgttgggaggcagaattcagacactcacagatcaatcttgcaagttttctcttctttaagttgagctgctcaactttatgaactgtgaaatttacttacattctttcaacccacatatatcattgcagtttatgaagttgcagtgaacttgcccattcagctaaattgcagtgtttattcttgtctcatgtcgaaatacaacaatcttatgg

SEQ ID NO: 4068 - DNA, 4408 bp, Homo sapiens
ctcaaatatgtggatgacatacagaagggaaataccatcaaaagactgaacatccagaagaggcggaagccgtccgtgccatgcccagaacccaggaccacatctggtcagcaaggtatatggacttccactgaatccctctcatcctccaacagtgatgacaacaagcagtgccccaacttcctcatagccagaagtcaagttacatcaactccaatctcaaagccacctccccctctggagacctcactcccttttcttaccatcccagaaaatcgacagctgccacctccctcaccacaactcccaaagcataaccttcatgtcaccaagacactgatggagacccggagaagactggaacaggagagagccaccatgcagatgacaccgggtgagttcagaaggcccaggctggccagttttggaggcatgggcaccacaagctccctcccttcttttgtgggttctggaaaccacaatcctgccaagcaccagcttcagaatggataccaaggtaatggggattatggtagctatgccccagctgctcccaccacttcctccatggggagctccatccgccacagccccctgagctcagggatctccaccccagtgaccaacgtgagccccatgcacctgcagcacatccgcgagcagatggccattgctctgaaacgcctgaaggagctggaggagcaggtgcgaaccatccctgtgctccaggtaaagatctctgtcttgcaagaagagaaaaggcagttggtctcacagctgaaaaaccaaagggctgcatcccagatcaatgtctgtggtgtgaggaagcggtcctatagtgcggggaacgcctcccagctggaacagctctcccgggcccgaagaagtggcggggaattatacattgactatgaggaggaagaaatggagaccgtagaacagagcacgcagaggataaaggagttccggcaacttacagcagacatgcaagccctggagcagaagatccaggacagcagctgtgaggcctcctcagagctcagggagaatggagagtgccggtctgtggctgtgggtgccgaggagaacatgaacgacatcgtcgtgtaccacagaggctccaggtcctgtaaggatgcagctgtagggacacttgttgagatgagaaattgtggggtcagcgtgacagaggccatgcttggagtgatgactgaagctgacaaagaaattgagctccaacagcagaccatagaagccttgaaggaaaagatctatcgcctagaagtacagcttagagaaaccacccatgaccgggagatgactaaactgaaacaagagctgcaggctgctggatcgaggaaaaaggttgacaaagccacgatggcccagccgcttgttttcagtaaggtggtggaggcagtggtgcagaccagagaccaaatggtcggcagtcacatggacctggtggacacgtgtgttgggacctccgtggaaacaaacagtgtaggcatctcctgccagcctgaatgtaagaataaagtcgtagggcctgagctgcctatgaattggtggattgttaaggagagggtggaaatgcatgaccgatgtgctgggaggtctgtggaaatgtgtgacaagagtgtgagtgtggaagtcagcgtctgcgaaacaggcagcaacacagaggagtctgtgaacgacctcacactcctcaagacaaacttgaatctcaaagaagtgcggtctatcggttgtggagattgttctgttgacgtgaccgtctgctctccaaaggagtgcgcctcccggggcgtgaacactgaggctgttagccaggtggaagctgccgtcatggcagtgcctcgtactgcagaccaggacactagcacagatttggaacaggtgcaccagttcaccaacaccgagacggccaccctcatagagtcctgcaccaacacttgtctaagcactttggacaagcagaccagcacccagactgtggagacgcggacagtagctgtaggagaaggccgtgtcaaggacatcaactcctccaccaagacgcggtccattggtgttggaacgttgctttctggccattctgggtttgacaggccatcagctgtgaagaccaaagagtcaggtgtggggcagataaatattaacgacaactatctggttggtctcaaaatgaggactatagcttgtgggccaccacagttgactgtggggctgacagccagcagaaggagcgtgggggttggggatgaccctgtaggggaatctctggagaacccccagcctcaagctccacttggaatgatgactggcctggatcactacattgagcgtatccagaagctgctggcagaacagcagacactgctggctgagaactacagtgaactggcagaagctttcggggaacctcactcacagatgggctccctcaactctcagctcatcagcaccctgtcgtctatcaactctgtcatgaaatctgcaagcactgaagagctgaggaaccctgacttccagaaaaccagtctgggtaaaatcacaggcaattatttgggatatacctgtaagtgtgggggccttcagtcaggaagtcccttaagctcccagacatcccagcctgagcaagaagtggggacctcagaaggaaagccaatcagcagcctggatgccttccccactcaggaaggtacgctgtctccagtgaacctgacagacgaccagatcgccgctggcctctatgcatgtacaaacaatgaaagtacactgaagtccatcatgaagaagaaagatggtaacaaagattcaaatggcgcaaaaaagaatcttcagtttgttggcattaatggagggtatgaaacaacttcaagtgatgattccagctcagatgaaagctcttcttccgagtcagatgacgagtgtgatgtcattgagtatcctcttgaagaagaggaggaggaggaggatgaagacactcggggaatggcagaagggcaccatgcagttaatattgaaggtttgaagtctgccagggtggaagatgaaatgcaggttcaagaatgtgaacctgagaaggtggaaatcagagagaggtatgaattaagtgaaaagatgttgtctgcatgcaacttactgaaaaatactataaatgaccccaaagctttgaccagcaaagatatgaggttctgtctgaacaccctccagcacgagtggttccgcgtgtccagtcagaagtcagccattccagccatggtgggggactacatagctgcttttgaggccatttccccagatgtcctccgctatgtcatcaacttggcagacggcaacggcaacacagccctccattacagcgtgtcccactccaacttcgagattgtgaagctgctgttagatgccgatgtgtgtaatgtggatcaccagaacaaggcaggctacacccccatcatgttggcggccctcgccgctgtggctagcagagcaaggacatgcggattgtggaagaactcttcggctgtggggatgtgaatgccaaagctagtcaggcgggacagacggccctcatgctggcggtcagtcacggacggatagacatggtgaagggccttctggcctgtggggctgatgtcaacatccaggatgacgagggctccacggccctcatgtgtgccagcgagcacgggcacgtggagattgtcaagctgctgctggcccagcccggctgcaacggtcacctagaggacaacgatggcagcactgcgctctcaatcgcccctggaagcaggacacaaggacatcgctgttcttctgtatgcccatgtcaactttgcaaaagcccagtctccgggcacccctaggcttggaaggaagacgtctcctggccccacccaccgaggttcatttgattgattgtatgcaaatagccctttatttacatgccactattaagctgctaattgttcctgttggggtgacagatactgaatgtatacgtattgtgcctgagctcaccagcaaacagaagcatcaagcccaggggtaaaggctgaagctttcacagtgcagagactgctagcctgggcacacgcacctcctttctggccgtcttctgtgtagggcacactttaacccagtctctgttgctgttgagtctctgctccgttttgtacagtcacagggaattctgatctgaaggggcaccttctgttcactcccacaaagtggtgtctggttctcactgagacgttttaagatttttccacaaatatttatatgtactaaatgtggaaccattagaaagttcttccaaaatctcatttccagcatagttttggatttttcttttgtcttattttaaaataaggaagtcgagatgaccttgaatcattgg

SEQ ID NO: 4069 - DNA, 1067 bp, Homo sapiens
tttttttttttgctatgttggaaattggtttgttttgccttttattgaaaaggtaagatcatgtgattggaagaacacaactgttggcttgggaagaggactttgctgctgaagtgttttctaccttctgagtgtgtttaaggcaggatttggagggaaggaccagcttagggagagtgtctgagccacagcgtcaggatgggggaaaccacatgggatccatcaagttccagttgaacaggagcaagatcagaacttaggagggcagtgtcagctcccttgttggctgtcaaggaacaccgatctagtagaaacccacttggttgtgacccaggtagaggtagatgccatacatttgagatatgcgtccttaaggaacctgacaagcagactgaagggatggtaagtgtgacagcctgataagttttctcaaagcccaggatacagagccagtgttttctgtaactggagacctcagttaggccaacttcgaattccagagcaacgtaggaagtctattcagcagaaactcgacattgttcagtgtgtattgctgtgcagggtgcctattgtgacaggacacaaatgttactatgttttaatttgctatatttttgaatgggtaaagcattactttacttctcttggttacttgtaccaccattccacccctatccctagcctgccccacaaatctaatattaggaagcctcttaactgaaaccaaatgaacatttgggtcaggtgccagatgtctgctgcctagaatagctttttctaggtgtctaccaccttgaatttatctctttaactgtgtgttcaagtcctttgtcattgaaactagtttttcatatcttagattcagttgtgtatgatttaatgtcccttattaggagtctttaggcagggagggaagaaaaaaacagatttgttcatagcaatgtcagtatccattttggcacataaagatttttgatgagccctgtttgcatagagccagatgttttccctcccccaagagtatctacatcagggatgtgacttggtgcgagaatcaggggaaagag

SEQ ID NO: 4070 - DNA, 335 bp, Homo sapiens
aatatgaggggtctccctgcaagggatcagattctgtgaagaaatccccctctctctagcccaacacataccaatttgactctatatttgaattgaaaagaaaatcaatatagctgaatgaatgatctttttctattttaaggggaggaaggaagttaccaacgaaaaccatgttaatattttatgaaactatttttaaataatcctcactgttcgacagtcatgggtggctcacatctgtaatcccagcactttttggatcctggtgtggggtggaacacttgaggtcaggaattttgaaaccagcctggccgacattggtgaacccctgctcc

SEQ ID NO: 4071 - DNA, 406 bp, Homo sapiens
  misc_feature (1)...(406): n = a,t,c or g
gtcgacagaagcaccgccctgcccctaggctccagccatcccacaccagctcctaggcactgagagcacgagcatgggcacccagccaggcctcccaggctgctctccacgtcccttatgccactatcaacaccagctgctgcccagctactttggacacagctcacccccgacaggcncngttcctggcatagcgcgctggctaggactccagtaccgtgaagggaggcagtgagagcagacatctgtgcctcattcctgatctcaaggggaaagcaagaacaagggaggcttcctcaggatctcgaacctggcgggaagggagggancaagtctggtgtaacttctggccaaagttccaagcttggncattncaggtttaggggaggcttgtgttgggaagtcc

SEQ ID NO: 4072 - DNA, 931 bp, Homo sapiens
tcagcagcatttcacgctatttattccccaaaaccttctgccatagaagacagccaccatacagattggaaaatgtggacgaggagaaaaggggtgtatggtaagcaaaataaattgtatttttccatccttggggaggataaaggaactctttgcactgctataataaacagcccccaaatgccagtggtttaattcagtggagttcagacctcattcctatatcattgcagtgtggatgctcctggatgaaggctcttgtaggtaactctcctccagtcggtgattcagggacccagcctccttctgccttgcggctttgccttttaaaggtcctcagggtgctctccatgtatcttgccaatggggaacgagtgtggaggactcacaagcgggtctcacatcacgtcctccggggctaatacacatcccttctccccacactctgttggtcagaagtcactgcttggcgccctgctacctttccttctcctccaccacaggaggaggaggcacagcagtcccaaaatgacagttttgagcacagcgacagccaatgcaaccctgatggcagtgtccagacttaggtgccatgattctgagtgccctttgctttctgtgaccctgaggccgggctatggtggttgtgctgctgggcctccaggtggtggtggttgtgacagcctgggtgatggtgagtttggtccccttgatggactgcaactgctgcctccctgatctccgggtgtccagctcaactcggcagaaatacacagactggtcctccttccgcaggtttgagatcctgaggaagccgctctcctgaccctctgtccagttcagaaagagccggttcacataatccttgtgaatggaaggcggccttgtgctgtagaaggactgcccgtggaagtggccccgtctccaggac

SEQ ID NO: 4073 - DNA, 415 bp, Homo sapiens
  misc_feature (1)...(415): n = a,t,c or g
ggtaaagttacagataacagaattatatggtctaacatgcagctcacttaggcagtcctacctttccaaatgttttcttcaatgccatattcccagggaaaattgctgctgggtagttgaaactaggtgcctcactggacttcttcctattatttgggcaacttgtaaaagcttacaaactttctagaaagtagccctgaaaacagttccttcgttatgtttttagcaataccacagaatacatggttctatgttatagcttagaattgctactactcttacaaaattgggaacataggaaaagatgggacaaaaacctagtattaatgtatcattatttccatttcaagatgggcgttttgaacttcatctcttttccttcccaaaatcctaggtggaaattatccntggggat

SEQ ID NO: 4074 - DNA, 646 bp, Homo sapiens
ccctcgaggccaagaattcggcacgagcttaaggaagataatagctgggagaataacacactgtctcacttcagtagcaacgtcaaactacctcctcagataccccatttggagttgggaaatgaccaggagcttgctgactctgttctccatcttggatcatccctgcctaggcaaacaaaacattttttaggaaacttgccatctagtaatgggaacattgtcttaccttcagaagaatgtgtaaccgaacaatcacttctacctaaagtgggctcactggcttcatttgcagaaggaaatgctgatgaacagagcagcggcttagaaggtgcgtgcaaacgtgaatctggagttgctactcactaatgctgacaaagggttgaaagctccagagcagcatctcaagcatgttgcaggagtgctgaatggggaatcagtagagacttcagttcttaactaccgggaattaagtcctcacaagaatagactcttgtcacctcttcgctgttctgcaccaatgtcgctacataattctctggtgaaaccagagatgacagtccaaatgttttgagtttgggaagctacagccttcttcttctcagtcactggatgttcaaaacataactgattcttctttctctag

SEQ ID NO: 4075 - DNA, 750 bp, Homo sapiens
tttttttttttttttttttatattattcatctattttatattaacttttaattttttaattaaatttttaatagaatattcagggaggggttcttccaaggtgccactcaaacaaaatccaagcaggttcatcataagacgaaaaaggtacactctcagattggtttaaacctcctaacttaaaggacaaggaaggatctgtttttgtcttttggaaacccatgagctatctacttgttctttacttcagccaattagaagttcaactgaagatagctattgaacatcatcttaatgatgttataaacaggcaatttaaatattttattttgcataatccccaagctgggttatcacagagaaagcatctgagcttctccagctcgccaacctgcctgcattcgtagctactagccagtcctgttttctttccacaaagaaaacaatgatttgttgttttcttctttgtctgaagaggggctttcacaggtgggaggtgatgagtagtacattctcctttttgctgagattcatgttcttcatcttagccttcagcagcttcatcttattcatagttattgaattttcaattatctgttgcccagaagaagaaggctcagtttcttcatcctcatctgtatctgaattatacatagaaccaccactcatacgatgttctccttttctccgtaggacatgcaaatgaaaatctattttctttgaagagtcagataacggtgttaaagtgcc

SEQ ID NO: 4076 - DNA, 543 bp, Homo sapiens
cctctttgaaacagaagaatagaaagaacaagtgtgttatgagtcaggaaaacttatacaagtagctatttggcatgacatagtatggaagtcttcactttggagcacgaggaatctctaaggagtacatatgcttggataattctttttttgcttggataactcttaggcaatccgtttccaggtcttcacattccataggtactctttcctaatctgtgtgtttaatccatgggttttcaaaacacatggattaaaattttacttatttgaggatcagagtgtattatggataaggtagtaaaaacttattttatcaagccataccatgaaatactccaattgcagtcaatcctcacaatatttcatcttataaaatactgtttctatctgctgttaacaagaaataaggaacaaatttatgatgaaaaattatagatgtctatttaaagatgtgcagggagttacataatttaaaaaacaattatttgggtctaggaacagaagagtttgaagaccactgatgtagtatatgggagattt

SEQ ID NO: 4077 - DNA, 401 bp, Homo sapiens
ggctcaagagggttctggtaccatttattcacagactgtatcctcgagagagctgctatatatgggagtgtaccagccaactccttttccagtgtctgtaagtcacctcattaaagtataattagctgtctcctctgggagatcctaccccatcagacaagggcagtgagcccaagcagtgccagaggccctcagaaagggattagggtagatgattgcaactgaaacacaatcttctttctttgccagggtattttgggggttttgccccaaaatataccctgggcatagcattactgcagtcttggatgtctaccccaaacttccacaccatccttcgacccacagctgcacctttatttatttattttgctccagcctgggggacagagtgagacttc

SEQ ID NO: 4078 - DNA, 3775 bp, Homo sapiens
gtcctcctcctagccggactggagggagacaaagcagcgcccgtctgcttcgggcctctggaatttagcgctcgcccagctagccgcagaaatgactgctgtccatgcaggcaacataaacttcaagtgggatcctaaaagtctagagatcaggactctggcagttgagagactgttggagcctcttgttacacaggttacaacccttgtaaacaccaatagtaaagggccctctaataagaagagaggtcgttctaagaaggcccatgttttggctgcatctgttgaacaagcaactgagaatttcttggagaagggggataaaattgcgaaggagagccagtttctcaaggaggagcttgtggctgctgtagaagatgttcgaaaacaaggtgatttgatgaaggctgctgcacggagacgttcgcacgatgatccctgctcttctgtgaagcgaggcaacatggttcgggcagctcgagctttgctctctgctgttacccggttgctgattttggctgacatggcagatgtctacaaattacttgttcagctgaaagttgtggaagatggtatcttgaagttgaggaatgctggcaatgaacaagacttaggaatccagtataaagccctaaaacctgaagtggataagctgaacattatggcagccaaaagacaacaggaattgaaagatgttggccatcgtgatcagatggctgcagctagaggaatcctgcagaagaacgttccgatcctctatactgcatcccaggcatgcctacagcaccctgatgtcgcagcctataaggccaaccgggacctgatatacaagcagctgcagcaggcggtcacaggcatttccaatgcagcccaggccactgcctcagacgatgcctcacagcaccagggtggaggaggaggagaactggcatatgcactcaataactttgacaaacaaatcattgtggaccccttgagcttcagcgaggagcgctttaggccttccctggaggagcgtctggaaagcatcattagtggggctgccttgatggccgactcctcctgcacgcgtgatgaccgtcgtgagcgaattgtggcagagtgtaatgctgtccgcaaggccctgcaggacctgctttcggagtacatgggcaatgctggacgtaaagaaagaagtgatgcactcaattctgcaatagataaaatgaccaagaagaccagggacttgcgtagacagctccgcaaagctgtcatggaccacgtttcagattctttcctggaaaccaatgttccacttttggtattgattgaagctgcaaagaatggaaatgagaaagaagttaaggagtatgcccaagttttccgtgaacatgccaacaaattgattgaggttgccaacttggccctgttccatctcaaataatgaagaaggtgtaaagcttgttcgaatgtctgcaagccagttagaagccctctgtcctcaggttattaatgctgcactgggctttagcagcaaaaccacagagtaaactggcccaagagaacatggatctttttaaagaacaatgggaaaaacaagtccgtgttctcacagatgctgtcgatgacattacttccattgatgacttcttggctgtctcagagaatcacattttggaagatgtgaacaaatgtgtcattgctctccaagagaaggatgtggatggcctggaccgcacagctggtgcaattcgaggcccgggcagcccgggtcattcacgtagtcacctcagagatggacaactatgagccaggagtctacacagagaaggttctggaagccactaagctgctctccaacacagtcatgccacgttttactgagcaagtagaagcagccgtggaagccctcagctcggaccctgcccagcccatggatgagaatgagtttatcgatgcttcccgcctggtatatgatggcatccgggacatcaggaaagcagtgctgatgataaggacccctgaggagttggatgactctgactttgagacagaagattttgatgtcagaagcaggacgagcgtcccagacagaagacgatcagctgatagctgggccagagtgcccgggcgatcatgcttcagtttccccaggagcaaaaagcgaagatgtcggaacaggtggccagcttccaggaagaaaagcgcaagctggatgctgaagtgtccaaatgggacgacagtggcaatgacatcattgtgctggccaagcagatgtgcatgattatgatggagatgacagactttacccgaggtaaaggaccactcaaaaatacatcggatgtcatcagtgctgccaagaaaattgctgaggcaggatccaggatggacaagcttggccgcaccattgcagaccattgccccgactcggcttgcaagcaggacctgctggcctacctgcaacgcatcgccctctactgccaccagcagaacatctgcagcaaggtcaaggccgaggtgcagaatctcggcggggagcttgttgtctctggggtggacagcgccatgtccctgatccagggcagccaagaacttgatgaatgctgtggtgcagacagtgaaggcatcctacgtcgcctctaccaaataccaaaagtcacagggtatggcttccctcaaccttcctgctgtgtcatggaagatgaaggcaccagagaaaaagccattggtgaagagagagaaacaggatgagacacagaccaagattaaacgggcatctcagaagaagcacgtgaaacccggtgcagggccctcagcgagttcaaagctatggacagcatctaagtcctgcccaggccggccgcccccacccctcggggctcctgaatatcagtcactgttcgtcactcaaatgaatttgctaaatacaacactgatactagattccacagggaaatgggcagactgaaccagtccaggtggtgaattttccaagaacatagtttaagttgattaaaaatgcttttagaatgcaggagccctacttctagctgtattttttgtatgcttaaataaaaataaaattcataaccaaagagaatcccacattagcttgttagtaagctctgaccaagccgagatgcccattctcttagtgatggcggcgttagggtttgagagaagggaatttggctcaacttcagttgagagggtgcagtccagacagcttgactgcttttaaatgaccaaagatgacctgtggtaagcaacctgggcatcttaggaagcagtccctggagaaggcatgttcccagaaaggtctctggagggacaaactcactcagtaaaacataatgtatcatcatgaagaaaactgattctctatgacatgaaatgaaaattttaatgcattgttataattactaatgtacgctgctgcaggacattaataaagttgcttttttaggctacagtgtctcgatgccataatcagaacacactttttttcctctttctcccagcttcaaatgcaaattcatcattgggctcacttctaataactgcagtgtttcccgccttgggcttgcagcagaaaaacctgacaacatagtgtttgctaaggcagtaatttagactttaccttatttgtgattactgtagtgattgattgattgattactattaactacaaggtataatttactatcaccttatttaaattttatgaattaatttgaatgttttttacactaactaacttttcccaataaagtccactatgaaaccacgacaaaaa

SEQ ID NO: 4079 - DNA, 322 bp, Homo sapiens
  misc_feature (1)...(322): n = a,t,c or g
acgagaaacttagtgcagagtatgagcctgattttgtttaaaaaaaaaatgtgtgtgggtgtgtatatgtatctttgagtgtatatannnnnnnnnnnnnnnnnnnnnnnnnnnnnnnnnnnnnnnnnnnnnnnnnnnnnnnnnnnnnnnnnnnnnnnnnnnnnnnnnnnnnnaggagtttgagaccagactgggtgaaaccatctctactaaaaaatgcaaaaattagctgggcatggtggcgggcactgtatccancaacagggagntgagnaggagaanattgaaccagcngtggaggttnagtgnccgacngagtgga

SEQ ID NO: 4080 - DNA, 617 bp, Homo sapiens
  misc_feature (1)...(617): n = a,t,c or g
catggtaaagaaaacagcctgtctggctcaaagcaattaaatagaatgtaatggtgagtacaaatgagtgcacatgtcaggactcaggtctaactccttgtctcctgagcctaaagattgcaacatacacaagaacacactcctattcctaccccacacactcagggacaagcccaactaaagcttacaaggagaccagggtggctctgtccaggggagaagccagttatggaacagtgcattgagagccatggtaggagaggcccacagttctctggagcatgcagcaggggcaccccacctggccttgaggatcagggggagtcaaaggataaagcatggggctgatgacgtctgagggagtgtgatcctccatgtatggcctctgcctgctgtctcacatgtcccttctggtggtcacttgggctctaggagtatacgtcacctcagaccatctggcagaaatactccangctcctaccccaaagcacatgtaancttgctgctggagcacgaanacaatgtaatgaacatgaatggaggatttnganaccctgaccctgatcttacttgaaagctgctgctggtgtctgagtgtctttggctctattcntgcc

SEQ ID NO: 4081 - DNA, 329 bp, Homo sapiens
taggtagatagagcaagtcctgctaccataagtttaaaattattaagacaacgggcttttttaaattgctggtagaaccaaaggctaattttgcataggtttatatttttagacttaagaaattagcacctatataataccttcataccttctgcatcactatcaatttttctgtaatttcttatttgaatgcttcctaattctttacagaaaaaattaaaatttgtcacccaaccaggtgataataacaaaacaataatttagggaacatccagtaaatttggaattagttctcttaaattttgggtaatttaataggcttattggat

SEQ ID NO: 4082 - DNA, 376 bp, Homo sapiens
  misc_feature (1)...(376): n = a,t,c or g
tttgaagctgccacagaaaaatcttacagcaatcattgctgattagaaactgtttcagacaatcagcatgggtgttatttaccaaattccccccagagtcctaggcctcttctccagaaatatctgatgatggaagtgaggggagggcaacggtgctacaaaacacgggaacagaggttaaagagaagggcactactttcttgccatacttgttaaatggattgctttgttcaaacataaataatcttaagtccaacaccaaatacctgttactcctacatcaatctcattagtgggttttaaggacacagtactaggattttccatttttttaaaatcccttggggccctttaaaaaattttacaggnacacaag

SEQ ID NO: 4083 - DNA, 161 bp, Homo sapiens
aagaggcatgagccactgggcctggcccaacttttctagtgaatggtttttcacagtggatataccaattgatacccccatcagcaatatgtgagtgatcctaatgactaaaaccctctccaaaacttgactttattgtgtttcttcattttcaccaatcg

SEQ ID NO: 4084 - DNA, 476 bp, Homo sapiens
gacttgttatgaagggaaattaatactccctcaagatacgtgtctcaagaactaacaagtttcatcataaagaaaaaagaaccctgaaccacaaacctcttggcaattccaaacattcttgtgtttcatgcctttctgccggtcgctcaactgcctcagaggtggaagctggcaaggggggcaggcccggcctcgtgctggaagagaaggcggatggtgaggccacgtcccgaagccggcaactgctccagtacctgttctcactctcgcacggcttgagcgccacgagcctgcacaggttccatgagctggagagctgcgctgctcgcctgcacactgccaagtcctccagcgggctggcagggagtatgggcttctgctctgacgagatgggagacgacgatgtctttgaggacagcacatctgcaaaactgaagagtagggttctgcgggcgcccctctgctccacggaaaag

SEQ ID NO: 4085 - DNA, 740 bp, Homo sapiens
agcctgcccacccggaggccacaaccccagggaagcgggtggacagcaagatccgggttccggtccgctactgcatgctgggcagccgcgacttggccaggaacccccacaccctggtggaagtaacatcctttgcagccatcaacaagttccagccgttcaacgtggctgtttctagcaacgtgctgttcctgctggacttccacagtcacctgacacggagtgaggtcgtgggttacctggggggccgctgggacgtcaacagccagatgctgacggtgctcagagccttcccttgtcggagccggctcggggacgcagagactgcagctgccatcgaagaggagatctaccagagcctgttcctgcggggcctgtccctggtgggctggtaccacagccacccacacagcccggcgctgccatctctgcaggacatcgacgcacagatggactaccagctgcggctgcagggctccagcaatggcttccagccctgcctcgccctgctctgctccccttactattctggcaacccaggccccgagtccaagatctcgcctttctgggtgatgcctcctcccgagcaaaggcccagtgactatggcatccccatggatgtggagatggcctacgtccaggacagcttcctgaccaatgacatccttcacgagatgatgctgctggtggagttctacaagggttcccctgacctcgtgaggctccaggaaccctggagc

SEQ ID NO: 4086 - DNA, 1147 bp, Homo sapiens
  misc_feature (1)...(1147): n = a,t,c or g
cactgctgggccctgaggctgcaccaagtggcgaaggagccggctccaagggcgaaactgtgctcaggcccgggctggacgcagagccagagctgtccccagaggagcagagggtcctggaaaggaagctgaaaaaggaacggaagaaagaggagaggcagcgtctgcgggaggcaggccttgtggcccaacacccgcctgccaggcgctcgggggccgaactggccctggactacctctgcagatgggcccaaaagcacaagaactggaggtttcagaagacgaggcagacgtggctcctgctgcacatgtatgacagtgacaaggttcccgatgagcacttctccaccctgctggcctacctggaggggctgcagggccgggccgaagnagctgacggtgcagaaggcggaagccctgatgcgggagctggatgaggagggctctgatccccccctgccggggagggcccagcgcatccgacaggtgctgcagctgctctcctagtgggttcagcgcggggcggggccgctgcccagtgcagggctgcctcagaccacacagggtgcagctcctccggcggtgggggccgggttcaccagcagggcagcggctgagcaagggctttcagctcctccggtggtgggggccgggatcaccagcaccagagcctcgcaagggccccttccctcctccagaccctccttggccggtgacggctgtgacagtgatggcaggttcagtgccttcagcgcagagcgtggatgctctggaatcacccggacccctggccttggagggaccctccagccccaggaatctgctttggagggaaatgtctatttttctaccgggaatattttagagattggggcatgctggctcctcccgccagctgcaaacctgcaccttccgcctgattcccgatccccctgcgtgggccgcattcctggtcccctgcctgcgtctatcgaggggcctggctgtggcctgttttcctttgaccccacacagcgtcattgcgggtcatggggagcccctggtgggagcttgtggagtcggatcacgtacctgtgcagaaaccgcctctgtggctgcatttgaaataaaacccgacccagcagcagccgtgggtcctgctctgtga

SEQ ID NO: 4087 - DNA, 519 bp, Homo sapiens
tttctcatttccattgtttttataaaaatattttggtattgttgcctgcattttagccacttctaactttttgtattatgaatttggagaggataacaagccaactttgaccctctgccaagtggcgatggtgtttttcttccatgggtaagccattgtgaatggaggctggtggagcagcacactgtgtgaacctggcagcgctcatcttggcttgtttagcagtgcctctgtttacaccataagatgttccgcatgtgtccaaaatttcgcctgctctgaaaaacatgcccccgaggctctgtgcagtttggggccttggttcccacctgcagatgcggtcagttgcctggctcctggggccagagtttcctctgttacttgttgagtctcttgtcttcactgtcagaagctgaactgacttgggggctttgctgttgatccactttagcaaaccctgctgcagaggactgtaaaaacaaataactaaaaataaacttagaaaatacaactcagaaa

SEQ ID NO: 4088 - DNA, 1003 bp, Homo sapiens
gggcggagggcaggagcatccagttggagttgacaacaggaggcagaggcatcatggagggtccccggggatggctggtgctctgtgtgctggccatatcgctggcctctatggtgaccgaggacttgtgccgagcaccagacgggaagaaaggggaggcaggaagacctggcagacgggggcggccaggcctcaagggggagcaaggggagccgggggcccctggcatccggacaggcatccaaggccttaaaggagaccagggggaacctgggccctctggaaaccccggcaaggtgggctacccagggcccagcggccccctcggagcccgtggcatcccgggaattaaaggcaccaagggcagcccaggaaacatcaaggaccagccgaggccagccttctccgccattcggcggaaccccccaatggggggcaacgtggtcatcttcgacacggtcatcaccaaccaggaagaaccgtaccagaaccactccggccgattcgtctgcactgtacccggctactactacttcaccttccaggtgctgtcccagtgggaaatctgcctgtccatcgtctcctcctcaaggggccaggtccgacgctccctgggcttctgtgacaccaccaacaaggggctcttccaggtggtgtcagggggcatggtgcttcagctgcagcagggtgaccaggtctgggttgaaaaagaccccaaaaagggtcacatttaccagggctctgaggccgacagcgtcttcagcggcttcctcatcttcccatctgcctgagccagggaaggaccccctcccccacccacctctctggcttccatgctccgcctgtaaaatgggggcgctattgcttcagctgctgaagggagggggctggctctgagagccccaggactggctgccccgtgacacatgctctaagaagctcgtttcttagacctcttcctggaataaacatctgtgtctgtgtctgctgaaaaaaaaaaaaa

SEQ ID NO: 4089 - DNA, 669 bp, Homo sapiens
caaggaggaggtgctcatcctcaggacccagatcgtgagcgccgaccagcggcgactcgccggcaggaacgcggagccgaacattaatgccagatcaagttggcctaacagtgaaaagcatgttgaccaggaggatgccattgaggcctatcacggggtctgccaaacaaacaggctgctggaggctcaactgcaggcccagagcctggagcatgaggaggaggtggagcatctcaaggctcagctcgaggccctgaaggaggagatggacaaacagcagcagaccttctgccagacgctactgctctccccagaggcccaggtggaattcggcgttcagcaggaaatatcccggctgaccaacgagaatctggaccttaaagaactggtagaaaagctggaaaagaatgagaggaagctcaaaaagcaactgaagatttacatgaagaaagcccaggacctagaagctgcccaggcattggcccagagtgagaggaagcgccatgagctcaacaggcaggtcacggtccagcggaaagagaaggatttccagggcatgctggagtaccacaaagaggacgaggccctcctcatccggaacctgggtgacagacttgaagccccagatgctgttcgggcacagtgccctgtctccccgcctacatcctc

SEQ ID NO: 4090 - DNA, 1336 bp, Homo sapiens
ttttttttaaatgcaagtaaaaaaaagtttaatcacacagcactttatacagatatcgtaagcagtaggcattcacatctccacatgtacaatgcactgggaagcacagccccaccagtcactccgggtgtttctcaaacaagataccgactcggttccaaatgccacggtgtgtggtccggctccatcctcccgcagctctgctggctgggcggtcacagcacagcacaggtgtggagcccacttaaggctgacaagacgcatcatgctttggctttttttttgtctttttttctaataagagttaatatctttgcttttgagttttttttccaaccttaaatattacatacatacaccaaaaattacatagctgcaatgtgctcaacagcatcctctcggcctggagcttcacattatcaaaagcttagaaaacttgtaaacctctgggcctgtctctgggcactaggagagcccccgccgggccgtccccttcggattgagcctgcagtttgtaaggcgaagggctgacagtaggccttctaggtccaagagagggctggctcgcttggagttcagtgaagctgcacgcctgtcccagtgtgaccatgtgatggggggagggggccctagcacttgccctggccttgtgcagctgctcttgcccccagcagcctccgacagaagagcaaggcacctatagctgttgctttccctgcagctccctggtcctcaactccatgtgcatgtgtgaaggccaccacctctcctgggcgtcacccggaacctagcctggtcccaacctctcttagagagcaagttcaacaggcctgagggctataacgtggtcgacaggccatgtatagccgggagtcagtgacagcagctacaactcccaagggatagtgttgacgctggaggactagggaggacctgggtggtggtggcagcaggagggtctgggacacagggaggcttgagttgaactaaacaggttgaaagggaccaggggaattgttggcgcaaccccacacttcatgcaaggcacatgtgcctctcctgcgggtctgcagggaaccggcccagagagcccccgcggcaggccctggaacacccgcctctgacctgagaaggggcagcaagggagcaagtgccggacattctgctggggtgacaaatggaaaatcggcaacagggttccgattttctttgccacaggggacccgcctgttgaaagctcgcttcaaaatagaaacggcagcatctcaacacacttcttgcacttcagcatcaaactcaccttggggagaagagggcagtggcgagctgtgccgaa

SEQ ID NO: 4091 - DNA, 440 bp, Homo sapiens
  misc_feature (1)...(440): n = a,t,c or g
gccacaaagctgggcgtcatctttcattcctcccctcttccacagccagtcatttctatctggcaatggtttgtccttaaattcttttccagtcttcttttctacatctccattgcaataactaattgcccttttcttgcttaacttgtgtactgtcttattctaggtcctctggaacagtgctgtccaatagaaatattatgttattttaaattttctaagtagctacgttaaaaaagataaaaagaagcaagtnnnnnnnnnnnnnnnnnnnnnnnnnnnnnnnnnnnnnnnnnnnnnnnnnnnnnnnnnnnnnnnnnnnnnnnnnnnnnnnnnnnnnnnnnnnnnnnnnnnnnnnnnnnnnnnnnnnnnnnnnnnnnnnnnnnnnnnnnnnnnnnnnnnnnnnnacacctgtatccctgctacttgggaagctgagg

SEQ ID NO: 4092 - DNA, 271 bp, Homo sapiens
atttcctggctctgtacactgaggggacctggaggcaccccattagcaatgagcacacctggcttccccgtactggcttttaaataccattagtcactaaagaaaccagagtttcttgaagaaatggtggctggttccagggccagagtagtgaaagtacaagatgaagttggaatattttgttgtcccagaaaatatgaagaacgatgaggacacatccgaaggacacaaaagcctgcttgaaggggttccactggccaaacctgggaca

SEQ ID NO: 4093 - DNA, 489 bp, Homo sapiens
  misc_feature (1)...(489): n = a,t,c or g
gtgtttatttccctccagccatactgagatttttctcttcagaaagcatccacacatcctcttgtgtcagcacttttagacatactgctccttttgctaggaaagctcccctcactatctttcactctgtgtaggaagaatgctttgcatgctttgttccctctctgcattcaagtctctgctctggtcacctcttcaaagaggccttcgctcacccaactccacctaaaatatcaccatctgccctgttgttttcatcctccaaccttaggtgtgtactccatttctcccttctaggaatatggaggctccatggaagggtaggaaggcttcttgtaaccggcattgctggaggaggcagggatctagggggtccagtgtcngggggagggnattttcactggccttccattatggccctntggagganggcaggccatttttctntggcaggaggcctggcaggnacaagggggttattcttccatt

SEQ ID NO: 4094 - DNA, 1185 bp, Homo sapiens
gaggataaagtaaaacactagaaagcacttttattttttcaaaacacaaatataaatgctatgtcatgatattgttaataattttacaggtacctcatcatgttacccattcagatatgtgcttaaggtaggtgttcctacaggatcttgggttggatgttccgtttgattttattttaaaaataataaatcacaaaactaaaacgtttgagcaaggtcacttaaccctctccccaggtggttagttattattaccatcatcatcctcctcaacatcattattacttttcagctacatgtttaaaagaggagatctttaatatgtcagcttaactgggaaaatgtgtcccctggcacaggtggttttcagaagaaaagcccatcttcacaagagctttgtcctctgccttttaattttaaagtgcgggacccttgggtggggagggacggagcgggtgttccgggtctgtcactgaggaaccaattccctcagagaggccagagcagcatggatgcggacatgcaatctgttttcaaagtcgtagccagagaaatcctcctttgcttgaagaagtagagctctgcctcttcctacagtctctggtttgtctaatagaagacagccaagttcataacaggcatacggctgaacatataaattattctgacgacacaattcatctttaacagctcgctggaagtactgaacagcatcttctgagtttcctagacatttgtgtatggcaccaagaagcaaatactttaatccaacaacagatgagtcatccacttcatggcaagcttgactcatcctctgcaggttggggaaggaacagtttggaagagctttccacaagtacaacacttcaatagacgccaacacacagagcgctttggttggggtttgcttccgaaatcgctctgcctttttcaccgagaactgttcaatctgattgtttttccttttgaagagtttctgaacttctttaaagacaatctgtgccccatccacatcaccagtggctccctgacaaactgtaagaaaccataattatatttcttaagtacaagtcagggaaaatgccataagggatacctgaagtgatgatacttgaaaaaaaaaaaagcaggagcaaatatgtttaaagactattccacaatgggctggacatggtggttcaatgc

SEQ ID NO: 4095 - DNA, 290 bp, Homo sapiens
cttgatcccaccataagtcaaggagcatctgtacaccaactgttggttattatttttcatccccacaagacagatatagttctgcatttctcatgcagattctacaggcctttattctaattttttaatgtgccaattttatcatatttggtttcttcagtctttaatatattcatgtagatgtctgtgaattatagtctatctatgcttgtaggctttaaaatatatttagtcaatggtgggtagaaattttattttagcttaaaaaattaatcttataaaatgcctgc

SEQ ID NO: 4096 - DNA, 414 bp, Homo sapiens
  misc_feature (1)...(414): n = a,t,c or g
acaggtgtgtggtcctgctgagctgtccacgtgtcggaagacctgtttaagacagtcatttttgcctctccgccaactgtcttcagagaaaccattaggttaggtgatactngtgccagcaagggaagcaccatcgtccaggatctgcaaatctggttcctgggaaccccagactcctcagcagatctggctgtacatggatcagaaccacttcttcccccgcttaagctgtggtttgacccaagggtcagcatattaggactgcctggctggcattttaattgaaggtgttttcctttttgggaagtcttgttgcttaccctcttgcggcctagtttgggggagggagaacattcccatnctgggtcttgggggatttttcgggggagtttaggaattnggaaaaagctcttt

SEQ ID NO: 4097 - DNA, 480 bp, Homo sapiens
  misc_feature (1)...(480): n = a,t,c or g
tgtattcgcagttactgctgttaatgccagtgaaaaaacagttgtggaagcgttatttcagagggattcacttgttcgacaaagtcagctggtggtagattggttagagagtattgccaaagatgaaattggagaattttctgataatattgagttttatgcaaaatcagtatattgggaaaatactctgcataccttaaaacaacggcagctgacttcttacgttggaagtgttcgtccgcttgtcactgaattggtaaatgttctttgaaatgaaagttgccttcaaagttaactgatttttttttttcaggctgaggaattttttctcgtgggatctttgttttgctcttctaaaggtttgcacacactaacattttactctaaaacaactaagttgccttgggatcnggtgggatatattggaaacatntccgtgaccnttgaattgtaggaataggtgtggaagttacttactgt

SEQ ID NO: 4098 - DNA, 922 bp, Homo sapiens
tgtcagaacagttccaagatccagactttggtggtctgtctggtggaagggtcgttcgcattgctgttcacccagattatcaagggatgggctatggcagccgtgctctgcagctgctgcagatgtactatgaaggcaggtttccttgtctggaggaaaaggtccttgagacaccacaggaaattcacaccgtaagcagcgaggctgtcagcttgttggaagaggtcatcactccccggaaggacctgcctcctttactcctcaaattgaatgagaggcctgccgaacgcctggattacctgggtgtttcctatggcttgacccccaggctcctcaagttctggaaacgagctggatttgttcctgtttatctgagacagaccccgaatgacctgaccggagagcactcgtgcatcatgctgaagacgctcactgatgaggatgaggctgaccagggaggctggcttgcagctttctggaaagatttccgacggcggttcctagccttgctctcctaccagttcagtaccttctctccttccctggctctgaacatcattcagaacaggaacatggggaagccagcccagcctgccctgagccgggaggagctggaagcactcttcctcccctatgacctgaagcggctggagcaggaggaactccagttcgtcccggcatccatggcagcccgcggttaggtgcgccagggtttgctgatgttgtcttgtgctgttccactcttggctccagcagacccactgtcccagaaaagcctgatcctgtagtttatgtagaatgccacatctgcgtcctcaagacctgtttcatccatttgggaaaagatgttgggaaaggccactttgctcgcaggggtgaggggaaggatagagaatctatttttaataaataacattctaga

SEQ ID NO: 4099 - DNA, 1077 bp, Homo sapiens
cgtctatggtttccgcggctcgctagaaggagtgcggtccactggaggtctccctacattcttcctccattatctcactgcctccggtggctgctgggataccggagacgtcgggtcccggctcgactcagtcctccagccgcccggggaatacctctagttcttcccggccgccgccgcctccgccccgccgcttcctcctccgcctgccggcctcgcttcgccgcgccccgtccgcgcacgtcgtccggcccgcccgcaggccagcttctctcgggagcctccacccaggcgcatggctccatgaagcaaggggaggaggcagagcgcgagagatcccgtccgccccagccgcgtctgggccaggagaaaagcaaaaccatattcctgctgctgtcagttttgatgcactgagaaaacttcagagacctaagctttttccagagaagagaagctttactggtgttccagccctaaggctcatatgacattaacagacaagacacttttcagaaagacaggcaacgtgttggaccttccggagcttctcagaagacagagggttttcttttgaggtaaatttgatagtacattttgatagtacaggaggcgatacggcatggtgacagaaaagcgccggcttggttagcaggaccacctgggcagggctgcaggctgtgccacttaccaggcaggggaccttgggccagctgcttggcctcactcaccctgtttcctcagctgcaattgggatgaacagactgcctgcttcggggttgcctaaaactcacattgcttaatgatgtgaaatgcttagcgcagtgcctggcatagagagaattctcattagatgatacctcagctgggctttaggagctacagaagaagctgcatctccatgagctcagcgtgtttctagctttcctttttgttttctattcaacctttcacccaactcagcttctcaatccctaaatgacaaaggtttgggaaggaagacttggaccgatgcttgcatttgtttctgagaattaaacgttatgttttcttcaatctaaataggtttgcttgtaaaaa

SEQ ID NO: 4100 - DNA, 791 bp, Homo sapiens
ttttttttttgatctttctagaatgttatttattaaaaatagattctctatccttcccctcacccctgcgagcaaagtggcctttcccaacatcttttcccaaatggatgaaacaggtcttgaggacgcagatgtggcattctacataaactacaggatcaggcttttctgggacagtgggtctgctggagccaagagtggaacagcacaagacaacatcagcaaaccctggcgcacctaaccgcgggctgccatggatgccgggacggactggagttcctcctgctccagggtacaagtccacaaagagagacccagcggcccagcagcagcctcctgggcaccaccagaaagcgatgtacttaagggcctcaggcggtcgagaggcaacgtggcttccacatgtgtgggaatgagactaaaaagctggctcaaagcaaaatatgaacttataggaaaggagggccctggactgggcaggaagagagagactcgtggcaattctagagatggcagtgcccagccatcaagttctaaagagacccatttgggagtgactctgcctttagccaggttgagctcacagacacacaggcccagaggccgaattcgcggccagcttccaggtgtgccggggcctctcgttgcttttaacagtccagccagagagggttcagttagtgagagtatcttcccatgatcaaacacagatgcccgagtttctcttcactatttcttccgcttcagtttcatatcttttttgttctttgtctctctgttcttcaacttct

SEQ ID NO: 4101 - DNA, 404 bp, Homo sapiens
ctgcacaaaagtgtctgtcatttagatgtaatccaaggaatctaattttcttttgttgcctatgcttttggtgtcatatcccagagaacattgcccaatctgatgtcacgaaagtgtggccaatgttttcttttaggcgtatgatacttttagcgcttggggtgaggtatttgatccagtttgtgtgaatttttgcacctggtgtgacatagggtccaccttcattcttctgcatgtggaaatcaagtttctccaacaccatttcttgaaaaggctgcttttccaccaatgagctttcttagcactcatgtgaaaaatcattggaacatataggtgagaagttatttctgggctcaaaaacaaacaaacaacaacagacaacagataaggatacagcatgggcc

SEQ ID NO: 4102 - DNA, 888 bp, Homo sapiens
  misc_feature (1)...(888): n = a,t,c or g
ggccacatgtggcctgtgactactgtattggacagttcagtactagacaaaaactagcataattaacttagttctagccatgatttctatttggattaaaattaaactctaatcacagttaactccacgtgcattcatgcagctgacagttatatttgttttattggagtcatgatattaaaatcagcgtttgtcaacctcaggggatatttagcaattgtcgggagacatttttgatgtcatgactagggcagttattgacatttagtgagtagaggccagggatcctgctaaataacctggcattgggacagcgccccacaacaaaggattatcctggcccgaaatgggtagtcgtgccaaggctggagtaaccttgtgtttaaaagtacctgtggcagactanggttccagatttcatggttctgctcacgtatcatgtttgaaaaaattttggctattaaagatatgtattagatggtcttatcctgattattacctggatacaacttgatcttttctaatattttcagaaagtgatgggataaccctagaagaggactcagaatgatatttatattttaagtgagtcttaaaacctcctcttatttctacaagttatatggctaaatttcagattgaacagggattcagcattctgccatctcctcatggaaagagaggctccctcatctgaagcgtctctgaaatctacccttgcaagcttcagacaaatcagttgatctccctgagccacacggcctcattctgtgagggagggaaagattagccaaagagttaattttcattccaaatcacttagctgttagactgatctgtttgtagcagttgtttgtctcatttttgctctgtgcattttttgagaca

SEQ ID NO: 4103 - DNA, 313 bp, Homo sapiens
cgggaggggtggcgggagcggtcctggaaataatctgtcctctgtcgccgggaactggcgaggtagttccttcgcggtggagagacctggaatggccaaatatcaaggtgaagttcaaagtttgaaactggatgatgattcagttatagaaggagtaagcgaccaagtacttgtggcagttgtggtcagtttcgctttgattgctaccctggtatatgcacttttcagaaatgtacatcaaaacattcacccagaaaaccaggagctagtaagggtacttcgagaacagcttcaaacagaacagggtgcacct

SEQ ID NO: 4104 - DNA, 561 bp, Homo sapiens
  misc_feature (1)...(561): n = a,t,c or g
gtgatcacctctcggatcttcagggccgggcagagggtgatcccggtgtatcctgggatttttacagcagttctgtgttggaggaaaaagacgggtttgcctgtgacctcctacataatcctcctgggagctcagatcaagaaggagacgatccgatggaggaggatgatttcatgtttgaactctcagacaagcctcttctcccttgctacaacctccaagtgtcagtgtcccgcgggccctgcaactggttcctcttttccgatgtcttgaagaggctgaagctttcctcgaggatctttcaggcccggttcccgcactttgaaatcaccaccatgcccaaggccgagttctacagggcaggtgggcttccagttcagctggttgacccttgccgagagctgggganggttnggacgacagatncccccagggttcctttnagattttggagttggtcngtaangagccagacnaatttggttctagggttcnaggtggatttncagttttgnaaaantttaaccggnaaaaagccctnctttntttttctttcgaatt

SEQ ID NO: 4105 - DNA, 316 bp, Homo sapiens
gtgaattgataggactaccataaaattactttttgatttctggaacataacagcagaaaatgtattgaccttttgcaatttgaaacaatactttgttgcctcatattcaaaatgcagtcttggtttctagcatacctggaaatgtcagtttaccttatttgtgtctttctgtgttccaaaaaaggatttatgttcagctgaataagccgatattattctaaactatggaaatcaaatgacctgagttctattctagcattctaatgaatcatttgaatgaagcctgaaaaatgaacattaacaagttactgggggc

SEQ ID NO: 4106 - DNA, 513 bp, Homo sapiens
  misc_feature (1)...(513): n = a,t,c or g
gaactgggtgtgaagaggccgttcaggtcctctctcaggatgatcaaaaccacaaacacgtagagacacctccaggttcacactaggttggtcagtgaaatgcgtcctgagtgttttctaggcattctgaagacttgaagggtgcaagtgtcatcctcctttgcaggtcttcccagaaacatccacctcctgagtcatggcgacttgtgtatgatacgatcccaggcctgggaatctcctgagaagggttaaacagggatgcccaaaatactagccctggcaaatttttcctagtcatttggtggttagtccagagcttctcaaacctgctgaagcgagcagggaacacctctctgtataaatggttatctccatttaagggtaacctccaagggtaatccaagngccttaaaaaccntccggccttttccgtccngtttttccgggtcgccgcacgctgtcccggtccgcgctgtccctgcgtgccttgtcgccatgcctccgaaaattgag

SEQ ID NO: 4107 - DNA, 769 bp, Homo sapiens
ggtggtgctgctgctatgagctgcaccatcgagaagatcctgacagacgccaagacgctgctggagaggctacgggagcacgatgcggccgccgagtcgctcggtggatcagtcggcggcgctgcaccggcgggtagcagcctatgcgggaggcggggacagcgcttccggaccagtatcaagaggatgcatccgatatgaaggacatgtccaaatacaaacctcacattctgctgtcccaagagaacacacagattagagacttgcaacaggaaaacagagagctatggatttccttggaggaacaccaggatgctttggaacttatcatgagcaaatatcggaaacagatgttacagttaatggttgctaaaaaagcggtggatgctgaaccagtcctgaaagctcaccagtctcactctgcagaaattgagagtcagattgacagaatctgtgaaatgggagaagtgatgaggaaagcagttcaggtggatgatgaccagttttgtaagattcaggaaaaattagcccaattagagcttgaaaataaggaacttcgagaattattgtccatcagcagtgagtctcttcaagccagaaaggaaaactcaatggacactgcttcccaagccatcaaataactgaactctgaatgatggctggagattgtctatcaaggaaggaagttactgtcttcccattcaagtactgtccattaagtgtcttgcctcagatttgatttaatcttaattaaaggtatcaggtggca

SEQ ID NO: 4108 - DNA, 150 bp, Homo sapiens
ggtggcatattaaaggttctgcagtgagaaagacagttcacctctattaaacctccattctcctgatttataagaaacaaacaattcttaagttatgcctcttaaacacatgaagcaccaattttgttaaagactgcctagatttacacc

SEQ ID NO: 4109 - DNA, 619 bp, Homo sapiens
aaaaacccttgatgtgctgagaaccatcatggggaccaggatagaaggcttcttcccactcaaagcttttctccctggagggtgggcactgctgggccatgccacttcaaagcagtgttcctcagcaggaaagcggaggtcaccacttaccggcctcctccaccttctcggcttctcttttctccatgaacccaggtcgtccagcaggtacttccaagttcccaggtctgtctgcctaagagccttttgaggagaccgtcctggagccccatcagtgcccagatcctggggtaccgaccattgctgtctagcagtgggggatcctgtggtgggaatggggtgggcttctcatccatgttgcttctgggaagagagggttgcctttctgggctagggaggtggctggagcttctgccctgaccctccgctagaaaccagttatatccattgccacagcaatactgtgtaacaaatccgccaacactcggtggcctgcaacagtcagcactgatctagggcaggagtcagcagtctgggcagggtgattcttctggtctaggctgtgcttgtttgtttagggccagtgggttgttaagtccccaggggatgctccatggtg

SEQ ID NO: 4110 - DNA, 757 bp, Homo sapiens
ggcacgagcttgctgagtccaaaccccaagcacagaggggcatgatcagacagctctggggcacagactgagaggaggaactcagcacacccttcctttccaaggccagtgacattgtctgacagtggttgccttcaagcaggcagcatcttggttgcttccagcggcagaaagctggccagtgcttacacacgtgtttccagttggagtgttatcagccatggttctgacaatattctagggtccttagatgagcacacttcctgtatctgcattatttttatagcattagtggggttgatccccagggctcacctttccttaccaaataccatcccatcagactgggattaatgggaggagaagctttgaagtcacatgctcaatttcttgagttgattttccccgacctcatcctttgatgctaagcaagaagggctctgaaattctcattcctatttcttacatgaatgagtagtgaagaggggagatgctggttttggtgcagggcaaaattagtctttctggtttaaacacgaatcacgataacccaaacccaggaaggtccatgctgcgattccctggcacttcttctttgtagtcacttcggtgaccggcttgtgctgcaccctccattgactagccttggcatattgacaagagcaggatgcccctccatccatcccatcctcaccatctctccttccaaccttctcactacggggtgggggaggggaaagccccaaatcttaaaaaa

SEQ ID NO: 4111 - DNA, 756 bp, Homo sapiens
gtcccggcagctcctggaccagagtcgagcccggcaccaggcaatctttggcagccagacactacctaactccaatttatggacaatgaataatggtgcaggttgtagaatttccagtgccacagctagtggccagaagccaaccactctgccacaaaaagtggtaccacctccaagttcttgcgcctccctggttcccaaacccccacccaaccacgaacaagtgctcagaagggcaacatcccagaaagcttccaaagggtcctccgcggaagggcagctgaatggactccagagcagccttaaccctgcagcctttgtgcccatcaccagctctacagatcctgctcacactaaaatatgaaccacaaacacacagagaaacaacctgttcaccactcctgggtgcatgattgagggtgaagcatccaccagcacttcaaggggtccatagtatttttttttttgctgcctcaaagtccccaaagccttcgagcagaagtggcagtagatggttgccaatcagccaatgcagactttcactgggacaacaagaaagcagatcttctgggttttgatggaacttggcagtggggacattcagctgatgcattatataccccgtcagagcacacttgtatcttttaccttccctttgccccatgcccccaaactgcttaggtcttctctgtccctttactgctgctgcacagagatgatataaaagaggctctttggctatttgcaaaaaaaaaa

SEQ ID NO: 4112 - DNA, 640 bp, Homo sapiens
gacttcctggtggaaaaccgcgactcttgcaagtgggcaaacttgacgttttcgctatgggcaaacgcgggagccggagccagagccagctactcaacaccctaactaaaaagcagaagaaacatcttcgagatttcggcgaggagcatcccttctatgacagggtttccagaaaggaagcaaagccacagatttgtcaactgtcagagagttcagattcttcagattctgaaagcgactcagagagtgaaccagaacaagtttctggctaccacagactacttgctacattaaagaatgtttctgaggaagaagaggaagatgaggaggaggaagaggaagaagacagtattgtagatgatgcagaaatgaacgatgaagatggtggtagcgatgtcagtgtggaagaagagatggctgcagagtctactgaaagtccagagaatgtagctttatctgctgaccctgagggaaaagaagatggggaagagccaccgggcacatcacaaacatcccctgaagagttcacagatgcaaaacacgagtcactgttcagcctggaaaccaattttctggaagaggaaagtggagacaactcttctttgaaagcctctcaagatccatttcttcaacatgtgaa

SEQ ID NO: 4113 - DNA, 415 bp, Homo sapiens
gcatccgcccgcaagtgcgccttcctgacttactgctgggtgcgcggggctgggggtgcgagtaccacccctgaagtctcttcctgggcgacctccggggcctcattctaggcctccttaaagagaaggatctaaattaggaaaaggaagtgcccttatccacgaccaagctcttccacctgcggagctcgcttagtctgcacctcaacccgtgcggaaagtgactgccctgtttactgaggaaaaactggggctcagaaagataccatggagtagtttgaaacaggaacaaaatcttctgaaagctcggagcagaagccttttttgggtcaacatggaggaaaaaagacggcgagcccgagtttcaggggagcctgggctgccccctgttaaaagccaggccattgctcagcca

SEQ ID NO: 4114 - DNA, 741 bp, Homo sapiens
  misc_feature (1)...(741): n = a,t,c or g
ctttcattttttttttttttttccatgagcactgccacatagattttaatttgcctaaagatgatagcgattttgagctgtggttagggataactgttcccacagtagacctattaccaacatgagttgctggctttcatttaataggactccaagctggcaaacaaaccccaccatcttcccaacagccacatcatgagatctagcagcaccagcctcttgaagtggcttctcagtggaaggtttgctccgtttcagtgaagcttctctctcaaagctctgacgtcaccagggtgcccctcgagggtctggatagactgtccgaaaggtcaggttcactctcggttctctagagtggtattctttgggcactcgatgctgccagtcagcttgtgtcgctccttccatgattaacaaggtcccatgatccaagggtatcttcactctttccacatatgtgtagtctccattctcttctggtggtggcttctttctcatctcaaatgtgcgtgtggcaccaaaacttagtgaagcaataatggggcacctccctagtgagggttcatcatcactgtgccagtccacgctgtccttctcattgcgataaagattgcagagtaaggagttgaaggtgtggccagtgttctcttcaatgcggttctttagtgtgcgcacaggngttgccagtgaggatttggttccatagtgattcttgaataagtgtaaggaagttctccatac

SEQ ID NO: 4115 - DNA, 924 bp, Homo sapiens
tttttttttccgacgtctgcgtctgcaagtttcattccgtatctggctgggggagggtggtctccgaggtggatggagtgagggtggaggggacagagatggtccctgctcccacctccccgagcccacctgggaagctgcgtggccgggctgctggagacatcccgagccctgggggagaccagaggtgtgggtgtttgggcttcatcttccaggtacaaggagatacatttcatcaagcagttcctgatttcatggagttctttgaggggctcggctggggaggtccctctccggggggctccaagtgccggacctggtggtttctggaaggatcaaggacaagtcctgggagtttcaggcttcggcagtaacagtgtgttaattgcacttgttcgattttctggcagaagccaggagagacggggacagcgtgcttctcttcggtgaccatcccaggcgcccagaggtgaccagacttctgtgtggtctgggacagtgcagggctcaggccaggaaggaccactgtggtgaaaaggcccactgacaattctggtgaggagtagggtggcaggggttcagccagggagaggaggtggctgccttttctcagggccctgctctcaccttccaaaggtctagggtacacagaactcatggattttggtctcgcagccccaggggccacacagaaaaaggggttcaactggaagtttgcagcatctgggaaaggccaattctggcagaactggaagattccagaccaggggagaggcgtccagggagagaagagtcctgcttgggttgatcataagcaaagtggacatcgttccgaagaggcagagagctcactatgttatcgataaaaaaattcttggccgggcacacgtcgcacgcctgtaatcccagataatttcttttaag

SEQ ID NO: 4116 - DNA, 616 bp, Homo sapiens
  misc_feature (1)...(616): n = a,t,c or g
tgagccaaagcacattggagttggaatgtatcagcatgacgtatcccagactttactcaaggcaacactggacagtgttgtagaagaatgtgtcagctttgtgggagtggatattaacatctgttcagaagttttgttaaggcatattgcaggactcaatgccaacagggccaaaaatattattgaatggcgagagaaaaatggaccctttatcaaccgagaacagctgaagaaagtgaaagggctgggcccaaaatccttccaacagtgtgctgggcttcatcagaatcaaccagggttatatccgaacgttttgcagtcagcaaacttgaaacttcaggccaaattccaaggagttgctgtgacatcttcagcagacgttgaggtcacaaatgagaagcagggcaaaaagaagagcaaaactgcagtgaatgttttactgaagccaaatcctttggaccaaacttgtattcatccagaatcatatgacatagcaatgaggtttttgtcatccattggngggacactgtatgangtttggaaagcctgaaatgcaacaaaaaatcanattcatcccttgaaanggaaggatnggcaaaattgcanaaggattgca

SEQ ID NO: 4117 - DNA, 345 bp, Homo sapiens
tggctgggaatctgaacttttgaatttcttgacgtttgaattctcaaccagaaccattgcattaaggacatttttggaaaacgggacttttacattttaacaggttatcgaatggtggaacatgcaggcctagctgtattagcagaaacacaaatgcgtttgaagtatagctacgtgaaattagacaattcatttccacttagtgcaaatagcaaagccccatttctgagagagagcctatttgccaaaaaaaaaaaaaatcacaatatttgaataactatcccagctagcatcaggatcaggcacacgatgtctaccctagtcaaagtacttacccaattttgg

SEQ ID NO: 4118 - DNA, 1073 bp, Homo sapiens
ttttttttttttttttttgccagttgataaaacttttaattaagacacaatagcgcgggatataaaaacacaagaaccacataaatatcgaagaagttgtataccattttcatgtaaacagttttgcttacgagcaaagccctaattagattctggcctgaaacttttggcagatgacgcgtgttcagccaggctctgtagcgatggtgacgtggaagccaggtcagtccccatgttgacaagcatgcaacttgaaaacattgcacaacaagcaacacaaagagtggagaagctcacaacacttcaaggagacctcacaaccttcacaactgcgtaacgacagagacccacgctccctcctttccacgcactgtcttacacatgggagaccttctgtgactctctagcttgtttgatgctatataaccacttgatgattctagcatttctttcgatggcagaaatgccatacggcacgcggtcattggcactgtcatcatttctaaggtcactgttactgtcctgagactgttcacagtctgagctgatcatgcttgcgctgcggaagttgagggatattatgtcagaattagcccttgcaaagttttccattcccaggttttccagctcttccgggtccagtccacagtagttgaagaacctctccacgtccgcgtccactcggaaatatctgtcactcaagtctgacttagaccgctggagggagggtcttcggctgactccacaagctggttccacagggtcggcctcgggggacttcatggaggcgatggctgcgattttgggcttgggaggcaggggaggggcagagctactgcaggggatggccttgaggggcttcacgctggtcaaccttgcggatgtccgaagagctgtgggacacgtggaggaaggactcggcgtgactgctccagcagtctcctgcccacgtgggagccgccctcctgcgggctcctgcggccctgcgtggggtagaccttcagggactccgcgaaggagtgacggtgcaggtcagtggcttccgaccggtggggcggccagttgcgggagct

SEQ ID NO: 4119 - DNA, 576 bp, Homo sapiens
  misc_feature (1)...(576): n = a,t,c or g
gcggcacgaggaagaagtaatctgtcaatcagaaaccatagctgagggccaaaccagtattaaagacctttctgaaagatgggacccaaaatgaggcatcttacccaggaatgaacagtgtccacaagtctcctttcatcagggccatatctgtatcagtggagacagaaaaattaacaggtacttcatctgacactggaagagaagctgtagaaaatgtaaacttcaggagtctaggtgatggcctgtcaaccgataaggaaggtgtccccaaatctagggaatccataaataagaaccgttctgtcactgtaacctcagctaaaacatccaatcagttacactgcaccttaagtgtagaaatttcacccaaacttttagcaggtgaggaggatgcactcaatcagacttctgagcaaactangtctttgtcatccaatttcatattggttanagacttaggtcagggcatacagantttcagtaacagncaggcctganaccagagaaatgtctgtcctgatgcttncgagggccattacntggatttgganccaccnaccagncttccttcat

SEQ ID NO: 4120 - DNA, 592 bp, Homo sapiens
  misc_feature (1)...(592): n = a,t,c or g
gagcgcgagaggtcccgtccgccccagccgcgtctgggccaggataaaagcaaaaccatattcctgctgctgtcagttatgatgcactgagaaaacttcagagacctaaactttttccagagaagagaagctttactggtgttccagccctaagaaacctttgttcaagaaaacggcagatgctctgttgaatccactggagattgttctgatactaaggacaagtatcaaccatctttcctgtgaaaaattccctctcgtactttagttctgtggatccaaaatttatagcattcttctaccaccacaggggctcatatgacattaacagacaagacacttttcagaaagacaggcaacgtgttggaccttccggagcttctcagaagacagagggttttcttttgaggtaaatttgatagtacattttgatagtacaggaggcgatacggcatggtgacagaaaagcgccggcttggttaacangacacctggcanggctgcaagctgtgccacttacaagcaagggaacttgggcaactgcttgggctcaatcaactgttcncaactgcaaatgggatnanaaacgccg

SEQ ID NO: 4121 - DNA, 542 bp, Homo sapiens
  misc_feature (1)...(542): n = a,t,c or g
tggactagccgaggagcagggctttgagactcctgttgggacacagttggtctgcagtcggcccaggacggtctactcagcacaactgactgcttcagtgctgctatcagaagatgtcttctatcttttgtgaatgattggaacttttaaacctcccctcctctcctcctttcacctctgcacctagttttttcccattggttccagacaaaggtgacttataaatatatttagtgttttgccagaatctctcttgctttgccattaagcagaagaactagtttccctgtatagcctgctgggagagacccacttctagggtatgggggatgcagcttcaagcccagtgcccagtgtctccctgttaactgcaggaatgccaagcacctgggccagagcagcccagccccaatatgcttaggaggagacagagttccctctgtatagcctctngggacaagaaaaagaaaacacaagnaatgtatnacactnggaaggtttggggcctccttgcctggcctttctntttgtttctgtttcct

SEQ ID NO: 4122 - DNA, 2714 bp, Homo sapiens
atatcaccattacactcatgctagggataacaatacttcctctattataaatgctacttgacctttatttactatgcttggcataactgggcatgcttaataaaataaaaaaaaaaaacattcaaattttttcttttactaatcgaagtacctaattttatacaatttgcacacttttaatgttagtaacagaaacaatgaaattattttacttcttgatacttaagagtttaactccaagacatgcactacaaccacataatagatttttgtcatcaatatgatggtcctggcatcttatatattaaggttcacactttaaattaagtactacttgctaaaacgaaaacaggtaaaaacaatgaacagacggttcacgttaagaggaatacgaaaagccaataacaatactgacataacaatcttatttgtaatgaaagaaatacaaattttaaaaatgacataccattttttaattacattggcaaaaattaaaccaaaaagaatacctacaattgaccaaggagtattctggcagggggagggaagtcacatacatatagtactaattagaggggtaaattgtataattaaagccctatgaaccagtcaaaccaatcattccacttttagaaactttctcaaggacataattaagcatgtaactcaaaatgtacaaggacattcactctgccactgcttgtagtaataaactgcagataatcaaaatgtctaacacagaaaaaagtgagtaaattatggtaaacctttcttatgggaaggcagtgggcttccaattccattcttcacacctagcttagcttctttcttttcaacagagtctacttctaacagagaccaaaaatgtcagacattgcctttctctgtaacctgatctaagtcaatggaaactgaggggaaatcttctggaggcttttgttaaaaatcttcctcatggataaaacaaatgagaagaccgaaatggccttttcctgcctttgagatacaattttacaaagatgtaaaactggaagttatagcagcagctcttgtgatcgagaggtggaatagcctaaggcaaaacaaaccaactgaggtcaaggcaaaaaaagtgtgtctttaatgacacccctgaaccctgtgttatgtcaaacaatttcctaggttacttaggccaattatatttggacactgttacctctggccaaaagcatcctaacttgtattagctatacaacagagtacattagaaccacaaaaagttatgttacagaggtatatttatgaacagtagatgtgcagttaaaaagaatttacaaaacagtacgtttccatgtttttaaaaaaatcaaatatgtcaatatggattcatttgccactgaaaaaggtctgaaaagatactcaaggttttaagagtagttacctttgaaagatagcatttaaatgtttccttttgcttatgtgcattttctatttttttctacagttagcatgtatcactttaagattccgccatccttcctatcaattcaatgcaatttaggaaagaaagaggtaaacatgtattccagtgagctatcttgaaccagaagtctgctttttttttttaattggaaaagtttctgttctttaaaaaaactttcgtgaaataaaatttgatactaaacaagcatttatttttcagtgaatacggaagatcacaaacagttttcatttccctttgttactcagggaatcatcatgactttgtaccatttcgtattggaatttcttctgtgaagcaaaaacagtccccaaaatgaaggatcttcaggtgtcatgggaacggcagatgacattaaatcattaaagttgagaatagtaaattgcctctgggttggtttggaatcatcctgagatggaacatcctgatgtcctagatccatcggggtttcctaagagcaactgcaacaaaatggtgctcatctattttgctttcccccaaatgccccattcctttttcctcctctccatccaggaataaacgtgtttctttataaacttggcctatatccaagtttaatggagatagatcaaattcaagccgctgcaattcaaatcctagtccaacaccaatggcttttatgaagctttccttaagtgcccaattcctataaaacatatccagctgagtccactcatccttaaagcttctgattgtttcccattctttgttggtaaactttcttttcataatatgaaagaattctggaattgaaccacgacctggaaaactagtcttcattatatcaattccaacttgcagctcaggttcagcagcaagcactgccatagtctccttgatgagagatgttaaagttgaaattcgggtaaggattcgatgagtcctttgcaagaactggttttccttttgcagttctttgcaaacgaatatgattccaagggatattcaatttctctgcaactaatttccttatcatcagacgaaccagccatggctgccttagcgtcccgggcaaagacgaactggccaatgcgctccttctcctcgggctgaatcgatcgcactgccagcagccattcggctcggctcggcagccaagtgccgcaggaaaaggcccagcgcacgccctccatggatggcaccaagcagaaccgtttggcagggaaaaccatacactgaaagcggacctcgccgctatctcgggcctgac

SEQ ID NO: 4123 - DNA, 388 bp, Homo sapiens
ggggacttattcatttcaccgtggttagcaatgatgctgtccagcacagtcacacagctagctgacaaaataaagcccaccagcaacccaggagagacagacttccctttctcacacccatctctgattgttacataaagggcttgaaacctaatgacaatgtcataaataggtattttatgaaagctgcagaaatcttcctacaatggttcctaaagcaaaccttgggtaaggaatgagcctgatgttgaataacccaataattgaggccatgtgggtatttttcaggattgtcttgaaaattacatctttaaacaatctgggtcggggacatgggatggctggactaactggccctgtttccctgttacttacagcattggggggg

SEQ ID NO: 4124 - DNA, 614 bp, Homo sapiens
  misc_feature (1)...(614): n = a,t,c or g
ataactaaaatcagaactgggtgtgtgaagacattattactgcttctacagaaataaaaaaggattataagacagtactgtgaacaactgtactccagtaaattggataactgagatgaaatagacaaattcctagaaacacaaactacnnnnnnnnnnnnnnnnnnnnnnnnnnnnnnnnnnnnnnnntacatttaaaaaacaattactagtttaaaagctggtattgtaatttagtttgtaaattctaacattttgttttctatataatttaagctactcatgtattactagttttactcatgaattactggcttgtgttttagggcactcaatacataaagatgtgattttgtgatatgagcaactgaaaaggatggggacagagctgtaaaggggcagggtttttatgttattgaagttaaacttaatataatcaagttataacattatatagagaattggaaaactggagnnnnnnnnnnnnnnnnnnnnnnnnnnnnnnnnnnnnnnnnnnnnnnnnnncaaacctttaactagatggactaggaaaaaaagagaaaagactcacataactaaaatcagaactgggtgtgtgaagacattattactgc

SEQ ID NO: 4125 - DNA, 388 bp, Homo sapiens
  misc_feature (1)...(388): n = a,t,c or g
ggaaaaaagtatccgccatacagagaaaaactagggtaaaggacatgaaacttgaactgaagaaactcagatgtcctttaattttatgacaagattgctgaaaactactaatagttggtactttgttttcaattaactgtttttaaccaagataatgactttggtattaaaaccccttttttttttaaacccgtgtagtacaggaagaaaagtgaattggatatgattttgaggatatgggcatctcaaaataagctccagtggaacaaacaatacccttaaattctgattttgtttcctttatgtactttgatagttacttgttctggtagcagtatagcatagtgggtaataggcaaggggctnctgggagccatactagggttgg

SEQ ID NO: 4126 - DNA, 262 bp, Homo sapiens
ggattcagctcaatatgcagaattctgtgaaagtcgacaattaagtttctccaaaaaagcttccaaatttcgagactggttggactgcagcagtatggagataaaacccaatgttgtcgcaatggaaatcttagcatatttagcgtatgaaactgtggcacagttagtggatctggctcttcttgtgaggcaagacatggtaaccaaggcaggggaccccttcagccatgccatttctgcaaccttcattcagtatcacaac

SEQ ID NO: 4127 - DNA, 2349 bp, Homo sapiens
gatgactgggctcctgggcctttctccagtaagccacagaggagtcagctgcaaatattctcttctgttctacagacctctctcctcttcctgctcatgggactaagagcctctggaaaggactcagccccaacagtggtgtcagggatcctagggggttccgtgactctccccctaaacatctcagtagacacagagattgagaacgtcatctggattggtcccaaaaatgctcttgctttcgcacgtcccaaagaaaatgtaaccattatggtcaaaagctacctgggccgactagacatcaccaagtggagttactccctgtgcatcagcaatctgactctgaatgatgcaggatcctacaaagcccagataaaccaaaggaattttgaagtcaccactgaggaggaattcaccctgttcgtctatgagcagctgcaggagccccaagtcaccatgaagtctgtgaaggtgtctgagaacttctcctgtaacatcactctaatgtgctccgtgaagggggcagagaaaagtgttctgtacagctggaccccaagggaaccccatgcttctgagtccaatggaggctccattcttaccgtctcccgaacaccatgtgacccagacctgccatacatctgcacagcccagaaccccgtcagccagagaagctccctccctgtccatgttgggcagttctgtacagatccaggagcctccagaggaggaacaacgggggagactgtggtaggggtcctgggagagccagtcaccctgccacttgcactcccagcctgccgggacacagagaaggttgtctggttgtttaacacatccatcattagcaaagagagggaagaagcagcaacggcagatccactcattaaatccagggatccttacaagaacagggtgtgggtctccagccaggactgctccctgaagatcagccagctgaagatagaggacgccggcccctaccatgcctacgtgtgctcagaggcctccagcgtcaccagcatgacacatgtcaccctgctcatctaccgcaggctgaggaagcccaaaatcacgtggagcctcaggcacagtgaggatggcatctgcaggatcagcctgacctgctccgtggaggacgggggaaacactgtcatgtacacatggaccccgctgcagaaggaagctgttgtgtcccaaggggaatcacacctcaatgtctcatggagaagcagtgaaaatcaccccaacctcacatgcacagccagcaaccctgtcagcaggagttcccaccagtttctttctgagaacatctgttcaggacctgagagaaacacaaagctttggattgggttgttcctgatggtttgccttctgtgcgttgggatcttcagctggtgcatttggaagcgaaaaggacggtgttcagtcccagccttctgttccagccaagctgaggccccagcggatacaccaggatatgagaagctggacactcccctcaggcctgccaggcaacagcctacacccacctcagacagcagctctgacagcaacctcacaactgaggaggatgaggacaggcctgaggtgcacaagcccatcagtggaagatatgaggtgtttgaccaggtcactcaggagggcgctggacatgacccagcccctgagggccaagcagactatgatcccgtcactccatatgtcacggaagttgagtctgtggttggagagaacaccgtgtatgcacaagtgttcaacttacagggaaagaccccagtttctcagaaggaagagagctcagccacaatctactgctccatacggaaacctcaggtggtgccaccaccacaacagaatgatcttgagattcctgaaagtcctacctatgaaaatttcacctgaaaggaaaagcagctgctgcctctctcctgggaccgtggggttggaaagtcagctggacctcatggggcctggggctcgcagacagaagcacctcagaatttccttcagtgcctcagagatgcctggatgtggcccctccccctccttctcacccttaaggactcccaaacccattaatagttcagacacaggctccttcttggagcctatgggcttcagatgtctttgccccatttgtcacctcgcacacttatagcgtttcctcctcgaaattctaccaagactggtcaaatgttgctgaggggcctggaccagctgtcctttacaccaccttctcaacactgctgaaaagaacccaagagaattgtcacacatgacacaagatgtacataatatcatgctcactgcagtgttatttaaaataaaaggcaggaaataaaaaaaaaa

SEQ ID NO: 4128 - DNA, 440 bp, Homo sapiens
gaggaaagcttgatgtttaaagaaattacgttaggaatcattttgtagtttaattatccactgttaggtcagatttttaatgtataatttttattttagatatttttttcctagaacaagcatataggtgtttctataaatgaccgtgagaaattctcttatattcctttaattttgtggtggtatttttataaagtgactgctttgtgctagggataatctatcttgaaatgactgcttttactggatgtaatctgtcattttaatttcctgttaacagatggtggtggcattagaaaaaggctttgggtcttattcatatcagaagctaagagcctatcattttatttcacctaacttttattagaagatatacatatatatatatatattctatgtgaaaatatacctaaggtagaagatatttggtaagcctaggg

SEQ ID NO: 4129 - DNA, 510 bp, Homo sapiens
  misc_feature (1)...(510): n = a,t,c or g
aaatggagaaattaagtcctttccatgggatcattccttctgtgnacagagatcacaaagcaagagcttcagcatcctcgtgaaaaagacattttgttctgggtgtcatcatctccttccactacagcttgcaattggaacaagcttcacatcctgggggtgctgcctatctctgtcttgatttctgtctgtctattcctcccattgacaggaatgtcgtttgtatcctccacgcagcagtttgcagaaatccagcaaggtttatggtttatgttgcccagcatgtataaacacaacgctctcaaatgctttttaaaaatctatgaatttgttagatgtcttcacatcctggtcctcctaccccaattctcaaacacaaagtactctgttgccctattatagtcctgcgatagttcctggctaagattaagttgacggtctaagccccaagaaaggcctggcattttcatagcaggctttccccagtgctttgagtctttcctctctcac

SEQ ID NO: 4130 - DNA, 433 bp, Homo sapiens
  misc_feature (1)...(433): n = a,t,c or g
gattcccctcctatagtcctcagtgtaacaactctgcagatgtgtcctttcctggagccctcagtgtaacatctgtgcagatgtgtcccctcctatagtcctcagtgtaacaactctgcagatgtgtcctttcctggagccctcagtgtaacatcgctgcagatgtggccccttctggagccctcagtgtaacatctctgcagatgtggccccttctggagccctcagtgtaacatctctgcagatgtgtcctttcctggagccctcagtgtaatattcatgcacatgcatccccctcttggagccctcagtgtaacatctgtgcagacacattcccctcgtatagtcctcagtgtaacatctgtgcagatgtgtcctttcctggaancctcagtgtaacatcgctgcagatgtggcccttctggnnccctca

SEQ ID NO: 4131 - DNA, 294 bp, Homo sapiens
ggctgcgctgacactgaggggtgtccgggagctgctgaagcgtgtggacctcgcgacggtcccgcggagacatcgatataagaagaaatgggctgccacagagcccaaattccctgctgttcgactggctttgcaagaattttgacatgacttacagtgtgcagtttggagatctttggccatcaatccgtgtcagtctcctctcagagcagaagtatggtgcactggtcaataactttgctgcctgggatcatgtaagtgctaagctggagcagctgagtgccaaggactttg

SEQ ID NO: 4132 - DNA, 447 bp, Homo sapiens
ttattttttttttagagtttcaacaactttattggccaaatgcttctcctatgtttacaacttagtgtgagcctgctcactggcttctccttctaagcccctaagcgggcagcaaactttagtacaggcctggagatggggtaggggttaatgagtgagttggaaacctgctgatgctccacaattggacagcaggacagcaaatcttctacttcttattgccgaaaactgcagaaagacacgaacaggatggagacaggaccgagagtgcatctctgccactggtcccagtttccagtttctggtgcatccaacagagtataccctttgtattcttgcttcagggattgggtgatactatgtcagcctacgcattttgcagaagtacatagggccaaaattggccatgaggtttggtattaccagctccccaacctgacaggatga

SEQ ID NO: 4133 - DNA, 432 bp, Homo sapiens
  misc_feature (1)...(432): n = a,t,c or g
agacacctgcaaaggggaagtggtccgcgtgcacaacaaccacttccacatcagatgcttcacctgtcaagtatgtggctgtggcctggcccagtcaggcttcttcttcaagaaccaggagtacatctgcacccaaggactaccagcaactctatggcacccgctgtgacagctgccgggacttcatcacaggcgaagtcatctcggccctgggncanctttaccaccccaagtgcttcgtgtgcagcttgtgcaggaagcctttccccattggagacaaggtgacctttcangcggtaaagaatgtgtntgccaaacgtgctcccagtccatgggccagcaagtaaagcccatcaagattccgtggaccaaagccactgtgccgggtgcaaggaggaagatcaagcaacgggccagtcacttccttggcta

SEQ ID NO: 4134 - DNA, 387 bp, Homo sapiens
ggtcgaagactgcgcgtgctcaggagcgcggagcggcccgctgagcgcagaggggcagacactggcctcagatacctgacctggtaccctctatgaggcctgcggtgctgggctccccagaccgagcacccccagaagatgaggggcctgtcatggtgaagctagaggactctgaggaggagggtgaggctgccttatgggacccaggccctgaagctgcacgcctgcgtttccggtgcttccgctatgaggaggccacagggcccaaagaggccctggcccaagctccgagagctgtgtcgccagtggctgcgtccagaggtacgctccaaggagcagatgctggagctgttggtgctggagcagttcctgggcgcactgccccca

SEQ ID NO: 4135 - DNA, 306 bp, Homo sapiens
atttcggcacagggaggaaaaggctggttacattcattcttgggcatgtacgtgcataccgtttatttgcaaattgaggtacttaagaaaattgtgcatgcaatagtcaggaactagtataaacattcagaagtcttttattgcacaatcaaaccttttaagaataagccttgtgtaatagggagctttatagtttttcctcatagtgaagcatgttgtgaagattttaataattgataattttttctatggtctttaattgtcaatcctatttttcattcagttgttgttggctttttttaaaaa

SEQ ID NO: 4136 - DNA, 463 bp, Homo sapiens
ggtaccaggaggtccaggcggcccagaaagcactgaggacggctgtggcagaggtgctgcctgaagcggaaagcgtgttggccaccgtgcagcaagttggcgcagatacagccccgtacctggccttgctggcttccccgggagctctgcctcagaagtcccgggctgaagacctgggcctgaaggcgaaggccctggagaagacagttgcatcatggcagcacatggccactgaggctgcccgaaccctccagactgctgcccaggcgacgctacggcaaacagaacccctcacaaagctgcaccaggaggccagagccgccctgacccaggcttcctcatctgtccaggctgcgacagtgactgtcatgggagccagggactctgctggctgatctggaaggaatgaagctgcagtttccccggcccaaggaccagggcggcattgcagaggaaggcagat

SEQ ID NO: 4137 - DNA, 927 bp, Homo sapiens
tttttgtaaacagagggcagccagctctgggactaggggctttggctgttgctgacccccttgatctctgcagatctgctgagacctccctgctatctggagtgagtggatgtagcaccccagggcatctcatgtaacaacttgcccaacatccagagggtgtccagcacacaggtggctctcacaacagctgtggactgtaatgtgtgtggaccgtaagctgctgactggatggattagacttgaacacgtgtgggtcatacacacagacatgcaccctcacgtgtgtatgttattgacactggggtgtgcccgtttatgcatgtgcaggggtgagagtgtgcactcatgtccaggtgaactgggtacgcacactcagtcctgctggcagggaagaagccacagacagaatcggcagggagtgtgactatccacacggggtcgagttcacagcagccggctccggggaatgtctgtatgggcacacctgtggggtagtgtgcaccccctgggtcatgtaaacagcaggtgggggagtgtgtgccggggatctgggcagccctcactgccagctggcacagttctcgggcaggctgtgcagaatggcctccaggttctgtttgtcggcgcggatctcggcgaggtcactctcgaagccctggatctgcagctcctgctgctgggattcctgctccagcagactgagtttcctctgcaaggaccccggggagcccagctgcagcctcaggcgttctagtgcccactgagtctcgttcagggcctgggctggggcttgatgggtgtccagcgaccccagcctggcaagcagctctgacaaggtctcgatgtccttctccagtgagatacgcgattcccggatctgctgctccatctcgctcagcccagcacccacccgctcagcttccc

SEQ ID NO: 4138 - DNA, 489 bp, Homo sapiens
aattcggcacacggtgggaacttacccaagccctgcagcgcatggaacagaagaactggaaccgacgcttctggaacaaggctatctgagagcagttcttcctggccctcgggttcatgggacggcataactggaaccgacgcttagggcgcaagggtatgtgagagtgggtcttcccgtacaggaagtagaagatcttttgtttgggggcctcgtcgtcctcctccatgtcattggccagatagctgaggacagaaatcaggttgctgctcaggggcaccaccaggagagacctccggctgaggtcagcttcccagagaggaaggtaagggaccgtccctagctcaggactggcacccaccctgcagagagccacgccttcctcaggagggctctgctggacagagacctgatcaagggcgtctcccactccttcaggatggagacaaaagcccaactggtagccgagagtggtggcttatgcctggg

SEQ ID NO: 4139 - DNA, 210 bp, Homo sapiens
ggcttgccaagtatgaaattatcccttgtttcaaaggacagctaatgaagctctatgactttaaagggaaaaaagtattatacacacactaaaaatattattcatttttattttacatctttgcctctgtgaagctgctgttattgcaacttctttttttttttcagatcagttgcaggattggacttggtagtttatgtaaaacaatta

SEQ ID NO: 4140 - DNA, 527 bp, Homo sapiens
ttttttttgtataaaggcactttattttaaaatcaacacatcctgcttttataaatcagttactcttcatttccaacttccatcacctgagtttgagagcagagtgcatggtatttttctgggcttaaggtataaactgacatggcattcaagaacatgtccagccgggcagagccattcaggcgaacctctcggcacctgctccttcccgtggtaatagagctgcacaaaccactccttagattccaggtgctggtaaagttccatggtcaggtcaacagcaaacggtggccatttgtggtcaaaaatccccagggtcattaagagcggtatgaaggtcacatcatgagccgcatagagatacagctttctgatcttgtcgggggcagtggcagagtccatggctttcagcaggttgctctctaggatgtggaggaatgggcctactgccatctgaagactttccctgtgaaaagtgaacaacatttaagcacctagagggcactcagcattcaggggacacagac

SEQ ID NO: 4141 - DNA, 1675 bp, Homo sapiens
ttttttttttgcattttgtgatcaaatttattttttgtttaaatttcatttactttgttttactgtaatttacacaagagactggcaagtaaactaggtattttacattcaccacacattccctcaaatctccacagttgttagaaaaacattaaaatccatgcgccgggctctcatttccatgtgcgcctaagctcccaatgatactacagatgccagcgagagttaagttcattaaaaggagagggctagactctttatttcacaaaattagcaataatcttcctcgcaccaaacactttgcagacaatgattatgctctgacaaaacctatcttacaacagtgcccagagagtaaacatcagtctttatcctgagtacacaaaggatgtatgaaatgtgggttttgttgctgaggataacagggtattgcaatgcagtagtgatcctacacatccttccttgtctgattcactgaaatcactccagtgggggagggatgcaggacatgtgggaaaacgaggagcaggcagggcaggactgtcagcaaatcagattactaatgtgatttgactgcaggggttggcgtgttttaggagggacaggaggttacaaaagacagtttgtgacctgaaggcttcaacaatataattctattcaagcttccaggactgacagaggaaaaactggattcagacagagaaagctgataaaaatcttacctagctatacccccttcctttaaataaaaaataaaattaaattaaaaaaagtggcagccgtttctgaccagcactctcatgatgcctattcagaatctgtcctgatgacgtcctacttgagagcacatcccacagtcagatgtccaccagtctcttggcggggcctcctcaccgcacgcaggccagactcacactgcatcttaaactgttcctatctcaaagtcactatctcctccttgaagtgtgtgttcccacaagaagagcaaaatgtcatcactaactatatcctatcatgtgagctctgggggaatctagacccattggcatagtttcccaagctgtggttacaggaaaactgtcatcttcaaaacaagactccatgaagtgctatatttccaacttttctacacagcctacaatcctattaagactaatttcttcatcaatgtgtttgtctaacaggagcctgaaaactgtctagtatttattataaatcagaaaccgtcatctccatttttgctaggtttgatgtagaaaaatatttgaaatttaaaatacaaaaatccaataaaaaccagaaattttttttaaaaggatttttccctcagggcaaacaagtaaaaactggcctgtaactttgctccttactttatattgtcaaatttggctacaagataatgaccatccagaaataaatagttataaatacattcagagtttacatcccagattcattggaacaccaaaaaattttgaagaaattttctgtgggagtctactgcttatgggactaaaaaaaaatttataacagactgacttaaaagaagagaaaaataataaaaggctatatatgttggtccacagcttgacatttatgaaacataccagctagtattacattgcagtcaatttgtccattaatggtattactctgataattattaaaatctgtt

SEQ ID NO: 4142 - DNA, 370 bp, Homo sapiens
  misc_feature (1)...(370): n = a,t,c or g
gaccaaaggcagtattcacagaggtatttcttgggaataaaagaaggaatatagtcattccttggtattctctttggtgtccagagttacttaaaaattcttggtgtttattgccttttagtcacagggatacaccttttattcatttatttatttatttaccagtctcatttagcagtaggaatgcatcttagcatttttatactgctgctcaacacagtgcttcatcgtttcaatttgttgaaaagattttaatttgggcagtgcattagtagaaaagcagttaatagttttgagagttttgtgaagcccttgcttggattatgtatgtagggcaacatggccaaaaccctgcttctactnaaaaaaa

SEQ ID NO: 4143 - DNA, 519 bp, Homo sapiens
  misc_feature (1)...(519): n = a,t,c or g
ggaagcagaaagccacagaggccagtgctgtggagcagacggcagagagctgcgaagttcaagaaatgttgaaagtagcccgagcagagaaagatctactggaactgtcttgcaatgagctcagacaagaattactaaaggcaaacggtgaaattaaacatgtttccagtctgctggccaaggtggaaaaggattattcatacctgaaggagatatgtgatcaccaagccgaacagctgagcagaaccagcctaaagctgcaagaaaaagcatcagagagtgatgcagagatcaaagacatgaaagaaaccatatttgaattggaagatcaggtggaacagcaccgggctgtcaagttacacaataatcaactcatcagtgagctagaaagtagtgtgatcaagctggaggaacagaagtcagcctggaganganctgaagactctgancaagcantgaaggngagaccnaggatggagnggttcaagggggtcngcnaacnccattggggngggcaat

SEQ ID NO: 4144 - DNA, 824 bp, Homo sapiens
tgatttcaagagctccatttttcttaaatcaaagtgtgactatataggggcctgagattaaggtgtgagcctacagaaaggggttcaaagcacctacttggtatatgttagtgaaatcgatagatcagaagcacaaaaagagtatttatcattccacatggtctgaaacaagacacaaagctagaagtcccccatataaaggtttggggttaaagcatttctatgtctgtgccaacaaggagaacttccaagtatagccatggccatagggtgtgactggtaaaagatctgggcatcttggattcaaagatcttatcattgctcacagaaagcccttgtacatgtctgggctttgggccagggcaggttagccctaaccatccaacaaccttcctaatcatcaccagtaaactgggaaattatccactgggatagacacagagtgctctagggagagatggtagagcaaataccaagagaacaactcatttgacatatagacaacccaacttatctcggtgcacaattaggtaattaaaattctctctcaagacccatgtaacctggcgagttattgggtcaataatataccatgtgtgaaaatatgaaaatcatcacaaaagagcatgatgatggaggctccatacctcagtttagcattttctagctatgttgactcagatcaaatgtagtacaatcaggaaaaaaaggatggataacaataactgtaatgacggtcacaggaaaatagcaaatacgtaggatgagggaagttactttttcttcttgatgaactcacagacaaagtacatggtaagatggca

SEQ ID NO: 4145 - DNA, 786 bp, Homo sapiens
  misc_feature (1)...(786): n = a,t,c or g
gacgttggcagtggactgcagtcatctgtttaggcctttccatggcccacgtcaatgccgttatttctgtttgttgcacatttgatttccttgttgttggcatttagaaggccccctgcttcccagatcacaccacgggcatggaccacagagattgcatcttgtgagtctgtagaaatggtcaaggccttgtcctctcttaggtccagagctcaggtgaatgcagattttcccggccatctgtgctgaagtccctgtggggaggctcctggctggtttcctgtaggtagacagctacacgtcctgcccttcattggcttcttttcatgaagctcctgccatctacaaaacatgtctcccttcttgaatcacatctctgttattgaaacnnnnnnnnnnnnnnnnnnnnnnnnnnnnnnnnnnnnnnnnnnnnnnnnnnnnnnnnnnnnnnnnnnnnnnnnnnnnnnnnnnnnttgttgcttctttttcaacaggagtgtgggctgctgctctcctctgagggcgagtgtcagggctgctacccgctggatgggcacatcttgtgcaaggcctgcagcgcctggcgcatccaggagctctcagccaccgtcaccactgactgctgagtcttcctagaagtacctgctgggttctcagttccagttcccatcctttgattgatcactctccctgacatccacctgtatgactttgtcaccaaatgctgtcttctctttctccaatcaagaaataataatccctcgagtttacaaaacaaaaaaaaaa

SEQ ID NO: 4146 - DNA, 195 bp, Homo sapiens
aactaaaagctgaacaaagtgactaaaataacatctcacagttaattggataatctgttattgagttaaataaatttatctcttaatatattcccagtagaattgtgtttttttattcttaggtaatagttttgctggtaatattaaaaaagttatatcacttgccacctatagagttttctttttacctcttaa

SEQ ID NO: 4147 - DNA, 1900 bp, Homo sapiens
  misc_feature (1)...(1900): n = a,t,c or g
tttttttttttttaaattttactattttatttgtgaaaaaactacaagcagaattcataaatagacatttctatttaaagcaggaaaatgataaagtggcttctaataacatagtcgtgcacatgccagtaacaggaatatattaacatcttttatttgctagacaaagagcagtgtccaatataaatttcccccaaaacatttaagacctgtgaatttttgaccagttcacaaaaccaccaactgacactttagcatgaagaaaaaaacaaacctaacagactgtcagctctaaagacattacagagcagaaacttccaaaagcgttatacaagctgtctttctgggcaaatgaaaaatatagctcgtataatacattaacaaaaattcacaagataagattgttttgacatacttaacaagcattctctatttgtctccaacaaacaaagctaaggaaataatgtaaccatctttacacagtaaattaaggttacaagtcatacacaagaacagaactgcttgcgcattaaaaactgttcagctccattgtcatactctaaatgttggctcttaaaccattttcggttacatacaagcaaaggttattatatattcagcaattaataaattttcaataatttaagatacggtagcttaaaaaagtagactgagaatggtcttgataaggcaggtgaaacatcttagtggaactaaactcacagaggcttctgccaatgtttttaaatatccagattgaaactgaaaggttttgattagaatattgtgtgggtgtcaagatgtctttttttttgtaactgcatgactcaagcagagcaagtcaggtaagctctgtgtgccgcgcacacgcacgagtgtgaaagattgcgtggtattaaaacaaatggaaacttgcaagcgtaacactgtgctttttgtttgtttaacctgctttctgtgccactgaataccaagtatttctggtcctcttttaatgtatatctttataatctacactagtgtttttacacgctgcctactaattgtagggcatactgcagacacaggaagttacaggaattccatttccagaatacatgcctgagggatgtcatcaatttccaaaattaaaagtctataaagtacctactacctcactacccaacagaatacaccacagcagctaaagggctggccctgtaacatctgattgcttagataactcccactgttagctgcggtttctacaaagatggtaatttcatgccacttgttctaaagcaatcttcttccccttccttcacccctccccattctttaatttatcacggaggcaaaactgaaaaaccaaaacattggcatgaatgaattagcagcctatgagtagctggttaatcagctttttccactaatctatggggtccaatcactttacatgaaactagtttttgaaaaagtacacagtgtgtctgaacaaagtgcataccaacagttattggttcaataagcagtgccaacctacatgagtttggtggcatttaagttttttcaaaaagttaaaaacagcaatttcttaaacctctggaaaataaatatggctgactaatttaccctccctgagacccttaataaaaggaatattaaaactttagaaggaatgtctttgcaatatcccaccaatattaaaatgtggatttaaaattcatagtcaaatcactatgtattatatattctgatgcttatagaaagcatctgatttcctttggttcattaataaatactttaaaaatgtatttaaaaagataagcaaagcttgcatcccagacacaagcattattttaaaaaggggggaacattgtccatgcatttgagaataggaccacagcaacgcanatgactg

SEQ ID NO: 4148 - DNA, 477 bp, Homo sapiens
  misc_feature (1)...(477): n = a,t,c or g
ggtttgacttaaagttacagtttccaagaacctatggatgacatcaaatgaggatgtactgtattaagtactattgtatatagtagattatggcattgtagcattatagtatattattgcagtcttaacagttgggagtataatgtgttttagttccctgccagcccacagaattattcagatgaaccaataaaattttgttttgaaattcaaggcacatctcactttcnnnnnnnnnnnnnnnnnnnnnnnnnnnnnnnnnnnnnnnnnnnnnnnnnnnnnnnnnnnnnnnnnnnnnnnnnnnnnnnnnnnnnnnnnnnnnnnnnnnnnnnnnnnnnnnnnnnnnnnnnnnnnnnnnnngctggggatggacggggtgtggcaccaccatngcctaatttttttttttnaaatttttttgttaggacatgggggtttgcaccatngtttgttcagnggctaattnttcgnggctgg

SEQ ID NO: 4149 - DNA, 197 bp, Homo sapiens
ttttaaagaaatttgttcaagagaagaaagcgaagtttcctggctcatgggaacatctgtagacatagaggcagctctgttcctgctttaatttcactaatattaactgtggtggttgcccactgagaaaattattaccagccacacaattgtagtgcttggctttctcgagtattcaagagagtagctgcgtggga

SEQ ID NO: 4150 - DNA, 759 bp, Homo sapiens
tcaaatgttacccggcatggatgcagcactttacagagctctctcactctaggactttaccttactccctcaaaaccctgggaaggagatggtaaaactaacccagttttcaggcctggatggttcagtgaccagtcaggaaagggaagacttagaacaaggacccgggactaaagtgctccccttttccatctgtctcacctggctgcaatagtccttccctgaggaaagcacctcattctggggacccaggagaggtaagagcacctgccaggcagcctctgcccctcagagccaaggaagtgacccagagctggctgtggtggggagcgtttgcactctgcagagaggagcagactggtaggggtgctttcaactcaaccttcctaactccctccctctacctgtgatgctgtaatgagccacttgctatatttctacccagggttgggtgtcctcactcccaaacgaatgtctgagagttcttaggggaaatgctacctactcagcagttcttaagggatgtgctgcctaattctgtgagaggcagcacatcatagtcaaaggaacatcgagttttagggtcagaaagatctaggtttgaatcttggcccttcccttgtgacgctgggttgcctcccagagcatccagccctgcacctctaaactgtggttaatattacttatccttgtcaggctgcaataaagatgaacgagtacagtgactagtacaaggcctggcacacacacacacaaata

SEQ ID NO: 4151 - DNA, 144 bp, Homo sapiens
tgcatgtgaggaagccatgaggctgggtgcataactgttagatctagtaggcagtgggaaggtaaggatagacttggtgaggttcgtttgtgttcattagaatagacaaataagattggtcaacttcaggctgggtgttggctg

SEQ ID NO: 4152 - DNA, 945 bp, Homo sapiens
  misc_feature (1)...(945): n = a,t,c or g
tttaaggatttcagcctttccattccgtcaggatctgtcacggcactggttggcccaagtggttctggcaaatcaacagtgctttcactcctgctgaggttgtacgaccctgcttctggaactattagtcttgatggccatgacatccgtcagctaaacccagtgtggctgagatccaaaattgggacagtgagtcaggaacccattttgttttcttgctctattgctgagaacattgcttatggtgctgatgacccttcctctgtgaccgctgaggaaatccagagagtggctgaagtggccaatgcagtggccttcatccggaatttcccccaagggttcaacactgtggttggagaaaagggtgttctcctctcaggtgggcagaaacagcggattgcgattgccccgtgctctgctaaagaatcccaaaattcttctcctagatgaagcaaccagtgcgctggatgccgaaaatgagtaccttgttcaagaagctctagatcgactgatggatggaagaacggtgttagttattgcccatcgtctgtccaccattaagaatgctaatatggttgctgttcttgaccaaggaaaaattactgaatatggaaaacatgaagagctgctttcaaaaccaaatgggatatacagaaaactaatgaacaaacaaagttttatttcagcataaggaagcaattactggtaaacaatatgagactttaatgcaaaacagtgttgcagaaaaaaaactcagagactatgaaatacataaaccatatatcaagttatttgaaaaatacctatttttttccaaagtgtgtaaaagattgttttgaaacgtacctgttctcaagatctttttattcagagttttaataattgtaactttttaaatgtctatagcactgaagttattttcaggttttgtattntcttttcttg

SEQ ID NO: 4153 - DNA, 398 bp, Homo sapiens
tggcttgaaagtactgaataatcttaaaacacctagtgggaagccatacctttagcctctgttactgtcttaactgaatgtgggaatctaaaagacaaactcagggaactggtttcccgccggtcaaggacttccaagccaagcccccacccataatggtttgctcctgaattgcatttgggccaaagagtagagctcttccatgcctgtaccgcagtgaagtgtgtttcttctcctcagtcctccaaagtggagctgctgccaggcgtggcattatatgagtgtcaggggttaaacctaagaagactacctagtgagcgctgcagtttcatacatatcctactgaaaatcttaaaagcaagctttgcttttttgtaaataaagcgaatatagaagtc

SEQ ID NO: 4154 - DNA, 763 bp, Homo sapiens
gatgggattctaacatattttagcctagtgcagtggttctcaaccaaccagagtgattttgccgccccctgccccgggaacagttggcaatgtctggagatgttgtttgtcacagcttaggggcagggagggaggttgagaggttgctgctggtatctagtggctagtggccagaggtcctgcttagcacctgcagtacacaggctcccctgttcccagcagagcaagatccacgcagtcaggagtgcggaggctggtggttcttaggtgacaagagccacctgggggacctgcctcagcccttgaaagagtagcctccacccaccagatgattcccgtctttcaggcctgggagccactgtgtcagcttctgtttgcacattttgatcttatgttctcttttgagtttgatttacttagaccaagaactgtagaatcatatttttagttgttggctttttcccctctataaatattatgaggatattcttttttttctcaccatttttaagaaaaagaacttcttgaatcactaccccttagcaagctgtgtaatgaagaacaggaattgctgcgttttctatttgagaacaaattgaaaaaagtaagtaaaaccaaagagttagcacttgctttatgtaaatatcttattccataaaatttggcatctagtcttatattaagttttcaaaattaaaactttttaaatttagcacatttttaagaatagagcgtttaagatacataagattccaaaaaaaaa

SEQ ID NO: 4155 - DNA, 678 bp, Homo sapiens
  misc_feature (1)...(678): n = a,t,c or g
tttttaagttacaataaaaaaaacctttcaaaaaggaatccttcagtatcttccagcccctccctccctttttttctccctccctctcccaatgccaggtcagcccagtgtgattcccacagaggccagagcgtcagtggcccaggtgggacagagggtgggatccccgtacatggcgcccatgaagtcccgcacgaagtccgggaagcgcttctccacgatgctggtgcggacggcgctcatgagctgcagctggtaggcgatgttgtggaccgtgagtgtgtgcagcgcggccgtgttgtcactgtgcagcagtgcgtgcaggaaggcgcggctgtgcttttggcacgtggggcaggtgcactccgggtctatggggccgaagtccttctcaaacaccttcttcctcaactgcaggttcccagtgggcaccagggcagagccaaagcgcgctgtccgtgtggggaagacgcagtcgaacatgtcacatccaagagccacgcagactaccagatcagtggcatagccaacccccatcagatatcggggcttgtccttcggcagccgagaggtgctcagcgccaccatccgccagaactgcgacttgctctcacccccgntcaggcccccgatggcgaagccaggcacgtctcgcttggtcatctcttcaaggcaggt

SEQ ID NO: 4156 - DNA, 178 bp, Homo sapiens
  misc_feature (1)...(178): n = a,t,c or g
gcagagctgcttcaattgtttgcccgcgtccggctcgcctcccaaagccagctctgcagtgcagccccagcccacagcccagcccagtgagactcaggaactggattgtcaaagngagagagagagaggagaagcaggctttgtttgcagccatggcccaggggaggtgacccacagg

SEQ ID NO: 4157 - DNA, 633 bp, Homo sapiens
ttttttttccactgaagagtttctgtgaaggagccccagagttgggaatgtgccagaatcaggccaacaccagccacacctgtccacagtgccccttcctgctccagttgatccagagagctcctccctctaccctcatgatgccagggagcgtgattgtgggtgtgtctctgactgggacacccaggatagggtgtgcaatgaggccaggaccctcctaaaccctaacagcatcctaacgaggcccattgcagctttcgatttccttcgtaacagagctcgcaggccctcagttgcagagctctcaccttctggagtgactccatcgttactccagtctttctaggtggtggaacactccaccacacatgccatttagaaagacgccagcttggcctttccaaaaagttaaccagtcgtctccccaccacaaaccctgtgggagcaggttactcttaggatgcacacccgtcaacgaggccattgcatttttttgcaggcatgaacggctcccatctaggcactaacccaggagccaaacaactgctggggagagttcagggcagctcttttgggcggtgcctccagctgcagctttgccttgccacctggagccagcacgcctctgcccga

SEQ ID NO: 4158 - DNA, 952 bp, Homo sapiens
gacctcatctgcttaagagagtgggttaatggatatatcagaggagtaatatatgcacactctttcaagaactactatatacttgaatcattataggacaagaagcaccgcaaatgtcttccttacacagtaccttcacctggcacacagagcatgagacgtataacactggcagtttaaatactgaaccacagtttaacttctcaagtgtaaggaccaagatgaaaactggcgcatccattcatctagttagtatgatggaaacaacatacaaccacagttaggtagtggtttatctttttaatgaagccataaagctttccatatctatatcatattaactcttttacttaactaaaaatcacagctgtgtttaccattttaaactacgtctgggggaaggtaagtaagacacacttgacagctactgaaaactacacagatggcaatttcttcaaccctttgttacagcaaaagagaaggaaagaaggggaaaaaaagccctcttaatgaatatcaactctcaaagcttcacctggaattctagtgctattaaacaagtagccaagacacaaacacccagcttgggtcactgaaacttcaaaagaagcaacaactgaggctaattctcgatttaattttgaggacccataaaaattcagctacaaacattcaaactagtctggatgcctagttccagcactgggttgaagccaaaatcaaagcaaaatgtatatattttaagagtctatttctagaagttttgcatgtaaccattttattttgcttcaggagattaaaggaggtcacagcttaatcaccttgcattaaacccatcgttttcagggctttgaattgcaatggcaagtttgtgtcacactgtctttcctattcctcctcgtgtttatatttcttttgcttcaaagcagagtagatgcacagtatatcaagt

SEQ ID NO: 4159 - DNA, 537 bp, Homo sapiens
  misc_feature (1)...(537): n = a,t,c or g
gataatgtcaatctgctggaccaagttaatttagaaaataatttttaatcctcagattttcaaaacttggactactgcaagactgatatgtactttntatgcccaaatcatatttttcaaagataggacatcataaggcatcattatttctaatgtatcttttaactagatagaaaaagctttactgtctaaacaggacttctgctcaaaacctaatgggaaagctatttctggggtaagatttgtaacagtgcttctaggtcatttcatgttttatagggaaaaagatctttgtacacctcctcaacctgttagtagaaatgttgacttcgattttttgcaccctcttcacaggacctcaaaagttgcctctgttcttggaaagcaatggggaataaaaatatgctgttgaaaatagtgcatggggcatgcattttagtttaggaaacccccctcccttcccagttccagagggagaaattataagctatactgtgccaaaagtgagtggggctgcagagaatggtgaaacccatc

SEQ ID NO: 4160 - DNA, 354 bp, Homo sapiens
ctgggcctgtttcatgttttttatatccataggttcgcaactcttatacttttcctttgtggcacccatcataaatcgcagtcatttgtactgccatgatctgtgtactctcccacaccagcctagagacttctgcttattttctgccgcatcctcagttcccagctctgtaggtgttcacaagcatgaattcaacactgtgcgaaagaactgaagctcacgtagtccacaacttccccccagtgtggggtgtgtgccaaccaatgctacacaaagtgttaaggtgggttttgcaaacattttgtaattttaataagttatacaattgtttttaatgtgaattggggaaaattt

SEQ ID NO: 4161 - DNA, 398 bp, Homo sapiens
gctggttagaacttctagtactatattgagtagaagtggtaggagtggacatccttgtcttattcctgatcttagaggaaaagctttcagtttttcaccattgtaatgtttgctgtggactttttatgtatggtctttattatgttcaggtaatttccttctattccttcctagtttgttgagtgtttttatcatgaaaggtgttgaattttgtcagatgctttttctgcaccagttcagattgttacatgatttttgtccttcattcggttaatgtggtgtattacatttactgatttttgtgtgttgagccatccttgcatcctaggaataaggctccctcagtcatcgtgtatgattttaatatgcctttgaatttggtttggtacctcgtgccg

SEQ ID NO: 4162 - DNA, 326 bp, Homo sapiens
  misc_feature (1)...(326): n = a,t,c or g
ctgtgcctggcccaaagtcaggattcttaagggaactctccaggacatgcttcgtttctctcagtctgtgtcatttagggtggcagaatggtctcacagggttaacatctctggaagtaaaccatttacccaatatgatgtantggagttagaaacaacagcaacancaacaacaacaacancancaaaaaacccaaaaaaactagcctgcaggcaaaagcaatctgggtcaaagagtttcagcaggcctttactangagtcacactattttgagagtacagctcttgagtgtataancttcttgccctaagcaatgnngggggag

SEQ ID NO: 4163 - DNA, 430 bp, Homo sapiens
tttccaagtacaagatgttaccactgacaaaagggtctcatatgaatgatggaggtttctgttaccgtatgcccataaaggggcctgaaaccaaatatgatttgaatagaaaagaccttgggaaacataagtagcactttggggctaagctgcgaaggcactcgtattgtacaagtaatttcgaagagagcctaaatttgctacccccctgcttctacagggtataccagatttttgctgtcttgggacactgagctcatggaagcctgtggaggaaactaaccggtaagctggggatctaggtagtcatccaagagtctggagggagaagaaatttgttacttccacagctggggtcctgtagaaccatactaatgtacaaatggatgctgaaaaatacctgcatagtttcaaaacaaaactccctctc

SEQ ID NO: 4164 - DNA, 603 bp, Homo sapiens
ggatcaacatctatgcagtcaccgaggaggagtcggacgaggaaggcagccaggagaaaggaggggacgacagccagcagaagttcattgctcacgtccctgttccctcgcagcaagagattgaggaggcactggtgcgaaggaagaaaatggaactcctccagaagtatgcaagcgagaccctgcaggcccaaagtgaagaagccagaaggctcctggggtattaggacccagctggggctctccttggagttcttccatcccccagtggtacctcaggacccagggctgcagacacaggctggtgctgcaagggctcctgccccattctcagccttccttccctctccttgtctcatgttgaccggaggggtaggggtctgtccctggtcttcctggtaggttttgtacacatattttgctactgtgtggatccatttatttttattgtggagtgtatacaacaggttgcgaactggctgcctgtgtcttattttgacttgcactgccattttgaggggagaagaatcaattagtggcaaacatttaaaaatgcaattttttgcagaccaaagtattaattttaaaaaaaatgcaaatttt

SEQ ID NO: 4165 - DNA, 892 bp, Homo sapiens
attttatattattttttggtactgaatcttcaaaatccagagtgtattttacacttaccgcacatctccattcagactagtcacatttttaagtgctcagtacgacatgtggctggtggctactggattagacagcacgagtctggaagatggaagctagtgcagaaacctcttgtttaaaaaacaaaaaaggcaagatgggcttgagcgattcaagaggcaactaaaaataaaattaggacccagcaccttgtttgacacacagtttgaccttcgattttcctcccttaacttccctcttcccttaatatctgtatacaagtgttgcttcaaagtaccaaggtcagaaattgattcagtacggtttactaaagtcatgtggaataaagccattggaaacaaatggaaagcctgtcgggacttctgggctcagaaccagctggctcacgcactccacttgtcagctggacttctgccttgtgaaatggaagcagcctttgttcctttctggctgagcaagctcctgaggctgggagagactaggaaggcttggtaggaggggaaaaaagtcaggaaaagatatcaaatcagaaacatggaagaagaagggaaccgatttgagttggtgggcaaaactctaaaaatctaaatctgatgcttatgtaagggttgagcgaattagggagattgctagtggaaattggagggaatttgttttgcatcatttgtctaggatctatgcaaatatagctccactaaaggaccatagggaagagccagccttgccttttcttatatgattttgtttacaaaattttactgggacttttaaatctagctatagagttgggaaaaaatatttccacttagatattttacatggttttgttta

SEQ ID NO: 4166 - DNA, 459 bp, Homo sapiens
  misc_feature (1)...(459): n = a,t,c or g
tgggataagggaaacaaaaataaataaaaactcagtgaaagtaaacataagctttcagattctatgggaaagtaaaatcagcctataagattatctggatgagattaatgtcatttttcttgcaaatcctggaccattcctgccagatatggctaaagggaactttaattttgtttagcgctctctccattcttaacaggagttcagtattttttcgttaatgtggaagagtttggctaagaacctctctatagtttgtaggtagtgagttagaaataggataatagaaccttggtttttctaatgtgctatctatacaaaaaacacaggtcattctgacctcagcagggtcatactgggctggaggtgtaggaagggaactggtggggtagttcatttacatttggacagcagatgccttaagtgtgttntctatggggcagagggcaaccngttagt

SEQ ID NO: 4167 - DNA, 98 bp, Homo sapiens
  misc_feature (1)...(98): n = a,t,c or g
ttagaaacaaaatgcttcctcggtgccacaaagaaatagcactcaaacattaattttntcagcaaggnaatttttacttctatagaagggtgcgactc

SEQ ID NO: 4168 - DNA, 486 bp, Homo sapiens
  misc_feature (1)...(486): n = a,t,c or g
ggtcacatggaggtggcagggtgagcanctggcctgtgtgtgggagggatattccctgtccttgatgaaatactgggagggagggctgtttgctgagcccaggcccaccagggagaaggcaccaaaggatgaggatgaagaagtgactctgatgagcttgcagcaagccctagcagggcaagccccagccccaaggatctgcaccccgcacccggtgggcccagcgtgggagaggccgggagcagcagtgggtacctgtgcccaggaaaagcacctcatagcgcccgtcggctgcatccacctggtccacggnaatagtgccagagcaccctgcctgcctgctgggcactcacggngctcatcaaagtgagtctcaatgccatcctcgcccgggacanagcagacgagccgcgccttcaagaatgtgctccacttgttgaccaaggcaacanntgaccancgtcatcgttctggggggtggggcaa

SEQ ID NO: 4169 - DNA, 305 bp, Homo sapiens
ttttcttgtttgcaaggttgtttattgacttccataatttatcaatttccataatagatataggcctattcagatcatctcttttccctgtgtgagttttggttgtttgtgtctttcaagaaattgatctgtttcacctaagctgtcaaatctgtgggtacagagttgctcataatattcttttgttatctttttaatgtccttgggatcagtagtgatgacccctttctcatttctgttatcagcaatctgtgtttttttttcttagttagcttagctagaggtttatacattttactgacctg

SEQ ID NO: 4170 - DNA, 519 bp, Homo sapiens
gtttttttcccagatctgaaccatttcactttctgcatctgctctaaggtttctggaagagtcattcccaaactttcagggaaaaaaagggtgaggattccaatcaggacagtcagactacccatgacgatgtagggcagcattctgttgtaagcaccgaggtaaacaaagtagggggcaatgatgctgcccactctggaggccgtggatgtgacccccaccgccatgttcctgacccagggttgggtagagctcagcagtgaagacatacagcatggagaaagcagaggtgatcccaaattttcccagcatgaccagaccaatggataagaagtaataatccacaggtaccagttgaatgaagagaagcacacctcctccccagaacagtactgcagctatgatataacgcctgggcagcgttcgcaatagcagccaggctgtaatgtaagctggaatttcaatcaaggcagagaggaaacagttcaggtaggcatctccatgtaaattaggagcatc

SEQ ID NO: 4171 - DNA, 470 bp, Homo sapiens
caggtcagcgggactatgatctcctggtggtcggcgggggatctggtggcctggcttgtgccaaggaagctgctcaagctgggaaagaaggtggctgtggctgactatgtggaaccttctccccgaggcaccaagtggggccttggtggcacctgtgtcaacgtgggttgcatacccaaagaagcttgatgcatcaggcttcactgcttggggggcatgatcagagattgctcaccactatggctgggaggtggcccaacttgttccaacacaacttgggtgagagagaagcccttgccctctgcaggtcccatttgaaaagaagaggtttgctctctgccactcatcttgtaaaccgtgagcttttccacccggcctcctctttgatcccagaataatgactctgagacttcttatgtatgaataaatgcctgggccaaaaaccttaaaaaaaaaaaaaaaaaaaaaaa

SEQ ID NO: 4172 - DNA, 480 bp, Homo sapiens
  misc_feature (1)...(480): n = a,t,c or g
ggagccacgtctctttgcccatctgcccatttgttttgggctgaatcatgtccccccaacaatgtcacaggctgaagccatcatccccagggacttggaatgtaactgtgtttgtagatacgatgttcacaaacgttgnnnnnnnnnnnnnnnnnnnnnnnnnnnnnnnnnnnnnnnnnnnnnnnnntgtcctgataaaaagaagaaatctggacacacaaaaagacccccagggtgcacacagggagtaaaggccaagtgagggcacagggagaaggcaggggctgccagctgcggagagaggcctcggaggaaccagtcctgcccccttgatctcggactcctgcctccaggactgtgggaaaatcagtgtgctggtggctcaagccggtcgaggcagcactgaagacacgtgggttgtttgcaattgttgctgttacacctaaaactgccataaatattcatggtcaaaaaaaaaaa

SEQ ID NO: 4173 - DNA, 353 bp, Homo sapiens
  misc_feature (1)...(353): n = a,t,c or g
gactcagtcctggacagagagcctccagagagtgaacagtcttccagatctgggccaatcatcctggacagaggcccgcgaggcagctttgccctgtccacctgttgggtgggcagagccaccaggaacccaaacaccacctccaactctgagccttccagagcttcagcctctcttcgtcgtcttaccccactgaaaccaacagggatcgggccaggctnccagattcttgaggacagggactttcgggcatttacttaatggggggactacttttggggtaagggngcgctgcttgcctgatacaggatnggggtnaagggncagtngggcaggtccttaatttaaggatt

SEQ ID NO: 4174 - DNA, 1012 bp, Homo sapiens
tccttcgtatgccacctttattgtgtttccccaactcctgggccccatggtagactggccacatggctactgggctcctggccttcctagggctagcagctggtgggcaaacactctgccctgctggagagctgccaggccatgcccgggcacaggctagtggggctcctggctcagtcctgatagcagtgccagggaggcgtagagtgcacacatgcggccctgggcctgcggctcccagcacacgtggggagtgtcctcccccagctctaggccacactcgtccagcaagacccaggccggtgctccttcgccccagctgttccccaggagcccggggggcagggacatggtgctgcgctcctgccacggggcactctgctccaagaggctgcccaccagctcgagcggccccaacagggtctgcgactccagcgcctccgccagcagcttgtgctgcgtcatcactcagcatggtcagtgcccccagcaggtagacaacagggatagcgagttccggcaccagcattccggaggacaacaccaggcactccaggacagcacctgctggaccgtccaggggctccaccggcccaaggctctggccctgctccagcgcctcctccaaggctcgcagggccagctggtcccgcagcaccccctccaggccctccagcagcagctggcacagctctctgtccaaaagctccagttccttggagatggtctccacctctgcccgtaggccctggaagtcttcagtgaacgccccctccgcagggaccccatctgtcaggaagttgtggaggcacctcatcatggagaggccagagggcagctgtggccaggcgccttcgctcgtggaacgcttgtggcctgtcgcgggtggctggaaggtcctctgcttcttatccgggaagagaaggacgtctggcagccagacgggagcagacagcgacaggcatgtcacctagaccccagcatcccctccccccccctactacgagctccc

SEQ ID NO: 4175 - DNA, 54 bp, Homo sapiens
catgcatattagtcatgtcagggtaaatggggcatccttttatcctttgtgtta

SEQ ID NO: 4176 - DNA, 372 bp, Homo sapiens
tttttttaacagaataaagactttatttttatttaacaaatgataccatattaccttcatggtgggaacagcttctgcaagcattaaagggaagagaaaaagttagaattgccgcctcagtttcttggcaatattgaggtccagatattcatccagaaagctgtttgcaattcccagggcacctaggagggtcaacaaggccaaaatccccagactcagtcggaaaccggtgatccgttttttagcagcttctgaatatccccagaagtataggtgacggccatatatgtacaccagacccagacaagtagcaaaaacttggttgaaataccacccagccatccacaatgtaattatgaatataggataaaa

SEQ ID NO: 4177 - DNA, 370 bp, Homo sapiens
tcagtgcccatcagactcgagctgtcggcaaaaagctggagaggttaggagctttgtctatctcaagggtaacaaactgctttgaccctgagggctctgaagacgactttccctcaccgcagctctcaagacaacagggatcagactcagaaagacactgcctgtataaggctcttgtttgtcttgtttttaattcctgccctctgcctccagatctcagtcctctatctgtgaaacggaattcggccttgcctgtccacgaaatgaagacaaggcatctcgtgtgtgttaagatgaaacaagatcttagcaagagagtaatgatttcttttttaaaacattttttactgtagtaaaatgtactataacg

SEQ ID NO: 4178 - DNA, 253 bp, Homo sapiens
  misc_feature (1)...(253): n = a,t,c or g
gcttgtaatcaagaagccatgtagtggcaggatatgagggaactcaactctgggagctttcttcttggataggaaaattctaatgtggaaaccagatttgcagtgattggaggtattgtcccttctcacaggtaagggacaagccttctaggtcagtggagactcagaactctttgaggggaaggagagggaggagaagcagtgctgaaggcagtcacaaccagcaaaccacattcttgaagtttncctgtta

SEQ ID NO: 4179 - DNA, 497 bp, Homo sapiens
  misc_feature (1)...(497): n = a,t,c or g
attcggcacgagaaaatgtccccactgattcttaaacatttggaatcccagtctgcaactattaatctggaggctatatctattttgttttgctttttggttggggggtggttgatctggttcttacacatcttggaagcaagaacaatcaggaccaaagtcactttgatcccactttttccaggagaaaaaccacctgtttggccagtgagaactacttgtatgaaataatttggccaaatcttcagtgtgaccaaatgtgagactgggagtttgtgtttttcacaggaaccctaagtatagacctctgctgctcatcaggaaacttactggagatgaaggccccagctgttgtcaccgggtttggaaagcaccttaantgaatcatgtaagcatcaggacataagcagcactttgtggtnaaatgtggaagccggagacttnaaagcacctctgggacccactggttgaagtttgcaatagaaacttaagttttc

SEQ ID NO: 4180 - DNA, 420 bp, Homo sapiens
gctttattgttattgctctagatgtatccagtaaagtgagaggtaaaaagtattcatctgcaatctgatggtcagtggtaagctgctagagaaatttctgtaggtgggttggggtagtggattaagaaataaatgtgaaataaggaagtaagagtgagtttagtaaactcaagaagcttgagagaaaaagatagggccatttgctggaggattaagggtttttcttttctttcttgtccccttcctaccctccttctctctctttcttagactggagagactagactctgggaaagtttaagtgaataagagaagattgaagaagcagacgaagattgataaattggggaatgggaaagagaatagagtctaaactctggtccataatgtcaacatttaggggtagattattaaaattgt

SEQ ID NO: 4181 - DNA, 604 bp, Homo sapiens
gcagagcttgccaggttgggttttgagattagggtcaggtcatgggtatgtggagaatggtttggaggttgaggacaaccacagctgtctcattgctgccatttctcctgaggacataatcacttggtcaccttggaccctgtcacttcctaaaattactcgttctgtcatgccatagaggtcagttttcctctttcttggcttctacccacaaacattcaccaatcatttattcgttcatttagcaaatatgcagcctccgcaagatgagctctcctgcagacaagcatggtctgaaacattctttgagcaatatttattgagtgcctactatgtgttaggtactgtgccaggcactgataagccagtggtaagggaaacacagctctaacctcacctcattctccaggttacaaaggccatgtgcccctttgaatctggcagagaaagtttcctcgttgtaagtatttgcatctacttcaagccagattcttctgcctctttctcctttccagacccctactctgtgcagtgctgaccacagctagagccaccgccccattgctcaaccagtatttatttccctaaacgacccttccttcac

SEQ ID NO: 4182 - DNA, 943 bp, Homo sapiens
  misc_feature (1)...(943): n = a,t,c or g
tttttttttttttttaaataaacgtcctctttattttaccaaatataatttatcagttaagttgacatttgtcaattcagttatagtaactataaataattctcttaagacacagttctgtaactttttaaggatacgagagtaaaccaatattgctccttgcagcccaggccaaaagtacatgcagttggtacaatcggggaaaagaaatgaaacttccatgaaagtcaccttcattttctttccctctcaccctacagtcctcctctgctcactcagggcctggggcatgcctatctgtctgctttttaggcaaaggaggtcactccagagtcttctggggactgcctgggccaaattccagagatgaggaaggggcgagtgactggggtaggggtggctggagaccacagggacacagccttaggggcagaggagttggttttgatgcctgtacaagaagaatctgtgtgtaagtattttttgaggtggaggaaaagatgaaaaaagtccagagggaggaggaaaaacaagcccaggctggtgttaatgaattctgttggacacaactccaactagaaaacctctaaaattccttccaattcctacgggttctatgattccagaaggaggcctggaggtctgggtagaaatggagggagagaaaatatggtctctggaggtctagggcaggttcctgggataaggtgcagtgttggtagaaacaggatcattgcctaagccttcccttggaggtgggcccttgaggctacagatggaagggtttctgtagaagcttctgagagagaagttagaaaaagcctacatccaaatccccagatctgtacacgtgtgactgcggatggaggctccagttttctcccaattttgtgctaggcagagaaaagtagaaacaaccagatgatgtccaccctgntagttc

SEQ ID NO: 4183 - DNA, 1120 bp, Homo sapiens
tttgctaacaaatcgagatttattttaaaaactattctcctgctatgagttcaatatttttatttctttacaatgatttcagaagagattacaaagagattaatatacttaaagaatcagactcttgcaaacagtgacatcattaaaaagagcttattttcattaacatgtgattaacaggaaggagatgattggtgagttttcttcgtaaccaggttcactgtggataggaagggcctgccttccttcccaccatggagatcctaaaatcacaagctccagcctccatcaatgatgacagggttaccagttacataagcagattcatcagaagccaaatacacgcagagcatggctatttcttctgcagttgcgaatcttcccgtcttttgtctcttcaggaaatcattccgtgcctcttcaggatttcctctggcttgtattctttcttgtagagatggcgtatcaactgttcctgggcacacacagttgcacctgatgccctgctggatgaaatctgcagccacagattttgtgaggccaatcacggctgccttggttgtgctgtacacacatctgttcacaactcctttgacgctggaagccacagaagacatgttgataatattgccagatttctgagcaagcattttaggaaggaatgccttgatcatcaggtacatgctgcgcacattgagattcatcgagaagtcccagtctttctcctcacaatcccaggacagttccatgatggacaaaaccagcaacattaaagagaacatcaagtctctcaacttcattggcaaactgatcaatttgtttcttctttgtgacatcaaggacacgagtttgaatacccgggtacttttccagttcctgaagtttggactcattaatgtctgtggctatgactttggcaccttctcttgcaaaagctaaggcagctgcttggccaatcccctgagcagcggccgtcaggatgatgactttcccatcaagtcgacccataatggaacctgtggtttaattttaagcagcgagctgatggcgttctccagaacgcggtctcgtgcggggattctttggctccactagtgtcgacctgcaggcgcgcgagctc

SEQ ID NO: 4184 - DNA, 752 bp, Homo sapiens
  misc_feature (1)...(752): n = a,t,c or g
taaaacctgtttcactgagaagtttgtttttgggtccgctggtgtcactatggcctgggtgagaggccagcactgctgctgccctgaggggaaacgcctgggccgtgtagtggggacgctctgggaatggtggcggacgggcagcgtgggtgggacctggcacttcgtggtggctgagccatccacccagcagcggcctcctgtagcaccatcttgggaaagtcctgggggacgttgtgtgtcgtgctttttaccatcggtttgacttacagtggagtagaacgagccagagttcctgacttgagcaggtggatttgggcccaggccctgtttcactcttgcttctcggtgcggactaatgtcagcttgtggctgggaaagagggatgtgcagtgacgtggtcaccaaggcagtgagccccgctgaccccgggccagcacttngcaggcaggaggtgcggtctccagagtggtnggccagggcgggctggctccgtcttctatcttcttttcttgcctccctgaccagcagactcacctcccaagaacgcctgcccgnccacccgccttaggactcccgatgcgctcctggaaggccccaggagtggcaccttagtgtgggtcggcccgcagatggcacccaaggccgggaagggcagtaactgcacacgcggcgttgtcagagatgggggtnggggatgttctgggggccctgtcttncccattgtgttgcccagaacatccntgggcccc

SEQ ID NO: 4185 - DNA, 597 bp, Homo sapiens
tttttttttttgcaggtgagaaatggtctggttttattgagaagctgttggtcatttgatggaaagacacatacggtacaaaattacaggtggtttagttcattacatgatacaaatcattagagtctttacaagtcattagagtctttggattttttaaactcccatttactgtgtaccaaatcaatataatcacagaatcaaagtcacttctttatatgtgaactcttcgcatttacacgaatccacacatagagaagctgttccaagaccccccaacaccattagtgtctgcagcccaccaggaaggcaccacggactttgtggagagaaagatgctttgggggttcaatgggtcagtatcttgggcaggaagcacagggtgactcccgtcttgtgtgcgtgcgcacagccaccaacacacactctcaggacttcccgtttcacatacagggaacttttaaggcaagaggagaaaatgctaggaagtaacgggggatcagaactcctccacctctcaggctccagcagtcacattcccagctccgttctcttgttgaaccttggtaggcccagaaacatcttccccctcctcac

SEQ ID NO: 4186 - DNA, 307 bp, Homo sapiens
ggcctggcccatatccaaatattttatgtttggtcaaaaatagaaaattctattataaaaaataaagttactatggcaacattttcccaacatagttcccagtatataaacttatttttcttaaaatgataacaaggtagctcaataacaatacaataccagtgataaccaaatataattgaatttttctaaaactacattcttacattccctatccactcaactcttgtaatggttttccacttttaaaaactatcaaaataggatttttaaaaatttatcaagaccacataatgcagttgaacac

SEQ ID NO: 4187 - DNA, 687 bp, Homo sapiens
gattctttatgccttgccctagccagatggaagaagatgaagaaggaaaccaggtgaactcagcaaggcagactggctgcttacttcagcactattggaattatttcccgctgttgccaatggaaatcaaagaaaatggatgtgacgtctgtgcaggtggacggcagtccgaggggcttatttcacttgcttctcagtgcaacttgataggagaatccagcatcttaaagttgcatatgtgtagcactaatgtttctttttaaatagttgggggaaaatgacctagaaaaccaaattgcagtttggtagccaaaattaactcttggtttatttgtcctttgtgtgtgaaaagtcctactattccgtgcgtcagacttcctcacagaactgttgactggttttggttcttagtactattgagatctttcgcgtcgatcccaacggccttagcggcggcagactggaataacaccttacacctttctggcctgcatttctgtagacttcactctcaagggaggagttttcttttcttacgttttgacttttgcacaccatatgcactagggattctggaaacttctagcatgactgcaaagtggccaagagaataaagtccttgatgataaatcacagtatatcccttgagcctcaccttattggccagtgctagattttttccttttt

SEQ ID NO: 4188 - DNA, 435 bp, Homo sapiens
gtggaagataaaggatcatatcattatgttctttgaaacaattatggtaaggaataaaactagttaaagttttttgaaaaggctatcagtagtaaaagcaaacaatttgttagaaagtaagattaaagttggttaataattaaaattttggataataatgctagtctagcaacatgctgaggtaatcataaggaactctagaatctgataaaattaaggcatgttggcaatcctctctctgagatgcccttctccctctattaatccacagctagcaccaccttcaaatcaggctcaagaatcacttctaggctttcccaaattaatctcacctcactctgatcaccctttactgaatctccactctttgtttagccaacatattaagcagctactatgtaccagatacattgtggaaaagatattaaaatctgg

SEQ ID NO: 4189 - DNA, 649 bp, Homo sapiens
  misc_feature (1)...(649): n = a,t,c or g
gagtcaatcagaattggaagaaaagcaaacttctgccctctctggtggagtccaggtcgagccacctgcacacagtgactccttggggccccagaccaacagccaacagcagaccacacagtacatcatcaccaccaccaccaacgggaacggaagcagcgaagtgcatatcaccaaaccatgacttccaccctggagcttgaatccagcacccacctcgtgtctgttctcataagtctgaaagctctgacacgtagagctcttttgtaagatttattattcactcaagagttcggaaaccacagttttgtctctcatccatacactggggtttattttgccaaggtcatctttatcaaattgactcttcaaaccctcggtttttgccacagaacagagatctttcaggggaaagtagatttcgaggtggagagaatttgccttgctcttgagctggtcttttaacatactgacgagccttacttttcctttgtggaaatattnaagtggcatattgtgtttcataccaaaggtgggagacaggatgtgccaagtttcatggttnactggactttcttattccaagccatggcaccaaaggagaaggggcattttgtgggtgtgcattaggtctgaactgctttatctg

SEQ ID NO: 4190 - DNA, 259 bp, Homo sapiens
ggtactttttttttcctcaaatattttgaatccatggttggttgaatccacagatgcagaaggctgactgtgtgtctagttttatggtcactaaagagaaagagatgcatcttctaactggggagtgtagagaagagggcttgctttctgaggattcagaagagagggagaaaaattcagacatgtagttaattttagaggggagaaaagtctaggattctctgattctaagtcaagaaattattctgacagcatgaag

SEQ ID NO: 4191 - DNA, 192 bp, Homo sapiens
gctcaagcaatcctcctgcctggggccttccaaagtgctgggattacgggccaccacgcccagccattattagagtcttaatacaataccaaagtctaattctccacagatcttgctcagcgtaatttttttcaagaagtgttatgacctggggctgaaatgctggggtccaattttctctcctttatagga

SEQ ID NO: 4192 - DNA, 301 bp, Homo sapiens
gccacctcagtgcagaatcagagaggaaataaaactgccagggaccagagcaggcttcctgccctgtcctcccatcagtcagggtcatgctggtgttaccctgaggctatagccctcccagctttattaattaattctcttaccctgaggctgagggcgaacagtaggtagcatgggagtgtaaaggaatttatctagataagtttgtttacttatgccctccggaaatcatgcaagactgctccctgcaaaggcgggcgacaatgttcattactcacaaattgtgttggcttcaggcctt

SEQ ID NO: 4193 - DNA, 546 bp, Homo sapiens
aagcaatacttccagccatggggaagcatcggtgttctgtgttattaaagtgactccagtgcaaaggcacatatatcgtattggagtaatttgccctgactaggttagaagccaggagatggttcttcacaggtattcctgagtggcccaaggtctaagtcagctctcgtttagacaaatcctatctctgctgatcatctacctctcaccaaatgcagccatcaccatgcacagcacatgcgctcctcttgatgatcttcacagagtgcagagtcttcaggaagttctttcctcagtggaacctttgggatttctaggagaggggcaggggaatatctggaatcagaggtgaacactttacagcagcctctaaactacttctaattacgttcacctgactaaactgccaggtgataaacgttttatataaaagtaattcactatggaaagttctggatgttttccccaatgggtacctcaaaacagggtacaagatggaaacctgctcaagaaacagcaaaatgtaaactggataatggtgatgat

SEQ ID NO: 4194 - DNA, 369 bp, Homo sapiens
  misc_feature (1)...(369): n = a,t,c or g
cttatgatgatgatgttagatgataaaatgcttatgtgatgtgatgaaggtaggtgaattatgttaggcattgtaatgcagcatgaagctactattgaccttctggtgttacatcagaaggaggatcatctgcttgggtggtcctgaatcatcacgtcctgatgatgtctgttgctggttgtcaggagcagacagtgtccatgactaatggggcaggcagcgtatatagccatgtatacactgggacaaaggggatgtctccatgtccacggctgggacagagccagggagagtgccaaggtttttgtcacactacttcaggattcgtggcagttttaaagcttacccattgttttatttnctgggatt

SEQ ID NO: 4195 - DNA, 596 bp, Homo sapiens
tttaaaaatatcttaacacctttacttagatctcatctcatacttgtagcatttcttcaaatttactttgaaaaaagagcttcactgtgtgtggttgtcatacacattcttctacccaaccatggacctctttcttcctctcaggcgcacttcatctaatttttttagcactggcctggcctttttggaggaggtggagtagctcttcagaaaggcttcaaacacagtttcagtgttgggatgggtactgaggaaggccttctccaggacatagaggtctactcccttatcctctggaagtgctgaaatgaaactcagcccaaagtctatgagcacaatgttcagctgttccagggggggtttcaggagcatgttggaggtggtgagatcaccatgaatgaggtcttcatcgtgcattcgagccaaaacctgcccaattgtcttggctaagttggagagaccctggggagttttttcagtctccatagcggactgaatctactctcgaacagtcactgagccttcaatttcttccatatataagcagttggaagcatagtccacaaaaaagacaactggggcagatattccagcgc

SEQ ID NO: 4196 - DNA, 524 bp, Homo sapiens
  misc_feature (1)...(524): n = a,t,c or g
ggggccataaggagttccccanaaagggtggtgcccctagctgcttggccaacctgcctgtttctctagataatctcatcttggcgtagncccagcannnnnnnnnnnnnnnnnnnnnnnnnnnnnnnnnnnnnnnnnnnnnnngataatgagccaccatgcccggccttgctccacagtcttacagtgtacacagttgaatattgtcatacacaagtataatgtaaaatgaatacatccttgtctgagatctcagataaaaagtgctctgctctttcctgtttagtatgatataagtcattgatttgtcatacatggcctttattgtgctggggtacataccatctatacctaatttgttgagtttcttaaagcacaaaggcatgttgaattttgccaaatantcctacatagaccagcaaaataaagatgtctaaatgtccaatggnaaacttaattaaccggccgcaagcttatccctttagtgnnggttaatttagcttgggantggccgtcgtttaaaa

SEQ ID NO: 4197 - DNA, 291 bp, Homo sapiens
gggcctggtctgattttgagctctgtggaaatacgcagaccacgggggaggaggccgggaaatggactcggtttgagggcttgctcaaggatgcggttttgtttttcggctgatttactccaagacagccagagattgttctgtcgttgccacagaggtgactaaacaggaaggtaagtttgaggtaggaagaaaaccatccccaggagtttcatgtagcaaagaaggaagtagctgttacaaatagggtgacagtttacatgtgggtctaacagtctcagctctgttgtt

SEQ ID NO: 4198 - DNA, 634 bp, Homo sapiens
gatcattttgtgaatttgggtaggggggagggtagggataatttatttttaaataaggttggagatgtcaagttgggttcacttgccatgcaggaagaggcccactagagggcccatcaggcagtgttacctgttagctccctgtggggcaggagtgccaggaccagcctgtaccttgctgtggggctacaggatggtgggcaggatctcaagccagccccctccagctcatgacactgtttggcctttcttggggagaaggcggggtattcccactcaccagccctagctgtcccatggggaaaccctggagccatcccttcggagccaacaagaccgccccagggctatagcagaaagaactttaaagctcaggagggtgacgcccagctccgcctgctgggaagagctcccctccacagctgcagctgatgcataggactaccgcaggcccggactcaccaacttgccacatgttctaggtttcagcaacaagactgccaggtggttgggttctgcctttagcctggaccaaagggaagtgaggcccaaggagcttacccaagctgtggcagccgtcccaggccacccccatggaagcaataaagctcttccctgaaaaaaaaaaaaaaaa

SEQ ID NO: 4199 - DNA, 1124 bp, Homo sapiens
  misc_feature (1)...(1124): n = a,t,c or g
ttttttttttttttgcatttcaatagaactagctttatttacttatttatttatttaaacaaaagaaatggtttaaaagcaaatgcatatatgtaccaagggatggacatgacctggtacttacaaaggagctgctgtgtcataatggaaacagcatattaggagaaaaatagtatttcgtgtgctgtctgcttgagtaatcaatctggagatgcaagttaaccgaaggtgctctgccaagccatcagcgtgagaaaaaaaaaccaccagaagttgcctccagataacgatgtagtggcagcatgataactggcatcaactcacggtcttctcattttccccattttctataattttcctcttcttttcatctatttttttcttgaagatgttatttcggtaaaactgaagctctttgatgctttcactaatgtcatcaagtgccctatgagaagcagccttctttggtgcaaattcatattcttctggataccagcgtctgcacagttctttaacagtgctcacatcaattattctataatgaagatgtttcatgaactggggcatgtatttgtcaagaaacttcttatcttcatgaactgaatttcctgcaagtggacagagccctggaggagtctgctgtcgtacaaaggacagaaattcatactctgcctgctgcaatgtaattgtactctccttcactgccttggtaaggccagacttcccgtgatgctccttacaccaatctgacatgctgtccagcaactcatctggttgttttataatcaggttaggaccttcagccaaaatgttgagatcagagtcagttatcagacaggccatctcaataatctggtccttctcaatgtccaatcctgtcatctccaggtccacccagaccatccgctgagccatgctctcccctgccgccatggtgcgccaccttcgcggacacctcgggccccgaaccgtccgtgactcccacctacaccccgcaacagcctggagcccagggagccgcctagcatcacccgggaccagcaancacggccccagtctcgcagccggccntngcaggcgcaatagtcgctanacgtcgcaagaccacggggaggcnacgagct

SEQ ID NO: 4200 - DNA, 250 bp, Homo sapiens
gctgtgctgggggcatccacaaagaagataaagggctcctccccagactcagtgaccacatccacggtcgctcaaagcaggcagcaagaaaaggttcgaccacaaaagagacaataggtgatgatatttttattcgttgctttttacttttcaagctaacccttcatgggaaagtaactgtataagactattaaatttttttgttattttttaaaggagaatgccaatttattaacttacaatgtgtaat

SEQ ID NO: 4201 - DNA, 466 bp, Homo sapiens
aagttcatttaaagcctaaaggaatagagactgcttctgaaataacttcttgtaaaatatacagtctttcagtgacagcaatttctccttatctgccttcttgacttcagggaaaagattaaaatctccattcttatctctaattatctcatttaaatgtctttcccccttattccaaaagattagcaaaatgtgatgtgtgatggaaagtgtgccaagcaggcagcctccattcactgtacaatgtcacccaacatcttcaggactcttccccatctccaaagcttgaccttttcacaatgcctccaaggtgttgtgaagtgtgtgttgatggaagtgtgggaaacccatgaggtatgaaaccactccagtcactgttctgggctgcatcttaaagtgaataacgggactttaacatttacccattcttttataattttgagggattaaaataaaatgggaaatt

SEQ ID NO: 4202 - DNA, 111 bp, Homo sapiens
gtgatatttaccagtttttacttaacaattgaatctattatttgtacagttcctagccataaaatactccagtattatattaaattatttttctctattttattcctttag

SEQ ID NO: 4203 - DNA, 535 bp, Homo sapiens
  misc_feature (1)...(535): n = a,t,c or g
ttttttttttgtccgactcgcacacatttaataaactgagctcttgcattgcctgccgccatcacctcttcctcaaaatgggctgtgggcgggtaggttcatcgctgtctatgtgctgccacagaattgctgagaccccccaggttagatccctggaagcagagccagaaagcagaaactgggggcacagggtttgtgggcaccccacccagatgggccggggaggcactggctgaggccaggagtctccccctgggtcccaagggagggcaggctccagggggtgcacagcaccccagacagggggtccaacctggggcattggtacctggggccagttatttatgggcaggccccagtgtggggcaggagggcacccatgagccactaggagctgtggctggtgcaacagctgggatggggcagccacagcagccactaccggggagagtcaatggtggacaggggctgcgggagctgggacggccccacgtcaaagccacttcagggagcacagccctggcccagntggggc

SEQ ID NO: 4204 - DNA, 241 bp, Homo sapiens
ccaaatgttttttttatagagtgtcccatactctagattttgctgatgactccccatgatatacttcaacatgtttctttatcatctgtatgtcctataaattggtagatttcagtatctgagaatattcaagaagtagaatcagtcaagcttagggattggatatgagtgtttagggggaaggagaagtcgagaattactcgcaggtttctgttaagcagctagaagggtagtgatgcaa

SEQ ID NO: 4205 - DNA, 614 bp, Homo sapiens
  misc_feature (1)...(614): n = a,t,c or g
attaaaattttttttttttttgcttcaagaactttgaaaagtgatcatccataaagctttaattcctttcctcttaacttgttcaaaaaaaagaagaggttgacaaactttataaggaacaatcaggcagctcagcagaccagacccatgtctgacccctgacactcactatcatacccagagttatgtgggatcagtgtgaggaagtggaaagacattggcctgacagttaagagttctggtctctatcactaaccctttcacaacagctcagtcatttattttatttattttagaggatgggggtttctatggtttgcccagacttggactcaaactctggggggctcaaggtgatcccccctgccctcagnctcctgaggtaggcctgagggcttacagggnacaccacgccctggcagctctgccatttaatcattcagtgtctcgggttccaaatctgcaaaatgaaggaagcttcccagtctcaactttataattattgtggagagaaaataatctaacctgtgtacaaaagacacaatacatactatataaaaatcttgtggtattttattataaaatcaaaaggtcatgacccaaatagttgaccc

SEQ ID NO: 4206 - DNA, 1397 bp, Homo sapiens
ttttttttttttttttgttttgtcttcctttattacatttttgcttttgagatacaaaccaacctctcataccacacaaagaacatccattcttgggatttttaaagtgcatttccccttgaactctgtgtacaaaaatatttatcttttaaaacatgcaaaaatttcttgacaaggcacttttaggtataaaatgaagatgagtccttggttctacattcacactgaagtaatagtgaaacatcatcacagctgcactctcaaagccctcagaggttccagcagtctctaaaaactcgtcaacaagactaaaaacattcacggctttacaatggtggggttacagagctttacaaccatgaccaggaaaaaactgctcgtaacaacagctgtccttcccagttccacatgtgttgtctcactgcaggaaattaagataagctgccaaattgtctttgtgtgaccctataagatcccatcatccatgtaacttcttgtctccgatttcagtgaacatgtcaggagagacgtgatcgggactctcccaggactacattcaggtgagaaattttagaagaggaaacaaataaaaggcaaccaaggttttcatcccctatccattgagagggaagatccagaaaatgggcagttccaaaaaaggaacacttttttgattgataagcatatatggcccatttaatgtccatgactacaactaatgccttttttcaaaaagaaaatggtttgaaaagatcaaaaccacggagcaatctcctaacagttccaaatttacatcttctaagaatgtataattttgccaccattaaaatgaaatcttaaaggtaaattaaattctcccattgactctgacattgttttaatttctggagaactgtacagcttcattatttctcaccagctccagtagaataattttttaaataaagaaacccactcaaatgcttcatgtcttccaatagataactgaaagcttattttattaaatatctttgtataatccagcttatttattgtacccagtttgcaaatgctcctcagggcacttgagggaataaatataaaacaaaaatgaagttgcttccctattgccggacaactgcacctgtgacaggtggctggtctttctggggcaacctgggaaagattctgggactcgggggccacttgtaaccataaccaagagctgtctgaaggcaaatctacaagtcaaggtgcagtgaagtctccaagtaagaaacctgtcaccctctgaagtgtgtaggcttatctactgatgatgagctatcaaacaaggagagaatacatcagcgcagctcccgagggccttctgagaatttcacgggacagaactgggccaaaaggaagaagactgtttg

SEQ ID NO: 4207 - DNA, 860 bp, Homo sapiens
gcgaccgctggagcgctggccctggtcctggcgctggccccggggctgcccacagccggaccggcgagacaccgcgccctgccgagcgggggcccccagtgcggcttttcaccgaggaggagctggcccgctatggcggtagcgaggaagatcagcccatctacttggcagtgaagggagtggtgtttgatgtcacctccggaaaggagttttatggacgaggagccccctacaatgccttgacggggaaggactccactagaggggtagccaagatgtccttggatcctgcagacctcacccatgacactacgggtctcacggccaaggaactggaggccctggatgaggtcttcaccaaagtgtacaaagccaaataccccatcgtcggctacactgcccggagaattctcaatgaggatggcagccctaacctggacttcaagcctgaagaccagccccattttgacatcaaggatgagttctgatgttccccctgcaggagcaggttcttgggagcgtgaggcaggaagacactaggtgctgaatctcctgcaaaactggctgcctggaggccctgagccacccagatctgaataaaacagatgcttaccctggaagagcaaatgcctcctgttgtccttggtcaggggttctgtctacctggggacccctgtctgcacaccagggatcaataagagccaaagtgggacacctcctagatgtcagtatcagctggctgggcagtggaattttgagcgacctttactttatacttttctgtgcttgacagattttcagccatgaccatgttcactttataatcaaaacaaaaataaaggtcccatttttacaaaagg

SEQ ID NO: 4208 - DNA, 638 bp, Homo sapiens
gcaggcaaaaaatgaggctctctggacctcataggctttggcagcatctaccaggttggaccaatccaagtctgcagcagtgtcagggcaggggcatcaggccagggtcgggcataggctgcctgcgggtctcctggatgtcagtgagggagctgtccgaggctgagaactctccatgcagcgatttcattcctaaggtgtaagaaggcctcctcaacgggagcgacttggggagagaagggtacgtgctactgaagaggacgtcgttgggcagggcttggtccagaagtgacgccctggaggtgaaaaagtgctccctctggctattgtaaatgctctcgtccgacagtgttctgtgcaaggcccgcccgtgaggtgggggtgctggggaaaggagactgaggagaggagagtgcgtggaacttaaaactcttctgtgattcaggagttgggctttcaagatcaattagtttctttagatcttcttcaatggtggacttggaggttggcttaggagatgcccggaggtctctggttgaggcacgcagcctggtgtgggctatttcattgccatcgctctgatgacgctttctcgtgtccataaatcccacggagtttatggtctcttcgggtttttt

SEQ ID NO: 4209 - DNA, 393 bp, Homo sapiens
  misc_feature (1)...(393): n = a,t,c or g
gaataatttcagttaagaaagaaaagaatagaaatctaaccttctaattggccaaccatctaaaattctatgtggaatgatcaacaaaggaagacagtattgagttgctgggtcctctctacggggtcagaaaagaggcctggttcacctggctctccatgttttccctgtagagtccttcaaacccatggtctttctctaccaactttgaccctgggtcatcatctctctctccaatcaccattccttctctttgaaggttaaaaaaaaaaaaannnnnnnnnnnnnnnnnnnnnnnnnnnnnnnnnnnnnnnnnnnnnnnnnnnnnnnnnnnnnnnnnnnnnnnnnnnnnnnnnnnnnnnnnnnnnnnnnnnnnnnnnnnnnnnnnnacat

SEQ ID NO: 4210 - DNA, 458 bp, Homo sapiens
gcaaagacacagttgtgcatgtctggcacaacctctcggcctgcaactgtgtttagtgataatgatgaactgtgtgtgtgtgactttgaaggattctgtatgtcaagtgaaaaaaaatgatgtctgacctccttacatatgtaaaaaatataccttcagagttcagcagtaagctggaagaagtagatgtcaaagaagttttgaactttgataataatgcttcagttattcattcattgactcggtggtaaaatagtcgaaatggttttgaatcagggttatgatagtgatgaagaaggtcaagataacaccacagaaaaggtgcttatagaagaagacatggtgaaaatgtatggtgggcatattgaaggattacggcagcgtgcattaacaacagaattgaaaaaccatgtcagtttttaaaattgaagagagacttctgagctaaaaaccatgtt

SEQ ID NO: 4211 - DNA, 354 bp, Homo sapiens
  misc_feature (1)...(354): n = a,t,c or g
gtcacttccgccatcgtggtcatcacttcaggcatcgcagcatcgtgttgtcacgctacctccctagcacccccctgcgctggacagtgtttagctcgagcgtggcctgtgctctcctttctctgacctgtgccctcggcctcttggcttccatcgccatgacctttgccacccagggcaaggcactgctggctgcctgcacttttgggagctctgaactactggccctcgcaccttactgtcccttcgaccccacacgcatttatagctccagcctgtgcctctggggcatcgcctaaggtgctctgcgtgggcggagaacgtgtttgctgtaaggtgttnttagttcaacca

SEQ ID NO: 4212 - DNA, 821 bp, Homo sapiens
ttttttttcatgccttgaggaaagctatttatttccaagatatagactgtacttttaagacaggacttttcagaagcaggaaattttagttgttgccagagaggtgtgtcaaggacacagtgaaaggagccatgcggacatggggtggaaggctttgtccaacactgttacaacacttttgtaaatgagcaaaacatctttaaaaatccttataaattctttataatatgttacacatttagagacaatatttacaataaaagaatgggggagggagggaaagaaatctactttacagtaaatctttgcataaaacaagaggactgatagacgtggcagcgggttcaccacctacctgggcttccctggaatgagtgagggtgtgtgggggctggcctggtgattggaagtctatttacagcctgtggggagaagagggcgctgggtcctgtccatcctgcaggaacagcccagctcagaccccataaatcagtgtgtgagtgacagagagacagcaggggtgttgactatccctcctcctaaggggaagaaggtgggcttctgtgtgcctgggctgtggaaggaacaggcacagatggaaaaacaaaaagaggggtgagggaggtaccagcaaagggggacccctggacccccccccaccaaaaactgtctggggaacaggcagctgcgcgtggttaaagcgcttagagggtgactcaggcaaaaggatgttggggagtaaccctggtgagggtttaagtcctgcctccttggaatggccccaacccccttctctggctctggcaaggggggcgggcagg

SEQ ID NO: 4213 - DNA, 368 bp, Homo sapiens
  misc_feature (1)...(368): n = a,t,c or g
tagttaaaaatctttattaaaaaaaaaaaactccaaaactgtttaaagaaaaccaagacaaccggcaaagctttgaagttgtatacagtcatgcactgcatgagacagcggtcccataagatgacaacactgtattttgacttagcttttctatgtttagatatacagatacctacttgtgttacacttgnnnnnnnnnnnnnnnnnnnnnnnnnnnnnnnnnnnnnnnnnnnnnnnnnnnnnnnnnnnnnnnnnnnnnnnnnnnnnnnnnncagtaggctgtaccatctgggtttgagggcactctaggtgttcgatgaaatcgactgatgatgcatttctcagaaagaatgtccccactcgtgccg

SEQ ID NO: 4214 - DNA, 385 bp, Homo sapiens
  misc_feature (1)...(385): n = a,t,c or g
ggattttagtatctgttgtttctgctttcattcatgatttctttttgccttatgtattttgtgacattttatcaggagctcatgcgtcttagtattttatgggtgggaattctttgaagcttggattgaggttaattttttaaagaaaggattatatttagtcacaccagttgactggggaacactactaacctaatcattttgaataatttattttaaattaatcattagctagggggtgttatgggactttgtgggccttccaaattctcaagggggaaaaatttttgttccccctcccatccaggcagccatgttttgcccacagaccaatttcccgggggnaggtgaggggggagaggggtgnaggggntttattttttag

SEQ ID NO: 4215 - DNA, 290 bp, Homo sapiens
ggtttgtttttgctcaaaaacttataatttgcttacgaaagcttttttctcccctataacagaggttggggaagacagggggtggtgagtaggggaattaggattagggagataggattagggaagtagttgttaacagaggtgagagagggggattttgcttccccagggaatattcgtaagtgcctgggagacatttttggcatcacagcttgggggaagatgctaccagcatctagtgcgtggaggccaaggacgcactcagcatcctacatcacacaggattgagc

SEQ ID NO: 4216 - DNA, 314 bp, Homo sapiens
  misc_feature (1)...(314): n = a,t,c or g
atagcaatcttcccaaatgacacttgatgaagtaggtgaatagggttggagtcaggacagatacttccagtcactggcagtgattcagtaaacatttcaggttcatagaggagtaaagggaattattgattagatctatatccaaataataggtgaaaagtgtaattacttaggctaatacaggagaaaaataggaataataaaacataatcctgaaggaatataagggagagactagggtgcattggctcacgcttttaatccccgcctttttngggaggctgaggttgggtgggntttttttttttgggccc

SEQ ID NO: 4217 - DNA, 485 bp, Homo sapiens
  misc_feature (1)...(485): n = a,t,c or g
attcggcacgagcttgtcctcatgtgtttttatgtgtgtgggtgtggttgtttgtgcagttttatcacatgtagatatgtgttacattttgagagttctttatgtattctcgatactagttctttgttagatatgttttgcaaatatttctcccagtctatagattgtcctttcatccttttaacaaaatcttccagagagcaaaagttttgtcataagatccagttacctttttttttcttttatatagtatgcttttgatgtcaaatctaagaactctgcgcatccccagatcctaagttttccatgttttttctaaaagttttanctgggtgcggtggtgtggnctgtgatcctgctatttggggaggctgatgcaggatgatcacctgngcccaggagttgangcanccttggtcgacacagngagatggagccccgnncaacagataanacgaatcaangttgtagttacattaattcca

SEQ ID NO: 4218 - DNA, 1993 bp, Homo sapiens
  misc_feature (1)...(1993): n = a,t,c or g
ccgaggttcctcatctgctcgcgaggatgccttttctcttctgccttgcgaaataacagcagcctagctgttgcccgtgaccagtgagaaaggcagcgtcgcgggctgattaggtttcacccaaaggtcgcggcgccgaattggtttctaacgagaacttttaaaatgatccgttccaaaaaagggtaggagccgcgagaccctccaactgcccagagaaaacaagtctcgtctggcaaagttctcggcccacgcggtccgcggccaagggcaaacggtccctcgccccacgttgccgcagcactgcgcgtgcgaagccgctgntcaaacgcgctgacggaggccgagaagagaaaaaggcgggacttcaaattcccgggttgagcaaaatgggcgcgggagaaggagatgcaggagtttcacccgtagcttctttccgaggccgcccggacctcagcacgcttacgcattccatcgtgcggcggaggtacttagctcactcgggccgcagccacctggagcccgaggagaagcaggcactgaagcggctggtggaggaggagctgctgaagatgcaggtggatgaagccgcttccagggaagacaaactggaccttaccaagaagggcaagaggcctcccaccccttgtagcgacccggagagaaaaaggttccgcttcaattcagagtcgggctggctcaggtcgccgtggagaggaccacccggctgtgatgaggctgaagccgctacattcggcctgtggtgccatcgaaactacaagaagctgttgggctcctgttgctcacacaaggagcgcctgagtatcctccgggcagaactggaagcgctaggcatgaagggtaccccttccctagggaagtgtcgggccctgaaggagcagagggaggaggcagctgaggtggcctcccttggatgttgcgaacatcatcagtggctcgggcccggcccacgcagacgttacagcctggaaccctttaggagaagcagcacccccaggggagctgtaccgacggaccctggactcagatgaagagcggccccgtcccgcacccccagactggtcacatatgcgtggcatcatcagcagtgatggcgagagtaactgagctctgccacccccaggagggacccttgatacatgtacaaagcatacatagcaccccttgccctgtgtctgtggaacagaagcagcttccttcagagaagactgcagctcccaaggacacaagctgttgggatgctacttctcagcttcacgctgtccctttaaggtgtttattttttaagactcaataaaggagtgtttttaatcacctcatcaaatttggtcccccattctcacctcctgtattttgggccaggaaactgagcagtagtcactgcctccacctcctcccctggcctggttccctttaatttcccccgggttcctggaagaagtccctgcctccagaccctgtcatccaacagccaccagacccttttggagaagggtgtgtggctcctgtgctgcccgcctaccccgtggcccctctgctttttagcctagtctgataacctaatgcccacttgggagagggatagaatgacttgagggcagccagtgcttaagccttctcccttatgcaaacagccactttgtccatgggctgttagcctcaaaggggtggggaaaagcccatacctcctgggccagtcctagccctcctaggcctctggctacaggcccagcctctgcagtcacatgaggtctccactgaactctggctgctgaggcttgcgggaagattcgtgagcatggagctgcctggggtctgtgtgggaggcaaacctaagaatctttgaagtcaaagcaaagaaaacaggaattagaggtcaaggggttgaagaccacctttgagatccgagatctggtcacacctaaagtcattaaaatcactgaaatgtttagatacacagcccaataaattc

SEQ ID NO: 4219 - DNA, 884 bp, Homo sapiens
tttttttatagtaggtttatcttttattctaatgttgctagaataagaacaaaattaaaataagcacacacacacaaaatgcctctgtgaatcagtcacaggatttctctaagtctgggctggtgtcctttctcttctgctgcttgcatagctctttgatgttctctatctctgcaggactaaacttggaggttagcatcacattgtcataatcaaattcttcatcaagtgaaaaaagttgaacttcatctccaagtatctcttccgtctgtttgtccattcttttaacactgggctttggcttcacttcacaggtaggaggctgggccacaaaagggatacaggaaggaatgctggtgcttacatcctgctccacttctcctggaagcagcagcaaatcctcactcatttggggtttaatctcttcatccatgtccaaatcttctaaatctaggaaattatctacctgttcttccaaacattgtgatgaagtacgaagaaagatggttttatttctaagatggtagtcatctgcttcatttttatgagtaacttttgctgaggtaaaaatgttttctgaagaatcagttccaaacactccccttttggacacatgatcctcttgtgaaagatgagtaaaagtgttcagaaattcttcatcatatgtttgctcatgacaattaaggaatttatccaagacgtctttgattaattgatcttcatccattatttccaatcctgacatatgggcagacattcctattcatgaggccacagtatctcccattccctagttttcctcctttgctcccgtctagtcacttcgcaccttcggctagtctttatttacagacacattccaggagtcccctctcccagagcaa

SEQ ID NO: 4220 - DNA, 1263 bp, Homo sapiens
ttttatgtttttcctttatgtttaatagttctgtgaacattgacaatatattacttttagtggtacacagttcttgagaaaatgtcttgatttttacattgccatttgtgatatttttagcagtccaccacaatatcatttttataataaaaataaaatatactcattgatgatagagaaaatattgttaaagacctcttgggacaggaaaaggctcagtcataaaatcagatgcttattcattttcagctgtgtcattttgactcattactttcaagaataactataatattgctagacagttcattacactgagaagaactttccttgaacttcacatggagattgagtaaagctcttctatttgttttttgaagtactctctcagctcaggtctcttagcttttagtgttggtgtcagcaagccattttgaactgagaacatgtcagaatggatgtgaatggctttaacctgctcaaaagaatggagtccactttcttttcctaacctcaccatatcttccaaaatggctttcttcagatccttatttgtgcagagatctgcatatgttccttcaattcctctcttcctgggcccaggagggcataacttcagggtcaggcacaacaatgcctaccaaaaaggcctttaagctgtccccatggacatagatttgcgccacaggttggctccggatgtagatgttctcaatcttctcgggtgcaacatattctccctgagcaagtttaaatatatgctttttccgatcaataattttaagagttcctgccggcagccattttccgatgtctccagtgtgaagccagccatcgctgtccagggcctccttcgtcctgtctggatctttcaagtagcctttgaacacatttggtcctctcacacatatctctccctctcctttgcaggcccagtagttcagttcctcaacatcaacgagcttgatatgattgcagggaagtggcgcccctacgtgccctgaggtccagtcgccaggagtggtgaaggtacatcccagctgtggcactcagtttggccataaccttcataaacctggcaccctagagctgcccggagaaatcccagaactgttggtgatgctggggctgctccagtaacaatcatccgcacacacccaccaagactggcctgaatcttattaaagaagagttcatcccagatactatcattcctgatgattccactccggacctcggccttctttacgctttgctgcaaactcc

SEQ ID NO: 4221 - DNA, 338 bp, Homo sapiens
gattaaactgaataaccagagttatagcagggtagaagagaatgtagaacttctcaccttttactttcttagtgcctgtgaaagtgctaggtttcacagagttattttgttgaggtatgtcatagtgaaacaatggagaatgcaaatgcaaatacattaaaatttttagccagtaaaaccttgtttttaaactccaaaaagagaccatctctatcctgaataattgttgatatttcaagaaaatgattattgtctgaaatagtttttttattggagacctagtttattttacaagcatctatctctgcaacttttattctagttaaaagaaaaacttg

SEQ ID NO: 4222 - DNA, 1097 bp, Homo sapiens
ttttttttttttaaagaagttcgaaatgtttaatatttcatgcagttaacatgcttcaaagctttaagtctgaagttttagacttatcccaaatccttgctaagaagtcaagaccactatggaattcacactgctttctatagacttccactgacttgcagctaatggtccttacacagcaaagttgggatttctagacgtctccttccaggttcggaaaagcctcactaggcaagtggcaagactgtgaagacaatgaaggttcagaattcagtcaaatggaaacaagatcaggaaacaagatcaaggactcatctgtccgcctgggcaccactttagttttgaagggtgacgccaccacggcatccccgcaggcacacactccttcctgtgccgactcccgctatttgcttgcctgagccagttcatgtttcagtaagaacgatttttctcccaacagtgccagttttcttattcccaattttgagagttgacccaaaattgtgggctatgagggatggtttttaaaactcctctaatgggttcccgaggcacagagcgttgaaaaggagggatttcttggctattctgaatttgtgcattgctgccatactacttcccaacacgaaccagcaagaccaccacaccaaggagtgggtaacatcttgatttaatttacaaataaaaagccaaaaccctcaatgcaaaggaaaactgcagtttacacttattctggagatcatttttaaccacagaaaatgtgcccctgtagcatgtttttaaatggcaagtgctatgattgcccagacatccataaactgcttgtatggagtaagaaattcataaatgaagaaagatttgttttctgtcttgtttctcctaggtcacgaacaggatatttcccacaaaatgttttgacctgaaaggaagtatgattccagtacttctggtcttaactcttctgaattacactgcaagctgaacttcgggtaacttcagccacattttcttttatcaccattttccatgtagtttggcttaaagccctcttgctgtcgcctcagttcctcctgttctctgtgtcggatcatttcttc

SEQ ID NO: 4223 - DNA, 3452 bp, Homo sapiens
  misc_feature (1)...(3452): n = a,t,c or g
gattttctacacaacctgccataaacgaaatttaagcctttggaaatttatagcattttcagctaatttgcattatttatctctgcaagatattgactagaaatcacgtttcagaacttctcagatgaaaacatcatacaacccttaaaactaagctcataatttaaaaatgtatgcagattaataggcttaaattgccaggactttagatagacattaccacttccaggttaatacttttagcggtttttatgccttcaatggtttgaagccctcaaccttagttgaaaacttaaaaatggcattgaatggctgctgcaataaggacacatgaattttggcttaagtggactaggaggacttaaatcttgcttaggcttttaaaaaatgcccacccactgggtctaggggatttgagggttattttcctgaattatggctaattatggattacaattcaaggttaaagatacacatatagtattctcaggttattcatatgatagcattttttaagagccaaagtnnnnnnnnnnnnnnnnnnnnnnnnnnnnnnnnnnnnnnnnnnnnnnnnnnnnnnnnnnnnnnnnnnnnnnnnnnnnnnnnnnnnnnnnnnnnnnnnnnnnnnnnnnnnnnnnnacgtacctatggccccaaggcactttaacaaatgagtaacagacacagttaaggtagaacctagcattttatttagatcttcattaaactgttggaattgagaaccagacatacgtaataaacctccaaaaatagatcctgaaaggcactttctgcttagggcaagcagtcatggaataagcatgtaaacaagctggcttctctgtaccacaccagccaagtcagctttctccatggccagccgcaccagctctgccctcccttctgttaacaccagccagaccccctgtagggtcttaacccaaggtttttctgtaggacaccttggcctacctgggaatgctggaaacatgttgttaaaggaatcatggtgttgagagaaaaaaaaaaaaatcttttaaaagctgccatctgaggtgatggcttctctgtacttacgccatacccccagaatacaataaataagcaattagaaaacgttcaagtatgaagggatttcctcctccccgccaaaagcactgctctctgaaggaagctggtttctctgtagctacaccagctgttcagaaagctcattggacctggttttgaaaataaaacaaagttaaaaccctgggaggagttattgtgcagtgtggagtactcaggctttcttataaagaaaaaaaaaagttatctggtaccaaagtgtgcaacctacagaccctcaggtactgccctgtgacttctctgtatgacatcacaaggctgccaagtgcctgtttttctagaactaggagttggtgaggtttggctagtgctgaaaccatgcataggattggtttactaaattaaaaccttattacgtacgtcctccaaaagacagctgaaagtggagagattttgatttggtgctgttagaggtggcaattaagagcataagcaccagggagatggtttaatggtaactgccttttttgatgtcaggctggagctccaactgggaacttgcgttacatgcaagattgattggatagggaacactccctgacaaagagctacataattagaaatggatcaagttacagggaggataaggggaaggcttcacattcataatagagctcaagacattacaaattcatgctgacagggctgtggcattgccagacagaggctataagtggaactacaagtactttacgtgcacatcacaaggacattttcagcatctggtggggaaagtcaatgcaattatgactttggagcgttgggtgatagggcacaaaggttcaatttcaaagcattatttactacagtgttgtttctaggcagttacatggatcacctatgctcactaaattcattataatggtgaacaaaacacctagggacagaatagcaagcccaacttacagtcccccacaaaagctaaaattcatgtcattgactagagtgactgcaactggtcaggagctgaaagaggacaggaaaatttaggaaggagggccctttccctcagagcttgaaggcttctctgtagcctacgccaacaagtctggggaaaaaaggctaacactttcaatatttaagctttttgggcacttcccatgggaagctgtccctaccaaagtggccataggctgcagtcctctgataaattggcttcttcagatccagatccctgacaatgaccccagggcggagatcgaaattcttcttcacaatctctaatagctctctctcactcttctgagaggtaccataatggaaaatggagatagataatggatgagaaactccaatagcataagagacctgaacaagaaccctccggcacagacctcctttaacaagggattttgccacccaacgagcagcataagcagctgaacggtcgaccttggtataatcctttcctgaaaaggcacctcctccatgagcaccccaaccgccataagtgtccacaatgattttccgtccagtcaaaccagcatcaccctgaggcccaccaataacaaatctgccacttggctgtaggtggtagattgtatcctcatcaaggtatttcgcaggcacaactgctttgatgactttctcctttagggcatccctcatttcatcaagacaaacctcttcatcatgctgaacagatataacaattgtgtggactctgatgggaagcacagcacctcgatcctgcatatactgcacagtaacttgagttttagaatcagggcgtaaccaaggcaaagtgccattacggcgtagttctgccagtttggcatttagcttgtgtgccaagacaatggttaaaggcatacactcctcagtttcatcagtggcatagccaaacattaagccctggtctccagcaccaatgtcttcttcatttctgtcaagatgaacaccttgagcaatatctggtgactgttgctccaaggctaccagcacgttacaagtcttgtagtcaaaacctttggaagaatcatcatatccaatgtgtttaacagcttcacgaaccactttctggtagtcaacagcagctctggatgtaatttccccagcaagaaggatcattccagttttagcaacagtttcacaagctactttggcatcaggatcctgctgaaggtgggcatcaaggacagcatcactgatttggtcacaaatcttatctgggtggccttccccgaccgactctgaggtgaaaaggaatgtgccctcctcgatgaacgcctcgtggaagccgttgagctgtccgttcatgttggtgtcggtgtgcggaagtggccttacgaaggagcagcggcgaggcggcagcggctgcgaaa

SEQ ID NO: 4224 - DNA, 254 bp, Homo sapiens
cagactcctggcctcaggtgatcctcccgccatgacctccaaaaccacagggattgtaggtgtgagcactgcacccagccttatgtttttttctacataaaaaacagcacaggattatcttccagagctaataaatatgttcaaataaccacaaccccattaaggaaaaatatcactgggcagcaaataatcaatccagaccaatatgatcacaattgctgtgaaggtgagaaaagttcatttttattatgttt

SEQ ID NO: 4225 - DNA, 1048 bp, Homo sapiens
tttttttttcctttcacaaaatggatttttattgtggtcatacatggtttctcagtgccacagaaaattgctatgtagggacaaaaaatttttggatggctctgtaaagaaacatggtaggttttcagaaatgagttgtgcaggaatgtggttaatgaaaagcagaaagggttaagggaagagaaaggaagccaaggagtgtggtatgtacatcaaatgattactttttaagcccctctaggctctgataaccctttccccaagtcagatcccaacaaaattcatcagtaactgaagtgattgtgctaacagatacataaagactaccggagaaaagtgggttgagatgggctcagacttattgttaggacaactctggggagtcttgtgtctgtgccaaccacgtatccgtgggctacctggagatgagttctaacaaccagcacagaacccaaagctgctctccaacacctttgtttagtagggaaaacctgtagtggggacaagagaggaagctgtgcccttcccccaaccaccgtttcatcttctgctcgctgaccttgatgtgacttgagagctctccttgcttcggctgtgcagtccagaagccagaacttcctctaggaaacttttcgtgttgtgcactgtggtgcctcccaggacaatcctcactccaggagtggtgcggttcaggttataaactgttagagcctcttcataggtggctcctccaattacaaacacaatgatatcctgaggtctgtctctgagtgtgctggggcctaaataaggatataggttttccttaagccttcctttgatgagatgatccagggtttcatgtaggaaaggttgatgctgtgtatatacattttctactcccttcagtcctttgaggaattgtttggtgatagccacagcatctttggggctgaagaggtcacttcctctgactcgtttaccaccatattcaacaactgcagacacgagctttcgatacttctcagaaacacctttattcctgaggtccatcattagtcctggcacg

SEQ ID NO: 4226 - DNA, 580 bp, Homo sapiens
  misc_feature (1)...(580): n = a,t,c or g
acgagctaaaacaacagcaccaacaaaccaggatcaaaataatcgtgcattttccaggattccatgttggacttctcagtgctttggagatcaggaaataatcatgcngttgcagcagtatggttttgtgtctggattttattcatacaggcatgtgtttacaggcatgagaattctgtattgaaaagaaagtccttgtttttttctaacgtatctttctgttccatcaactgttaaaaccaaattgttaagaacattgagcttcttacgagagattacatgcagctgtggaacctccangttctgcctaggtgttgtggcaagaacagcagggaaacaggcggccgcctccangccacaggtggacccanggaccttcagttacgccgcttcanttgaattcgtggtggtttcctgctacagcagaagtggaagaagctcttgtcttgtttggatttgtccactttttggctaataaatggctttgaatttcctgtgccctgcttacactatagctttctggatggtgtctaacagtgcagngcaatgcaagaacancaggngtacttcgggaaaacaa

SEQ ID NO: 4227 - DNA, 104 bp, Homo sapiens
tttttttttacatacttgttatgtcaatgtttactgcagcattattcacaatagccaaaaggtagacatatcccagtgttcatcagaagatggatgaacaaaat

SEQ ID NO: 4228 - DNA, 323 bp, Homo sapiens
gtcacccctccccaaagatttccaggccctccccctgtcaacaatgtggcatcctcacatgcaccatacaaaccctctgcacaatcttcttatccaggtcctatatccacttcatctgtcacccagctgggcagccagctcagtgctatgcaaatcaacagctatggtaatagttttattattagtgtttattgactgccttgtgtcctggtcatttttaatgagagaggttttcttcatttttaaaatagatgtaactagggcatactgtgttgaagtagtatttggacatttttaataataaagcatctatcttatgtaaa

SEQ ID NO: 4229 - DNA, 188 bp, Homo sapiens
agactgtgaaactactggaagaaaacataggggaaacacttgaggacattggtctaggcaaagattttatagctaagatatcaaaagagtaggcaacaacaacaacaaaaaacagacaaatgggactatattaaactaaaaagcttctgcacagcaacgaaaacaacagaatgaagagacaacctgtt

SEQ ID NO: 4230 - DNA, 475 bp, Homo sapiens
aagactgctcttaaagcacctttttgacagtgaacatggtctaaaaaagggaagatattgtagaagatttcacacacacacgcgtgtgtgggagacaactaaaggtattgaaggtactaattaattagatttccaaaattttctacagagagttaattatcaccaaaatgtgaatggtacatacaaaacctggcattttcttgtgataagtttacatttttaggagagtggagctttcaatctgcccttttctcctttgtttttgtagttttcaccaaagatgatcaactagaaatgttaagtggctatgcaagcaaaagcatagataggttaaaaaaaaggatcagctggctgggcagggtggctcatgtctataatctcagcattctaggacagtgatgtgggaggattatttgaggctaggagttccagttcgaaaccagcttcgtaaacatagcaagacccagtctctacc

SEQ ID NO: 4231 - DNA, 347 bp, Homo sapiens
tgatatcagaataaaatactgattttcacagttaaattgcttgttttgttttatcagtatgatcgccctggagcatcccctaagaggaatcatgatggagaatgcacagctgcccccagtgagtcaggagtctcacactggttctttgctagacagtagtaatattgttattgttagttgtattatgatagaaatatgtagttaaataagctacatataatagtaatatataaatgttatagtagtaacagttgcccttgtaaaacacaagttttaactgcaggcacctattatacacagatttttgttttcaataagtatattggattctttttctggagattgtc

SEQ ID NO: 4232 - DNA, 616 bp, Homo sapiens
attgtaatgaaatgttcccaaaatggtagagtggtagaaaacgccagagtagtttagagcagaggaaaatatttgttttaaaactagctttaaagttttgtttcatttctaccaggagcctctttggtttggtttgattttgcttggaaataattggttttcttataaatgagtgaagcggtgataaaattctttggctagttattaattcttttacgtgtctttgcatttgagaggcactgttaaaaattattgggaaagatttaaagtgcaggctgcaattaaaacatggagaaaagtagaaataatgccataagtctagattgcctcatgaagcagcctcatttgaattgctttcatagctttcatgtgtgtatggtttagaagtacacttacctcagaaacctgatttgatcttcatgtcttgggcaggagttgttgaaaataggttattggaatatataagttatctcactgctcatgtacttgcatgtttgggactcaaattttacttgatgtctgtccgttcttgtggccctatcagccttctccttcctttactcctttaatctacttctttgactaccagtggagatttcagctggactatgttgat

SEQ ID NO: 4233 - DNA, 3467 bp, Homo sapiens
cattctcccccaggctcactcaccatgaccaagctgagcgcccaagtcaaaggctctctcaacatcaccaccccggggctgcagatatggaggatcgaggccatgcagatggtgcctgttccttccagcacctttggaagcttcttcgatggtgactgctacatcatcctggctatccacaagacagccagcagcctgtcctatgacatccactactggattggccaggactcatccctggatgagcagggggcagctgccatctacaccacacagatggatgacttcctgaagggccgggctgtgcagcaccgcgaggtccagggcaacgagagcgaggccttccgaggctacttcaagcaaggccttgtgatccggaaagggggcgtggcttctggcatgaagcacgtggagaccaactcctatgacgtccagaggctgctgcatgtcaagggcaagaggaacgtggtagctggagaggtagagatgtcctggaagagtttcaaccgaggggatgttttcctcctggaccttgggaagcttatcatccagtggaatggaccggaaagcacccgtatggagagactcaggggcatgactctggccaaggagatccgagaccaggagcggggagggcgcacctatgtaggcgtggtggacggagagaatgaattggcatccccgaagctgatggaggtgatgaaccacgtgctgggcaagcgcagggagctgaaggcggccgtgcccgacacggtggtggagccggcactcaaggctgcactcaaactgtaccatgtgtctgactccgaggggaatctggtggtgagggaagtcgccacacggccactgacacaggacctgctcagtcacgaggactgttacatcctggaccaggggggcctgaagatctacgtgtggaaagggaagaaagccaatgagcaggagaagaagggagccatgagccatgcgctgaacttcatcaaagccaagcagtacccaccaagcacacaggtggaggtgcagaatgatggggctgagtcggccgtctttcagcagctcttccagaagtggacagcgtccaaccggacctcaggcctaggcaaaacccacactgtgggctccgtggccaaagtggaacaggtgaagttcgatgccacatccatgcatgtcaagcctcaggtggctgcccagcagaagatggtagatgatgggagtggggaagtgcaggtgtggcgcattgagaacctagagctggtacctgtggattccaagtggctaggccacttctatgggggcgactgctacctgctgctctacacctacctcatcggcgagaagcagcattacctgctctacgtttggcagggcagccaggccagccaagatgaaattacagcatcagcttatcaagccgtcatcctggaccagaagtacaatggtgaaccagtccagatccgggtcccaatgggcaaggagccacctcatcttatgtccatcttcaagggacgcatggtggtctaccagggaggcacctcccgaactaacaacttggagaccgggccctccacacggctgttccaggtccagggaactggcgccaacaacaccaaggcctttgaggtcccagcgcgggccaatttcctcaattccaatgatgtctttgtcctcaagacccagtcttgctgctatctatggtgtgggaagggttgtagcggggacgagcgggagatggccaagatggttgctgacaccatctcccggacggagaagcaagtggtggtggaagggcaggagccagccaacttctggatggccctgggtgggaaggccccctatgccaacaccaagagactacaggaagaaaacctggtcatcaccccccggctctttgagtgttccaacaagactgggcgcttcctggccacagagatccctgacttcaatcaggatgacttggaagaggatgatgtgttcctactagatgtctgggaccaggtcttcttctggattgggaaacatgccaacgaggaggagaagaaggccgcagcaaccactgcacaggaatacctcaagacccatcccagcgggcgtgaccctgagacccccatcattgtggtgaagcagggacacgagccccccaccttcacaggctggttcctggcttgggatcccttcaagtggagtaacaccaaatcctatgaggacctgaaggcggagtctggcaaccttagggactggagccagatcactgctgaggtcacaagccccaaagtggacgtgttcaatgctaacagcaacctcagttctgggcctctgcccatcttccccctggagcagctagtgaacaagcctgtagaggagctccccgagggtgtggaccccagcaggaaggaggaacacctgtccattgaagatttcactcaggcctttgggatgactccagctgccttctctgctctgcctcgatggaagcaacaaaacctcaagaaagaaaaaggactattttgagaagagtagctgtggttgtaaagcagtaccctaccctgattgtagggtctcattttctcaccgatattagtcctacaccaattgaagtgaaattttgcagatgtgcctatgagcacaaacttctgtggcaaatgccagttttgtttaataatgtacctattccttcagaaagatgataccccaaaagggagcctatgggtcctcatttcaacttctaaggtcgctagattgtttctatcctgaggtattgcatcaattttaatactcctatagttttctcttcttagaagagcacaaacactccatggaacattagagttctgaggcactaccctagcttgtcctctatcatgactcatttttatctatggcaggtagggctgaagcactttgcaggtttacatcttccccagagtaacagcttttccttttcacatatactttccttactgccttactcagtgggtaagttaaagggctgaaggagagttgaatggtccacaagactaccctcttaagaggtttcacaaattccaaacagtaccagtgagagcagcactttccactggggctaggcttgagacctaaaggcaagtatgaaatgcatatgctacttcactccctctcccaacccttaataatgaggcaaagcaagagcctagtgaaggccaatgctaggtttacaaacttacccagaagcctctgcaaagcttcacaggctcctcagatgaaaataacaggaatcaatggggactacggccagacactggtttgccattctgttccttttaagaagtaacagtgctgcaaggaagtccatgtcagaaagccaacagaaggtgatttccacaactttgaacaggttgttacaagtatcagcaagaatgtgtccttttcagaaataacagtcaaatcaaagaaggttaataaaggctttaatttcatacacacaaaaaaaa

SEQ ID NO: 4234 - DNA, 871 bp, Homo sapiens
  misc_feature (1)...(871): n = a,t,c or g
gctcattcacttgtgtctccgatcacactagagtccccatttcacagacaaactgcccagagtttgtcataggtcacacagcaaaccagcaactaagccccctggtcccctaatctgccccagaaaggtagtttctcagctgttctgagcttgacagcatgaacatcctcaggagccacaggcaaagtgggctgaggcttggcattcccctcgaggtcatctggccattctgaacgcccctcctcagcctgcttcctccggctgagccatgtgcccccggaacccctctgaactctgttgccgatccctccctccatctgcgccttcagtgaagcagtttcttaaaggaggggtccttggtaccgtggagggacaggacatctctgggaattcgtacccagctgcgttcgtgctgagttcttcatgacccactccttccagcgtcagctggtggatccagggctgggtactgagccgtactggaccagtgggccccctcccgggatcgctggacttggagcagaagagtccctccagggnttgaagattggacacagaaaacttgggaactgtcaactgccctgttattcacctcgtgaaaaaagctggatttctaatgagagcgaatggaggtgacaattccccagaaactggaattgggatggtgagattttagttccagcgccggcggtctcatgcgtggaggtgataaagttgagctttgaggtggtcttcagagggagaggaataccctctgcgggcagagcttcctgggttccgggcccttccggacgtcaacacaggtccaaaatgcccttgggctcctccgcacaccctgggtgcaagaataaatccttctctctgccgccaa

SEQ ID NO: 4235 - DNA, 573 bp, Homo sapiens
gattttattggctgtcatttgcctgccatgtcaagcctattttaatgaagcacttgcttttctagctgcatagaattatttgaagaaaataatgagaaatggggactctaagtggcctacagttcaatagaagaaagctaaaagcccacccaaacatgatagtaaccactgttttctctgcactaggaaaaatcagccgtagaattgttgattagtcttgcagaaggctatagttctcgctgtcatccggtttttcagcttaaaaaacaggtgctgagctgtgaggagagcatcagggtttgggctctgctgcctttccccgaagaactcactcggcaagccgtcagattagaagataattctgaaacaaatgcctgccactctttgattacaaaaatgacggatgagctgtatcaccatatgcctgagaatcgttgtgtgttaaaggacttggatcatcttcctactgagacgtggccccagcttctccgtgagctctgcagcacacctgttcccaccctgttctgccccaggattgtgctggaagtgctggttgtgctccgaagcattggc

SEQ ID NO: 4236 - DNA, 212 bp, Homo sapiens
gtaaagacgatggtgtcagctgctgaattgcttctgtaagtcctttaaaactcaaaaacccaatctatgtagattcatgttaaaatttccacatcagagttaacgtacaggatgtgcttgaataactttaccaacgtgaattttacttatattcttaaatgttatgctgttatattttattttgaagacattaaatggaacttcagatttag

SEQ ID NO: 4237 - DNA, 184 bp, Homo sapiens
ggaagccactgacatttaagtaaagattttagtgatttttttttgccctgggcaaagcttgttcaaatttctcattgaacctacatcttagcatgaggcataatcaaacctgagacattagatctgagacaaatggctaatgcatctgaaaggacaaatccaaaggggatcaatctacttgtta

SEQ ID NO: 4238 - DNA, 401 bp, Homo sapiens
gtgcaccatgtggcagtccatgtgtcctctgcgccagttccggaaactccctgaggaagtagtgaagaagattgagaagaagaatttcccctttgagcgtctgtacgacctgaatcataatgagattggggagcttatccgcatgccaaagatggggaagaccatccacaaatatgtccatctgtttcccaagttgggagttgtcagtgcacctgcagcctatcacacgctccaccctgaaggtggagttggaccatcacgccagacttccagtgggatgaaaagttgggcaggtgcatggttcatccgaggctttttggattctggtggaggatgtggacagcgaggtgattctgcaccatgagtattttctcctcaaggccaagtacgcccaggacgag

SEQ ID NO: 4239 - DNA, 453 bp, Homo sapiens
gctcaaaccctgttccagtgaatgaggactgttttgtttcttgaagcctttctcctgttaagaaagaacgctaatgcaattagggtggaaccatctgaaattccaagtcttccattatctccaagagaggtcctatattatgtactactgtggggcccagtcgccctctggtggtagtctcagggatgtcacagctgtgggttggtctttagaatcacggcaacctatagaaaggagagttccaactccttcgtagtgaccaaggtcaacaaactttcttttcagaatctgtacctggacacctccaattgtacaggtaaatactgcaaattgccatctcctataccaaacttgagtttttccaagaatgtcttattttccatcaaatccagtgcatttgaatacatcaaatccctttcgatttagccaggatgagcgcgtcgctcatgaggt

SEQ ID NO: 4240 - DNA, 272 bp, Homo sapiens
tgcctacaaggcaatacatagattggctttccagtaccactctgccctcaattcttgctacagcctcccctgaccattccacacattggctctacccgactctgctttcttaaacctgcgaagcacatcatgcctcagtgcatttgtacttgctgctccttctacctagaatgctttttcctcagatatcctcatgtctcatagcctcagctcctttaggtctttactcaaatgacacttttcaatgaggctttccttggttattttttcta

SEQ ID NO: 4241 - DNA, 891 bp, Homo sapiens
tgctaattcacatgtgaagctttattaaatctggttatatgtgggacttcaacagctcaatttttccacaatttccacttttcaaatcccatgccaaactgtcactttttcccttaaaaagtggataaacccatcttttgaaagacaggtcttctcagtttttctgttcatcctcctactgtaagtactggctgatattcacacacatgtactacagaattaaaatactgacaagcaagtagtttcttggcgtgcacgaattgcatccagaacccaaaaattaagaaattcaaaaagacattttgtgggcacctgctagcacagaagcgcagaagcaaagcccaggcagaaccatgctaaccttacagctcagcctgcacagaagcgcagaagcaaagcccaggcagaaccatgctaaccttacagctcagcctgcacagaagcgcagaagcaaagcccaggcagaaccatgctaaccttacagctcagcctgcacagaagcacagaagcaaagcccaggcagaaccatgctaaccttacagcttagcctctgtcctttaaaaaaagagagagacagacagacacatggggtcttcgcttgttgaccaggcgggactcaaactcacaggttgaagcaatcttcccacttcagcctcctgaccacaggtgcactctactgcacctggctgccatgttttttattattaaagtacattatgggtaatcacaggtttaatgtttgccgtttccattattcaaggtatgacatgcaataatttataattttactgaggcacaaatttgaatcatgcaggcaaagctggtgtgcagcagcttagtgaggaagtcatgcatctacacatcaacatggctttgctgcagtacctatca

SEQ ID NO: 4242 - DNA, 899 bp, Homo sapiens
ggcacgagcctgcatgctggactcctgagccaggaggctctttcactccgtggcccttctgctcattcttcaagtccctgagtgaccagtggtcctcctttctgaaggctcttgctacaaaggaaagatgaggatattctatttcttgatccctctcagctactgggagctgctttgtgccttggaagcctcaagctgaaatggatgtcagcctcaagtttaactccaagagggttcaccttgtttctttgaacaaaatgtgctgcctgttgcttccctttgccaggagtggtgttcccttttccacaggtctggaccacagtgtctctagctcccgctcctggatacttggttactgtgtgtttcggtaaaaaagcatccacaacatgaatatccactaagctataacagggcctgctgcaactatagtatttcctgaaaaagtatcaactgccacaagggccacaaataaagtctgtgaacttgaaataaccatggagaatgaaatgttctgattcagatcatcggtgggatttcactgggaaatctcccactgggcaagagtagatgatggaggaggagaaacagtcactagaaaaaggtgatactttgtatcaagaaacaattaaaaattagatcacatcctgaaacattaagcatatgctcctttgtgaggcttgctggctgaacttgaactggattgagtgaataatttcttaaaaacaatcaaaatcacagatttattctattttaaatacttatatttacttatatttcattcagaaattagttaacaaataatttttgagtatcctgggaactgttctaatcattaaacatgcaagtttgaagaaagtaaggatgaatctgcctgcgtggggctctcaatctagcgagaa

SEQ ID NO: 4243 - DNA, 185 bp, Homo sapiens
aggagtgataagtcctgatggccttaggtgtcctgactgtctaggcagccaaagggcacatggtaagccatccaaaagtgccttcagggcaaaaagaatagaaagggggtcgctctgctcgtggggtacacggcagaggagtaagttttatgtcaaagcaggaatctgatcagaggttccgaatt

SEQ ID NO: 4244 - DNA, 535 bp, Homo sapiens
tttttttttcaagtttttggggttcactcaagacctaggctacagccaggtcaagtgcctgctttattcaacaggaagcgctcaagtgggactcaccccccacctttcacagtgtaaagtgaatagggagcaaggcaggaagctagaaaaataatgcatggatctagacaattcagaaaaacccttctaagtcagcttaaggccaagactggtcagtgtgagagaacaaaagaggtgacagaaaagccttgggcagcctgagccatgatgggcctagcggaagtagttgggacattcgtgagcaaccaaatgccaggcttgattaaaggcatccacgacagccggctccaggggcccttcctctgttgctgccaagttctgctccagctgctccaggctggacatgcccaggatgaccgcgtccccgtgggcaccctgcagctgtgagtggtggtacatccaccggagggcagccgaggtcacactggggggcgctggccctattagcggcctgcagggctgtctccaccaacgc

SEQ ID NO: 4245 - DNA, 1274 bp, Homo sapiens
atcaaatatcagggtttggagtggaagtcgagcgcttcactggttttactaaatcagacccagaacctggtgattgggctcgggctcctcgccggctccctgctttgcgcatactttgtcactgagcagaagctacaggttggggactatgtgctctttggcacctacattatccagctgtacatgcccctcaattggtttggcacctactacaggatgatccagaccaacttcattgacatggagaacatgtttgacttgctgaaaaagggagacagaagtgaaggaccttcctggagcagggccccttcgctttcagaagggccgtattgagtttgagaacgtgcacttcagctatgccgatgggcgggagactctgcaggacgtgtctttcactgtgatgcctggacagacacttgccctggtgggcccatctggggcagggaagagcacaattttgcgcctgctgtttcgcttctacgacatcagctctggctgcatccgaatagatgggcaggacatttcacaggtgacccagggcctctctccggtctcacattgggagttgtgccccaagacactgtcctcttttaatgacaccatcgccgacaatattccctttacgggccgtgtcacagctgggaatgatgaggtggaggctgctgctcaggctgcaggcatccatgatgccattatggctttccctgaagggtacaggacacaggtgggcgagcggggactgaagctgagcggcggggagaagcagcgcgtcgccattgcccgcaccatcctcaaggctccgggcatcattctgctggatgaggcaacgtcagcgctggatacatctaatgagagggccatccaggcttctctggccaaagtctgtgccaaccgcaccaccatcgtagtggcacacaggctctcaactgtggtcaatgctgaccagatcctcgtcatcaaggatggctgcatcgtggagaggggacgacacgaggctctgttgtcccgaggtggggtgtatgctgacatgtggcagctgcagcagggacaggaagaaacctctgaagacactaagcctcagaccatggaacggtgacaaaagtttggccacttccctctcaaagactaacccagaagggaataagatgtgtctcctttccctggcttatttcatcctggtcttggggtatggtgctagctatggtaagggaaagggacctttccgaaaaacatcttttggggaaataaaaatgtggactgtgaaaaaaaaaaaa

SEQ ID NO: 4246 - DNA, 190 bp, Homo sapiens
  misc_feature (1)...(190): n = a,t,c or g
aaatgagagtggattctgagcctagtttttttcagggaacaagacccagtgctaccacttaggggctagaaacagaaattgtatttattttattttgttttatttatttnatttttaaggtcagaaggatcgtgaggccccgctttcacggtctgtattcgtactgaaaatcaagatcaagcgagctttt

SEQ ID NO: 4247 - DNA, 437 bp, Homo sapiens
gagggaaccccaagttgtcatcaggcttcacctcactcccggtctagtaatgtacttaagagaataccaggttggtgtgctccagttctcctcttgaatgtcagcagtgatacacagtctggtgcaatgcaacagaacccactccaatgacatgaggcaattatgatctttttgttttaattggatagaatcctgcctctgaaacttcacttcatttgtttccaaagtctgatatttttctccaataaatgtccttattcttcatccttgaaacattaatactgtccaatctgtcctttaacataggaaccctggtccttttatgactgccttttgcaaacataggcccaatggtcaatattgtgtatatatctggggttttaaaaatctatgagggacatggatgagtcttacactccctagtattgcccacatga

SEQ ID NO: 4248 - DNA, 397 bp, Homo sapiens
  misc_feature (1)...(397): n = a,t,c or g
cagcatcaatttcttctccatcattcctcacatatgttggagtgcacagtactatgtagacgctgctttcctgtctttaagacggatccgaatgcttgcctttcgcagatgaagatgtatgttgcagaggtggatgctgtaaaaatgggactagattagaagccctttctgtaaccttgactgaagaaaatacaaggttacagaaagggcttctaatctagtcccatttttacaagcatccacctctgcatcattcatcttcatctgcgaaaggcaagcattcggagccgtcttaaagacaaggaaancanngtcctacanagnactgngcactccaacatctgtgnggaataatggnaagcaattgatcngaccngctaaagaatttatatttatg

SEQ ID NO: 4249 - DNA, 1625 bp, Homo sapiens
ggcgctcacaattgccacgggtactggcaattggggtttcggctttggcgctcggggtgactcttctcaaatgccttctcatccccacatagtaagggactcgcacggccagccattccacagattttgaagtacaccgaaactggcttgctatcactcacagtttgccaatatcacagtggtattatgaggcaacttcagagtggacgttggattacccccctttctttgcatggtttgagtatatcctgtcacatgttgccaaatattttgatcaagaaatgctgaatgtccataatttgaattactccagctcaaggaccttacttttccagagattttccgtcatctttatggatgtactctttgtgtatgctgtccgtgagtgctgtaaatgcattgatggaaaaaaagtgggtaaagaacttacaggaaaagccaaaatttattctgtcggtattacttctgtgggacttcgggttattaattgtggaccatattcattttcagtacaatggctttttatttggattaatgctactctccattgcacgattatttcagaaaaggcatatggaaggagcatttctctttgctgttctcctacatttcaagcatatctacctctatgtagcaccagcttatggtgtatatctgctgcgatcctactgtttcactgcaaataaaccagatgggtctattcgatggaagagtttcagctttgttcgtgttatttccctgggactggttgttttcttagtttctgctctttcattgggtcctttcctggccttgaatcagctgcctcaagtcttttcccgactctttcctttcaagaggggcctctgtcatgcatattgggctccaaacttctgggctttgtacaatgctttggacaaagtgctgtctgtcatcggtttgaaattgaaatttcttgatcccaacaatattcccaaggcctcaatgacaagtggtttggttcagcagttccaacacacagtccttccctcagtgactcccttggcaaccctcatctgcacactgattgccatattgccctctattttctgtctttggtttaaaccccaagggcccagaggctttctccgatgtctaactctttgtgccttgagctcctttatgtttgggtggcatgttcatgaaaaagccatacttctagcaattctcccaatgagccttttgtctgtgggaaaagcaggagacgcttcgatttttctgattctgaccacaacaggacattattccctctttcctctgctcttcactgcaccagaacttcccattaaaatcttactcatgttactattcaccatatatagtatttcgtcactgaaggactttattcagaaaaggaaaaacctcttttttaattgggatgggaactttctacctgctttgcctggggcctctggaagtctgctgtgaatttgtataccctttcacctcctggaaggtgaagtaccccttcatccctttgttactaacctcagtgtattgtgcagtaggcatcacatatgcttggttcaaactgtatgtttcagtattgattgactctgctattggcaagacaaagaaacaatgaataaaggaactgcttagatgtg

SEQ ID NO: 4250 - DNA, 358 bp, Homo sapiens
gtgtcagttcggtgaagtccgtatagttctctttatgtttttaccattacactactacattcccctggggtggggcgaggggagtgtttcttgttgaaagatggcaaggttagagaccttgtttgtctggcgtttccagtgcctggtactcaaatatttttgtcagagaaaatgggaaaactccaagatatctccattttataagtcttactaatataagaatccaaatcactgtggaagaagaaagtgaagtgaaattccctagtatgaagaggatcaaagcggtgtccctgcttaagtgtagaataagcatagctattaaataaagactgatcttcactgagtttaagagtctcag

SEQ ID NO: 4251 - DNA, 431 bp, Homo sapiens
gccgtgaggagccacgaccgcagcaccaggcccctctacatctccgtgggccacaggatgagcctggaggccgctgtgcgcctgacttgctgctgctgcaggttccggatcccagagcccgtgcgccaggctgacatctgctcccgagagcacatccgcaagtcgctgggactccccgggccacccacaccgaggagcccgaagcgcaggaggccagtggcatgccccaaaggagactccggagagtcctcaggtggagcacccagtccccaaagacaggctgaccgcaccaccccagggggacgccgcagcacagcccagcaccaggtggggcagaggtgaccacggcccctctttgctccgtcatcggctggtcagctgtggtcacggtgcctcagaggacagatctctatgggggcaagtgcagatcc

SEQ ID NO: 4252 - DNA, 78 bp, Homo sapiens
cgtcgaccaaatcacatatttgataaaggacttgtctccaaaatatacaaagaactcctaaaattcagcaataagaaa

SEQ ID NO: 4253 - DNA, 236 bp, Homo sapiens
gagtcttagagtgacataaagtagtcttaaataaatagttcttagtttattttaagcagttgattgtactaacgagatgtaattatctgaagtatttatgattagcatattggtttttataagtatttctgagttattgagggtgcttaaaaatgctgaagaaactttaaaacatgattcttcttataattttatgtgattcttatagcacaatcatttttgaaaaaggaaaacta

SEQ ID NO: 4254 - DNA, 457 bp, Homo sapiens
agcagatgtgtcaaagctcttttgtcccaggaataaactgagtttcgtcatcatcttgacagtactttcctggatgagtgttcaggaaacatgaaaagtttttaaacaattcaacaaatgtgtaataaaagtttgttatcttgttttatttgttgttatattgtctcttggcttgagtttttatttgggaagctaatagagagacgggatattagaaaaccagaggcaaactgcttggtttattgaagcactaactgaatgaatgcaggtatacgagtaatccaggaatcccatgcattaaggaaaaatttatttctatcacctctgtattgttgttaccttgtgaacctggcttggttttttcagcagttggtaaactgataagcctgtttctcactctgtcattcatctcatcagtttaccagcccagaaatactcctttcagtctttacaaaaa

SEQ ID NO: 4255 - DNA, 468 bp, Homo sapiens
ggtctttcctttcttctccactgttttctccttctttttcttctcgactttctggtggtgagttttcgccatctccttgcgctggttggctagggcttcttcatatgacgtttccttcatggagaaagtcgacaccaggaagatgccaatggaggaaacaaccatgaatcctccaaagaccacaacccccaaggtttgagtgtcgtaaatatccatcctggcttgctttcctttcacctgcagccagagacgcgagagggaaagcgagagggcaggaccgccgccttcgcagccgtatcgttccgcctgggcggagttctgacttagaggcgttcagtcataatcccacagatggtagcttcgccccattggctcctcagccaagcacatacaccaaatgtctgaacctgcggttcctctcgtactgagcaggattaccatggcaacaacacatcatcagtagggtaa

SEQ ID NO: 4256 - DNA, 711 bp, Homo sapiens
cgtttccccgatagtatttggggatctcgaagcgatacttccggctccccccaggtccccaagctttacttttgtggggcacgacgagaaagtccgcagccccaaacattcccagaggtccacttgggccagtggtactttatcgcaggggcagctcccaccaaggaggagttggcaacttttgaccctgtggacaacattgtcttcaatatggctgctggctctgccccgatgcagctccaccttcgtgctaccatccgcatgaaagatgggctctgtgtgccccggaaatgggatctaccacctgactgaagggagcacagatctcagaactgaaggccgccctgacatgaagactgagctctttttccagctcatgcccaggtggaatcatgctgaatgagacaggccagggttaccagcgctttctcctctacaatcgctcaccacatcctcccgaaaagtgtgtggaggaattcaagtccctgacttcctgcctggactccaaagccttcttattgactcctaggaatcaagaggcctgtgagctgtccaataactgacctgtaacttcatctaagtccccagatgggtacaatgggagctgagttgttggagggagaagctggagacttccagctccagctcccactcaagataataaagataatttttcaatcctcaaaaaaaaaaaacacaacaaaaaaacaa

SEQ ID NO: 4257 - DNA, 107 bp, Homo sapiens
gcgagaagctaagcaattaactcaagttagaaagaacacgtcagcgaaacccatctgatcgacatgttatttcacaggcagaaacggaattacagagagctgcaatg

SEQ ID NO: 4258 - DNA, 834 bp, Homo sapiens
gaaaagaaacaaaattaacctcatagtctgcatactctcgaaatggcaaaaaagcctgcaactttccgttgtggaaaataatatacctgggtgataaactgagcaaacatcacccttgcccttgcctctgaaagagagcctgttctagttcatcctggggccagcttggctgggaaccccactggccagctctgtccacaccttgcatattaggacagaaatctgcctaccacattccagctacataaagaaggtggccagcacctgactgcctctttctccttgtgaaattccttggaaataccatttgtgactgcttgggcttgttctgaagaaaattcaaatcttgttctgtttaacaaggattgattgaagaacccgtaggctcagtgctagttacaaagataagcaaggaaggaactcagaataagagagaaaaaacttggataataattatcaaaaccagtatttattgagcacctactgtgcccagtagagtagtaattacaggaggtaaatatctaaaacttacatagctcttcacagaacatacatctgttcttgcttctgtgtttgattttattagctttcctctgtacacataagcttttagtgtatgtcctattattgaagtccagagttttattatttttcacttatttgggcatagatagttccagaatttacttgtcttcctcattctcattgttaatctcatttttcttccctggagaatatggactttcaaaactatttttcaatcaaggccaaaatatttcttaaaattcacttctatttaaaacacagataacatccaggagaaaatctgagaag

SEQ ID NO: 4259 - DNA, 451 bp, Homo sapiens
ttttttttatgatttttttaacccttttattcaatacaacattttgtttgcaatgtaaaagatcttatatttggtccaagcctaagtcatgccactttgaatctctcaaggccttaagtagaaagatatttcctgaaaagcacatataagactgctagtgaatcttctccagcaccaaaaagtctgccactgtcaaagcagaatgcattttaaaggcacaaagtcagcagtctgaccattttccagcgtcagcaaagaagcattacagtatagaagaatcaattgtgcatttaagaaacaaaacacatttagagttatcttaaaaagttcaaattgcatttgttgatccatatcattattagaaagaagaaaaaaacggagtgttatatttaacttcccctgataaagctgtttcctttcaaaaatttcttttttaaatttacttttggtc

SEQ ID NO: 4260 - DNA, 843 bp, Homo sapiens
  misc_feature (1)...(843): n = a,t,c or g
gacagcactcaaaacgtatttattgaatgacaatttcttagtacagtgtatactatccccaccaaaggaaaaaaacattaagagcaaaacaaggtgtggggggtgggaatattgctaaagaaaattctaataagagttatctataattatagcttttatttattatatcttcattcaatcatttattcacaattagtctaattgcattcttgatgaataactgacttcagcaaaggagtcaatccactaagcaaagttcatttatttttcatgatgttcttctttcgatcttgagtctttactctcctggattcccaagagaactgcattagcctctagtacagttgtatctgttgttgctcccaggaacctagacgtaagttcaagatctaatagccgcaaccggaccctggttcctttctggtatttctctccatccacttctggtcttctacatacacaatgaaactttccaccaaaatctatgtacagatcattctccacaatatgaaagatccgtccaatgaccagtttatcctttgcaggtcccatctgtgtaagaggagaatgtctcagcatagatgcaaaggattccacattttttggagaaccccgcccgggctccaccttctgtaggggctccaccttctgtagaagctccgagtgccgctccaacgcgctcgcgaaaccgcctgcgcgcgtcttaggctccttggcattggaactaccactttcggatccactctcagtgcctacaccccgaaagggcctgaagaagagaaacactcgcagaaaatggctctcggcagccacagcacgggtccgacacagngccgccatgac

SEQ ID NO: 4261 - DNA, 246 bp, Homo sapiens
atttacaaatcccaaaaactaagtgaaaccaagcaggataaatacaaaaaataaaaaaatcacaactagaaatatcatagtccagttgctggaaacaaaatatgcagagaaaaataaaagcagcctaagaaaaaaggcacagtgcataaagggaaactatgatagctgagtccttatcagaaacagtgaggacctgaagacaatggaacttctttcagggtactaaaaaaaaaaaaaaagtcgacg

SEQ ID NO: 4262 - DNA, 515 bp, Homo sapiens
gaatgatatcacagttttcaaacccttcattgatctcgatactcagcctgtcctcttcattcctgacgtgcactttgccaacttgcagcggggcactcatgtaggtaaccaggatcccaggggaggttaccagggaaggaaggcatggcaaaaggaaattctttggcattattcatggggaaacagaagccaaaattgagtgaggtttgaccagttagtcagctctttgggaatattctgctgggggtgacatggatgcccgtgcaataaaaatggtaagcatcgctgatttcaaggtgcagtgcagcctgtcagctttattctgtttgtattcattcattcattcgttcgttcttcatacctacatatcctagctcatttaaaagattctagaatagtagcataatttggagtttgagcctgtcatctttttaaacttaacttggggcaatacctaggttaaggagctcttataacataagaacatccgaaggcttttctcacagttccagttc

SEQ ID NO: 4263 - DNA, 564 bp, Homo sapiens
gcggcacgagctggaagatctgggtcttctgggtcggaagagcttagaatcaccatcaactgcatggagagatgtaagagactcctcacttttagctgaacggagggttccttctgccctgccacctttcagagccatggctttcatctctgaaggctcactctcattccgctgcagctttcgtttagaaacagatgatgatttccccaagttgaaaaaggaacgccagctacccacaggagactttttcatcttattttgaggcctctttctttcaagtgggaactcaattatggtatgaaatttcccctgaagtgcagcaggtccttctcctacttcgatatatttattttccgtcacaattggagaattgacctgagcttgtgttcgtgcctgggcctcttccaatgtcagcagtttggtggatggagaggataccaggagggacttgggccttgatagagaagctgccccctctagcatggccatgctgattctgccgctgaacagcacatcaacgtgattcaggatgaactcaacaaccacagactgaatcctcacttc

SEQ ID NO: 4264 - DNA, 1967 bp, Homo sapiens
  misc_feature (1)...(1967): n = a,t,c or g
gtgtgttgcaccaggcactgctgcacaacaagatacgctcgccacagtccttctttgacaccacaccatcaggccgcatcctgaactgcttctccaaggacatctatgtcgccttgatgaggttctggcccctgtcatcctcatgctgctcaattacttcttcaacgccatctccactcttgtggtcatcatggccagcacgacggatcttcactgtggtcatcctgcccctgggtngtgctctacaccttagtgcagcgcttctatgcagccacatcacggcaactgaagcggctggaatcagtcagccgctcacctatctactcccacttttcggagacagtgactggtgccagtgtcatccgggcctacaaccgcagccgggattttgagatcatcagtgatactaaggtggatgccaaccagagaagctgctacccctacatcatctccaaccggtggctgagcatcggagtggagttcgtggggaactgcgtggtgctctttgctgcactatttgccgtcatcgggaggagcagcctgaacccggggctggtgggcctttctgtgtcctactccttgcaggtgacatttgctctgaactggatgatacgaatgatgtcagagttggaatctaacatcgtggctgtggagagggtcaaggagtactccaagacagagacagaggcgccctgggtggtggaaggcagccgccctcccgaaggttggcccccacgtggggaggtggagttccggaattattctgtgcgctaccggccgggcctagacctggtgctgagagacctgagtctgcatgtgcacggtggcgagaaggtggggatcgtgggccgcactggggctggcaagtcttccatgaccctttgcctgttccgcatcctggaggcggcaaagggtgaaatccgcattgatggcctcaatgtggcagacatcggcctccatgacctgcgctctcagctgaccatcatcccgcaggaccccatcctgttctcggggaccctgcgcatgaacctggaccccttcggcagctactcagaggaggacatttggtgggctttggagctgtcccacctgcacacgtttgtgagctcccagccggcagctgggagcttccagtgctcagagggcggggagaatctcagcgtgggccagaggcagctcgtgtgcctggcccgagccctgctccgcaagagccgcatcctggttttagacgaggccacagctgccatcgacctggagactgacaacctcatccaggctaccatccgcacccagtttgatacctgcactgtcctgaccatcgcacaccggcttaacactatcatggactacaccagggtcctggtcctggacaaaggagtagtagctgagtttgattctccagccaacctcattgcagctagaggcatcttctacgggatggccagagatgctggacttgcctaaaatatattcctgagatttcctcctggcctttcctggttttcatcaggaaggaaatgacaccaaatatgtccgcagaatggacttgatagcaaacactgggggcaccttaagattttgcacctgtaaagtgccttacagggtaactgtgctgaatgctttagatgaggaaatgatccccaagtggtgaatgacacgcctaaggtcacagctagtttgagccagttagactagtcccgggtctcccgaatcccaactgagtgttatttgcacactgcactgttttcaaataacgattttatgaaatgacctctgtcctccctctgatttttcatattttctaaagtttcgtttctgttttttaataaaaagctttttccccctggaacagaagacagctgctgggtcaggccacccctaggaactcagtcctgtactctggggtgctgcctgaatccattaaaaatgggagtactgatgaaataaaactacatggtcaacagtaa

SEQ ID NO: 4265 - DNA, 149 bp, Homo sapiens
gcaagtttaaactactgaagtgatcaaactgtagtaccaattatcagcagtatttattcagagggcttttttttttttaaaagaaacagagtctcatttctgttggcccggggtggagttgcagtggggacaattcttttaggcacaaa

SEQ ID NO: 4266 - DNA, 542 bp, Homo sapiens
ggaccatttaggttttggtgcttatgtagaagtaagaattaacactttatatcatatatgagctactacattattacatgtatagcctcaaaggtagaagaatgatcttgtattctcatttatgcagaaatatacaattgagaatgacttgtcccctgttgaccttccataccactgaaagaccagtgtatttctccctcctctccagcagcacggagctgctaatagctctccattaatgcatgtttgctttatttcttacccacgtgcttttgttcctgctattctttctgcctccccttcctccaccctaagtagcccttttctgggtccccatgctcatgtgcgcatatctccatcattgtacagaatacagtgtagtagagattttatctctgtttattgccttagtttgtgagctctagcggacctctgagtagatgatgaggtcaggattatatcatattcatttttgtcaccctagcaccctgaactgccaggaggtgctaaactaaaggtcattggtttttttccataatgtt

SEQ ID NO: 4267 - DNA, 780 bp, Homo sapiens
  misc_feature (1)...(780): n = a,t,c or g
catcaattggtgaatttttacggccctagatttgagattgtggccccggagtatctggatagttgagttgtgtgtttatgtgcttatatgatagaggtgctttgttcctgcagcttagaaacagaagcagcccattcactgagaagcttaagagaggaagtatcaacctcattttccaaaccagcattactttcaccgctcgtggatctgaaagattacatttagaacatttagtactattacactctcagaaactgtggtaaaaagtcacattttcaaaacttcatgcatattgtattcttgttggaaataagtcctatagtttcttaattgtcttcatgccgtccatatttaacaaacattgcaagtcctttttatatttgggtaattatttgtaatttagtgaaggagactaggggatgttttcttccaaagggaatttaaaatcaattttatggtattttgaaagtaaaatactccttaacgtgtcaatatttttaaaatgttatctcgaagttttctattgctcaggtatataatctaataaaattttttgtttgctctaaggttatttttggctattctctattttggaattatgttaaaatttgtgtgcattttatgaaatgccttttttcttattttgaaagtgtaaaattgggcatctcagagtaaaatgtgggattattagctacaaagactaggcacatcgtgaaagctcagtaactaattttcttgactgagtcctatcccagagtgtcacagnttgcaacagaattt

SEQ ID NO: 4268 - DNA, 2169 bp, Homo sapiens
  misc_feature (1)...(2169): n = a,t,c or g
ttttttttttttttaagatgtaagaaaatatatttattttttccatgacaatactatgataaaattgttaaatacatgcatgttttaaaaacagacataagtaacatctttagagttaacagccaagcatactagttttacatttatggtgttttagtaatagattattttctatgtttttgctataatcatgttttccaaaagatacagaaactaaattctgaaattatacaatgatataaagtgtccaaatttcccattctaacagcaatttaaaatccaaattttcacaaggcaggaaatgcttcagttatcatctaagtggagttgttttattccatattactctccagaattctgtgaatcagactggaatcacaccccatgggacttcatctatagttttcttcctggtataagtggtattgaaatgtttccctatacgattaaacatggattttaagtacagcacatcacaactgtttattcaccttaaaaaaatgtctgtagtggtaacatttcaagaaatgaaaaagggaacagtttgggatccgcagtttctccctatcttctttcagctacatttacaagcatttgacccaaacaaaaattagtaaacagttactagtatttaataaaaaacttaaaatatttaacatataatactcactttaaaaaaacattcattcctacaaaccttataaaagacagaaacttatatctgttcacagtatgtgtattttgtaaacagtaattcactataatgcaattttgaaagtaaaaaaaggtaatttcctagtgttataaggaccttgacttatggccagctaatgaaagagaagaaaacctaacatccttattaggaaagttaagtattttgaaatgatttattttacctttcaacatacttttaagatggtactatcttaaatctaggatgtctatctatccaggccaatcttttgcaagcaattctgaatttaaatgtatttaagaaaaagccgtgctcttttttgagaaaataacaggataaaacaaacgccaggaagggcatcaatcacataacacctacccctccacaacaatgaaaggtttctttttcgtgttgtctcccgctactcacaatgttattcatatttttcctaaatattgtgttggaaggaaaaattaaatacaaggaaacactagcttatgatatattagacaatttggggaaaagcatttggaatcaaactgggagaagaatgttttaccaaaaatggtatgaaaaccattattcagtgttcttttctatgagcaattgcaaaaacactaatactaatgttaaacctaacagttaacttttccacgttataaatgaaaattgtactaccacctagagatattttgatcttttataatacacaactggaatgtttaggaaaatagttcggaagctgaaagttacccatttaaaatggaataattcttaacggaagtacactttaaatgtataaggaaattcaacaacttaagtgagccattcaatcacgtgtgcaaagtattttagtcttaagggcaacacataggatctatgttgttagcttttttttttttaaagttctgattggctactgtaaaggcaatcttagaagatgcatgtaaatataatataaatcaactttcttatcaattagacattttccccactcacatctcttagtttttagggtattcagtcccagcaaccaaaaaaaaaaaatgtaaatcatattttgtttctggctaatgttcaatcagtttttcttttataagagcttttgatgtactgtttctacgggttctttagggcacttacacataaaaacattcagaggggttttccccttaacacacaacttttaattctcatggaaaatgttgcacagttagggaatttgtcttgcatgggggaaattctgtttataacctgggggctctgggataatcccaaatatttaaccattccctaatatggggggggnaaaatagggcacccatttcatagggnctaaaaataataggggatcccnggtccataaccccccatatccatattacnggggggcncggggggtatattctngggggccccaatcacactnccctgggaccttacccntggtnccatagggncctgggatggggccc

SEQ ID NO: 4269 - DNA, 353 bp, Homo sapiens
tcctcatccacaatgccggtatcagttcctgtggccggacccgtgaggcgtttaacctgctgcttcgggtgaaccatatcggtccctttctgctgacacatctgctgctgccttgcctgaaggcatggtgcccctagccgcgtggtggtcgtagcctcagctgcccactgtcggggacgtcttgacttcaaacgcctggaccgcccagtggtgggctggcggcaggagctgcgggcatatgctgacactaagctggctaatgtactgtttgcccgggagctcgccaaccagcttgaggccactggcgtgcacctgctatgcagcccacccagggcctgtgaaactcggaagct

SEQ ID NO: 4270 - DNA, 418 bp, Homo sapiens
gactgtcagtgtcataaatgtcagctgctattttttcttccacctggaagtcccttcctgcctctccctaccgtctccccatacttcaaggcctagcttaaatgccacctcctccaagaagccttccagactccacccagccataagtcatctctcctgcctcctcatggtctatgttgttgtttttctcagtggaattcatacatttgtacctattttctctccctatcagacagacgttcctcaagggaagatcctttacactctgatctcagaatcttccaagctactgagtatgtagtaggtgcccaatgaaatgtttgtcatatgactaggagagtaaccatttttcttggccagaccaatggagtgggcttcactttcccaggttatttcagtgaggcactttgttcttaat

SEQ ID NO: 4271 - DNA, 516 bp, Homo sapiens
ggtatatttgaacaaactgtcccaggcaggggctgggcagggcctgtgtgccttgctcagcctcctgacaggacacttttgttgcacttagaatttacattttaatggatgtaaaaacaactgtgagagatgtctgggcctgcagaagtccagcattgctcaaaaaagcgtgtgttctagtgaacattttcatatatatttattggttatagcctgttaaaatattttcttttttgtattatttatccccctacattatgtatttatatgagggaaaaaaaggaaaaaattgtacttttttagtatttacctgttacaaaggacattgtgtttcctgtcatgtaaaaccagctattttagttactattgtactctagaaaagagctgtagatttatgttaaactcgtacttacgaacaattgtaattagttctaaaaggcatgaactcagctcctaatcgtcactgtatagtcctgaatttgtagaactagaagttaattccctcttgggaacttt

SEQ ID NO: 4272 - DNA, 500 bp, Homo sapiens
ttttttttttttcaggtgcatttgtaatttattaaagttcatctgtgtgtgacagaagagattttacccacagtgtggggagtttctatttttctagcctgtgaaatggggttggttgtcctgaggtgcagagaccagaatgtgagacattagactgcatcaggtttgccatctaaacttagggcaaccccaagtgcttgaacctataccaccccactttcctgagctctgtaaagagcatgaagttttcccactgaccccatacactgaggtgccatcacactgcacatttccttccggagaacaagcacgtactcaggtggagatagaactgtctttttacttaatagaaaatgatgtggcagctttaagaggagcgcgtcggtctggggctggtggcttgggtcacgtgacaccggtggtctcgtttgcgcctcttgatgtcccggcggcgccctgaggacggattgggcaaggctggtccctgtgtgatgagacat

SEQ ID NO: 4273 - DNA, 513 bp, Homo sapiens
  misc_feature (1)...(513): n = a,t,c or g
aaagatgattgagagaaatgcttcctgggagtttttatgtatgtgtaataccattttattctgatctaaagaatactttatttcattatttggtgggtaatttgtcatagccagaaacctgtatcatcatatgttactcatgagtgtatatagcaagttaagtcactcaaatctttaatgtggaaggagttactcagaagaaagaagaagatgtctttttcacatgtattttctttctaggccagggaagcctttaaattaatttcctacagtagtgctgtagagagtgtgattcccctcccttcactccactccctacctatatagtctgtaggattatcctgttcagaggaaggttgaacctgtgaaagtatcctttttataagaccacgttaatcttgggggggtgaaaaaaaaggtgagacagtgatagcactgggaggtttaaaggtacttttngggaagtacttacaaatttcccncaccattttcaagtagttcccaattactaag

SEQ ID NO: 4274 - DNA, 44 bp, Homo sapiens
ggaaaccagttctgatcacctatccctacatatccttcttcact

SEQ ID NO: 4275 - DNA, 2884 bp, Homo sapiens
actccccccaccccacttcgcctgccgcggtcgggtccgcggcctgcgctgtagcggtcgccgccgttccctggaagtagcaacttccctaccccaccccagtcctggtccccgtccagccgctgacgtgaagatgagcagctcagaggaggtgtcctggatttcctggttctgtgggctccgtggcaatgaattcttctgtgaagtggatgaagactacatccaggacaaatttaatcttactggactcaatgagcaggtccctcactatcgacaagctctagacatgatcttggacctggagcctgatgaagaactggaagacaaccccaaccagagtgacctgattgagcaggcagccgagatgctttatggattgatccacgcccgctacatccttaccaaccgtgggcatcgcccagatggtgaggcctctctgctcctacctgcctccttctgagcagtaagagacacaggttcctgcagcaagaagtcatgtttaagccctgtttaaggaagctagctgagaagaggggaagaaccccagaacttgggcctgggaattgaattctgattgggggtcatcctgaagggattgtttttcagggagggagacagaccttgaatcaaagagttgtgatagactgcctcttcctcaaggaacaaacaacaaatggctctgatggtttgtagccctgccctaatttggaagaaaggcaacacagaagtttgagagcccatctagtccagagaagggggcctctggacagagttggaaggagtgccgacagagttggtatgggttgggctgcgaagggagttgcctcttctttacatctacctgccaaccccttccattgtattcacctcagttggaaaagtaccagcaaggagactttggttactgtcctcgtgtgtactgtgagaaccagccaatgcttcccattggtgagtgttgaagaagggaaaggaaagcaccgtgtggcagtcttatgggaaggagttggggctcaacacattggagcctgagtcctgaggggaggttaggtaggaatagggggatacctggcctgctgagtctggctgtctcccaggcctttcagacatcccaggtgaagccatggtgaagctctactgccccaagtgcatggatgtgtacacacccaagtcatcaagacaccatcacacggatggcgcctacttcggcactggtttccctcacatgctcttcatggtgcatcccgagtaccggcccaagagacctgccaaccagtttgtgcccaggtagggagcagggagagtcattaagggtcaaaggaaaggcccaagatcccccagagaggggaggacagggcatggccctttcttgaggtctgcttctcccagaatcagggcatctccctgctgagtgactgtgggaaagttatttgattatctgtgcttgagttaccttattgtagaatgttcttgagctgagaagttgggaaccacgaggctttagctctgagcaggtccatagaggagctcaggtggggaggtgggaatgcaggtgactggcagggcctggatggggctcatgctgctgcctctctgacctctgccctggcctaggctctacggtttcaagatccatccgatggcctaccagctgcagctccaagccgccagcaacttcaagagcccagtcaagacgattcgctgattccctcccccacctgtcctgcagtctttgtcttttcctttcttttttgccaccctttcaggaaccctgtatggtttttagtttaaattaaaggagtcgttatcgtggtgggaatatgaaataaagtagaagaaaaggccatgagctagtctgctggtgcttgctgttggggaagggaaggtgatggtgtgttggactccaggggccctcatggcccagcccaccctccccagattgaaaaccaggacagatttgtgctcagtggattgggtggtgtttttagtatggagcagaacagaattcctaggactgcgtgtgatgaaatgcaaggtcaaaaggaaaagacaaagcatatttcaaagatgagaaatatttgtttggatatctatgactgtctgtttatactgtaaggggcttaatcagcagctccatcttttagttttagttctaaaggaaaagtagcctaaagtcagtataactaaagggtggaacgaggtgggacaaggtccggaattgctgctcagtgatgtgtgtgtgcctgccgctggtggagctgagactgctcactctcagaaggatggggatgcttgatttcctggccaggttgtcccagcacagtggggattggccctgttgtatgacgaagacagcacatggtggcagagatagatactaacccatggactttccaagggagggaataggtctttggagggtatgcaagacaaaggtagacactggataaagaacccggtagtgcccaggtattaccccatctgggccattactcccacactcaggaaccagacgttgtgggtgaggacatgctgtccctcctgccaagtaataacttccttcccagccaggatcctgccccaagtaggaatatagctctgcatttacagcagctcctgctcagaccttgtcaaaaccaccctgcagcttaggattaaggagcatggtcacaggaaggtggggtttcagggcatcccctcaggaactgcccatctccccagaattccaaaatgaaggtccatatgcttgtaggtgtgctggtcatggtgggctcacagtaggaaagggtaagtggggcccaggggcagggagggaggaaggggtaactgagtccaggaagggggtggagcgtggccatggaaatcgggctccacggcccagggatgg

SEQ ID NO: 4276 - DNA, 455 bp, Homo sapiens
  misc_feature (1)...(455): n = a,t,c or g
attcggcacagctggaaggctccttaagtgggaggcaggagggtcaaaggtccaggagaaggaagcggctcagaatgcagtgatgcagtgaagagccagcctctagatgctggaaggcccaaggaacaggttctcccctggagcctacagaaggaaccagtcctcggaacaccttcatttcagcccagtaacactggatttgagactccccacctccagacctatcagggaatagatctgtgttactgtaaaccattaagttcatgttgattttttacagcagcaataggaaactaaaacacaggacttgtagtcatacaaagaagagttgaattaaatcggcagtgactttaccccacaaacccaggggcaccagggacatgtcataggaagagagaaaatgttgacagcgtttcatttattgaaggatttaaacctcaccatnaaattttaaa

SEQ ID NO: 4277 - DNA, 528 bp, Homo sapiens
  misc_feature (1)...(528): n = a,t,c or g
agaacaaccccatgtacgtagctggcagtgaacacaaaagctctctgagtagccggaagagcccacaatttcatcagctctctagacctgttggacaccctcagatcagggtgactgagggagtgtgggcaggaagccagnaccagggaatccagggagaggctgcttagggctttggggtccaggcagagcaggaactataaggaggtggagccacttgggaggaaggcgaggaccagaatggagtggagtggctcttttggctccacattgaccaccatttagctacttggtgtgttggcctctctacatccagttgctgcttctcagtgctcccctctggcttattctttcccaccattctgtgcctgggctttactctccctcacagcttctgcttccttttagctttggattgcatgacccctgacgggcccagtgctttcatancctcattcnccttagaattcacctgctgctttgccaaattcnctgcatccaaccctganggaaancatctatggccgg

SEQ ID NO: 4278 - DNA, 725 bp, Homo sapiens
ttttttttttttcacagtgagcattaaattattattccatacagccctggccctggcccttcttgagggagtggggtttgtggggtgtgcccagcagggatcctgccagatgatgtccacatgagaaggcaggtgtccaacagcttcagcttcacccagtgccccccagacaaataatgacaagtccagggtcttctgatgtgtcaggccagcactccccttgctgatgggaaaaccggggctcggccagccccactgcatcccctcacatgatgatacgaggctctggcactgactcgccaatagacttgtggggcagcacgctggctccgttgaggtagagctcatcattaactatgacgtcctcacccagcactgtcacgttctccatgcgtacccactgacccacgcggcagcgccagcccacaatgcaggactcaagccaggaatgggaacggatccgggcatcccgcagcaccgtgcaccgccggatacacacaccatcttcgaccaccacgccaggtcccaggctcacattggggccaatgctgcagttctggccgatgcgggcacttgggtccaccagcacgttgcccacaatgccagggcctgagcacagccgctcaggctgcttctgcctcagtgactgcaggaagaggcacatgccagtgaggaagtccttgggctgcccaatgtccatccagaagccctgtaactccatggcc

SEQ ID NO: 4279 - DNA, 703 bp, Homo sapiens
gctggcataatgtcttattttccactgcttggaaaccatttttcctacatcccatctttctaccaagttgagaatcagtgagctcaggacgcaggggaggcgctggctgcatattgtagagatctgatcttggggaaatgcctgtttattatggatatggcttatggactaaaacaatagcattgaatgtacgttgtatgcatgtaaggtagttgtgattaaccaaaaccaatgttgatgacgaacttaacagagagtcaagtgtgctttaaaaataagcttaaaaaactgcctgggttttgtatgcacagattttgggccagccaggaagatccctcaggttgtggtttgagaatacctgttttagacaaagcacgggtgatgtgtcccagtcatccaggaaggatgaaatcctggcaaggaaacccgtaaggatccagattaccaggaagggcttgcctcagggagaggaaggaagcaaggaagaaattagtaactgaaaagaggcaaggaggaaggcctcttcatcaggaggtgggggagtgtggggcagtggataactaaaacaaaacagctgtggttgtcataaacacattttgtcagaaaataacctggtgtgttattttctgatgtttcagccattgtgtcttgattcaggaacagctcccttccgagtttctttttgtttgtttgttggtttttg

SEQ ID NO: 4280 - DNA, 272 bp, Homo sapiens
  misc_feature (1)...(272): n = a,t,c or g
gcaaaagaagggaagtgtcagagatggctctgctagactcacgtatttttcagtagaatctgggtcaggatggtgcggtcagaagatgcttctggagctctgggacccacaagcctgcgtgtcccacggtggagtattaggacaacttgaaaacatagtctgcagttcatcctccaccacacccaatgtgctcaataggatattgggttaaatgaataatgggggccgggcatnggtgggctcacggctgttaatcccagcactttngggag

SEQ ID NO: 4281 - DNA, 421 bp, Homo sapiens
ttgatgttgtccagtagctgtctagatataattgacgggtttctcttgtattcttgagtgagcagagctgaggttttagagcaccacaaaactgtaggaatggagtatcaaaaggttgaatacctgcctcatgaggaaactgggggaaagatgacagggcagattgtggcagaatgtatgtactgaaaatttgggggacgaactatagcaggaagaaaatacataaccagggacaccaaacagttggattttttgtttagtggttgttgatttggcttcaatttagggaatattttgagggtttttattgcttcagtagtttcaaactattttgtgtctatgtaagttggcttttattctcctgatctctcaaactcaaatctcaaaatattgaaaacttctgttatttttccctaaccct

SEQ ID NO: 4282 - DNA, 803 bp, Homo sapiens
ttgcagtcttttactacaggaatgtgaagatatatttaaaaatagaatactttaaaatcaggaaatgtattttgctctcttgaagaaaatagatatgatttggcaaaggataaaattagccataaatgataaagatttttttaacatctgaacttgtcattagcactaagatgagctgcttaccaggaactaagaagaattaacatcatcaagtttaaaatcgatcattttaaatatgaaggagatttaaacatctcaaccccatgaatcaattgtgctggataactatccagtctcattggatagtgggctcatcaaattgaggatattcaggagttaaagagatcagcacagaagagtgagaccaaatgctttttcttcatttcatttactgttataatgactgatgagtataaagggatttataagggcttttcatttcaaattacatttttctttaaatatccaaagttccttatgtggaaacaactgcaatttttatgaataggctggtcttgcctttaaaaatatgtttttaaagagcaaattctgcagaattaattattaaaaagactatgggactttggagaggctttcattaacattgtccctaaactacccttagttctacccagtggctcagaacttggggcaattttttttcccaggttatatgtggcaatgtctggagacattggttgtcacaacttcgggggacagtaccggcatttatgcatagcggtcaggggtgcagctaaacatcctacagtacacaacccacacatcaggagcaagaacacatc

SEQ ID NO: 4283 - DNA, 98 bp, Homo sapiens
tgggttttttttttgcaatgagaataaaaattttccatgtataagatcagtgtctttgaactttgtttatatcctttgcccatttttctattgagttc

SEQ ID NO: 4284 - DNA, 788 bp, Homo sapiens
  misc_feature (1)...(788): n = a,t,c or g
aaaatgcttaaatcaaacattttacaggaaatactgatcaagactattttgggaaattatgctttgcttaccgttcattgtaccgtctacgctctttccggtatcttgctgcctctcttggttttccaaaactcccactgagacttcttctccttggactcccttttgctataccattatctctcctgttcacttccttccctgtcntaattgaatctcagtttattcactttaaagatatgcctggtgattgaaaactgtcaatttttccaactgtgctgggtttntaatccagctcatcaagccttttatttntacaaaattttatctttcttgaattccccataccaaccaccaaattttttttctttatttcatttcctttaccttatctcttcccttacaagcaaatatgcttcactcataactgaagagattaaaagccaagtagaattgttggttgtttttaattccctaaacccacaattcctaatcccacttatgacagtaaataccagctgaacatccatttccatactctctcttggctctaagatcttacatacctgaggtatcctctgttctttatgactatttggggaacaaccttaaagggcatgacatgaaggaaatgtgactctattaaggatatttatctgaatcaaacactgctgtataggcaatggaataaacctcggtcagtttttaggcaaattggctttaacaaatggaacgggtgtggatcccggcactttggggggggctgagggcggncgggnttacccgga

SEQ ID NO: 4285 - DNA, 450 bp, Homo sapiens
aagcatcagacttctgttaccagacaacttataagtgccaactattggtagaactgtggacatgaagatagtggaaacagcttctctaggatgctatactcatctccaccaaatgcactttgaacaaaaacaacttgtagaaataggtcttaattttttttgtttgtttgtttggtttttttacaacatgctgtactgctctccattggtaagtgctagggaaaatcacttagccactagagggagctataacacaaaattaagcaggaaataatccccattatagatacatagaacaaagtagagaccagctaactaccttgatcctctgtatgcagctcttaaagttaggatgggtttggggtaagttttctttgccaactttacctttgtctttcccatctttttgtgtaaaaattcttcccccttttccagcttttgcatccattt

SEQ ID NO: 4286 - DNA, 505 bp, Homo sapiens
  misc_feature (1)...(505): n = a,t,c or g
gttttttttgttatgttgaagggaatgatccagagagaaagaaaaactaatgtagtttcctcaactgtgaaacaggtatagtaatgggattgttttgaggatttaatgaataaatataaagcacttagcatggcataaagtatgcactcaataatgcttgctttaaaaaatacagaatactgggcaagtcctaatgacagagttggttatgggagttggaagatgtcagagacccaattatcaagtcaattcataccacaagcaaagaaaagagcatggatgaggattaaaggagcaggagaatgaaaccagattttacatctactgtcttagggtgaagagttcctgtccaaaagggatcaacagtaaaaattattcacagtagagtttcaccaaacttccatgtggatccaaagtaatggcagctcctttttttttgtcatcacccaaggctcttttatattttgccttananctccagtttgnttttttttttgggggggga

SEQ ID NO: 4287 - DNA, 1962 bp, Homo sapiens
aggaggagcttgatggaagcgtgcgagaaggggcgtaactgatttggaaaccagaggaaaggcgctgttttcaccgaattagaatcgcgggaaaatagagaagagtttgtttgaaggtctcgcgagatcgagtgagtacggctcgccaagttggagcgctctcgcgatagacacagcaactattcagctgcgaggggacgggagaggtggtgagcactctcgcgagatttgaaggagcggcggaggccagagggaggagaggaccggaagtccttcatctcaagcatccaatgctgaaaggggcctgattttctctaccggaagcccttttccagaggctgggaacacggcccacctagcaggaagtcccacctccttgagctccgccacccttcccgaagtttttctgtcacctgtgttaggctccgtcccctttccgcgttttatccccgtaccagaaaaggatacatttagtgcctcccacccagctccactaaacgggttggatatctcattctttgagttggtgttccttccccggcgcccccatgtagctgggaagtgggacctgggggtggttgggacccctggggatcctaaaggaggggcagggagggcgcagaactccgcttctgctccttgctaccaggacgcgcggcctcctcagcctctttcctcccgctgccatgcaccctgcagccttcccgcttcctgtggttgtggccgctgtgctgtggggagcggccccgacccgggggctcattcgagcgacctcgggaccacaatgccagcatggacttttgcagaccttccagctctgtttggggctaccttgagccaggagggcctccaggggttccttgtggaggctcacccagacaatgcctgcagccccattgccccaccacccccagccccggtcaatgggtcagtctttattgcgctgcttcgaagattcgactgcaactttgacctcaaggtcctaaatgcccagaaggctggatatggtgccgctgtagtacacaatgtgaattccaatgaacttctgaacatggtgtggaatagtgaggaaatccagcagcagatctggatcccgtctgtatttattggggagagaagctccgagtacctgcgtgccctctttgtctacgagaagggggctcgggtgcttctggttccagacaataccttccccttgggctattacctcatccctttcacagggattgtgggactgctggttttggccatgggagcagtaatgatagctcgttgtatccagcaccggaaacggctccagcggaatcgacttaccaaagagcaactgaaacagattcctacacatgactatcagaagggagaccagtatgatgtctgtgccatttgcctggatgaatatgaggatggggacaagctgcgggtactcccctgtgctcatgcctaccacagccgctgcgtggacccctggctcactcagacccggaagacctgccccatttgcaagcagcctgttcatcggggtcctggggacgaagaccaagaggaagaaactcaagggcaagaggagggtgatgaaggggagccaagggaccaccctgcctcagaaaggaccccacttttgggttctagccccactcttcccacctcctttggttccttagccccagctccccttgtttttcctgggccttcaacagatcccccactgtcccctccctcttcccctgttatcctggtctaataaccccccacacatacacctctggtgacctatttgcacagaccgtcgtcttccctccagtcttctgagggataggggacattccatcccaagcttctcccttacccacacctatccttttgaggggctttggggtggggctggggcaagcagagggactgggtcttcacttcttgggctaataaaattgtttctttgtggactaaaaaaaaaaaaaaaaa

SEQ ID NO: 4288 - DNA, 307 bp, Homo sapiens
  misc_feature (1)...(307): n = a,t,c or g
gcggtggctcaacatctgtaatccccagtacttttaggtggtggaagtggtaagatcgcatgaggcccaggagttcaagacgagcctgagcaatatagacctcatctctacaaagtaaaaacattagttagccaggcatggtggtgtgcacnnnnnnnnnnnnnnnnnnnnnnnnnnnnnnnnnnnnnnnnnnnnnnnnnnnnnnnnnnnnnnnnnnnnnnnnnnnnnnnnnnnnnnnnnnnnnnnnnnnngcttttaaaattaattaattaaaaacaaaaagaatattaactaaaatttattgagg

SEQ ID NO: 4289 - DNA, 339 bp, Homo sapiens
gcctaaaccctactgggcatgccacctacctatgccccagcctcacacagaaggtttctgagtaatctgttgctctttttccctacaatttgtcttccatataactcaaactgacaaggctatggcttacataaagaaatatattataaatcaacaacactcatgataagtttacataagacatgagaatacacctgaatcaccaaccgggaaaaatgattgaagagcttgaaattaagcctaagtgtaagtctctgttaagcttacaacattacaatagttaaatcgaaggttagaaagaaaatggtagacattgctccttttcctgtacttaccacc

SEQ ID NO: 4290 - DNA, 649 bp, Homo sapiens
agagaaagatgtcactgtctctaatctccctgtcatttttatttccagcaggcgcggggcgaaggagctgctagaacaatgctgaggcgggtgaggtgaggagcagcccctcgcggcagccccgacagagtgtctggaacaggtgattggaggagccggagacccaggcacctgggcatccttcccctcgcctctgccaggccccgcgcccctaaaaggtgggaaaaccatggcgaccaatttcagtgacatcgtcaagcaaggctacgtgaagatgaagagcaggaagctcgggatcttaccggaggtgctggctggtgttccggaaatcctccagcaaggggccccagcggctggagaagtatccagatgagaagtcggtgtgcctccggggctgccccaaggtgactgagatcagcaacgtcaagtgtgttacgcggctccccaaggagaccaagcggcaggcggtggccatcatattcactgatgactcggcacgtaccttcacctgcgactcagagctataggcagaggagtggtacaagacactatctgtggagtgtctggggtcccgcctcaacgacatcagtctgggagaacctgacctcctggccccaggggtgcaagtgtgaacagacagattcgcttc

SEQ ID NO: 4291 - DNA, 488 bp, Homo sapiens
aatattttcaaatgaactccaaagtgatatgtattgaagtcttgctcttggtctaatctgcctcagtcctgagaagcctagctctaagataaacaaagggcatcttccactgggagtgcaatgttggaactgctcactgccttaagtaaccatatgcatagcctctttcctgatagttggctcctgtctccctttgtaatcctttccttcttccatgcctgctgcttaagttgcagactattccagcctcacttctcttggacacttctatctgttgcaggcataggcctgtctcatcccagactcacctcttctacaagatcctccctgtaaatatctcctttgtgtttgctggatcatcttatttggttatctttggcgatggaggtggtagtgcttattactgagagttttctatgtaccaactatagtgtcagcagtatgctttatctgatttaattctaacaaccacctcatgagttagatgc

SEQ ID NO: 4292 - DNA, 82 bp, Homo sapiens
gagctgactggatcaagaaactgaagcgtagtgagggcaagtgtgctggaaggctaaatagggtgatgttgctaaagcaagg

SEQ ID NO: 4293 - DNA, 398 bp, Homo sapiens
  misc_feature (1)...(398): n = a,t,c or g
agaactgagggtctctgctgatgtccctctgcagctgtcctgccagtgaggcactgttgacccatcgtgcctgggcctaactgtcatgtagaaatagtttctggaagtcatctttaaactggtctggtgagtattctaagtgcgaccaacatcccctttccttctcctgacctagttggccccttctgtgggttccagatagcctttttctgtgggttcatttgtattgctctagaacaggataaagatattgtctaactttaggctttgctaagttaaaatatgaaaagttaaaattttctggccaggcgcccttggctcatgccctgtaatcnnnnnnnnnnnnnnnnnnnnnnnnnnnnnnnnnnnnnnnnnnnnnnnnnnnttaagaccagcct

SEQ ID NO: 4294 - DNA, 346 bp, Homo sapiens
  misc_feature (1)...(346): n = a,t,c or g
aaatttcttttggtaggcgggacccacagatgcatgcaatacttctagatcagttttttcatctgggcacttgacattttggaccagataatttattattttgagggttgttctgtgcatcacaggatgttcagcatccgcagtagcactccccgtccagttgtgacaatcaccaatgcttccagatattgctagatgtccctgggagtggcgcagaatcgaccctggctgagaaccactgctctagatcttcattaggaattgtaacgtgaaagcctccaaacttttagatgttgagttaatttaaacatcctttggtcaatgctgtgggcaaacctananccca

SEQ ID NO: 4295 - DNA, 333 bp, Homo sapiens
cacttcctcccgttggcaaacagaagttcaggatgagaccctgctggcctggtcctggcacatcctctgcactgttgaatcactggacttactgatcttagatgaccaccccctccctcacacctgtgggcagggcagaacagcctggcgggctacagtttagcatggccttcttgagctagggtggaatggggcagggtgctctggactcttaccccctcccctcccatctgtgggcttggctctgctgtggccctcctgggctgggtccccttggtttttcgtgctggaacatccccaccagagcctctctgccataacatgccagctgct

SEQ ID NO: 4296 - DNA, 340 bp, Homo sapiens
cagaagtgaaacatctctaccgtttgaaacccgaaacttcggcagaattaaatcttcatgctccagagctgcttataacaactgatgcaaaagacaggcgatcaagtgcccccgcgagcagtgcccagccaggctgggccgcgaacgcttccaggaccagcgcctgcagaatggaatgcacgcttttttcttcctggtctttctgggcggtggatatctctgcaagccaacccacacatttttttaatctccggtaacaagcagaaagacacctggactattatgctgtaaaactattttttataaagacattttaggaccagacattaaaagttattag

SEQ ID NO: 4297 - DNA, 366 bp, Homo sapiens
  misc_feature (1)...(366): n = a,t,c or g
cccccagtccctttgtgagatttgccatcctgactgcaaaggatggaagaaancccgggcaattaggtgagtgttgccctaaattaanctgccccattaaaatantctaaagagcatttccttcctttttggaggatgaggacttctacttatctgacagcaattctagtgtgtttttaacattttaatatgaagagtttccaaaacttggaaagaatcggatttggaaagaatcggatggtgaaccctcagacctaccgtctagattctatgatcatgttaagtttttctcataagagatggcatgaaaactttgtctaagcaaaataaagtggagaacccatttgggttcctcggttaaaaaat

SEQ ID NO: 4298 - DNA, 612 bp, Homo sapiens
agactgttggatattctccaagactatatggattacagaggctacagctatgagcgtgtggatggttctgtgagaggagaagagagacacttggccattaagaactttggacagcagcccattttcgtttttctccctgagtactagggcaggtggagttggcatgaacttaacagcagcagatactgtgatttttgttgacagtgactttaatcctcagaaatgacttgcaagcagctgccagggctcatcgcattggccaaaacaagtctgttaaagttattcggctgattggtcgagacactgtggaagaaatagtctataggaaagcagcctccaaactgcagctcaccaacatgatcatagaaggaggccattttactctgggagcccagaaacccgctgccgatgctgacctccagttgagtgagatactcaaatttggtttggataaactgctggcctctgaggggagcaccatggatgaaatagacctggagtccatcctgggagaaacaaaagatggccagtgggtctctgatgccttgcctgcagcagaaggagggagcagagatcaagaggaaggaaaaaatcatatgtacttatttgaag

SEQ ID NO: 4299 - DNA, 389 bp, Homo sapiens
  misc_feature (1)...(389): n = a,t,c or g
taagagggacctttgtaaagcataggtctctgtgtcccgattccatcatgggacaactaatcctaaatgataaatgtattactcaggcagcccctgatatcagagggaagttgcagaaatgggccctggcgtcggggagtactttaggagacctcctgaaagaggccaccttggtcttttacagtacagatagggagacacaagaaagaggcagaagctttaagggtcaccatgcaaacccacaaaccccagaattcctaaggtgcatctgttaactcctacagatgtgggcaagaacagttatctctcttctaaaatttaaccacacccatggcaagtcttaatttcttttcantaaggtgaaacagttncaggggtacaatgttgtt

SEQ ID NO: 4300 - DNA, 1623 bp, Homo sapiens
ttttttttttttaggtttgaaatatctttttgcaatagataatcttatttacattaatacagaatcattttacattcctaaatcagacactaatagatgctttattttagtgaattataaaggaaaacaaaaaggaaactgttgagaagtgttcttcattaacctgtctaacgacagcccgaagatcctgaaacacatggaaactgcgacatgctaccagcagaggctggggaatgggggttctgctctcactgaatggtggggaaccttcaactgcttagcctgtgctttccttttctgaatcaacatttacaaaggaaaaaacaatgattagcactgaataatttaaacacacttcagaaaatagatgtcaacagtgtaagtgggagaaccaagcccctgactagcaacagtggcagggcttcagttcccaaggcagctgaagtctggccagcacagtgctgcaatgggctgtggctcagcagtaaggcaggagccctccatgcctggcttacaacaacaggactcaatagtcagggacaggcggccatcctggatggggtgggagcaaggactgtacatcctgacaaggatcaccacccacacggtcagagcagaacccccagggactctctgggcctctacgtgcctcccaggcaccgactgtgcagctgcttggtaccccgggaataaaaactaactgagcagagcagctgatgcctcggcagggcccctcattaggggaggacggtgctggtggggcctgggggccccacgctcccagtgaagacaacctgtcaggaagaactcattctggaacctcccggaggtttgctgagaaggaaattaatcacttcgtaacttgatgcagcttaaggcttcatttctaagctgtaagcatggcctttaactaagatatccacaatattcaattccaaattagagttttagccctgcaagagtctaaccatctccctctgcctgagccaggggccgtcacctaccaatggacaggaaactgccaccagcctctggggctgcatcctactgcccgggctgtccactgtgacctttccgtggagagaggtgttgtcccatgattttgctgttgccaaggccgtccagaggctctgcgggtgggagctcagtgctgctgttctggaatcctcccgtctcccaggtgccctggcccttggaggggctgctgcttcccggcctagtttccagtggatctttttccagagctggtgagggtgacgccgttcaccgtcccctccacatctgtctcgtcctcggcgtagctcaggatcaggctctgctgccggctcgttagcctctttggaactccggtatcttgaatgtggatgtagtggtctccgtagccgtagctgttaatccgggggatgcctttcccacccatccgaatcttctggtctgtctgagtcccaggggggatcgtcacgttgatcgtctcgtacaggccctgggctctggctgttcccccaagaagagcctgagctatagaaataaagaggtcggagtggatgtctgcgccgtcgctccggaaacacagggcttttctgcaccctgaacgtaatgaaaatttccctttttcccacaggc

SEQ ID NO: 4301 - DNA, 577 bp, Homo sapiens
  misc_feature (1)...(577): n = a,t,c or g
gcccccctgaaacaatggcctcaactcctccctgtccctgaaccccctgggcttctggcagcttggtgcctgcctgcctgaggttcaggctgaaacggccctgggaccacgtgtctatgtccaagccgcagagggcccacccctgccccgtgatcaggttaaggcctggcagggctggggaagggaagggacatgcagcaggaggtcatggggcccaggagtctaggagggactcccagaccagcatactggccccacaggccccgagctgggagccctgaggtcagagccccacagaggagcccgaagcacagtccagctcagcagggccgcttgctgtccagaatggccttccagtcgtccgcccacgagtgcagcctgcggcgggggggctgcagctgcaggtgntggttgtggcaggcggtgaagaggacatgctcccagctgggggttggctcggcccctgtcgcaggccacttgcctgtgatgtccggccggtcgtctatgagaaggtcagcaganccacggtcttgtctctggtcagcacaatctgctccagaaagtcagggccaaagta

SEQ ID NO: 4302 - DNA, 490 bp, Homo sapiens
  misc_feature (1)...(490): n = a,t,c or g
gagcaccatgagcttcaataccctgcaaattgagtattttacatagtcttagaaaaggaagccaaaaggaaaaaaactccatgggcaacagctttcacacaaccagatgacaaagtaccctacaaaacctcaaaacacctcagagcacactgagacccccgtgctatcagggaaagtgagaagataaggcccaagagccaagaactcagaaatctcccaaaaatctcaaaggggaagtccccctgcctgcctcccggaatgaagaactcagtgaagatgtgaaaacaggtggaactccgagaggacttgccagggagactacagcagcacaagggcagggctttaggganggcttgggtngagctgatnaggacttccttcacagcagggagagagttcntgcattnaggaggganccacggggtagttaaggagcntcaacttaggcngattggggcaccttnggccaaaaaaaaggggattgaaactt

SEQ ID NO: 4303 - DNA, 275 bp, Homo sapiens
gacctcgtgggttagatcccaaattacgcccgctctcgatccttaataatgggaaggggcttccacttgtcgccctccgcctcctgcacctcagtgacttccctgaccaaggaggaagaattggcgtgcagcatgggcttccctcaatggccaccattccgctggcacaatgtagtgccctgccccgggcctcagtttccccatctgtggaactgagtgtggcctcgacgtcaaaaatgtggactctggtccggtcgcggtggctcacgcctgta

SEQ ID NO: 4304 - DNA, 407 bp, Homo sapiens
  misc_feature (1)...(407): n = a,t,c or g
cggcgtgggatgataacagcttaccaaggtcagccctacagcaagaggggaagacaatacgaactctgcccgacagctgctaaggaatgccaagatgttcccctggaagtctggtccctgctggaattctcctgggattcctcagcaccctatctggagttcaccgttcactttcttttctctagaaagccaagctacttctcgatgtggggaaagcaaggagcttctttttcttgcattttgttgtaaaagacaaggacatcctagttacaccattttttcctgagcgttccggggaaggctngcaggctgtgtctaacagagctgctaccccaaaatgacatcctncaaaggtcagagccaaatacttaagtgntttcaatttaaatgcgaacatttccttttct

SEQ ID NO: 4305 - DNA, 386 bp, Homo sapiens
  misc_feature (1)...(386): n = a,t,c or g
caccagaggtaaagttgtccacattctgccgagtgaacgtgaacaatgcttcctgactctaacttttacctcaagcttcattttccctaggagatctaaagcctactcacttcaaaacaagcaaaacaaagccgagttctgagggtaagacttcgttgttgtctggtttccaggtcccatttctagaccctacgtaggctgcagagcaccatgaaataatttaagcccaaagttttaatgtttagagcctagacctctctgcaacatttttagtgtagtgaggtcctgatttcaatttttcgaaattagggtcctatcttctgnnnnnnnnnnnnnnnnnnnnnnnnnnnnnnnnnnnnnnnnncagaggttgcagtgagctgaga

SEQ ID NO: 4306 - DNA, 960 bp, Homo sapiens
  misc_feature (1)...(960): n = a,t,c or g
cttccttatcaactcagcaggggtcatagatcgaatagatgctgaaaagcgtaagatatatgcattccttgacatcatttttaaagacattccttcaaatagtttccacacagaaattcctcactcccattatgagagattgtggttatatgtcttaaatttattataagctgcttcaaagaaagggtctgaatgtttgaattatgagtgaaatcatgtgaaattttgagttaaactctgtgatttgattttcagggtctttaaaatatatcttaatatcttcttcctctttattcaataatttctgtcttgcacttacacactcataacagccaaatatgaggcacaaaaatgttacaatcagtttgaaagcagcatcaattaatggtagattctattcacattcccacaacccagaccaaatttttttcctattacngcagatgtgctgagcactttccagattgcccctgttggccaaaagcagcctgttaccatcctggaattaaggcacactttaaggatgaaaaggaacatgccaaaacccatttaattaaccaaaatatccaagtaaaaattagttcccaacggggcagcagctttcaaaatgagtgtccaatatttgcttctgctatagctgcaagaactgtaactggacccaagtagagaatgaagccacggtatagaactacgagaacacttttctgtgtttcccccatgccgtcctgtcacatcctcttacacgtcctctcttgatttgatagacaatattggcatcctgggtctcactgaggccgtgctatgtcctcagcagctgtttttgttgtttcgttattatgcccacaacaaaaaatcattccttagaaactcaccaagtttatctactgtgtaaatttatattattgttactaccaggtctcatcttttgtcaatgtcattgaataaatttcataagagtta

SEQ ID NO: 4307 - DNA, 652 bp, Homo sapiens
tgccgaaggcttcggcctttcacattcgggaagcgtcgggattaggtgaaagtacgtagttgtctttcgtaagttaaaatgataattgggccgaaacttactgccttacctaaaaggcagcgcagtcaggatattggtaggtcgggggcggctttggaaacccttaagtttacaagcatgcgcggacttgagtgctcattaggtcgccgggcgtccacgtgcagccctggaccctgaaccccggcgtgcgtgggccgtgggccctcggggaaaggttccgtgcactcggggactccggtgaagcctgttcagccgtctgtgtcatgtggccatcttgaagtctactctgtcgctcttgtgccctagcaccccgagaaccgtcagtttgagccagatggaagctgagctgaacacattacgatggatgatggaaacataagactatcaagaaatccaagtggtaatgggcgaagtttattcagcatccggcaatggacttatcgtagttggggaaacgggtgttccgaataatatcctggaagttatcaggacacctattttaaatataggcctgaattttgtaaagtaatatttaaggtggtccgtgataattaaataaaatgcttaattcatgtggctaaaaaaaaaaaaa

SEQ ID NO: 4308 - DNA, 1804 bp, Homo sapiens
ctcatccagaagttcctcagcctgtacggcgaccagatcgacatgcaccgcaaattcgtggtgcagctgttcgccgaggagtggggccagtacgtggacttgcccaagggttcgcggtgagcgagcgctgcaaggtgcgcctcgtgcccgctgccagatccagcttcactacccctgggaaattcttaccaccttccaaggcactggtgttttttcctgcctgtgatatgccaggaaaggttcagacccagccatcaagtattttggggatattattagcgtgggacagagattgttgcaaggggcccggattttaggaattcctgttattgtaacagaacaataccctaaaggtcttgggagcacggttcaagaaattgatttaacaggtgtaaaactggtacttccaaagaccaagttttcaatggtattaccagaagtagaagcggcattagcagagattcccggagtcaggagtgttgtattatttggagtagaaactcatgtgtgcatccaacaaactgccctggagctagttggccgaggagtcgaggttcacattgttgctgatgccacctcatcaagaagcatgatggacaggatgtttgccctcgagcgtctcgctcgaaccgggatcatagtgaccacgagtgaggctgttctgcttcagctggtagctgataaggaccatcccaaaattcaaggaaattcagaatctaattaaggcgagtgctccagagtcgggtctgctttccaaagtataggacatttgaagaactggtatgctactcactggtgaaggacagtcaggtgaaggactgtaagcccacacaagctcttcttatctctactagaattaaaatgttaagtcaaaaacggctccttttttgcgcctcctagtgaaacttaaccagctagaccatttgagtaccagcatttagttacaaacgtcaaaggcttccggtgctgcttaccttccttttttgttaatgtgcttttatttattaaaaaaaattacaatgaagatgcctgttttgtctctactgtgtactctgatcgtatctttccaaagtgcagactcttgtgaagttttcttaaattgttcactttaaagaaaatgacgtaccaacaatgatttggcttttatattactgtaagatgttataatgttaatgtggatgtagtgcttttactttacagattgattggaataagattattgcatatgaatttacccacaggactctgaatcatgttacccactcccctcacaatgttgtccacttagtgagttgcattgatctatccgtaccaaatgatgttgaataattacatatctttcttgactatactgatttcttattttggtcactattactaaatctctgttaatattctctcttttaactgaaaagggatgggatagaagggtttgcaatgccatattattggtggagggctgttttaacatctttgaagtatggcttgctgaatatctttaccaacatcttgaatatatattctagtgtccacaagatttagcaaaaagataaagcttgggtggaatatcattttaaaatgttcatgttctgttctatattttcttcacctactctccaaatattgtaatgcaaaaagtctcagtaatgatttggtagtattaattttgtggtcattgtttctcttcgataaatttattttcattaaatacttattagagggttttgaaatgtttttcaaatatgtgaaatgtgaaactgctgtcttttatattaaagtaattaaagaaaatgtactgtgattg

SEQ ID NO: 4309 - DNA, 371 bp, Homo sapiens
atgtagctagagatgtaaagcaacccactgccacgccgaggagctaccggaacttcaggcatccagaaatagttggctactccgtaccaggacgaaatgggcaaagtcaagacctcgtcaaaggatgtgcaagaacagcccaggctccggaagacagaagtacagagccagatggcagtgaggcagaaggcaaccaggtctattttgctgtctacaccttcaaggcacgaaacccaaatgagctgagcgtgtcagccaatcagaaactcaagatcctcgagtttaaagatgttacaggaaatacagagtggtggttagcttgaggttaacgggaagaagggttacgttcccttccaattatatccgcaaaa

SEQ ID NO: 4310 - DNA, 558 bp, Homo sapiens
  misc_feature (1)...(558): n = a,t,c or g
ggtccttcatcattgccctcccggggcaccagcctttgccacagtgttcatggttttccttccatccatgtcaggtcttggccaacaagagccacctctgggtggaggaggaggtctggcggatggagatctacctctccctgggagtgctggccctcggcacgttgtccctgctggccgtgacctcactgccgtccattgcaaactcgctcaactggagggagttcagcttcgttcaggtaaagtagtctctagtctgccagccagcttcagcgtggccctggcccacctctcatgagtaagtgctctgcctttgagaactgcctgggctctgatcatctgcacagcaggaccactcggtgagatgccangccttcctgacccaaagggcccatccaagcctcttgatangggctgcctgctacaagcttaanctcccaacacatgangaagcagacacaagcatgtgaaaaaattacagacaagacactgagccctgggtcaacantctcaacntctagaattcntgagcttccaaacaaaatgaatgacatgaat

SEQ ID NO: 4311 - DNA, 617 bp, Homo sapiens
  misc_feature (1)...(617): n = a,t,c or g
ggggttggaaacccagctggcagacagtagcagtgtaggagggtcccagacctgctcgtggctttcatggtatgactccaagccaggcatcttaactagcaggacaggcgtgttgctcatagtccacatcagccaacagatgtgtgaaccacgcccacaggctacgcagatggcaggtgtgatacgatcacatgtatattggttttcatccgcaattcctggctcataactcccatagcccttattacaatgttttgttatcatgttgggtgagttaggcctcaggagcaggccccagggaaacagagtctctctnctctgaccttctcctgttcctcctgttcacctgcctaaagggaancttcttaattctggattgtggggtcaaggagaccgatttccagaggggtcttattagggaaggcatgccacacagaggagggccaaggaaaagtttgagggtgggcacagtgggttcacgctgttaattcccagcatttagnnnnnnnnnnnnnnnnnnnnnnnnnnnnnnnnnnnnntngagaccacctggggcattttggtgaaancccttttntattganaattacaaaaaggtttggttgggcttggttttt

SEQ ID NO: 4312 - DNA, 421 bp, Homo sapiens
  misc_feature (1)...(421): n = a,t,c or g
ggggggtttgtttgggaaaccgtaaggtatatatggctcagcagagggataacaaggttttttgtgtaatcaaaattcaaaggtatactgtagaatagaacaaccggaattacaactcagaataaattcttagaattactaacagaaatgtgaaaagtcctgatggagatgtagaaagcgactggggacagatataggacccttcaatcctttctttcccactgctgcggttctcagcgcagctgtccctggggacacccagacaccgtgatgtagaatgaaagcatcttgtttcacccaagtgacctgctaacgtgagaattctcattttgagacattaaaaacacactttgggcaggccaaggctggccaggatccacttgagccccggggggtttcaagggcccgccttggcnaacat

SEQ ID NO: 4313 - DNA, 1155 bp, Homo sapiens
attctggcaaaaattgtacaaattttgtgggaagtcttgattgttacacaagagtactttctggttaagaacacttaaggtaacaatcactttcttcaagtattgttcaggtctgtagtattttaatgaatgccttgtaaattcagattcatccatgtatcaacacacttcttgactaaacttggaaaggagagttgtggtaaggtcagtgtttgctgttatgtaatctgtttgtccaaaatatttaaaaatcagtatcgtaagattcttaattcagagtcaagaattatcagtgtgacagcaattttcatatgttgaaagttttttccccagtagttgtttcatgataatcaagctgtttcttaggtgtggacctcaaaaagtattatcagttgatttttatgactttgaaaaattctaatttaaatgcaattgatatattgagagctcataaacagaatgtgctttccctgttgatactgctgctaatttaattctaggtaactgaaggaaaaggaatggtgtgcattcttgttgttttttcatactctcacattcatcttttatctagtctcaagatgatcttaagagtaaagctgtaattataactgattagaaagaatttcctaactttagtatagagggaagcacatagggtgctttcttaatgttctagaaagcagaccctattttagcttcttagtcatggagtggggggaactgtttctttctttttaaaattattttacagttatcattgtattcaatttttaaaattcttacaacctctgtgaagaaggtaaagagtagatgaataaattttaatgtcaacctagaacttcactccataatttatttgtgttatagtaagttattttaagctagtatatacccctattcaaaagtcaagatttaaacattgttgctaaaaagtaaatggggcgtgagccaccatacccagccagtgaaatattttcatatgttcattagctaatagtgaaaagcaaaaaattaagacagtgtttttggtatctatcaaacagttcaatccagtattggaggagatatggggaaatgggcatattaatatactgccggtgggaatatgaaactatattcttttttagagggcatttttacttttttaaaaaaaaa

SEQ ID NO: 4314 - DNA, 384 bp, Homo sapiens
gttaaagttagacctattcagaatgttgcagagtacagagaagtgagcttagggtgatcatttattttctctaatattcaaacctcaactcaaaacctttaggattaaaggcctgccactgtaagccaccctactctcatagaaagtgtataattatttaggaagacactatatcctccaaatgtacatgctttccaagagctgtgtgtccacactaggccttttgtctcttaactataggaaaggctggaaacttcaaggggttttgtaatagggtgctgctgccatggtacatacagacctctagcctgtgctgctccggagaacgttctgcagtgacggaaatgtcctttatctgtgctggtcagtgcagtagccactagc

SEQ ID NO: 4315 - DNA, 481 bp, Homo sapiens
  misc_feature (1)...(481): n = a,t,c or g
ggcagccaccgagtcgggcgatgggccgccctctgcgaccgagcagccccccgaggcctgaccaaccgcgagaccggcggaggagccccgcctggatgtcaagcggatgccaagcggatgccacagttccccccccagcggactccgtggggacatggcttcgctggtgcccctttccccatatctaagccccacggtcctcctgctggtcagctgtgacctgggcttcgtgcgagcagaccggcctccctctcctgtgaatgtgacggtcactcacctcagagccaactcggccactgtgtcctgggacgtcccagaaggcaacatcgtcattggctactccatttcccagcaacggcagaatggccccgggcagcgtgtgattcgggaggtgaacaccaccacccgggcctgtgccctctggggcctggntgaagacagtgactacacagtgcaggtcaggagcatcggccttcgggga

SEQ ID NO: 4316 - DNA, 467 bp, Homo sapiens
gccttcctggttctgacttgccatgaattgagccacagatctgggcagggaaggtgacaggcctcgagtgaggagagcttctgagaaaggctgtggggttggctgtacctgtcccacgatgggctggtttgccatgtcaggtctggccaagggtgatgtgtttatctcatccattgggcccagaactgtggaaattgttcgctcactgatttgttgctcactcccccatcaggggtccattgccctgtctggcatctatgaggacctgtgggtgccaggagtgaagaggcagagatgagcttgtcctggtccttgggatgattattttttgaaaggtaaaatggaccatggggagcccctgccattttctgaggcctcatgaggattctttctcacacaggctcagctggaagctcagaaagccacgcaggacttccagagggccacagaggtgctccacgccgagc

SEQ ID NO: 4317 - DNA, 325 bp, Homo sapiens
ctgaaaatagaaagataatgcttgcttcaatagacagagacatcagctgtagatttcatagtgaatcccagtttagcaaattagcagcaaatagacttgaaagatgactgcctgaaaataaaattttctatcattttatgacaatgatttagcctgttgattagacttacgcactaataaatgccagggctgtgtacagaataggagtgtattttagcttcagctgtttcacatgcatctctcactggtatgtgtgatgagtgtgatggatgtaatgtaagccttaactcttaagcagagttgcaagtaaattctgtgtaccaaa

SEQ ID NO: 4318 - DNA, 1600 bp, Homo sapiens
  misc_feature (1)...(1600): n = a,t,c or g
gaagcgccgggccctgctgcgggggggagagccactgacgccgggaccgggaccgccgccgccgccgccaccatgagtgatcagcagctggactgtgccttggacctaatgaggcgcctgcctccgccagcaaatcgagaaaaacctcagcgacctgatcgacctggtccccagtctatgtgaggatctcctgtcttctgttgaccagccactgaaaattgccagagacaaggtggtgggaaaggattaccttttgtgtgactacaacagagatggggactcctataggtcaccatggagtaacaagtatgaccctcccttggaggatggggccatgccgtcagctcggctgagaaagctggaggtggaagccaacaatgcctttgaccagtatcgagacctgtattttgaaggtggcgtctcatctgtctacctctgggatctggatcatggctttgctggagtgatcctcataaagaaggctggagatggatcaaagaagatcaaaggctgctgggattccatccacgtggtagaagtgcaggagaaatccagcggtcgcaccgcccattacaagttgacctccacggtgatgctgtggctgcagaccaacaaatctggctctggcaccatgaacctcggaggcagccttaccagacagatggagaaggatgaaactgtgagtgactgctccccacacatagccaacatcgggcgcctggtagaggacatggaaaataaaatcagaagtacgctgaacgagatctactttggaaaaacaaaggatatcgtcaatgggctgaggtctgtgcagacttttgcagacaaatcaaaacaagaagctctgaagaatgacctggtggaggctttgaagagaaagcagcaatgctaaacctctgtttcatgctaaccagacacgccgtgcactcgttagattcctttcttagaaaactcgttttctgctcccttccctcgtcccttccctccccgacaggtcacataacagctgcatcattgaccgcacagcgccatctctccctgagaataaagccgatagccaccctcctccggctccgagcctgcttctgccacacctcgctctcagttctctccacatttccatagagaccgtgtggtttttgttcacccgggccccccgtcttccaccctgtccccccatttataggcataaaatccactgtctgccagcctcccttccctcccacctttttggtacattggtgtaaaaaatgtaaaaccaaaaaaattttatgaactaactgtggtgtgtgaaagagagaagaaaaactggaaatcttattccgtgtgtgtttgggagttgcttggggttgggggtcgtggggacaggggacagctctgggagcagaggtggccctcggtgccgtcctgcgcagactctcccgttcccacggaggccgcggggtgggcgctggggggggtgccgccgaccgttccgctcttccggccaggtgcttttctgtcaatttctatggaatgcaaaaggaggtttttgttttattttgtttttttgtaaagcttaagaaaaaaatctacatcttcggnctngngcctccatact

SEQ ID NO: 4319 - DNA, 535 bp, Homo sapiens
tttttttttttggaattttgtaagatttattgagaatagaacaggcttcctgtcccctaaccctgtggtggatcctgagaagagggaagcctaggtctgggtggtgtgggctggaggccctacccacctgcaaatggggactcccaggcccccgcgggtgcatacagtgaacaaagtaattgctctcccctatcacccctgatccttacctgcctggcccccaaggtctcctggggaccagagatccctgcatagccaggagccagcctggcccacctcaaggggcaggaagcaagggtagcactgtggaacctgtttttgtcagggggtggcaggcatgccctggccccgaggctgaagcccacaggtctgccacttggtcctggtgtgcccctgtatcccaggggacatggctgagcaaagtcctatgtgttagcctgaggtgcaagctggctcacttcaccccctactcaggagccttgatttgaaatagacatcgagaagtggtgattacatgaatgtatatatatatata

SEQ ID NO: 4320 - DNA, 175 bp, Homo sapiens
  misc_feature (1)...(175): n = a,t,c or g
accacgcctgctactttttggatttttaagtacagacatttgaaacaatagagcagagtagtctttctgtttgggagtctgtactaatgaactgcaatacatgaggggtctaaaacatttcctgtaaccantactattttccatttggacaacccanttaattttttaaaangca

SEQ ID NO: 4321 - DNA, 566 bp, Homo sapiens
ttttttttaagtcaaaaacatgatttgttttcaggttgcaagtaacgggtcaactgagcctcacaaggtccgcccccgcccccagccgctggtgttggtagatgggggtgctgggtgggtgcccagcatcttctcggccctgggggcctactgcctgcagttgttgtcagacagctggctgggggtccgcacctcacccagggaggtggtgccctcaaagcgctgtgaggcgatggccgcctggtgggacatgctcttccgtacgatgtcacccttccgccacaacaccacttcctgctgcttgaagtagcgccgctcctcctcgtctatcagcaccaggttgaggtaatagcgcacagagaacttcttgttgatgtcccgcatggtgggcgtgagctcatacccggccaggaagagccggatcgggatggactctcctcgcactggtgccccgtccatgatctcgtacttggctatcgtgtcattctcatggtacacgttggggcctgtacccgtcgtttctcgcttgatgatgtctatctccatgtgcttgattttgattctta

SEQ ID NO: 4322 - DNA, 332 bp, Homo sapiens
ggaggaaatgaggttgtttctagatgcagtccatcaaaacagacttcctgcagccatgaaaccgtctcaggggtctggtagttttggagccattctgggcagcaggacctcacagaaggaaaccagcaggcagctttcttactcagacaatcaggcttctgcaaaaagaggaagtttggaaactaaagatgatattccgatttcgaaaagttcttggtaatccgggtagaggatcgattaagactgtagcaggaagtggaatagctcggacgattccttctttgacatctacttcaacacctcttagatcagggttgctagaaaatcgtact

SEQ ID NO: 4323 - DNA, 315 bp, Homo sapiens
tgaatgcactaaacatgaagagcttgaaagcgaagttcaggaagagtgacaccaatgagtggaacaagaatgatgaccggctactgcaggccgtggagaatggagatgcggagaaggtggcctcactgctcggcaagaagggggccagtgccaccaaacacgacagtgagggcaagaccgctttccatcttgctgctgcaaaaggacacgtggaatgcctcagggtcatgattacacatggtgtggatgtgacagcccaagatactaccggtacacagcgccttacatctcgcagccaagaacagtcaccatgaa

SEQ ID NO: 4324 - DNA, 456 bp, Homo sapiens
aacaaaaaaaaggaaaaacaaaagcctaaaatctgagttctagaaccagagagatttgggaaccataagatctagaatcagaaggagttgagggtggtaagatctaaaaccagagaaatgtataaggcaaagtctaaaatcagaagatatttgaaggctgaattctagacccagggtaatttggagtcagatcttgagtgaggaggagctggaaatgatgaagtctagagccaagggaacttacggaatgaggtctagaatcagaaggcacttgtaagtcagttctagaaccagagaaacagcagatcaccagatcttgaatcaggaccctggaggtggcaccttctagaagttgtgtagtctggaactagtgagtggtacaggtcatgaggttcagaatctaggagaactagagcatcgtctggttctagaagaactggttattataagataagg

SEQ ID NO: 4325 - DNA, 1056 bp, Homo sapiens
  misc_feature (1)...(1056): n = a,t,c or g
tttttttttttccttttagtaagaaaaactttatcaaaaatttaaatatataaaataaggccagagcgtgcactggaggcccacttcccagtggtgcactgctgcgctgggtgtccctatgcagctagatacatgttaactgcatagagtaccataaaggagcccactggtgagcttcactgtcacctggccctgctggctggggcttccattgtctactgggtctgtccacaccccagattgccttgtggtcctttcccctggccaagaagataacagttttttaaaaatccccttctgatatggatgtgagcaagcagtggggttcagtttgggaccaagcagtgccatttacaaagagcatgggaagcacctccttaggaggggaagcagggccatctccacgttgtcaggggccgcgccgttgcctgccagaccctgggcccacttgtgcaggcggctgtagagtgggaggccctggttctcacggtacaagtagacgccggtgatggcattccactgtggccgtggctgcgtgccttccactgggaagttggcaatcagttcctcatcatccttgttgagcgccacaaagccaaagaagcggcgcacattgttggcagcgagcacccgagagtgcaacctcggccgtgcgctggaacagctggtcctcaattgcgcggtactgcgcccagtagggcctcctggcggtagctgagtggtgagcagtaatgcttgaggcacttggtcaggaacaccaggatggccaccacgccgatgagcagccatccaaagagctgggactcataccntgngtgcggctgacctcctcccggaagtctgacaggttgtcagggttctccttgcaggggaacctggccaggatttcagtggcgtgggctgatgggaagtgctcttccctggccgtgagtgaggaagggtccacgaactcactgagagcacagacataagcctcaccacgcagcagggagatgacagaccaggtgacaggggccacagccgcacgtcccaggatggagccnntcgtgccgaaat

SEQ ID NO: 4326 - DNA, 636 bp, Homo sapiens
  misc_feature (1)...(636): n = a,t,c or g
tttttttttcaaatgcaaatagtctttattatgagaaagcagtgttatctaggaaagtcacatgctggtttctttctaataaaatgacaaagcaggtttcttaaataatttacaaagggcagaaattgctcttgaacagggctacccctcctggcacatccacagtgctctgcactgagcatataaataggtacccgtgagcccagggtcgtaagcctggaaatatctcctatgccttcctccgagtccctggtagggaaaggagggatgagagtggggccctcaagagccttggcaccagaaacacagtgggtgagtgactctgcggatgactccccaaaaaccaggcgtttccaggagggccctgcgcggaggttgaggttgacggctctcaggggcagcctcctttggaactgtctgcacagggaccccagggcccctacagaggtctcctgatggctgaccacaggctgcagctccttgctgtcctccagctgctcctggtgctggagagatctccggcgcacggaggtccccatgttctgccaccgagaagccatntgcctggccaagagtcttctctgtccactagaccccgncaccactaaggccgagcacagccgcagcacagctgcc

SEQ ID NO: 4327 - DNA, 413 bp, Homo sapiens
gcatttttactatgcatggtacccatgagcctaaataagtagcatagtagtaacagttttcaaactgcagtatgagagagtttactcacttatagaactacttcagtcttgattgtctagggataatggacaagaggactgtgaaatgaagattaactatttaatggcctgtgaaaagacggtgttagataattattaagcaaagaacttccactacaagccagacttaaccctcttctgatttattgctcacctattacagttgaattctaattacagtatgaatagctgaagtttgaaagcctgcttttcaagtttgagagtttttaaaagtccagttctttcaggatgaatttagcggaattaacctctctcatgattttacctgattttgtggaacatgcctagttttg

SEQ ID NO: 4328 - DNA, 1329 bp, Homo sapiens
tttttttttttttcaaaaaccgaaacatttaattttttctccccaaaccaagacgctgacactagcctgagttcccctaacaatgttattttctacaacagaagctgggacagaggaacaaacacagcccactcaagcagtggtggcaacattctgttagaaaggaggggagtcaaagaaaaaaacacccctccgcccatctccttatcacctccctaaagacagaggagaacatggacaccctccatcctgatagacatgccatgtggtcagtttgtgcggtaaacaggaaaaaaaaaaaacctaaagatattgtagacctttattttctttaaatctcctaataaaaacattaaactttcaagaagattccaaactgacattgcatagaccaactcctttccaaaaatatctctgatatactctccaactctctcaatatatagaatttgaagtccaggagctgtgggcacctggtgggaattcactgagctcaaggggacaagagggctgaggacaggggctccccacatggggacaaggccaggctttctggcctctggttccagccagcatcaatttggttgtggccaaattctcagtccaatcacctctggcccagggcctggcgtgggaggatgtggcaggctctgtctccttctggggttcctggtctggaggagtctccccaacagcgccaaagctggctgttttccgcccaaagccccagaactttgaatgagaggcaaatctaccctgaatgcacctccctcctaggctgggtgaggtcacgcagacacagaagggcaggacagaactccccatcttctgggggccaattcgtctggacactgtgcggtcagcttcctttttaaagtgccagtatcggtggggcaggaagggactctcagggctgagcagagccttctccagcgcgagcaaacactctgtcccgcctcggcaggcaccttctaacattcattttctaagggttaggtgagtaaaacaacaacaacaaatgctggaaatgctctgttcccaatgccagggagttccaagaccaagaagcccaactctcaccagcgggggcagatggggagctagggaaggaaccctcccagcctggggagggcacctgcacccctcccagagagagaagcccccatcccggccccccagctgggccccagcgctgctggaaccagccggcaggtggggcagaaaagcagcacctcccctcaccagggcgaggaggcaatattgaaccgtgaactcaagaagaaagacggaaagaaaaaatgaaaaaagctacaagggctaatgtaaaca

SEQ ID NO: 4329 - DNA, 348 bp, Homo sapiens
  misc_feature (1)...(348): n = a,t,c or g
cgggcccgagagcgccgctcctccccaaaactaggatttggagcctcacgttctcccgcaaaacgagccctgtgggtgacaggccaggacgtgctcccaggtgtggagggggcaaggtacgggcgtctgccgtcgctaagtgcccccttccacttaaggcacaccttcgcctccgattccgaaccgcccggggacagaggcaagtggcaaagcagggagggcggaggtgaggagtcgataccccccaccccagggaccnaggctccgcgggccctttccctcccccaggcccggggcaggagctcggggagcccttcctggtgcccgccgtcctctgcggagccatgg

SEQ ID NO: 4330 - DNA, 634 bp, Homo sapiens
ttttttttttctcacttggccgactttatttttcaggaaaaacagaaaaacaaatgtacctcttgggttggaaaggacccattgacaacatggcacagacgtgagcaataaatacgcacatacattcaagtatgcgggggggcgctacgtcctggagaccctgtgttcgggcacctgtccctgctctcgggtgcggccctgcccctccagaagcaggtcacctcaccaggcccagatctgcctctccatcctagcctgagagtggggcctagaggcaccctcctagatggaactgccagccctgggggctgtggggccatggtagggcccttggcagtcttgggaggtgccaaggctgggtctggacaggaggaggcaacctcaggcccctgggcccatctcaggctccagcaggtcctgccagtcctaggatcccgaacttggtgccctgtgagccccctccccatggagagagcagtgatgtcatctcccccagctggtgggaggaggggggttctcatatggggggtctgcagggttgagctgagtgaagcctccccagcttccactgaccacccccccacttgggtgagggtcacagagcctggtgctacctcccaccctgactggcact

SEQ ID NO: 4331 - DNA, 1958 bp, Homo sapiens
gttatggctcaacccaaagaagatgaagaggaagatgatgatgtagtggctcctaaaccacctattgaacctgaagaagagaaaactttaaagaaagatgaggaaaatgatagtaaagctccccctcatgagctgactgaagaagaaaagcaacaaatcttgcactctgaggaatttttaagtttctttgaccattctacaagaattgtagaaagagctctttctgagcagattaacatcttctttgactatagtgggagagatttggaagacaaagaaggagagattcaagcaggtgctaaactgtcattaaatcgacaattttttgacgaacgttggtcaaagcatcgggtggttagttgtttggattggtcatctcagtatccggagttactcgtggcttcctataacaacaatgaagatgcccctcatgagcctgatggtgtggcccttgaatggaatatgaaatacaaaaaaactaccccagagtatgtgtttcactgccagtcagctgtgatgtctgccacatttgcaaaatttcatccaaatcttgttgttggtggtacatattcaggccaaattgtgctttgggataaccgtagcaataaaagaactccagtgcaaagaactccactgtcagcagctgcacacacacaccctgtatattgtgtaaatgttgttgggaacacaaaatgctcacaatctgattagcatctctactgatgggaaaaatttgttcatggagtctggacatgctttcccatccacaggatagcatggagttggttcataaacagtcaaaagcagtagctgtgacatctatgtccttccctgttggagatgtcaacaactttgttgttgggagtgaagaaggttctgtgtacacagcatgccgccatggcagcaaagctggaatcagtgagatgtttgaggggcatcaaggaccaatcactggcatccattgtcatgcagctgttggagcagtagacttctcacatctttttgtcacttcatcgtttgactggacagtaaagctttggacaactaagaataacaagcctttgtattcatttgaagataatgcagactatgtttatgatgttatgtggtcacctacccacccagccctgtttgcctgtgtggatggcatggggagattggatttgtggaatctcaataatgacacagaggtaccaactgccagcatttctgtggagggtaatcctgctcttaatcgtgtgagatggacccattctggcagagagattgctgtgggtgattctgaaggacagattgttatatacgatgtgggagagcagattgctgttccccgcaatgatgaatgggcacggtttggccgaacacttgcagaaattaatgcaaaccgagctgatgcagaggaggaagcagctacccgaatacctgcttagttcctgaaaaggggagtgtaactagtggatttgggaaaggttcttaagtagatcctgagactatttgcatgcttctgtctaaatgataattaaaaggaaatttcatggattaaaccatgggtttaatgcagcaaggaaacttacaatgtccctttatatataacatgcatcttgttttggatttgtgtcattttttaatatagctgattgacttcacagaaagcagcttttttgaattctaatacataggtgtatatttggtattagttattttgagttcttttcaacttataacactgtatacagttatttctaaagcacagatgaaataagttctgcatatttttaaaataatcaccagttccctgttatacagataatgttctcactacccataatatgtaggaaccattgtttcctccttaggccgtaggtatgcatacacctatccatgttccttcctgacattcctttgttgtctttataattcatgtggtagttacctataaataaaaacaaatatgcgtt

SEQ ID NO: 4332 - DNA, 601 bp, Homo sapiens
  misc_feature (1)...(601): n = a,t,c or g
cagaaggaatatatggaggccttgcgggagccaaagaacttggtgtggtgaaggaactaagatgcccagggtggccagaaccccaaaagttgcggggagaggaattggagtgaagctgaaggtaggataggaaaagttacacagggccttaaaggctttattcatgagtgtggattttgtttcaatctaagtacagtaggaagttcttggaggacttcacatagatttttttaaaagattattctgacaactgtgttgaaaatgaatgagagggtgttaatagtggaatagatatgaaaactatgttgtagtctagttgaacaatgatagagcctaacacctggatgctggcagtggagatggaaagtggaagaatttgaggtatattttgaagacagaatttataggacctgacagtagaagtgtgggcctttgagggagacaggagtcaagaatgactctgagattctagcttaggaactaggtaaatgatgataccatttgctgagatgggaaagacactcttcttgggagaaagtgaagaattcagttggnttaaccaggttgacttgcaaaannnnnnnnnnnnnnnnnnnnncaa

SEQ ID NO: 4333 - DNA, 546 bp, Homo sapiens
tgattattcaggtctggaatatggctcaggattcttaattttcaaccaacacaatatagaatcctgtcagttatccttggatcatttgctaagtgatcttgcaaaatcaaaactcctttgagactatttcattttcagaaatattttaaaacttgttcagaaacatcttaaaacttgttagcatataggaaaagtacaatgcttggtgtaggtaggttattatttggtcatttccctcaaaccatccagacaagccactcttctaccacaagctggtagaaatccttaggcacctttctgcttctgcactgctatcactttcaggtgtctaaggcttctggaaggctgttgtcataacctggagccatacacctaatgtacgtctggggaaaggacaccaattaaagaatctagagctaggatgatgttacataagacagggcacaatggagatggactctggatcccctgcatctgaaagaaaaagggcaagaaaatgcagggcaggggaaaatcctgaaggtcttcactgaccatgaatttaaa

SEQ ID NO: 4334 - DNA, 1282 bp, Homo sapiens
ttttaaactatttaattcactcctttattctgggatgtatattacagataacacaactcacaaatataccatcagacattgaaaactaaggccattctgtgagttatttttaaaacttggtgttttgcacataatgatcttaaaaaaaaatcgaattaccaaaaccaagattctcttctaaaatgaaaatttaatgcaggtacaggataactttagggctatatctaatctgaagcttatcaggtagcaaaaccattttcgttttctacagcataaataacagctctaaggcaaccactacctcagcatgaagctcatttctccacgttagagtagtgtttacctgctacagtgaccagtgtttagagaccatttccctttcagtagcaaaaagagactttacctaagaaacacactacatactacagaatccttggaacaagaaacagaaaggggagctgtaactaaggcactggaaagcacattatttggtataaagaaatgtaaacaatttaacaccaacaggctccctccgttggagtctttattgtaaatgcacacaggggcatcatagtcagggctagagtttgaagtctgggtgaaacaaatgtttctgcagagttcagagtcttggctgccaatatatttctaacatggtgctgttgaattaactatttcaaagtgactcaagtggaagctggtatttcccttgaatctgagttttaatagcattaacaaacaaggaagaattttataggagtcctaaaattacgggctctttctaacatttatttggagtccttttatccaagttcttctaatgaattttaggattattttggcttatttcatcaaggaagtttggtgtaagaacttgttacctaatgagtgcccctccttgtaagttcatatttcaagttacatggttcatgccataaataaaccacacttgctttaacatcgttcagaatggtacatttaacaattggacatacagcactgtaaacaattcaaagtccattgagcttaccatgaaagaactgaaacgtatgtaggaactgtgtcctgctgcagacaagcagctgctctggctctggtgcggtgcggtgcggtgcggtgcggtgcggtgaggtgaggtgaggtgaggtgggcaggtgtggaagggagaattcctgaggccagtcacaattattgaagctaaattaatttcttcctgacactttagcattaattctaagtagttctaagttctaaaccattaactgtatagttaattttttta

SEQ ID NO: 4335 - DNA, 674 bp, Homo sapiens
aaaaaataagaaaagaaagaaaaaaaagaaagagaccatcccaggaagttgtggggttggggaggcctagggttaggcaagaccttgaggcaggggttgaagccagggagtggtcagccagcactgtccctgcctgtccccatcccacagagggcaaggagttggtgcacacctacaagggctgcatcaggtcccaggactgctactccggcgttatatccaccaccatgggccccaaggaccacatggtaaccagctccttctgctgccagagcgacggctgcaacagtgcctttttgtctgttcccttgaccaatcttactgagaatggcctgatgtgccccgcctgcactgcgagcttcagggacaaatgcatggggcccatgacccactgtactggaaaggaaaaccactgcgtctccttatctggacacgtgcaggctggtattttcaaacccagatttgctatgcggggctgtgctacagagagtatgtgctttaccaagcctggtgctgaagtacccacaggcaccaatgtcctcttcctccatcatatagagtgcactcactccccctgaaaagctatctgaacagaggaagataatgtagtgtgaagtccccatttgtcctcagcctgtaactccccgtgtgcctataaagaagttaatagagca

SEQ ID NO: 4336 - DNA, 1011 bp, Homo sapiens
  misc_feature (1)...(1011): n = a,t,c or g
tttttttttgtgtgaagaggtagaggtttattgaaatataaacattcgagaacatgtaagatagaaaataaccacaacatatagacacttgctgcaggaggacatctgaggtatttactcactgcctaggctacccatgtgctatcacatttttcctggttagaatacatataagatggagagcaggaggggacagagctgccctggctgatggcaccttcaggggaagctctgcttgggccaaggccccactcgtgggggcacctgctggcacccctcatcgggctctgggtgacaccctgctgttgtccttgagggcagtgagggttcactccaacggtgtggccaggcgagctgcctggggaaagggagaggatccaatgaccggaaagacacagtgtgctttccctgcatcctctgggtgggaagagtccatcctttgtgaccaaacccctgagaaagacatactggccaaatgtctgagacaccttcaaatgggcccagtgccagccaactgggctcctcactggcaccacgtcccagatgcccttctctgcccacaccctgcaggctgaggccagaggaggtcagccctcgggagatggggnnnnnnnnnnnnnnnnnnnnnnnnnnnnnnnnnnnnnnnnnnnnnnnnnnnagggctgagagaagacgcagttgagcagagctgcagcttaccgggctgaggtatctgtttgtgctcaagcttttgattccctttcctctcctacacaggactgaatgcgagccacgctgccacacacacccacgccacgcgcggtgtctcccactgccacagccccatgtcacagtggtggtgttctgctgaacattccagggcttcctcgactgaggtgagccgcaagcgaatcaattttctttacagcacaggagctgcctgctcccgcgcagggtccaggaggagctgtggagttattcatctcctcataccctggggcggctcaacctctggcaaggccagcgaggacc

SEQ ID NO: 4337 - DNA, 245 bp, Homo sapiens
acttgctatcagctgaagcctggcctccaagaagagctgctccatttctatctggagaagggatgagggcattgaagagtcgtggaaggcagctgtgacaggctactttaaaggcaacgcaaacatttgagacgccatgtcctgcaggcctcatttcctccattctgtcttgctttctttcccagccctgaaacccaggtctttggtctttttcttctgttgcattcccttctcactcggtttac

SEQ ID NO: 4338 - DNA, 465 bp, Homo sapiens
gtgaatatctcctcatctttccagaaaccactcaatgtccattgtattctactgctgcccaactaggaggaaatttctacttctttctctgagctcctttagttctttgcatccttgattctgctcatatctggtccagagcctaccaggtgctcaggtgctcctggggctgacccagaggttgttgggaggtcagtggggacagatttagggacagtgtcacattccgctctgccatcccatcacctcagaaagactccagctacccagttggagtctaataaatgctggatgtatccagctggaagcctgggacagtggacccagttccagctgtggggaagatgactgcttgcccgtggccagctggggccatgcacaaaactgggaggccgcatctgtgcagggagcttgtgtctgagggtgttgacagctgttttctgcctcaggagaaactgaaaccag

SEQ ID NO: 4339 - DNA, 1395 bp, Homo sapiens
gcttggcacgaggcggacttgctggcagatgcttgctgggccctttcttatctgtctgatggccccaatgagaagatccaggcagtcatagactccggagtctgccggagattggtagagctgctgatgcacaatgattacaaagtggcttctcctgccctgagagccgtgggtaacatcgtcactggggatgacatccagacccaggtcattcttaactgttcagccctaccttgccttctccacttgttgagcagtcccaaggagtcaatccggaaggaagcttgctggactatttcaaatattactgctggcaacagggctcaaatacaggctgttatagatgcaaatatcttccctgtgttgatcgaaatccttcagaaagcagagtttcgtacaaggaaagaggcagcctgggccatcaccaatgccacatcaggagggaacccctgagcagatcaggtaccgggtctcactgggctgcatcaaacccctatgtgacttgctgactgtaatggattcgaagattgtgcaagtggccctcaatggactggagaacatcctgcggcttggagagcaagagggcaagcgcagtggctcaggggtcaatccttattgtggcctcatagaggaagcctatggcttggataaaattgagtttctccagagccacgagaaccaggagatctaccagaaggccttcgacctcattgagcactactttggtgtagaagacgatgatagcagcctggctccccaagtcgatgaaacgcaacagcagttcatcttccagcagcctgaggcccccatggagggcttccagctataatatctgcctccagggaggggaggggatgggaagcaccaccagccagcggaagagcagccctctggtgggcgggaaaccagtgtccccaccatcagccaccacacacctctgctgccctggagactgtgctcttgacctgctccgcccccttccctggagggaagcaccctctggacagacagaaccatctgaggctcacctttgggttttgtgacaagaaggggacgtgttgggtttttcttccttacactatattttggctgcacacatgtctttaacccaggagcccaggggtagacaaaggaggactaaggtaatcaatttgcacctttttttatttttattttttttctttttttcttcagtggtgacttccttccctttatcttttttcattcttcccggtcctctgccctgatctgtgtaactcttatcttgggtacttgagcagacggtatattccagaggtgggaggtgggaggggaagggagaaatccaaaacaaagtgttcttgctctgacagaatattaatcttgtacgcttgaaaaaaaaaaaaaaaaaaaaat

SEQ ID NO: 4340 - DNA, 420 bp, Homo sapiens
gctttttcttcaccatagcagtttttaagtagctctgtggaatggaaatatacatatttagagggtgggacataggctaaaagaaagcttgtcacaagttgacactaggtcttcctaattgtcaaccagaggcacttactgatataactgaagcagtttttgtcctgtacttactcccttttgtggtcttcccttccacccacccttttttttttgttccttttttcctctgttacagtttagaaaacgctaaaccctcctcccgggcagcctccgtcacgatccctgatcacctcaggcatcaacctctctcaaccctccaccccttcttcttcttcctcctccaccaccaccccctcgctcgccacagcggggacctccgacgcaccctccagcctccccaaccctcttccgaccgca

SEQ ID NO: 4341 - DNA, 504 bp, Homo sapiens
gcctgaagttcatcctctactggtttattcaagaaggttcatggagctgtattcccaaagtttttatgaaaatatttgtggttttataaatgaataacagcagagtgtagagagcttgggtccctctttctgaggacattttaatcacgatttatttcactgttggtgatgtgcctctttgccaaatgttccccttccatttgtttcaaccaggagagcattagtcccacatttttgcttgactcatttccacaaatctgctgtgagtagcccaggctcgtttctgctcatctggatttctgaagagaatttcaggttttcttgcagaggattttagcttcctgtctgaagtgaagacatagtgagagcaagttttgggtgagcacatacaggctgagcactccaattctatatctccccaccaggttaccaacatcaagaagacactcaaagccaccgcatcctcctcggctcaggagatggagcagcagctgagctgaacgg

SEQ ID NO: 4342 - DNA, 215 bp, Homo sapiens
  misc_feature (1)...(215): n = a,t,c or g
tgcagagaaatcctcaaaaaagttatcttctagcatgcaaacctctgcacggccttctcaaaaacctcagtgatatttctgcaatcgaagtgttttatctgtaaagatgtttatttatttagaacccctgccctcccaccaaagcctcctgtgcttttgttttgtacttttttgagtcacgtgccgactgtgtgtgtgtgtgtgtgantgtatcc

SEQ ID NO: 4343 - DNA, 649 bp, Homo sapiens
gatgtggatttctccacttccagtttttcaagaagtaaggtaaatgcaggaatgggtaatagtggtatcaccacagaaccagactctgaaattcagattgctaatgttacaactttagaaacaggtgtaagctctgtgaatgatggccaattagaaaatactgacgggcgagatatgaacttaatgattacacatgtaacatcactgcagaataccaacttgggagatgtctctaacggactgcagtccaagtaattttggtgttaatatacaaacatacaccccatctttaacttcacagaccaagactggagtaggaccttttaatcctggtagaatgaatgtggcaggagacgtttttcagaatggagaatctgcaactcatcataatcctgattcttggatctcccagtcagcttcatttccccgtaatcagaaacaaccaggggtggactctttatcaccagtggcctcacttcctaaacagattttccagccgtctgtccaacagcagcctactaaaccagttaaagtcacttgtgcaaactgcaaaaaacctttacagaagggccagacagcttatcaacgaaaaggatcagctcacctcttttgttctaccacctgcctttcttccttctccacaagcctg

SEQ ID NO: 4344 - DNA, 310 bp, Homo sapiens
cactactatacccagttctacagggcctggagctgatacgaaaaacctcccttctttcccaaatggtccccagcttccccgttcactgaaggccctgcagtcgggaacagtcaggactttgcacccagttgttgtggttgtttggcagacccttcctcttgtgtgattcatggacccgcagcattgcgtcacctgtgagcttttggaattgaagactctcagggctcacccgggaggacctgctgggccagaatctgcattttaacaagatgcctgggtgatctgcatacacgttcagatctgagaaagt

SEQ ID NO: 4345 - DNA, 1912 bp, Homo sapiens
tttttttcacaagttatattttattttaacacgagattaacatatagttacaaggtcaatacaagcctccagtggaagctctttatttggtttaattccatctccagagacaaacaggcaactctaggacctttacagtggcgatcggcctcacacagcaaaatgcctccaaagtttagaattagtgcaacacacatacgaacgttttaaaggtgctcaacatcaggttaaaatagaattctggacctttttaaaaagtttttggatgatataagcacaggagggcagagccaataagaaacatgaaaccaatatttctggaaaaacacttagcatgaacgtcactttttgacgtcgtgtaaactttcttctgcaatgacggatgttaccaaaaggcattgagacctttgcgctgcgcctggttagacaagccgccgtaattctccacggtgagcaggataaaaacccccaaggaacagcccatgacaaccttctgtgcctttttatactttcccatcctacaaaggaaaaactgggtaaaggacaagttcctccctttcattgcgtttctaagaacttttcagggcaggttcttttaaaattagtcatcttacaacacaacagtattctagcacggtggcgaagtgacaggcggcagatacgggggaggaaggagacgtttcacgggaaattcccacattctactctatgtgaaactgctccagaaaaatacagacatgatttcacagtaggattcccagagtaaatgatgatacataggacaactgacctccgtcgtaagaagcccggctggggcagcagtgagcttttcatggagccacgcagactggcccggaagcaacacccaggttcaacatttaagagcactcgctataacattctttttggacgcaggtggtggaaaagtttaaaaaacaggcggaggagtgacggggggatacaagcatatcctatactgggggtgacggtcattcaaagagcaaattactgcagcttatatcttttccactatgttgcaagaaatgaatctatcctgacccataatatgaaagatgcgacgcacatgcattcccgaggctctaaaatcccattttaaagaaccgtttcaacatcctcgtggagtggaacaatggtcccacttgaacttggtgaaggtcaagaagttcctgaagatccctgtcgtccccgttggcgggggagcccattgtggagctgtggggactgccacactcaccatgcacctgttggtttgcagggacagaggtgcggccctgactcttctcaccctgtgtcatccgggcttgtctttcgtctgtcaagtcagtcctcctgcgtgactgatgggtgcaccacgcttaggtcacccgttgcagggaccggaagtccatggctctgccgcaaccctgagcggtttgcagtcccccccggggaagaagcagtcagagaggctcacgctcacctactttaaaaacccaaagccacttcctcttcacctgcctgggcctcagcgtctctgcgcttgtggtttctcgtccccgagggctgactgatctgcatctggaagggtggtgtgtggtcaaccttggttggctgagaggagcaatttcctggtttccacaagtaaagacagccccatcccttgggacctgtcctttccgtccctgtccctttggcttctataggacttccttgtcttagattcataaacagcaagaggaactgaggatgcttgaggggaccacctagttaccaaagccaagcaaagaataaagctgcccgacatcatccccaggcttccgtggcgctctcggtcacaggagctctaggccaatggttcctcttgactgtttctgcaccaaatgagaggaggggctgctctgctctaaggcgc

SEQ ID NO: 4346 - DNA, 636 bp, Homo sapiens
ttttatttttttaaacctatatatggaaaaggaaatttcaatgccagatttgataaaagaatgtgatgtatatgtagctgatgacccactggggaacaccagtgttccagttcacttaccacatctgtgacagtgtgtttagattggaataaatgtgatgcattacttcttatgtttttatcagtgacatggttgactgtgccctaattctcttgagttgcagttaagcaatgaaggttatttcctaatagggaagcaaaaggtgattgtcaattgatagtttaatgtttgaccacattagtgtctttatatgaaatagtagaggggaagaaattatagaaaacaaatgtgaaaaaaatacaccagtgggtatctgttctactaaaaccaggaagattgttatgagtacttaaacctcactgtgaaataatgatatattttgcaattaatccctccccaactgagtgtcttactgtgttattaaatcttatcttttagttaatagttgcagtatttcttttaaatgtttttgttttaaacttaggggtaggatcctttatttgttcagttgtttccaactatttgggatactttcattccctgctatttatgaagtacatgtttatcactaagtgt

SEQ ID NO: 4347 - DNA, 451 bp, Homo sapiens
  misc_feature (1)...(451): n = a,t,c or g
ttatgctacttggggattcagcagaacttatctgactgatggaagtgaccaatttgaaccactgaccccagaatatcccagcaggggcaataatcagcagagaccctgctacttttgtggctgtcttggcatcctcacagaggcctggttcaaccctgagctgtacacaggctggtttaaatgtttccccgcagattttggaagcaacgtgctgggtcactcgtaatataaccacatgcttcagtgtagccctcctacattgcttgcctacatctgaaaacactgaatcangaaagagaatatagctcctttccacttgactaaagaacatcaatccttccagtagactaaaggctgggtcatgggaacaatttcccaacacactgacttgattttgtgtaaactgctgaaagngaagctttaagaagctgtggctggggctcagaatcac

SEQ ID NO: 4348 - DNA, 453 bp, Homo sapiens
ctctaaaaaaagaagaggcgaattttggatgatcttgcctgcgtctgagtactgactcctccactcactgaaagtcactttggccaagtgacttcgtgtttttgtgtctctgctcccacaccagtaaaatgggaataataataagatatcttgatggactgttgtgataaatgagaaaatcagtgtaaagtgcttggagatgtgcctagtgcagagtgggcacttgctgaatgttaattatttgtataacttgctggtgtgggaagcctgactcttctccggctggaatcccacaggcctgcacaacagtaaatggccccgctgctaacccccaagatctatagtgaatacacagggaggatggtgagttatatccttctgaaagtggctcaactgtgccacagaactgatgtttatgatttctttggaataaacgtcgaaattaactctcct

SEQ ID NO: 4349 - DNA, 654 bp, Homo sapiens
  misc_feature (1)...(654): n = a,t,c or g
gttttaagcaatgatacagttgaagggactgtttataattttcacatgtttaagttgtgaggctttaaaacttaaatataaggctttgtctaggaagaaaatgatctttaccttcaataaatttataatgtagcactaatccagtatagattggagactgaatgcattcttactcttagggttcatacctctaattcatgtggttaagacagtgttgtggtgaagtaatagggccccttgaaagaatctacagaaacataaattatactgagttgtgctgtactggtttgtgagaacatcagtgtattaaggagaatggtagtttaatttgaatatttaaagaaagtaatttgaatggttctagtactagggccattattaactagtaacatagattagtgacttcaactgggtgtccttattatctgatttgtctgaagtgaaaactgttaaggtgctcttttaaaatgtatttggaaacaccatagttagggtaaatncaatgtcacaattcactcttgcatattatttncttagccaaatttatgaattctaagttaggccaaattgaaggtttggagttttacattgtgggngagtctaaattcatgcgtttggcaagcaccaaggncatggggaaagaatctggtattt

SEQ ID NO: 4350 - DNA, 1003 bp, Homo sapiens
tggccaagcagcagagcagacctcaggacctaacgaggatggttgtgattaggtcaaatagaaaactagcaggccattgctgacaatttttactatataattagaggacttcctaaaatgctttaaaaaaaaatgtgtatggatggaaaatacaaaggaatttttcaaatactcaatttttattggtagtagttatcaagaacaaagtcctcggacttctgatgggaaatctgaactgctgtttctcttttagcgtacaagaagaaatagatccctctcattagcactttaatatcagtgtcacgtgtctggaaggaaattgtattcatttaggtaagcaacacactacataaatatcatagctgttagacccaggggactctcaggtgccagaattggggactcctttaattggaagggagctaaagggtctacctcctacctagaagtcctttctatgtggatatgaattaaattctcttgtctgttttgctctgatggggtctgtgtgggctagctggctctggtgtgtgcctgacgacagactgaactccttaaccatttcagacagcttgaagatgtatgatcattatttgaaaagggagagagggaggactcttgttttctccaccagtttggctcctgaggtttcttccagcgttaggttctgtagggcccagctttctccagtgtttggctactgcaactctgtgttctgccagtctcttaactcagacagaaacaatgcaaaccagcagatagagcatcaccttgaaagtactaaaacagctgtcaatctagaaatctctgccccgcaaaaactgtcataaatactgcaagacccatgttcagatttccccccctttacaaataatgttttgttttatttcccagctactacaagtgatccaaatattctttatagcagactttttcctgcgatctcgggatccagtcagagatcttgcattcaaattatatctctgtaatctttaatttcgtc

SEQ ID NO: 4351 - DNA, 2103 bp, Homo sapiens
  misc_feature (1)...(2103): n = a,t,c or g
gaattcggcgcagcggagcctggagagaaggcgctgggctgcgagggcgcgagggcgcgagggcagggggcaaccggaccccgcccgcacccatggcgcccgtcgccgtctgggccgcgctggccgtcggactggagctctgggctgcggcgcacgccttgcccgcccaggtggcatttacaccctacgccccggagcccgggagcacatgccggctcagagaatactatgaccagacagctcagatgtgctgcagcaagtgctcgccgggccaacatgcaaaagtcttctgtaccaagacctcggacaccgtgtgtgactcctgtgaggacagcacatacacccagctctggaactgggttcccgagtgcttgagctgtggctcccgctgtagctctgaccaggtggaaactcaagcctgcactcgggaacagaaccgcatctgcacctgcaggcccggctggtactgcgcgctgagcaagcaggaggggtgccggctgtgcgcgccgctgcgcaagtgccgcccgggcttcggcgtggccagaccaggaactgaaacatcagacgtggtgtgcaagccctgtgccccggggacgttctccaacacgacttcatccacggatatttgcaggccccaccagatctgtaacgtggtggccatccctgggaatgcaagcagggatgcagtctgcacgtccacgtcccccacccggagtatggccccaggggcagtacacttaccccagccagtgtccacacgatcccaacacacgcagccaactccagaacccagcactgctccaagcacctccttcctgctcccaatgggccccagccccccagctgaagggagcactggcgacttcgctcttccagttggactgattgtgggtgtgacagccttgggtctactaataataggagtggtgaactgtgtcatcatgacccaggtgaaaaagaagcccttgtgcctgcagagagaagccaaggtgcctcacttgcctgccgataaggcccggggtacacagggccccgagcagcagcacctgctgatcacagcgccgagctccagcagcagctccctggagagctcggccagtgcgttggacagaagggcgcccactcggaaccagccacaggcaccaggcgtggaggccagtggggccggggaggcccgggccagcaccgggagctcagattcttcccctggtggccatgggacccaggtcaatgtcacctgcatcgtgaacgtctgtagcagctctgaccacagctcacagtgctcctcccaagccagctccacaatgggagacacagattccagcccctcggagtccccgaaggacgagcaggtccccttctccaaggaggaatgtgcctttcggtcacagctggagacgccagagaccctgctggggagcaccgaagagaagcccctgccccttggagtgcctgatgctgggatgaagcccagttaaccaggccggtgtgggctgtgtcgtagccaaggtgggctgagccctggcaggatgaccctgcgaaggggccctggtccttccaggcccccaccactaggactctgaggctctttctgggccaagttcctctagtgccctccacagccgcagcctccctctgacctgcaggccaagagcagaggcagcgggttgtggaaagcctctgctgccatggtgtgtccctctcggaaggctggctgggcatggacgttcggggcatgctggggcaagtccctgactctctgtgacctgccccgcccagctgcacctgccagcctggcttctggagcccttgggnnnnnnnnnnnnnnnnnnnnnnnnnnnnnnnnncctccccctgggctctgccccagctctggcttccagaaaaccccagcatccttttctgcagaggggctttctggagaggagggatgctgcctgagtcacccatgaagacaggacagtgcttcagcctgaggctgagactgcgggatggtcctggggctctgtgcagggaggaggtggcagccctgtagggaacggggtccttcaagttagctcaggaggcttggaaagcatcaccctcaggcccaggtgcaagtcg

SEQ ID NO: 4352 - DNA, 300 bp, Homo sapiens
gggttgtggggacgccgggagggcggcgcggtactttccagaaggttccgcaccggaagcgcctgccgaggccggaggctgggtgcaggggcggagacgcggagaacttgggatcctggtttaagggagctgggaagctgccgcaggtttgtttaaacgatattttttttggtggcggaacacgaagtgaaagttttccgtcggcgcagttcctgcgtgtgctgttcaagcggcctgaagtgcgttcaggttcggccgggctgtccctcctcctggtcccgacccctcaaacccgggccg

SEQ ID NO: 4353 - DNA, 620 bp, Homo sapiens
ttagagatgctctgagacattttatttaaactttttttttttaaaaaaagacagcaataattaatgccaagaacagaaaagaatgttgacgtgttgcccggcccgccaagcggccatgcccaggcccccaagctctgccaccactggggtgccgtcccctcccgcagcggggcacagtcagctttgaaggtgacagcgggccaaggccaggactctgggtggaggaggccccttctctgacggccccgcctctgctgggagcagccacagcctgtggctggggtgctgggatttcttcctggtcatcaaagagaaacgtacaaacctcaaggacccagacacacagtgggtggccagggcagaccccacagcagaccccatggctcgcctgagctctggcagctgccccactgctccttccatccttgccccaatcccccaatgcttgttttgattgttttcttaaaaaatataattttgtaaatgttccataaaaatactattattcctagtcaaacacagatattgcaatatgaagagtaactgctctgtctttgctctataaaacgtgaaaagattatcacactggataatatagaaaagatgccagggttcctaag

SEQ ID NO: 4354 - DNA, 406 bp, Homo sapiens
  misc_feature (1)...(406): n = a,t,c or g
gagtatggaggtaaatataatagttcagaaaagaaattatagtgtctaggactataggtagtgatagagagtagagagattcaaaatagatttaggagtaaaatcagccagatatactgattgttttgatgtagaatgagggagtataaggataaatgttctgtatttctagcacatgcagttggtagtgccatttataaggcagagagtttttaatatataaaacactgccttatggtgcaagagcttaatcatttttaatggttgcataataatcagatacacaaatgtattttcagttcccagaaataaaacatctgttaatgtgtagtgaatatgatgttttgaaaatttagtgggtgaaaggctgggcgcggtggctcctgccnattaattcccagcactt

SEQ ID NO: 4355 - DNA, 400 bp, Homo sapiens
gagctggcaggtgaggaggtggagaggagtgcttcacccagaggagttagagtaaaggccagaacctcgaggtgagcaacagcaccgggaactgctgggtgcaagcaaaaggtggcaagttgcaggagaagatggtggagaagtcagtgggggctgcatcatggagagctgtgagtgcgtctcctttcagttttgtaggcatttaacaactgcacagagttgtgcaaacacagaactgagtgtgtccccctcacatgaggcctcaggaaaggcattctagaagagaggatgacacatggtttctcctctctaaggttgcagactcagaagtctgataccagtcagttaacgtagatgtgtgagtgggagagtggggtcccaaatattgcatgcttatact

SEQ ID NO: 4356 - DNA, 179 bp, Homo sapiens
gctggacatgatacatgcctgcccttcttgcttacatgtgaagtataaccaagtgccaaatgcttttataattgactaagcagccacacccaccctgctcagaaacagaaagctactgcaggcccctacaaagtgagtgagagtgtgtgagctcctgctgaagaggtgagacccagatc

SEQ ID NO: 4357 - DNA, 477 bp, Homo sapiens
  misc_feature (1)...(477): n = a,t,c or g
gagttgttttcacacttcactgaggtttaggattgcaaggcatcttctaagttttgtctcattgcccttgattccttgctgtcttataatacaactacaagcctcaaaagaaccaaaacgaagctgttctcttccatcctcactgccttagaatgtgttgtgttcttagcagaaatgagaagaggagccctcttcttctagagtttaggtgtagtcttggagaccctccttactctcctccactgattctgcccttggccctcggtgcctaagtttctcctctatgcccttctctggcatgcaaaacaaggcagacatctctgggtcaccagcatcaccaatttctcaaacagacccacacttagcttaggaccaccccagtggttncacaggcttttgcaggccaggcacctgcctcataattgggggactatagagtttattggctaaaccaggacacttttgagagagctaaaa

SEQ ID NO: 4358 - DNA, 845 bp, Homo sapiens
tgaagagcaactgggaactcggatctgaagccctgctggggtcgcgcggctttggaaaaacaaatcctggccctggactcggtttcccagcgcggtcaacgcatctggaggggactggaggaaacccccttgttggaagagattccaagagaagcacggttttctctttcccttgccctgactgttggagtaaaaaacctcttaaatccattgtatcagaggtccttacctctctgacagttacaatgatctttgtatctgaactttgcacgtctgccgaaaaatccgaacctgttgactgggatttttaagaatccgtttctcccttttgtgtattccatattggccggccccaaggatgctcgcagaagccagcccccaaccccagcccttccgtatctttcccctccatcgcggctttgcgatgaaagattagcccgcgaacagaggcattgattacaaacatgtccttggcagtggactctgggcctggcattcttcaggtttctgtcaatccagaaacgcgactttcctggacccctgcggctctgtccttcccgcccacatccagccctccaaggccagtccagaggtgaagtttgaggccctccccccacccaccccacacgcacgcaggcacgctagaccgtttgctgcactaggaattcgagcttgggccccactcgcaagctgtgtgaacagtggctgattagtgggcggtctagtctctaaaatgacccctccccagactggcccttctcgcatcgggacccgcgcttgcacgctgcaggagccgcaaacgtcagctgttctggaaacccgagaggtcccagagagaggagata

SEQ ID NO: 4359 - DNA, 228 bp, Homo sapiens
gtctttgactaaggaggaagggtcagcaatgaatgggtgcctttaacctttcccatgcactgcaccaatggcactgaaggtgaggggagctccttgtgctccagggggatgcctgaggatttcatccatgaccataaagttgggcctttcgtgttccccttttctttaagtttgggagccatattgggaaggcccactgttcagggaaacggttttcatgggcctgag

SEQ ID NO: 4360 - DNA, 1005 bp, Homo sapiens
  misc_feature (1)...(1005): n = a,t,c or g
cccccagcgcccagcactcgccactggaagatgctgcgtccttgccgcccagcgagacgaggtgcgagtcgtcgtgcgtgaatcggacgctggtcacgtggctgccgtggcccccgtacactgcgctcggcgccttggcacgagcgcacgggtactggaagagatgcactttgcagaagtcgtcgccaccgccaccacgcgctcgttgtgggagcggcacagggagttgatgtcggtcccatcggacgcgctccgccagacgccgtagacgtgaaagcccagcacacaggtgtaggtagcccattcccggtctcggctctcatagcgattcttgcagctgttgcagcctccagccacgtcccagtaaagaatctcatagtccccagaattggacatgatgaaattccccatccttggaccagtcaagatgagtgatgaagctggagtgacccatacagcggccaaagcggcttggatttggcaccatcactggaaacacttatagatgtagatcacggttgtcatgggaaccaatggccaggtacaacccatctgggctgtaccggaccactgagagctgctcattgccatcaatgacatcagacacgatctctctggtctctgtgtccaaaaccaaccacctccccgtgttcagtcctacggccacaactgccccactcgggtggaagtcagcacagagaccagtctccttgaggtcgatgctccagggccagtgcatggctctccccatcccacagggcagagctgccggtcgtggccgcaggtgaggaagcggttctgggaggggtgtgtgcagagcccccagagctcatcagtgtggccctggattacaggggagaagaccctggaccaggtctcccctcagcaatgcattcttcgtggttcccaccaagcagctcagagccaagcccttcagcaatggctcgcacggncccgaagtgctcgggaatctcaacctcctggaaggccaacaacccggggccc

SEQ ID NO: 4361 - DNA, 744 bp, Homo sapiens
aaaactgagggaactcatgctttaatagacactgaaaatcacaaaggaggaaggccaagtgccttagcaatctcaataaaaatatgaagttctttttacatggtaaatttcataatataaaaagtttaatgtctggaaatggtgtaatttacaaaaaaagtccacgtaggccaaagatggctaacactgcatataaggaacgtgaatgccagtgggaaggtgtctgaggaggggcagggccacaggtgtcctgacagggaacatctttgaaggatctggcacaaacaagggcccagttcacaaaccacaggtacactcattttagatagaacagcagaataggtgatgaaaattatacagttttcacttgttgccctacttactgaaagcaaaccagattattgcatggcatttttcccagcctgaactgaaattatcaaggctacagttcttcttgtgggtctgcaaatgtgtgtggctgggaggtggcagaatcggcacgggccagggaccggctgcagtgatcatatgctggagcgtcactgggacagagagagcaggatgaggacagcgtgggtgacacctttgtctcctgctaaaacccagcaagtttcagtgtggaccgtgaatttttaaaaaatggaatggaggtgaaaactttcattttgtgttgccacatcagtgtggatcaaaatgtaagttttagtagcaatttttctcttgatattttgacttaattaaaaa

SEQ ID NO: 4362 - DNA, 99 bp, Homo sapiens
ggctggtggccgtggaggctctgatccatgcagccggcaaggctaaacgggcctcattcatcactgccaatggtgtctcgctgctgaaggacctatata

SEQ ID NO: 4363 - DNA, 469 bp, Homo sapiens
  misc_feature (1)...(469): n = a,t,c or g
gggggattccgagaatgatcccaggacctagatcctatagattccggcagctcttcctgcaaacacaagcccttgttgtgtgcctgagccttgctctccggcctggagacatccatctgcccactctcctaggaactgctgattaccaggaagcaccatcggctctgctgccctccccctggcagagaggcacaatgaccacattatttctcttccagcttcacgttacagcatggaagctgttgccaagtttgatttcactgcttcaggtgaggatgaactgagctttcacactggagatgttttgaagattttaagtaaccaagaggagtggtttaaggcggagcttgggagccaggaaggatatgtgcccaagaatttcatagacatccagtttcccaaatggtttcacgaaggcctctctcgacaccaagcagagaacttactcatngggaaaggggtttgnttc

SEQ ID NO: 4364 - DNA, 1058 bp, Homo sapiens
  misc_feature (1)...(1058): n = a,t,c or g
gctgggagggtggaggtgaaggatggggcctagagccgtgtggtgaaggtcacagtgtcctgagctagaaccacctgtggtatatggtctcacatcagaggcctgtctgatgcctcccactcaaccgctctcagagagtttgcaactccagagaaggagagtggggccacttagtgggcacaggctgggcatccagagatggggcagaggtgggcctcccactcctgtgctctcttctgagcaggaactgggcccttgacagtgtcctttgacattccctcgccctaccaaagatcgtcttttctcctcccacctctgtcaccaccaaagacgggcggaggtggggctgggccctcctgcccccgcccatcccccttccatgagcccagacctccctgggtggtgctaggctctgagctgggggctcagaccagggatcgctcaggcccctgtcacctgtgggcccggggaccacttgggggaggtcagaggatgtatgtggccggaccagcttccccaccttcattaggacaagaaactgcccagcactttgccttcagttcaacgcacaaacgctccttgggccttatgggggcanagcctcccctgggcctcgagagtcctgtttgcaagcgcgttcccccgccgcggggtcctgtcagcccggcagtgtcttctcagtgtcttcacctgagcgagtgtctgtggccccaacgcgttctgctgtggctctgccatttccaggttgagaggcctgcaggagaaacacactcccctcctgggtttccacactcaggaggtcagaggactggctcctgtgaccagggcccctctcccctgaatgggaaaggggtctggggatgggagggcgcaccacagagaggtagatgatgcctgggtgtggcccatcttctgtgggccccttcccagacaccggatccatgggcactaacccgcctcccaggctgatgcccggaggcagcttcctgggcaggagggttccatgggcactaacccacctcccaggctgatgcctgaaggcagcctccagggcagga

SEQ ID NO: 4365 - DNA, 535 bp, Homo sapiens
agattctggtgaaagagacagtcataaactatcaatccacacagtagaataagtgttacaacagagttatatacagggtggtctgagtacatagtttctcatgctggtgttccaggtagtataattttctgaaattaaagctggtaagaatcaacataccggggatgtgattaaccattcccaaatctcagaaagacattagcctaaacctgtaaggagtgtaagataagcccgtgctctagttaattgtaacctgagggcatgtgctggtgatagataatgtgatggctgataaagaatattgaaaaccagagccacgggaatgtgtcatggcccctttccattagggggagtgcagccccatgccaaatgaatggtcccagctctctagccacaggtggctctgaagatttctagccacagacacccctggacaacacagtgagacctctctagccacagatagccctggagccctgaagttgagaagggcacactgttctgcttcttccatgtacagctgttcttccagctt

SEQ ID NO: 4366 - DNA, 278 bp, Homo sapiens
atgctctgaggctgattgagtgatgaccagcagcatcaaagaaaaccctcagtttgcatggcaggtattagaattggctgccttgatgcctcctgtcatcgtttgagtggtaaagagacattctttgtatgtttataactcttgatttggggtcatggttatcatctgtactaactgcacaggtcatcccgctcccatccctttttcattctttagaatcccccacagcggtccacgccccttgccaacttccttccactatcctggttctgttgtta

SEQ ID NO: 4367 - DNA, 247 bp, Homo sapiens
gggaaactgaggctcaaggaatgaaagtcactccctgaaacccagggctgatagagtgctagccaccaccctctgtccctcccacagcccaggtgtcaaagtcttttctcagctcccaagagtcgaatgaaggaagagcctgtctccacctttcagagaggactgaggcctgtccccagccccacccagggtcttctgggaagaccagcccttccaactaccaacccgttccttttccagtcttagc

SEQ ID NO: 4368 - DNA, 526 bp, Homo sapiens
gcaggaagccagctgagagacagggctacgtttcagggagggaaacagattcagcagcggcagcagctggagaaggtcgtggagcagcaccttgcctgcagggtgttctgagaatcagccatgtcatccctgtacccatctctagaggacctaaaagtggaccaagccattcaggcccaggtcagagcctcacccaagatgccagccctgccagtccaggcaacagccatttccccaccaccagttttgtacccaaacttggcagaactggaaaattatatgggtctttccctctccagccaagaagtccaggagagcctgcttcagattccagagggtgacagtacagcggtctcggggccccgggcccggccagatggtggcaccggtaaccgggtacagcctgggcgtgcggcgagctgagatcaagcccggggtgcgcgagatccacctgtgcaaggacgagcgcggcaagaccgggctgaggctgcggaaggtcgaccaggggctcttttgtgcagttggt

SEQ ID NO: 4369 - DNA, 1685 bp, Homo sapiens
ggagaagaggcgggagtggacctggtcagccctaccccactgaccccaccggacccaggcgcggcctccgccacagccacagcccctgcccctgctgcggcgcggcgaggcgaggcgatggccaaggtgtcggtgctgaacgtggcggtcctggagaacccgagccctttccacagccccttccggttcgagatcagcttcgagtgcagtgaagccctggcggacgacctggagtggaagatcatttatgttggctcggctgagagtgaggaatttgatcagatcctagactcggtgctggtgggccctgtgccagcagggagacacatgtttgtctttcaggccgacgcccccaacccatccctcatcccagagactgatgccgtgggtgtgactgtggtcctcatcacctgcacctaccatggacaggagttcatccgagtgggctactacgtcaacaacgagtacctcaaccctgagctgcgtgagaacccgcccatgaagccagatttctcccagctccagcggaacatcttggcctcgaacccccgggtgacccgcttccatatcaactgggacaacaacatggacaggctggaggccatagagacccaggacccctccctgggctgcggcctcccactcaactgcactcctatcaagggcttggggctccctggctgcatccctggcctcctccctgagaactccatggactgcatctaactggaacccagagtgtcccagcacgccgggaggggcaaccaggcctcccagcgagtcctgcagggcccatctagaggactttgggggccatcagctgcaatccaggtctgtcaaactcagcccctaggaaagaacaggccttgggtctcccctagtcctggccagaaggatgatctcgcttttcctctacaggcctataagaagcaggtacttcagttctaaattctgacttgtgttcttttcgtcttcataaattctaactaaggccactgtgccactgtgcacccttgagtaccattgatccaaagctttcccacagacctccctggcccacctagaggctttcttggtcagtgcctgtcaaggctccagtcctgctgagccaaaggctttgtcattcctttctcttcctgtacatctgagcagacccactccagctttctggtgtcacaggcgggaatgttagttagtaggtagacttagatcccatttctgtcctgctcccaggaagattcttaggtcctcttcaatccagcagcccctcccagaggtgtgatcagcaggatgctgaggaaccatgttgcctttcctgtcaatcacagccaccttcctgttatctcctaaatggatctggcttttcctggaggctgccatggttggaagatggtatcagagggcctgcctgggcagtctgtctccgggccagggtcagggaccctctgcctctggcagccttaacctgtcctctgctaggaccagggtgatttcaagccagggaagcaactgggaccctgaaaactgtccctccccagcccgctccccctctctgtgccctggtccccttgctgccatgtggatgctgttgtgattgctgtttgtatattatcaaaatgtttttatattaaaaatgtttggtctgaaaattaaaagcacttcatttagaaaaaaaaaaaaaaaaa

SEQ ID NO: 4370 - DNA, 297 bp, Homo sapiens
  misc_feature (1)...(297): n = a,t,c or g
aggggatatagaatgtccaataccagagccctcacacagtggaaagcactgactcaggcacaagccaggccactggcaatcaaggtgacacaccttcttnccaccatcgccctccctaacagggtcccttcaatggtgtctcagagccaaccatcatatcctcttatcaaccacctttacaatctccggagctatttatgagctaacgccctcaacaagtcagctttcagtacaaactcctagaaaggcaggtcaaaggtctgactccagagaaaaaggcaacagctccctctcaca

SEQ ID NO: 4371 - DNA, 322 bp, Homo sapiens
taaactggggaaaatccttctaaagggtgtaacacaaaaggaagaaaagtattaccctcatgctttgccactgactacaaatcagcacttagcggcaagtgagaccacttggaggactgatagtgtcaaacaaagcaaggcattctcaacagcaggacccctggaatgttaagagccatgacttttacttcccatttttcacctgctcagtgataggcagcagtccttcacctgctctcagggatgagactgtgggcagaccctgtggcttttctgaacacttaggaaataaaaagcctctaaatctcttacccccactccc

SEQ ID NO: 4372 - DNA, 435 bp, Homo sapiens
  misc_feature (1)...(435): n = a,t,c or g
ggtacatcacttacacttaaattgtaaaaataattagtctgaccatctgactttaaaagactgttgctacacgtacatcatgtttaggagaatgtgggatatggggaaggggagaagaagacagtccagtggtgtctagttgctgctgcttaacctatggcctattgctgcccattgtccctggttttaatccaagcctattatggaatactgcagtgagattatccattctcagccctttgagctgcattaaattagaatgggaggctgtaagtaaaactcatgcctcttggccaggcattctgcaccagcgtgtccctctgtggcttgctggtcctgggttgttctcagactggcagctgagctcgnctttggcttgaaagcatacttgaagcctgcagccaggggacaccgccattgaattcagatggaagg

SEQ ID NO: 4373 - DNA, 1591 bp, Homo sapiens
  misc_feature (1)...(1591): n = a,t,c or g
tggagttccatggaggcctggctggcactgcacccgggcatgaggacacatccagtaagaagacctgcctcaagaggtgcactgcggtgaccagtggaggtgactggttggagcctggaattggaagcagattccaagctctggtggacaaactctccaggcctggtgggaatcacagctggggcagacctcatcctggctgcctggccacactcccactctctgccactggtggtaggacgatgcctgtgtggaaagctggcttctctgctcccgcctggtccaccacttggctagagttcagagacaggaagtgattggtctaagctaacacagcaagttggtggcagacctggttctagaggcagaaccttcttccagatgtgaatgaaacctgcaggcttcattttccttctgagcggtgcttcttagctctttggagacacgaagcccttggaaaatctgatgaaggttacggaccttccctaggaaaacagataactgacgtagactcaaaaaccccaagcaatttcaggagccactggactccctgaatgaaacccatccctggactccaggctaagaacctcagccctggggacttcacctgctgccctttccttacctgtcacacattgagcgtcgagtcaaggccactgtacaagtagtgcccctccctccccctggccaagcctccttcccttgttcaggaataaagaattccgaggagccctttttagtcattcccttctcccagacctaacgaatggtgcgtcaggtttctggagcctcatttcccttccccagacattggcagaggtcccttgggctagattttctcttctggttttgtttcttgttctgcctgactggccgctggttccacaaaggagccctttgctcctgggcctgggctctgatttcactgtgtggtctcaggggaagctggactgctgtggaacgctggtgggagcttgagtctggtctgagtctgccccaggggagaaagaatcctgcttccaccaaccaagcccagtcagcggttcctcccaactgggccaagtgttcagcccagtgggctggggaggaagaggatgagggcctcgctcctggtgcctgtggctctgggcagggtgagaggtcggtggaggatctttctgtgtgttctctgagtatgcagcagtgcagtttgaaagggaacagggcccaggcaggcagcagggcgaggactcctcccatcttcacacctgaaccagtcagcctggaagctacaagttctcacctgcctccccagaatgaacatcagaaaaggcaaaactgaccagggctgggatgggtttgggtcancntgttggagggcagcctgtggatcctgnactggagtcttgctgtcttcatgcangttggtcataattgntactctaatggntgctcacctggatacaaaatncanggggantcnatacngaaggnnccancccaagngttcatcggtctatncttgcnnctnaggaaactcaaanancccttttggcaatgggcattgntcccccngccaaantnggnttgcntcctcncnggcttccaaaaa

SEQ ID NO: 4374 - DNA, 306 bp, Homo sapiens
ttttggctcttaaacattaatacacacatatgaaaaggacacaggaaccagccagcaggagtttccactggccatatctgaaatcaagtgagcagcagaaaaccccatgactgtgactacaacacaatgaatagtcagttggcacacagtgattcacaaaggaaggatggagggaaagaagcagaggagtgaaaggaaaacactgatttccacaactataggtgactatcttcctttcaaatggataaaggacagaatgaaacattgaccctgcttttttagaagaatctatgatgttctcttatt

SEQ ID NO: 4375 - DNA, 592 bp, Homo sapiens
tttttttttgtattatacaccttgtagaactcattttgctggctgaaagagtatggaataatatatctcatgtcattttttagaagaaaaactatttgaaggtattttttggttttccttaacatgtatccactgtaaacgtttgtcgtgtacaagctcagagcttggacagaattttttgtatttgtaaattggtttaaatacatggaattttatacaggttttctcctgtgttatatatgcattatgtgcaggtatgatattttcttcactactttttctatcttaatatagtgtggaattttattgtattattcttccattcttaatactgtaccacattcctgctcagaaactgctcacttccttaaattgtcttttttcccccagcgtgaaatgtatccatttataactgcctattgcctgttctattagcatccaaaaatgtggaaggcctcccaaccaccatttctgctgtgtccttaggatgtgcagtaaaaaatatagacctaacagtttatgttatagaatggctttatttactttggtgactgtttatagtttttaaataaaagactgaacattttcttga

SEQ ID NO: 4376 - DNA, 1125 bp, Homo sapiens
  misc_feature (1)...(1125): n = a,t,c or g
ttttttttttttttttaacagttaacaccttctgtaagatgctttatttcattgaccaacaacatggggtctgaaaacccagcggaggggtctttttatcacagagccagtcccaggcgagctgatgcatctctgctcctctgcccctcaggagctctcatcctccaaccccagctgcccccacagccccaccccattcacagaaagagggctaccacgtgcctcagcccccctgcccaggctgccagctcccaggtccttttggagaaggactgatctaggcagggaggagagaaggccaacccctccagggctcacttgaggaaagccaaagcttttcagaaacatttcctgcagttacgtaatccacagcctgggatcttgcatggccctgagatggcctgcggaggctgggccaaggggctggtgtgaagaaagagggcagggcccataagctgtggccaacagggggcaggggccctgccctggagtaaagtgctctggcctaggctgcgtgggtttccactccctgcagccccagcctcccttccctctgatgccaggcacagggagcctagtcctcactggagttgtcanantcctcccagtcagacacactcatcacctcagaggcaaagtccgggtcggcctggctgcggtcaggggtcccgcggggcggctcaaggagcagggagcggggccagggtgagcaccacaggccgccaggccctgagatggagttgtccagctggggccccttcctcccagcagtccttctccacatcgtaaatgtgcaacgtagcctgtgcggctgccgcggttgtgtgagcggccacctaacacatagatcctgttgtccagcacagcaatgcccaggctcaccgtgcccagcagggagtgggcagacagatgaccactgtccagacgtgcagctgtagcaggccacctggtgcacgtccctcctgtatccggcatcgttgttgctgcccccgatcacatacagcttgttgaggagggttgccatgccgtgccaggcgcgccgcacaggcccatcagccagtgtgtgccaagtgttgctgcctggatcgtagcagtgtgtctctttcaggtaatcctcccctctgc

SEQ ID NO: 4377 - DNA, 514 bp, Homo sapiens
  misc_feature (1)...(514): n = a,t,c or g
ttttttaaaattttaataaaagtaaataagtaaatgacctcctccacccccaattaaggagtcctgagttgatatggaggcatgattaccacccctagagaagcctgtagctgatagactgtgccattcagaaacttcccaagctaatgaaaagtgggcaggcccttcccagaagaacaaaccacaggagcgctcaaaaacatgctttaaaaaatgcaggtgattatccccgtgtaagatgaaagggcttgcagggggagtggccactgagatactccagggaagcatcctagagttggtgagtctgaagcaagacagggcaagacctaggaagtgagctgagggtcttgctttcttcaagttgaggtctggggtgcaggctgaggaaacagattngttttaggcagggagcaantatggctttcttgccccaaaggnagcttttgtnttattgnattaggaacctcngggatggttaggaacccaggaagggcnttcccaggagattntgttc

SEQ ID NO: 4378 - DNA, 614 bp, Homo sapiens
tttttttttaagaggcggacacggtacctttaatgattaaacacagccagtaccccgcttcccgggaaagaatcagacttcagtagaaattccccacaccctaaccagccttttctggtttctcctggaccagagttgggggaaagggtgggcttcagagaaaaccaaggagtattctcacctccatcccctacccaacccatgccagagagaatggtgacgacatggccaacacggggctgcagcagccatcatggcacatggtggcccactgacgttgtcacctacccagtatgatgtccatcaaagcacccaatgggccaaaaaaggtgttacacagaatggtggccaacttggcacctactgtgccaagtacaccaaaaaagaagtgggcacagcacctaatggggggggccaaagaagatgtcactgaaatgctatcaccatcacacccaaagggccaaccgagatggtggccatcaaaccatgcagtggattagccaataacatccatcaatgtagcagtcctcacagtacccagtgggccaccaaaatgtatccatggtggttatcacagtaccccgtggatcaacaccatgcccactgagacagca

SEQ ID NO: 4379 - DNA, 404 bp, Homo sapiens
  misc_feature (1)...(404): n = a,t,c or g
taaagactttatagagccaaggatcagtaagctatggcccatgggcaaatctagcctgcttttgatacagtcctcaagttaagaatggtttttacatttttaatggttggaagaactgtgctcaatcactgctattgaatgctgaatggctttggaaattagcttttgctgcagactaggtaatgtttgttaatgaattcaacctaaaactccaaagtaaaacagtgcttatgcaaaccctatgcttcagggaagtcatgttgatgacagcaaatgtttaaatcatatgtcatgttaaactgccttgtatacttcctgtgctggcaaaagtngaaacaaaggnaaagctcnccaatcctanananatgttccaaaatgaagggtaaagtcnancaaggaatttt

SEQ ID NO: 4380 - DNA, 765 bp, Homo sapiens
agcagcagcaagtggtaataaacatgaaaactggtttgtagcagttttgaaagaatagaatgcattcaaatgtaaggctgcttctggatcattaaagccagtttcatcaaacagttcaacagagagcagcacttaataccctttaatacagcccattttttcatagtttcatttgttcttgcccacaagcttgaaatccaggttaaggtatccagcctttatcatataagcattgacattatccaggcctaagtcagtagcagtagggtaacgggattgaaaaagatttgatggagaggaaagtatctaatattagtcatggttttgacctaaattgctagacagtcgtgccattcacaaagtcagaaaatacagcaggaagagacagcttttagaggggcagagaattagaggatggtggtagtaatgaaaatgatgcattcagtttaacaagtttaatttgagacagctatggtatagctaaaaacaaaagcccataaagttggagatagggaccagagtttaacatagcgatctaggccagaattgacaatgtttaagtaatggtggaatctgtcaataagacttcccagagtgttaatatatatcagaaatgcacacaacagaaccataggcaacaccaacacaggaagaaatagaagtcacctattgaaaactggaatggcccattcagaaagacaggagaattaggagagagtgagtgaaagaagccaagggtcaagaatgcagaagcaaaggaaggac

SEQ ID NO: 4381 - DNA, 580 bp, Homo sapiens
ttcccgtcccacggtcccggcgtcacccctccggcgcccagtccccgtcccggaactcccgggcctgtcctgggcccccggtctgtgcactccgctcgccgcagcgcccggcccgggcgtcacccgccggccccatgaggagggacgtgaacggatgaccaagagcaggtttgagatgttctcaaatagtgatgaagctgtaatcaataaaaaacttcccaaagaactcctgttacggatattttcttttctagatgttgttaccctgtgccgctgtgctcaggtctccagggcctggaatgttctggctctggatggcagtaactggcagcgaattgacctatttgatttccagagggatattgagggccgagtagtggagaatatttcaaaacgatgtgggggctttttacgaaagttaagtcttcgtggatgtcttggagtgggagacaatgcattaagaagctttgcacaaaactgcaggaacattgaagtactgaatctaaattggtgtacaaagacagcagacgctacatgtaacagccttagcaagttcggttccaaactcaggaccttaaat

SEQ ID NO: 4382 - DNA, 523 bp, Homo sapiens
  misc_feature (1)...(523): n = a,t,c or g
gggaaatcacctcgcaggttcttattttccagattctcaaattcccaccantgctgatggtcaatcatccaattanattgaaagcccttantatgatacatcancagtaggaaaggtagatgactaaatataatacagtgtgccttttcctacaccatcaaaggtataatgttgtgatcatgtgtataaaaactttcagacacctaaaaagtanaaggtgtgattcatctctgttaaagcttaatctctgagcataacaaccaacatctggaagctangcagccaacagaggggttaatttttctggaaccttggttgcaaaaggttattaagtttgcanaaagactcanagatcactgtttatcttaaaccacaaganaatgtttttgaattcagaannaacaagtgatatagttcggtaatttcatgaacctctccctgggaaaccttatgactcancagtcaaaagngtccgaatagnnaaaatnggnttcaatggncaagtccgtngncaannnctggc

SEQ ID NO: 4383 - DNA, 818 bp, Homo sapiens
gttgcttccagctccagcgttctatgagcgccggtcttgtctcccccagctaaattgtgagcgcccccatggcagggacctggactcccccttcttcggcattcggcggcctttatgtgctatgtgcccagcccggtgctggcttccgtgggagacacagatgacagatttgaagatctggaagaggcaaatccattctcttttagagagtttctgaagaccaagaacctcggcctctcgaaagaggatccggccagcagaatttatgcaaaggaagcctcgaggcattccctgggacttgaccacaactccccaccctcccaaaccggcgggtatggcctggagtatcagcagccatttttcgaggatccgacaggggctggtgacctcctggatgaggaggaggatgaggacaccggatggagtggggcctacctgccgtccgccatcgagcagactcaccccgagagggtccctgccggcacgtcgccctgcagcacatacctttcctttttctccaccccgtcggagctggcagggcctgagtctctgccctcgtgggcgttgagtgacactgattctcgcgtgtctccggcctctccggcagggagtcctagcgcagactttgcggttcatggagagtctctgggagacaggcacctgcggacgctgcagataagttacgacgcagtaagtgagcctcacggcgccctctggcacagcgcctgtccgagcggcttctcccggggagaacctggagccatcctacctcttgggtggcctggtttgatttccaggacaaggcgatttgcgtgaca

SEQ ID NO: 4384 - DNA, 185 bp, Homo sapiens
taacttcatctaaaaggtttaaactgtggcaaagttgagtaactgcaacagtgactacagttccctgagaactgttactttctggctctctgcagaaaaaattggctgaaccctgttcaagcctatgtatgggaataaaaacaagctataaaacagtcaacctaaaatgcatatgttttgaccca

SEQ ID NO: 4385 - DNA, 1135 bp, Homo sapiens
  misc_feature (1)...(1135): n = a,t,c or g
ttttttttttaaggaccagatatagcctttaattcctaatgttcaaaaacaatcctgtcttctaaatcacaacttttcgagttacaagatttatccacttcaaataaggataccttttataaagtactttcttgtggttttacagatttcaaggtgcttctacgtggcttcagcaattctcacaacaaaccctcagtgggtcagggtcttctaagattaaaatgttaacaccaatgcgtgtgaagtacagtgaagtacagtgaggttaaggctcagtggcaaacgttaaagaggcccacacaacacaccagggatcagagccaggtcaaattcttgctccccacctccaccccacctcaagaagaaatttattttttgtttttatttttagaaacagtctcactcggtcacccaggctggaggccatgtnnnnnnnnnnnnnnnnnnnnnnnnnnnnnnnnnnnnnnnnnnnnnnnnnnnnnnnnnnnnnnnnnnnnnnnnnnnnnnnnnnnnnnnnnnnnnnnnnnnnnnnnnnnnnnnnnnnnnnnnnnnnnnnnnnnnnnnnnnnnnnnnnnnnnnnnnnnnnnnnnnnnnnnnncgntcaaggaggcactagattgaatgacaacagctacagcatttcttactgaacttaaccctgtgtgacccttgaaataataaaacccactgatcaaaatagatgctataatctttaccacaaatgaataattaaccctgtgctcaaactgctacaaaaatatgagattcaaatgttggagccaatgaagtttgtataaaggagagtttctgccagtgggatgtggcagtgccaccctccttatatcttggctgtcagtcttttggcttggtcccgcagctccattgttgcgattgctgaaagatgaacttcgtcaggtccatctggatggcccagtcaacgattttgctgacagcccgtgggnatgccactttgatcattgcaatctctttcttagcgccanagcttgcccagagtgtccatgctgtgagcagctttcagagtcaacaagcggatcttctcaatgggcaatgcggctttcagcaatccagtgagccacaacctcatgtgcatacaacttcttcttgaaagctatcc

SEQ ID NO: 4386 - DNA, 889 bp, Homo sapiens
ggcacgagagaaaagcaaaaaagaagaaaaaattacccacaatcttaccatccagctataacaacacccagcattaggatataggtttgaaaatctgaattttcccccaaaatgcattacaatatcctttcctgtcattgaaatttattcaacaaccttaatagtatcctcattaatttaccaaaatattaaatcatcccttgtttttgattatttaagttgctattttctattgttgaaagcaaattttttcaacagaaaaggagggagaggcacaaagccctcaaggaatgtaataggaaagccatgggaaggcaattaaataggtgggacccaggaaatggggaggatggaaggcttccaaaggttaaggatactttcaactttaccagttttgggttttaagggacaggcttcctatttttaaaacagccccactaggggacttttgatggtgaaacttccccaaatgcccgtgacgtcaggaggtgaaagcaggtgctgcagtgggtggggctggcagctggtgtgctgctcaccgagaagggaggagggaggagccacggagaagccctggagaaggagtaacacaagaaagagactgcgccgtgaccctgtgaggaggcatttatgctttaaaacccccatagggagtattcagagggcagaacctcagaagtagctgtgtgggtgtcgaggaggtagagcgttccttgctccttacagacctcactccccttttgcatccaggggccaatgctcctgccatcagccttgcgctctccttttcacttctcttatgggctcaggtggttaaagatgcttatgattttggcctggtgaaaaatccctaaggcaggaaagcacatgaaaggaattaggctatata

SEQ ID NO: 4387 - DNA, 386 bp, Homo sapiens
gtgctattccagttgtgcctcattctgtgacctagaccgaagaggaagcctctactctgagctcctggaagagagacaaagagcaacagtgggagcgtgcaatggcatatagaacttctactatactggggtatttgtcacttctgttcacatttcattggccaaattaagtcacatcgctaagcctgatgtcaatgaggcatggaattgtaatctcattgaaaaggcagctcataattcagaactaagtacaatctaccttatttttagagtagggcctaactttatattttcccaaatacttagctaattgcttcaatactatttgttaataacctgattttttacactactctgtgataccacttttatcccatatcacgtcg

SEQ ID NO: 4388 - DNA, 833 bp, Homo sapiens
ttcaccatcgccattttcctaaagtacagtaatgatcccgtcgtcgcctcactggctcaggacatcttcaaggagctgtcccagattgaagcctgtcagggcccaatgcaaatgaggctgattcccactctggtcagcataatgcaggccccagcagacaagattcctgcagggctttgtgcgacagcattgatatcctgacaacagtagtacgaaatacaaagcctcccctttcccagcttctcatctgccaagctttccctgctgtggcacagtgtacccttcacacagatgacaatgccaccatgcagaatggcggagagtgcttgcgggcctatgtgtcagtgaccctggaacaagtagcccagtggcatgatgagcagggccacaatggactgtggtatgtgatgcaagtggtgagccagctcctgggacccccgcacctcagagttcactgcggcctttgtgggccctttggtttccaccctcatctccaaggcagggcgggaactcggggagaatctagaccagattcttcgtgccatcctcagtaagatgcagcaggcagagacgctcagtgtcatgcagtccctgatcatggtgttcgctcatctggtgcacactcagctagaacctctcttggagttcctgtgtagcctcccaggacctactggcaaacctgctctagagtttgtgatggctgagtggacaagccgacagcacctgttctatggacagtatgaaggcaaagtcagctctgtggcactctgtaagctgctccagcatggcatcaatgcagatgacaaacggctacaggatatccgtgtgaaggg

SEQ ID NO: 4389 - DNA, 1182 bp, Homo sapiens
  misc_feature (1)...(1182): n = a,t,c or g
ttcatttgtaaagattactttactgtcctagaaaaatacatgttgcaaatttgagggctacaacttaagcactttagaggcttcctgagggaaaggggataacctttgaatatcagactctgtggtaatgtgtgggagaggcatattaaatatagttgggtcaggtggatttaaaaaaaatcccttttccccattttttttttttttttctaaaaaaggaagatcaaattgccatctgtctggcttattttgtgtgtgcatgtatatataggaacagcttgaggggaagggttatgtcatgncaatgaagcaaaaacaagacgacctcctctgacagaggagccttagtgttgtagaagagaagcaaggctgaggtcactggaaaggcttagaatgaagctgctcttgcctgttcctcctgagaacccagagcagcagtggtccagggcacaaagcataatgatctctcatgaggattcctatctgaacacatcagaagtcctatgaacatagataggtctgttttagaatataaatggtagtgacttcctgcgctcctgaggcgggggcaaaataatccataaacacataatccttctgggcaataatgtttctggactcgccagcagagggctctaggaacagaggtgggggtagagtcggggagaaaaaaggttctagagatggcatgtcttcaggggaactttgagaaatgtcctttgttccagcattcctaagtgacggcaccggtgagcctggtctgaattgtcatcagtgtcactgccgaggccaagggcccaagggtcaagatgccactttaggttgagaagaaagtgcatctcaaggccagtgagggctgcaaaatggtttgcggctggcccagaaggagcaaatgtagaaaggctcccctttttagatgccgatggtctgtagaactcgcctctcattgtcattaaggtggcctgaaaacattatgtagcagggctgctgagcaaactggcagaggaaatctgtgagatatgcctgcagatcaatctgatagagaggatccttcagggcatcagggtcatcttcctcatcatcctcgtagtaatcctcctcatatttacttgtagcaagaatgtcagataaaagttggccagctaaaccatcctcctcctcctcctcttcctcctcctggtc

SEQ ID NO: 4390 - DNA, 496 bp, Homo sapiens
ttttttttttttgaagatcaacattttatgtaaagtcatcttttaaggagggcgcatcccaccatggccctctctgggactgttgctccaacccaaggaaatgtgagtaggggccgagtaacagacccagaaggggcagcctgaaagcaatggggtctcaaaacaatagagaacgtgggcaggttgggctggggtgtgggcagaatagacgccagctcatccgaactggcctagagtcaaggtgctgaactcctggctccatcgaagcacaacgtcctcacttttgccagggctcagcgcactgtaagtctcattctgcagacatctcatgcgggacaccttccgattgcggtttctcatcagacactgctggcttttgaaggaacagtagtttgggtactggatatagtctgtgtcacaaatcttggtagggaaatccccatcctggaagctaaggaactcagtctggagccacccagagactcggacatcttca

SEQ ID NO: 4391 - DNA, 496 bp, Homo sapiens
taaatgtgaccttggataagtttattaacctgttttataaatctgtattcacacagatataaagtgcctagcccatcacagcagagctctccgtagctcagtggttgttccaataagacatcagggattcttcagaagccagccttcagacctctcactgtgttttgagatcattattatcaatttggatttaaaaaacaagggtcctgtaaaacccttgaagtcttcctcatctcaggttttagggatgccacttgcataaaaatgagtggttcacaaggtcactgcccccagaagcaggcacggagtaacagtccaaagcctggggctgcagttggtggggcaactcttcactgtgcttgcacctgggctggggcaggatcctgaacctctcgggggcgtagcccgcggaacgtggtcggcttgttggtgaaggggtgccactggccctggatgctagggttgtcggtgtggaagggcttgcggatgcggatcc

SEQ ID NO: 4392 - DNA, 206 bp, Homo sapiens
tgaaggcacagctaggctgagggccaacaagttgcacagctgatgggcggcagattcaggacccatgcccagttccctggcttgcgttatctcctctgacaagtgtttactgagcactggttctgctaggccctattctaggcactgggggcttgtggcacacaaagacctatgcgcttgttagtaaataaaccacagctgcgggg

SEQ ID NO: 4393 - DNA, 606 bp, Homo sapiens
  misc_feature (1)...(606): n = a,t,c or g
gtccgctgtatctagcatttcggttcctggaaaggttaccggagctgcgattggggctgggaccaaagttgagtcctggaaagggagcctggagagcggcggtgctgggaggcccggccagctcgatcgcaggcttccacctgggcggccagtaagtagccggtccggttaagtagtaggtgcgtaagagctccccgcgcctcttancgcgccgtgtaacgcgcctggaggcagggaccggggacgcggagctgggcgggagactcgcgggtcagggacgcggggtgaggctgggggtgagagacaaggctggagtccgtggcgcgcttcggagggctgagataatgggggcgagcgcgcgggcagtcccttccccccgtgaaaggtagaggtggcttccagctctcttctctagctcggctaaatgccaaaggcgccttacctggagggcttgtcagaaccaggactgaaggtgggatctgctgcttgtaacctgcangtccccggatgcgcaccccaacggggccttgcgcctacgggggcctcanccttgcaaaatgtcactcaacaaaacctgctgctgaaacgtggganttgaaaaaggtc

SEQ ID NO: 4394 - DNA, 371 bp, Homo sapiens
ggtgggtgggggtgcaggtgagctgctggatgcactttagatggcctagtatgccaggccgtcctttcatcctctactctcgtctttctttttcgacctcatgttgaggattactggtctagttgaaaaaagaattcatacacataagaccatgtatataatagagggaggtatgcctttaaaaacaaaattatatggtaaagactgatgtgtcaacagggatagacaacatagagaaggctagaactgtttctggaaaaaaacccagaaacaatggatttcaaacttcttaacatcccgataaaagaaaagtagcaattattcaaaggatgaaacacttctgtctgttatgtacatattatgaaagtatg

SEQ ID NO: 4395 - DNA, 708 bp, Homo sapiens
taagatggagtctcactctgctgcctaggctggagtctcaaaaaaaaaaaaaagactcttttgaacatggtgaactgatttcccagaatctagcaattcctgaatgtcctggttagattttttttttaatgtgcaccggaaccccagtggctccatggaaggacctgggcatcctctaagccacttggtggcttccattataccatctcaaaatgagagagcttactccacttcattgagggaaataccaccagagttctgactccagaggcactggcctagggaggacaccgtgtgtgaagccccagcagggcccactagctgtccccaccaattacagtccttgcgtagggtccaaagaaatgaatgccaaagagagcaacagaggagcaagggagtcacattccaggaccttccttcagggacttttaaaggaaacatgacagctgaggatcagttggttgttttctgctgttccccttcatgtgattcaagctcactcagaagaaacacaatgagacaagagaagagccatctccttccttctctatttattctaggcatctaaactactgaatgtagtggtgtctgagatgtatcaaacggtcagattgactgagtttgaaacctgtttctatcactgacaaactatgagatactctatacttccccttcttttttttttcattttttttatttttatttttc

SEQ ID NO: 4396 - DNA, 438 bp, Homo sapiens
gttttaatgcaaacctaagtttgggatgcagaactacggagacaagaactcagcaagcacccccacttcctccaaagagtagtcaagtcccacagcacagcccggagcagtagctgttaaaagacaagggctgggctggatccggccaacattacaaggacaaccaactggtctcattccttagtcttgtgcttttaaagggcagacgatgtgccaactattttaaagctccaacacactaattctgtaaacaataatagctacagcctgcacactgcgcactggaatggattcctcaacttggcctcatcacttatgcagctgatgaaacaaacactgacagcttttttgcatttgtaaaggccccacagcagctgtggtgatcccaccatagagcaatgaattaagcctgaaacccagctgggtctgaacagaagc

SEQ ID NO: 4397 - DNA, 628 bp, Homo sapiens
aattcggcacgagaatttattaaaaaacgggcacttatttctaacagttctggaggcaggagtctaagatcaagacaccagcagattgggtgtctgatgagagcctgctgtttacctccaagatggcaccttgttgctacattctctagaggggaggaactctgtgccttcttcatctggcaaagggatagaagggcaaaaaaaaagggccaaactccctccgtgaagcccttttataatgacattaatccatttgtgagggctttgctttcacgacctgaacacctaccaaaaggccctacctcccaggcagtactgcattggggattaagtttctaattacatgaattttggaggacacatttcaggaccccataggcagggtttcagttttcgtttttgttttttaaatttgggataacaaactgttcccatacgttactaaaaaaatccatacttccttcaatgattgccattcacttctgcatggtattatattctcatttatgcatgatctatgcctgtgctctctattggtgtgtttatttatatgccaacacgttatctttataataaattttgtatgttagattaagccttttgacgttactcctctttagacatattt

SEQ ID NO: 4398 - DNA, 687 bp, Homo sapiens
ggggaagattcagtggctggtccagagacagcattcctgagtgctatgggcaggcctgaatcaggggtcccatactgcctgcagacctgttgtcttcaacaccaaggaactgcctgtgagactgaccacagatacccaagcattctgaagtgaatatgtgaaacccgaagaaaagggtaaaatttctaaagcaatgaacatattttaagactttcttcaatcttcctctttggagacactctttgtggaatatgaagtgatgagcattcctgaggtttcagggggcagacccagtccctcacatccccaccctagtgcctgagtccacgatccagtatctcctaaccaacagctttattattatattgtcattggaaggagtctttgaaacaactgttgacttgaataatcaatcaattcttgtcagaggtgttttgcaaccctctcccacaagaatcagaaagtaattccaatcaccttaaatcatgccatttcacccagagacctttactgtgaattagggaaggggggagatcagaagcagagagataaaataccttttgcatattttaaccataatcagtcactttatttcatgactgaatggtgtttgctatcatttcattatagtgaatcatctccaagagaagattccaaattgaagcaattccttggaaacaaacaaac

SEQ ID NO: 4399 - DNA, 795 bp, Homo sapiens
tttttttttgcttcaacgcatttctttatgtgatatgaatagaaagattatccatacaaagttagaaaaattaagataaattatatattagtacaccttccaaccacattttatataaaaattcagaagtgtactattatttcaatctacaccataaaaatgcctggacttagcagataatcttctatctgtgatgtattttctcagtagaaggtttatttgttgcagtcactttttaagagtttaattttcattgttaaccttactgaatcatcagtaaacccagctgattgggacccactgtggttccattctcagtttctctatggcagtttgcagtttttcaaaggctttgtctagattatcatttatgatgatcaaatcaaaatagtggttgtatgctctctgaatccgtgcactttcatccactgttttcttcaagtcagagtcggtcagaagcttggtagtgattcctgcatccaccacagccttgtgcatggcacgtaacgtctctagctccggagccgcaataaataccacatagggcataaactctgatgtcctcaatactttcagtgcttgtgggttgacatccagaatgcaagtccgtccagtttggacaacctcaagaatagaatcaattttggttccatagagatttccttcatattccccatgttccaaatactttccagctttaatatctgcttccatctcagatcgtgacacaaacttatatgcctggccatctttttcatcttcccttggtttccgtgaagtaaatgggccgtagtt

SEQ ID NO: 4400 - DNA, 429 bp, Homo sapiens
aaagggcgtctcagggaacccccacattctctcactgaagtttcccaccaggatgaccccacagccagagtcccttggcagcccctcaccccagaccccccttctaaggaaaaagagaggttcagagcgttggaccttcatgaacagtggcctggctggcgtggcagggccaaggcccacccactgccatcccccttctgtgtgtccctctcccccagttatgaggcccagggcctgaagctctcttccccagcattgcccccacccggaaaccccacctttggagagttaattgtctgtgtgaggtgcttaacctatcagccctgagaacacaaagcaataatctttgttactgagatgcgcggctgttcgtgttttgggttttttttttttttaatgtttcctaataaaagagaagctgcattttaa

SEQ ID NO: 4401 - DNA, 755 bp, Homo sapiens
ggtaacaatcccaaggaagcaggattagaatgcaattgtgatttccaaagtggaaggaagatcattaggacagaggaggatggtgaggccaaaggcaagaaagggacacgttaagagctggaaattggccagtgttcatgaccatagcctccaaagagaggtgccttccacaccctcatctcttgctggccagggttttgaccctgaagcagagattcaaggcagaggcccagaccctcgaccttgggccctgatgaattatccaaggtaaaggccccttgatgagcccctgacagccccccagcacctcctgcccacccattccccatgcgcatttactgcctttcctctgtattaccttgggctgcactttcctttaaaactataactctacttgttttcatttggaaggtcctaattctttccctatgcaaaagaaatttattctggttaccaagttatgtgtgtgttactttttttaaatatggaaaaaatctgaagaccagtataatcttattcccctcagtgccatcccttgctctcttgcctgatatatagctactattaatagcctggcatatattctttcagatttttcatgtaaatatctctcattctttttaatacttgtacgtattctattgggaggatgtatgatcatttatttctctaatcccttatttgttgcagcagtggaattcttagatcaaagaatatgtacttcccttaggttatagagactgtgggaaaaatag

SEQ ID NO: 4402 - DNA, 1271 bp, Homo sapiens
ttttttttttttttttttctcagaacattcacctttaattctgttacaggttccagtatttgcgctggccctagtcagctgtgggtaagagtcacccatgggcaagagtggggaggggactgctcccccatgaaccacatcctcagtgttggccaaataccagcgtgttgggtaggcttcctgtgtccaccaggcctggccatgtcctgcacagtatagcttggacctctgggcctgaaccagggtgagcatcaaggcccccatttctcctcaccacggggtcgcttgtcagctccaggagccagtctggccccactgagaacttttcagtcgagggcctgatgagtcttgggaatgcgcttctgcaagagggcccaggctttctccacctggcgttgggtgatatgcggctcccacaaggtgctgagcaccacgtggctctgttccacaagctgctgcccgctcatctggctctgcagccggctttgaagccgcggcttcactgaggccatccctctccacaatgcgtcttacagcctcagtctctgggatgacagcagtccacacctcatggaccaggttctgccagccggcttcaagcaacacagcggcatcaatcacacacacacgctttccctcagccacagcccgatccatctcctctcgggccagctttgcgataattggccacataatgtccgtgagtatcttcagctgcttcttattcccaaacacccggctgcctaggaccttcctgttgatgatgccatctttatggagaatatctgttccaaaggcctccaccacaggctggtaggcagggccacctggggcataggcccgatgacccaggtggtcactgtcaatgacaaacgcccccaggcccttcagtcgctgagctattgagctcttcccagagccactgatgccagtcagcccaattacatagagacatgtggggagctctggcctttcatatggaggccgaagcaggttccccaacattcgctggcggaagctggaggagctgactttgtcctcttcattctccgtatgtctgaggtccttcagcagctggatctggtacaaagcaagttcctccaggtcattctcaaggcggaagcggttgatggccatccccccacgataggtctcctcgctgaccaccaggaactccagggaggggtcagagccagcgggccataggggtccagcagggggatgacatcaaaagtcaaggagggcttgatgtccaccaggaattcactcac

SEQ ID NO: 4403 - DNA, 315 bp, Homo sapiens
gcgacaatgttccttaaaaaagtaatccttagaaagctgacagcacaactcagattctctggaccacaactgggtcaggtgtatactctaaagtcagagaaaagacatgaagaccctacatgcttgggctattaataatttccccaagcaaatgggagagtacagaggtttgcttctctgagcactgtggggaagtgactcatgcacatggtgtgcacctgccaggtgggtaggggtgaaatgtgaaatggcttcagcctcagaaattggcagtgacataaatcaggctataggcctcggcagattaggaaatta

SEQ ID NO: 4404 - DNA, 478 bp, Homo sapiens
  misc_feature (1)...(478): n = a,t,c or g
gcgcgtgtgggtcctgagtggccagggcagggtcagcagcacaggaagctgcccagggggtccttgcaagcgtgggctctggccagcgtctgggggaggctgtgctaggcggggcctcccgtgggcatgtccctggagctcacaggctggcgccctatgcccatctccagatagcctgggctggaagctcttctacgtcacaggctgcctgtttgtggctgtgcagaacttggaggactgggaggaagccatcttcgacaagagcacagggaaggttgtttttgaagacgttcagcctctacaagaagctgctgactcttttnagagctggccacgaccagntggtggtcctgctccatgttgtccccgacacagcgtcctctccctggtggacatccccagcggtcaggtgcttccccaagggcagtnaggggtgaacatccagggcctacctggctgtgcacgctgcagccacact

SEQ ID NO: 4405 - DNA, 212 bp, Homo sapiens
gggcaggacctggccacttctcaccacgctgctttctctgccctgtcatttaccctcctccatccttgtccattgtcttccagagctgcacttcctccatctctgctattgcctcctcccctgctccctttttcctgttgggatttcacctttaatggggcttcagcagggcagggacataagcacatgttttcattacaccatgtaacacc

SEQ ID NO: 4406 - DNA, 444 bp, Homo sapiens
ggtagctgggaagctggatgagaaccactgtcgccaccaggtcgcatacctggggctgctggagaatgtgagggtccgcagggctggcttcgcttcccgccagccctactctcgattcctgctcaggtacaagatgacctgtgaatacacatggcccaaccacctgctgggctccgacaaggcagccgtgagcgctctcctggagcagcacgggctgcagggggacgtggcctttggccacagcaagctgttcatccgctcaccccggacactggtcacactggagcagagccgagcccgcctcatccccatcattgtgctgctattgcagaaggcatggcggggcaccttggcgaggtggcgctgccggaggctgagggctatctacaccatcatgcgctggttccggagacacaaggtgcgggctcacctggctgagctgca

SEQ ID NO: 4407 - DNA, 394 bp, Homo sapiens
aatgctgatcctgtttttatttaaaagtaggctattttgttcatcatggattttttgcattaattttgactttaaaataatattgcattaaagtcctatcttgattaataaattgttcaccacccccttaaaatttagtccccccaggtgaatgactcactttgctttaccccagtcctagccctggagactaagctgtaattgggaaggaggttagatctgggggtcggggatgtgtgggggagacaccagaaggcctccttagattctccttagatgaaggtctcctcaagtcaaaggtgggataacttccatgggttgctcaggaagccctcaagctcagatttacagtcccccaggcagtccttttcagactttctcctctagggttcct

SEQ ID NO: 4408 - DNA, 249 bp, Homo sapiens
agactctggagtctcaagtgcaaatgtcattggcctctcctccagcctcctcaaggggcactcaatgactggaagcgccttgatatgactgtggttggactgacatgactgccagatggtgggacttggtctggagcagagactacttggaatggtagaggcaaaactcaacagcccctggagctgcgcttgtggtggagctggaccctgattttagctggaccttgtttttagagacagggtttcctt

SEQ ID NO: 4409 - DNA, 656 bp, Homo sapiens
gaaacaacaccccaaaatacgtcttttattgcacccaattttgatttctccaaactaagtgaggacataaagacacttgggaaacagccttcatgcagaatttgctattttaatggcccttgcccaccaaatcttttacatttatttcaggcacacctaattggacaaactttttgtgttggggggtggaaattcagctttgttgaatgcttctaaatcactccactgcgttttcatagaatcagcaactctttttttaacaatcatacttctgaattcagcaaacatggaattacgtttatgtaagcagcacacacaggcttgggaagaaacatggctgactttaggaagtagagcacaactgttgggagcacaagcgcccatttgtgctggtgagtagcagtcattggccatagcactgagtgtgccgtggacatcattcatgtgtttgacagagggaaaaggaaagggttagttgttgggtgatcagggtaagtggtgctccatttagagagcttctactgtactttggaaggaactacctgagtcagacaagtaaagatgtataacataataactggttaagaagaatgtgcattgcattctccatgcactatctttcctccagcctgggtgacagaaacataattcgtctc

SEQ ID NO: 4410 - DNA, 683 bp, Homo sapiens
  misc_feature (1)...(683): n = a,t,c or g
ggaaatattgagtcgttcacagactcagacactagagagtttggaattcattccacagcatgttggtgccttctctgtggagaaatatgatgacatcaggaaatatttaataaaggcctgtgacactcctctgcaccccctgggcaggcttgtggagacactggttgcagtgtatagaatgacatacgtgggcgtaggagccaaccgcaggttatttgcaggaggctgtaaaggagattaagtcctatcttaagcgaattttccagctggtgaggttcttatttcctgagctgcctgaagaaggcagcacaattcctctctctgctcctctgccaaccgaaaggaagtctttttgcactggggaagtcagattcccgattctgaatcaccagagccaaggttatgtagtaacgaggttctgggattatttgcttcctgtgctgctacctcggctctacccaccgctgtttatgctttatgctttggataatgatcgcgaggaagacatttactgggaatgtgtccttcgactaaataagcagccagatattgctctcctgggctttcttggggtgcanaggaaattttggccacaaccttgncaatccttggagagaagtaaaaaggttttgccaaccacgaaagangcttggtttgcctcancagtagaaagtctgcaagca

SEQ ID NO: 4411 - DNA, 523 bp, Homo sapiens
ggagtccgcgtgtggaagtctgtgaggcgcagaggtggggcaggccgtctgactagctaggcggctgggagcgttttcgtggcggggaacggaggttgaattgccctgcctgggctcatagggaaggaggatgtgaaggagcttgtgaaggcagaggaagattattgaataataaaatacagttttgaaaaaaatggatgaagaacctgaaagaactaagcgatgggaaggaggctatgaaagaacatgggagattcttaaagaagatgaatctggatcacttaaagctacaatagaagacattctattcaaggcaaagagaaaaagagtatttgagcaccatggacaagttcgacttggaatgattgcgccacctttatgtggtagtagatggttcaagaacaatggaagaccaagatttaaagcctaatagactgacgtgtactttaaaagttgttggaatactttgtagaggaatattttgatcaaaatcctattagtcagattggaataattgttaact

SEQ ID NO: 4412 - DNA, 889 bp, Homo sapiens
ttgataaattttcatcttacactgaatttacattcagacttaactttcttcttacactaaattaatgaattaacataaatcataaagattctatatttaattataaaaacataaaattatcacatcaatttaattcttataagtttatacatactgcataatgactttgaaaacagtataactcaaaataatagaaaacaaaattaattgaatgaagtactactgaatttcaggtatttctgtgacaacacaaatttaaaatttaataaaatattaccttttcttagcaaaaagtttcttaagtcagattatcctttcatgttttaaatgaagcttcttctaaagaagtccttttattcacagttgcaaatttctttttaacacatacaatgtatactacatgctggaatcaaacacctgaaggagctggaatcttatgaatacagccagggcaacagtgtagagaatcatgaacaaaaacatcacagtccacacagaaaacattttggcacacagcacaaacataaacatgttggtctttcaattccccctgacatccataacaaaatctttctccattatattcttctaggggaatttcttgaaaagcatccaaaggaaacaaatgatggtaagaccgtgccaagtggggagcagacaccaaagtaagaccacagattttacattcaacaggtagctcacagtactttgcccgacactgtgggcagaaatagcctcctaatgtaagccctggctcagtattgccatccaaatgcctgtagggggaaaaagggtaatatataatgatctgaaaagttagagcgggaaagcatgctatcttgaccttaaaatcttgacactatttaaaaatctatttaaaagtctgtat

SEQ ID NO: 4413 - DNA, 455 bp, Homo sapiens
gccaacgggcaggtctcagcgctcctccccctgctccgctcctctgtagggcccaggcgcccttggccttaggacccaacttctcttaccgccatggagttcgacctgggagcagccctggagcccacctcccagaagcccggtgtgggggcgggccacgggggagatcccaagctcagtccccacaaagttcagggccggtcggaggcaggggcaggtccgggtccaaagcaaggacaccacagctcttccgactccagcagcagctccagcgattcggacacggatgtgaagtcccacgctgctggctccaagcagcacgagagcatcccgggcaaggccaagaagcccaaagtgaagaagaaggagaagggcaagaaggagaagggcaagaagaaggaggctccccactgaagggccctggacagggctcattaaaccttcctctctgcctt

SEQ ID NO: 4414 - DNA, 392 bp, Homo sapiens
gaggaagtggagtttatccccattgccagaaagtggtaatacttactcccagaaaaatgaaatttagaaaccatttatatttgatagaatatttggtcagttcctgtagcaaagacgaatggcttaaacaaattttctagtttctttatcacatgaaagtctgtacagtcagtcccagggctagtctactggtttcctgatcattaagaactcattaccttctctcattgctttacaaacctcaatatgtggcatccatctcatggatgaaaatggctcctcagcttctaccatcacatctgctatctagaaggaagagaatgagggaaggagggaggggatgaagagaaaagaaggaacaaaagaaggagggaggaaagaagaaaaaaaaa

SEQ ID NO: 4415 - DNA, 826 bp, Homo sapiens
cttcctaataacaactttggtagagaaataccaaaggagaaggaaacaatgatatggagaagactcaaaacaatgacagatgcttgcaaatctaagagtgcagggctaaaccttctccctgcactggactccatttctgtaccattcacattttgtgggcacctacatacatacatgtttttgctgcattttttataattggttttaaggttaacattgttcatacacttcaaagttaccataatttttaaaactgcagttgtacatggtttataggctatttaaatctttcaggataaattacacgttttatacaaaatatataaattgcattcatataaatcaccaaatttgtatagagctggttcctaaaacatttgttgataaaatttttaaattttggaattaactactgtcaaggattccatggtattatttttccttgactatatctctacttggctgctcctctacacatgacatataaaggcagatctattagaaacaattctctgaccttgagacttgctattttatataagtcacattgttcaatatgcaatgatatcttgaatttaatagataagttttattttttaaaaagggcccagcgaacctgctctcgatcaggttgtacttgtaaaggcaaacagaggtcaccagtgtttgctggcagtgggccttctagaatctagaaatgatgccaataaaaatgataatatgtgcttagcacaattccatcttactctgcggatgtgtaaagaccaaaggtcacttgaaatactaatgggaaaactgattaaagccaagaatgctgctcattatc

SEQ ID NO: 4416 - DNA, 669 bp, Homo sapiens
tccctaatccaaaaggccaaaatccaaaatgcttcaatgagaatttcctttgacatgtaagcgctgaaacagttttgggttttggagcatttaggattttggttttcagattagggatactcaacctgtatttttcttttatacttgaattcttcaaaattttctttcgtgtgttttgttgtatcactttttcttagcacaattacaaaacaaatgtaattatttcacatttttcactctcttatgggatgcatgtactggaattacttctggggacactattccttcctttgtattcctggtcctaaaaaccaggtcagggtgttcacaagttacagactggtttctatgcatcacagaatcttttgctgattttattcctaaatgatagaatacggaagttaaaaaccaggtgagaaaaccaggggaggagctgccccaacagcatgcacttgtctcatggtggagctctaggcactcagggtgggtttttctccagaggtgggaaagtcacccatttgaacctaatgctactagatgcagtggctgaacatgtgggactatgagggcattaaggagtcaacaggtgacttccaatggactgtacttaggcagcagccacatttatacgcactaaaagcaggattaatttttcctctacttgcgtag

SEQ ID NO: 4417 - DNA, 455 bp, Homo sapiens
  misc_feature (1)...(455): n = a,t,c or g
ccaggcaacatgatggtgtcatggaccaggctggtagcagcggagataatgagaagcagggaaattctggaggttaatccaaaagaatctgctaatgtgagataccagtgaaggaggcatcaaggatacctccaagatttttagtcttcttaacaaatatctgagtatctactatggtccaggctctgtactacagttcacatctttccatttaattcaatcaattttttcaaagtaggggttatcagcccctatctaaaagagaagttcagagagactttaaaactagcctttagncgnnnnnnnnnnnnnnnnnnnnnnnnnnnnnnnnnnnnnnnnnnnnnnnnnnnnnnnnnnnnnnnnnnnnnnnnnnnnnnnnnnnnnnnnnnnnnnnnnnnnnnnnnnnnnnnnnnnnnnnnnnnnnnnnnnnnnnnnnnnnnnnnntgcgcctgcat

SEQ ID NO: 4418 - DNA, 471 bp, Homo sapiens
gggagtcaggaggggtaagagccaaagactgggacttgggaatagcccatctttgagggaaaggcaggggaggagccagggaacacctgcctcctttggaatctgcaaatgcaggtccttctggctgagtcgatagaggcaccttagagactgttgctgtgaggacatcttttcttttcccttgtccagtcctgtaatgatgtgggaaacaaagcacagatagtgtaccagctgcccaatagaggaaaataggagaatttactttcatttcccaagactatatagcctgtcctctagtttccagcagtgagagagagaaagcgagcggtctccagtacagtgccgtagactctccattagaccctctcaggttgacaaagattagttcatctgaatccctagagtagggtagtttagctgtgagtttgcctaaaaccatggttctcaaacttcagcaggcatgaagccggg

SEQ ID NO: 4419 - DNA, 446 bp, Homo sapiens
  misc_feature (1)...(446): n = a,t,c or g
gctgaaaggaccaattaagaggctcccatgacaattcaggttaacacacctggtctaggaactgcaaaggagagggcagaggaaagagctctcccatgaccaaaaagttacagagccttttctggtatggagacactgattgtgatcccatcttcagagtacatgtggctggaagaacaactgcagcaacaggaggggcaagctctctggaaaaagctggaggggaaataatgaattagatcttggcaggtgagtttgagtctaccatgggcagaaggatggcagcacagcaccctgatgtagacgaccagcaggtagactaactttgagtccagagccaaggagacntcaacctgggatgtacttgattccagagagccacagaggatcccctgccatggaatgncacacttctccccacaaatacagcacttgcnagaaggtgc

SEQ ID NO: 4420 - DNA, 662 bp, Homo sapiens
  misc_feature (1)...(662): n = a,t,c or g
atgatgctgaggttcagaatatggcatttcagtatgggaagcacatggccatgagtcataagataaattctgatgtccagccttttattaaagaaaagaccagtgactccatgacttttaatctaaactcagctcctgtagtcttacatcaggaatttcttggaagagatttgtggattaaacagatcggagaggctcaagaaaaaggaagattggactatgctaagagatagggtctcgctctgtcgctcaggctgnnnnnnnnnnnnnnnnnnnnnnnnnnnnnnnnnnnnnnnnnnnnnnnnnnnnnnnnnnnnnnnnnnnnnnnnnnnnnngttgcgagaaagaatcaaagctggcaaaggtgtgacttcagctattgacctgtgtcgttaccatggaaacaaggcactggaggccctggagagctttcctccctcggaggccagatctgctttagaaaacattgtgtttgctgtgaccagattttcatgacatcaaattaaaaagacactattgttagttagctgaaaatcctagggaatgaggttgattgggagcgctttcacgatgcgttaatgacttttaaaacatatgcatttttccttccttttatcacattgctaaatgagttctgctttctttttggaactgctacaaac

SEQ ID NO: 4421 - DNA, 1045 bp, Homo sapiens
gctgtgtgagcggcacccacagcatggacctggtggccctggcaccctttgggagtataccgtgctgccggggctggactgcaccttttctaagggctatcaaggactcacaaactgcatgatggccgccctgccggaggacactgtagtttttgagaagcctgtgaagaccatccactggaacgggtccttccaggaggcagcctttcccggggagacctttccagtgtcggtagagtgtgaggatggagaccggttcccggcgcaccatgtcatcgtcaccgtgcccttaggttttcttagggaacatttggacaccttctttgaccctcccctgccggctgagaaggcagaagcaatcaggaagataggctttgggaccaacaacaaaatcttcctggagtttgaggagcccttctgggagccagactgccagctgatccagctggtgtgggaggacacgtcgcccctggaggatgctgcccctgagctacaggacgcctggttccggaagctcattggctttgtggtcctgcctgcctttgcgtctgtccacgttctctgtgggttcattgccggacttgagtctgagttcatggagactctgtcggatgaagaagtacttctgtgtctcacccaagtgctccggagagtgacagctccagatcctgtttgcgggggaagccacacatcgcacgttttactccacgacgcacggggctctgctgtcgggatggagggaggccgaccgcctcctcagtctgtgggccccgcaggtgcagcagcccaggccgaggctctagctgggcccagcctactctgttccacccgtgtcgggggtaggctgggaccgtcatttcttctgacagatttcagtctggcttgaaatttggggatgttaatgagggtcctctggtttttggtaaccagggccaccttctcagttcttgtgtctgttattggagtctggccagggttgacttgagctgagacaccagatgctcacggagatgctggacacataaagcaagttacagccacagca

SEQ ID NO: 4422 - DNA, 2278 bp, Homo sapiens
  misc_feature (1)...(2278): n = a,t,c or g
ggaagctangtgaggcccacatggggagagggtctgatctttataaactgggttccacccccataccataggttggctagattcctgcattagtaaaaatcatgaaagtagtgctgaaactcttgtaggcagcagagtgagaaaaatgggaacaaaatccagtgctcctttcttgtgctctggagtatctaatggaggatgcaggggtcctagtgttagatcttggcctctgactgggccagacatgggattggaaggggtgggagttctggacaagctcgcttttgaaattgctctgaccctttgctgttggttgcctcctctcatccgcttgcagatcgaagagcacagaatatgtgtctgtgttaggaaacgcccactgaataagcaagaattggccaagaaagaaattgatgtgatttccattccctagcaagtgtctcctcttggtacatgaacccaagttgaaaagtggacttaacaaagtatctggagaaccaaagcattctgctttgactttgcatttgaatgaaacagcttcgaatgaagttgtctacaggttcacagcaaggccactggtacagacaatctttgaaggtggaaaagcaacttgttttgcatattggccacgacaggaagtggcaagacacatactatgggccggagaccttctctggggaaagcccagaaatgcatccaaagggatctattgccatggccttccggggacgtcttcctcctgaagaatcaaccctgctaccggaagttgggcctggaagtctatgtgacattcttcgagatctacaatgggaagctgtttgacctgctcaacaagaaggccaagctgcgcgtgctggaggacggcaagcaacaggtgcaagtggtggggctgcaggagcatctggttaactctgctgatgatgtcatcaagatgctcgacatgggcagcgcctgcagaacctctgggcagacatttgccaactccaattcctcccgctcccacgcgtgcttccaaattattcttcgagctaaagggagaatgcatggcaagttctctttggtagatctggcagggaatgagcgaggcgcagacacttccagtgctgaccggcagacccgcatggagggcgcagaaatcaacaagagtctcttagccctgaaggagtgcatcagggccctgggacagaacaaggctcacaccccgttccgtgagagcaagctgacacaggtgctgagggactccttcattggggagaactctaggacttgcatgattgccacgatctcaccaggcataagctcctgtgaatatactttaaacaccctgagatatgcagacagggtcaaggagctgagcccccacagtgggcccagtggagagcagttgattcaaatggaaacagaagagatggaagcctgctctaacggggcgctgattccaggcaatttatccaaggaagaggaggaactgtcttcccagatgtccagctttaacgaagccatgactcagatcagggagctggaggagaaggctatggaagagctcaaggagatcatacagcaaggaccagactggcttgagctctctgagatgaccgagcagccagactatgacctggagacctttgtgaacaaagcggaatctgctctggcccagcaagccaagcatttctcagccctgcgagatgtcatcaaggccttacgcctggccatgcagctggaagagcaggctagcagacaaataagcagcaagaaacggccccagtgacgactgcaaataaaaatctgtttggtttgacacccagcctcttccctggccctccccagagaactttgggtacctggtgggtctaggcagggtctgagctgggacaggttctggtaaatgcccaagtatgggggcatctgggcccagggcagctggggagggggtcagagtgacatgggacactccttttctgttcctcagttgtcgccctcacgagaggaaggagctcttagttacccttttgtgttgcccttctttccatcaaggggaatgttctcagcatagagctttctccgcagcatcctgcctgcgtggactggctgctaatggagagctccctggggttgtcctggctctggggagagagacggagcctttagtacagctatctgctggctctaaaccttctacgcctttgggccgagcactgaatgtcttgtactttaaaaaaatgtttctgagacctctttctactttactgtctccctagagatcctagaggatccctac

SEQ ID NO: 4423 - DNA, 406 bp, Homo sapiens
  misc_feature (1)...(406): n = a,t,c or g
gtacatgattatgatatgagggtggatgatttccttcgtcgcacacaagctgttgtcagtggccggagaagtagaccccgtgaaagagaccgggaacgagagcgagaccgccctagagataacagacgagacagagagcgagatagaggacgtgatagagaaagagaaagagaggtcgatatagaagataatgggcttttggaagcactgattgtttaaagatacaaaaaatcttgtattttttttttgggtgtgtttacaagtagtaaatttattttcagctgtctgcctatgaagttcattgtgtaaaaggatttattatgaccccctttgttccaagcatgcagtatcataanaactggaaaaactcaaatccgccaaaaatccacagctgacagttgaattg

SEQ ID NO: 4424 - DNA, 345 bp, Homo sapiens
  misc_feature (1)...(345): n = a,t,c or g
aacaactgtttatatgcattcttaaggcttgaattaacaagtctcatcacatcatccacattgtttagtggctaagataatggactgtggcatctgtctgatgtgagtctgaatgccaactttgccatttactttgtgaccttgagaaaagtatttaacacataaagattatatgaggattcagtgagataacatgccatgtgtggccattctgttaatacttattgctgctattaccgttagtttattgggatgttgctgacaatactggaaatctgttgacaggcaaaccctcctgctacaaacatcaggcactctcctgcccccggagcngccgggggnggg

SEQ ID NO: 4425 - DNA, 693 bp, Homo sapiens
taaactgaaatgtttgcccaaagatttgttggacctggtatttggaaatgaaggcatcttatacctgtgtttagaaccatactagatggtccatagttggaagctgctatcacaatattactactgttatagcaaattcagagattcacactgaatttggttcccacaattctgcattactttgaatagttggtaaaagaattttttttgttttaacagatacatgaaaagcaaagaatttatgaatgaaatcttctaaggatgggctgccaatttttcaggtgtacacagaaatgtatttctctttagaacagtaagctggggagatgaatcacctctggtgcagaccttgcttgggtgggccaagccaacaaaccctgcatcattaatctaaatgcatacttggccttctcctgaatcactttgataagaacaatctgcaaaggtgacactgatgagggccttcaaaccaaagaatttccatgtgtcccaaacacctcaagttttctgacaacaaaagctcttctccccactttttcaaagaagccctttatgtttttctcagaaaactgctggccttgattttcaatctaattctaatcaatggtgtttgcaaagtcaggaaaagcccgctaaaactggctagagacctttctgtgggagcagcaatgtgattatgagtgatgtaactgg

SEQ ID NO: 4426 - DNA, 1046 bp, Homo sapiens
gccaaaaacggaagaatagacgaaaaaataagtgtgtgtgtgatattcctactcccttacaaacagcagatgaaaaggaagtaagccaagagaaggaaacagacttcatagaaaatagcagctgcaaaacctgtggcagcactgaagatggtaatacttgtgtagaagtaattgttaccaatgaaaatacatcatgtacctgtcctagcagtggcaatcttttggggtcccctaaaataaagaaaggcttatctccacactgtaatggtagtgattgtggatattcatctagcatggaagggagtgaaacaggttctcgggagggttcggatgttgcctgcactgaaggcatttgtaatcatgatgaacacggtgatgactcttgtgttcatcactgtgaagacaaagaggatgatggtgatagttgtgttgaatgttgggcaaattctgaagagaacgacacaaaaggaaaaaataaaaagaagaaaaagaaaagcaagatactgaaatgtgatgaacatatccagaagcttggaagctgtattacagatccaggtaatcgagagacctcaggaaataccatgcacacagtgtttcaccgtgacaagaccaaagatacacatcctgaaagctgttgcagctctgaaaagggtgggcagccattgccttggtttgagcataggaaaaatgtaccacagtttgcagaacctacagaaacgttgtttggtcccgattccggaaaaggtgccaagagcttagttgaactccttgatgagtctgaatgtacttcagatgaggaaatctttatctcacaagatgaaatacagtcatttatggctaataaccagtctttctacagcaatagagaacaataccgacagcatctgaaggagaaatttaataaatactgccggttaaatgatcacaagaggcccatttgtagtggctggttgacaacggctggagcaaattaaataaataaaatagctctgtctttcaatgaaacactcacgatgactactggcgccttctcctttcgaaaaact

SEQ ID NO: 4427 - DNA, 487 bp, Homo sapiens
  misc_feature (1)...(487): n = a,t,c or g
gggttgctgctggtagggatggttaaaaatacctcagctcttatcccaggatagtgaacaccaggaaggggaatgactgctatggaaataggcttcaccaaatcttgaactattaggatgaaggagaagtcttggtcaaaataagttgaggttatatacgaggagaaactgttcacatagaggcccagacactggtgaactggtgggagaaatagaaaggcaaggcatatccgtgatttgaaatgagtggcacatctgtaagcagcttctactggaaatgaagaccttacctgaccttctggattcatggaaaggaatggccatatcctcccatgtgaacagaatattccatgtgcttgtcccattgtcataaagagcatggcatagatgatcatgaatgaagatctggggatggctatcctatgtcccatgcaatccgggccacaagtcacttgtattacttaaactccacatagcnggggaatag

SEQ ID NO: 4428 - DNA, 1415 bp, Homo sapiens
gaaacttctagaggctgtgtactctcaccaatcctcttcgagaatttgttcaagtgtatttccccattatatggatgaggctcaggataacagcatagtggctaccttctactgagttttgaggtgctaataagtatgtttgtctgaggctgcacatgtgggtggctctgtgtgtatgatccaagggacaaaatgacgatgtaggaaccagcaagaacggaatctgggctgatgcttcagtctccacctgggtgatggctagcctcccgccctccaccaccgcatcccacacgtgctgcgcactgtccccgtgtctcctggagaaccaaactggagaaaacctttctgagtatctctcatagtaccccttccttaagaagatgtggtttagagcatgtgtgcaatcctgcctctgtaattaggaaacggagcccgaggctttccattgttggttgaacccaggacagctggtgctattcacaggctgaagaactgggcagttcttacttgggtctgtcctaggatgtggaggaagttcaggactaacgctaggcagagagtatgactcggtttacccagcctaggggcctctggatgggaacactccattccaagatctcagcagagcagggcttcctgggcttgaggctggaagctcttggggaagaggcccagctgggacattccctgggcacctgtcttccgctgaagggagcaaggtgccctctgggactgacagccatgaccctctgtgccatcctcaatccttgagccatatatcaagagtcctctagagctggatggtcctcaaaagtctgtccaaggaatgccaacgttcaccgggctctgagaaacgacgcaaatctctgagctggggaccacttggagaaccggcttagtaacagtcctgatcttcgcaagccagcttcttctgcatctgaggggctcctggcgcccagaggaggcagacagatgtcttctagctgagtttctaaccgcatgatgagactcagaccttccgctgcactagaaaatctgcaacagtgtccctgagtcacttctccttagtgggcagactcgtgttagatttgtggaacccagctctctgatttactccttttggaaaacccatggaatttcatgtataaggctttcatttgtattttaaggtttttctgtttgttttgagtatatacatggtgctcaatagcaacatcttagcagatgaagcagtttatgattccactccctcctgtatgacaggtagccactatactgaatcaaggtgctgaactcaaatcacaaaattctggcttaccgatacaacaaccaatacatctttgttctgtaatgtaaaatttgactccttacttttataacttattaaagttaaaatgtctgtgtttttgcaaatc

SEQ ID NO: 4429 - DNA, 178 bp, Homo sapiens
  misc_feature (1)...(178): n = a,t,c or g
gtcaagggatttccaaaggactacccctcaaaaatggaatacttttttgatccagatgtgttaactgaaggagagctggccccaaatgatagatgttgtcgaatttgtggaaaaatcggacacttcatgaaggactgtccctatgagganaaaagtaagacggcggtgagatcaggaa

SEQ ID NO: 4430 - DNA, 138 bp, Homo sapiens
  misc_feature (1)...(138): n = a,t,c or g
ggttcaaaggagttagtgaacaaacacagtagggccacaaattattgttaaagacatgaatgcatgaaagtgtatctatgtccaaatggactctctgcaaccatactgttccacctgaaaattagtagataganattc

SEQ ID NO: 4431 - DNA, 458 bp, Homo sapiens
ttataggcttgttgcaagaattaaacgaaaggtataggtaaggttccgagctagcaggaagtagtaggtaccaaccaatagcagtgtccgttttcttcttctcatctgtctcctctcaacctctcccttcccttccctcttccccgctgccccctactgacagagtggtggtagagataaaagtatctaaaatccaaggccgagtgtggtcagttcctttagaatgtcgttttctggttcttccaccagaggctgggacaaacctgacagcagtgtagggtccctgtgaccctttgttgttacctaagctggccaaagaggatggccagggaggcaaatgggcagcttgggagcccaagagtaggtacctatggtgtagaattaaggttttgggtacaaggggtaagggagaagctattttaagaagaagtcaagaactcaggtctcatggaagttgg

SEQ ID NO: 4432 - DNA, 884 bp, Homo sapiens
  misc_feature (1)...(884): n = a,t,c or g
ttttttacaaaaaggaaaactgacagagaatttaaagacagacacaccctgtctctccaaattagaacaaaacatcactagctctaattggcagggatctcctattaaatggtcagaggtatactagtggatacaaacatactaacattttttaaagcttgccaaacccatgttacgttgtgggagagaaaaaaaagtgtaaaaaacaacctggtcatttactaagggttctatcaaattcgcagtgatgaggggtacaaaaggaaaagatgtttacttgtacaagaattccttactgccttcaactatataaaaatgaagcaaaaagaattgtgcagtgcaaatatgactcattaaaaatgcttctgaaagaattcctggtaaatatctaaattaattatctttttttcagcacctgatataaacacgtgtgcacgtgtgtgtaatctgaggaaaaccccacagcacaggttttccacctcactggaagcatccagctttgagccctaagtccttcatcttctcccaccttattgtttcccttccttttctcctaacccacgactccaagggtgatcaacagtgtagcttagtagttaagaacacaagactttggaatctagcttnnnnnnnnnnnnnnnnnnnnnnnnnnnnnnnnnnnnnnnnnnnnnnnnnnnnnnnnnnnnnnnnnnnnnnnnnnnnnnnnnnnnncagggataacagtgcctggctcgcagggttatttgagtaaatgaaatggtatctacaaagatcatttatgcgcccaacacagaatgggagttctataagttatacaccaccatctttgagttagtctttgctcagattcctctattccatgtattcctgttgtttcacccgca

SEQ ID NO: 4433 - DNA, 808 bp, Homo sapiens
ttttcaacttttttttttggattagctaagaaaattttattttgctccgtgcgttcaaggagctcacacacatgcacatgcatatgcatgcacacacacacatacacacacactcacatgcatacacacacggctaatactgctcaaggcatggctcctgggcacagagttctggggccagaattctgctctgggccctcctcactctgtcatctcctgcactgcagtccagggtccagatagatttccgggatacagcaccttcacacctccaggccaggacccttgcttagtcccagtgcctgcaccaggtcatctccgagcccactcttcaacgtccttctcaaagacttgcggttgccgcgggaacgcttgcgttccctagcagctaaggcacgaggactgctcttggtcactgactgcaccagaaggtccatgatctcatctgatgtatcactgggtaaactggagcctgggggttcttctggggatgcagtggagggccccactgtgggcatgattggggagctgctctggaccatgcctctgctgcggcgattgtgtgtggtgtcctcaggcctgctggtcagcagactcttcatactagcatgactgtcagcatctccccggcctggcccgctgctcactgctactgggacagaggggttgctgggggcttccccagccacacctgagaacttctctgtctcggtgatcatgcgtccccgggtcttgttgcgctcacggtatgtggcctgcttctgctgctgctgtagcactcgttcccggcaagtccgatactcaagcg

SEQ ID NO: 4434 - DNA, 1862 bp, Homo sapiens
ccttgccaaagcgaagggtgtatggtccacgctccctgtaaatgagaagaaattaaatcttgcatttagatctgcaaggagtgttatcttaatattttctgtcagagagagtggaaaatttcaagggtttgcaagactttcttcagaatcacatcacggaggatctcctatacactgggtgcttccagcaggaatgagtgctaaaatgctgggaggtgtctttaaaattgactggatttgcaggcgtgaattacccttcactaagtcggctcatctcaccaatccttggaatgaacataaaccagtaaagatcggacgtgatggacaggaaattgaacttgaatgtggaacccagctttgtcttctgtttccccccgatgaaagtattgacttgtatcaggtcatttcattaaaatgcgtcacaagagaagaatgcattctcagccccgatcacgaggacgtccatcccgtcgagaaccagtccgggatgtgggaaggcgtcgaccagaagattatgatattcataacagcagaaagaaaccaaggattgactatccccctgagtttcaccagagaccagggtatttaaaggatccacgataccaggaagtggacagacgattttcaggagttcgccgagatgtgtttttaaatgggtcctacaatgattatgtgagggaatttcataacatgggaccaccaccaccttggcaaggaatgcccccttacccaggaatggaacaacctccacaccatccttactatcagcaccatgctccacctcctcaagctcatcccccttactcaggacatcatccagtaccacatgaagcaagatacagagataaacgagtacatgattatgatatgagggtggatgatttccttcgtcgcacacaagctgttgtcagtggccggagaagtagaccccgtgaaagagaccgggaacgagagcgagaccgccctagagataacagacgagacagagagcgagatagaggacgtgatagagaaagagaaagagagcgattatgtgatcgagacagagaccgaggggagagaggtcgatatagaagataatgggcttttggaagcactgattgtttaaagatacaaaaaatcttgtattttttttttgtgtgtgtttacaagtagtaaatttattttcagctgtctgcctatgaagttcattgtgtagaaggatttattatgaccccctttgttccaagcatgcagtatcataagaactggaaaaactcaaatccgccaaaaatccacagctgacagttgaattgacacttttattggggcagaatggaacagtccaagaatgtagatactgattctttctccataaatgttcttatagtgtgttcatcctagagttatttttttgtttgtttttttcctttttggatcttgattgataactgccatgatattttgctttgatgtgtttctacatgtagttgcacacggttcagtaaaaataatgctgctatcgagtatgcaaatattgaagtatgatggtttgactgtatggcagtgttgtagcagcctcttgttttttttccccattgcctcttttttttaaaaaacttataaagtcactttttatttttcctcagtcttcaatgacgagagtcaatattaagaagacattgctatctaatttttaatctttttaaatgaaaaattcctatgttcagtagcgtggttgatgctattgtttagccttcccctccaaattgtatacattggcttggaatgttcacaacttgcgtgcgtggcagcggaagacgattcccatattctacattgctactgttttgtataaaataaattggtaaagattgacggtt

SEQ ID NO: 4435 - DNA, 462 bp, Homo sapiens
gggaggcctcatgtctcctgtgggctttttaccaccactgtgcaggagaacagacagaggaaatgtgtctccctccaaggccccaaagcctcagagaaggggtgtttctggttttgccttagcaatgcatcggtctctgaggtgacactctggagcggttgaagggccacaaggtgcagggttaatactcttgccagttttgaaatatagatgctatggttcagattgtttttaatagaaaactaaaggggcaggggaagtgaaaggaaagatggaggttttgtgcggctcgatggggcatttggaacttctttttaaagtcatctcatggtctccagttttcagttggaactctggtgtttaacacttaagggagacaaaggctgtgtccatttggcaaaacttccttggccacgagactctaggtgatgtgtgaagctgggcagtcctgtgggtgtgaaa

SEQ ID NO: 4436 - DNA, 460 bp, Homo sapiens
ggttgttggcagtgtgatagtaacgggaagtgaagccactcaaaaatgcttttgtcagacttcaactcacaacccagacctttagagcagggggaaggtctgccccttcccctcatcggctccctggcttggctgctgtgcccttggaagggcagggccttggtgtgggggagcagaggtggaatatcccccagttcccttatttggccccaaagggtcttattgatgggaggattttctaggcatgtaaaagtgagttcgaacattcagacttcactgtttgatttgatttgtttatgcctgggaatcctttgtggctttttgtcaataggctgggagagggaacctagttggactccagctgtccggggtgggggcttcttagaacagccccgcagccctctcggtgcatctgtgtgatgttgtgtaggactttccccttcagagtcctggggagcat

SEQ ID NO: 4437 - DNA, 549 bp, Homo sapiens
  misc_feature (1)...(549): n = a,t,c or g
acgagaattatggaaatatgaccctgagcatggaaatatgtacatgagaatgtctaaaagctagttcattttgaaaaacaaaataatgtcacctcatattatttatagtatataaagatgattttaagagtggcagtgtctgggattataggtgattgtatttcttcccttttgcacatctatgttctctcatttgtattgtgtggggagaagtgactttttttataaaaagaaaaaggtatatgcatcccancagagaagcactggctccacccagtacctgcctcctcatgccaccctctcaagccaaaagccgggggaagcccaggcaccttgaccatgaccgcccgagactcacacttcttctttctcatcagggaaggaaaacccccctgtaagcgatactcaaatgagggcgatgagccatgccgatccccgaggactctcaacactcgggaggaagaaaantccaagagtgcagatctggtaactgaggacatggtgctgataggncaaacattcccagttnaagnggacctatnanaactg

SEQ ID NO: 4438 - DNA, 1109 bp, Homo sapiens
ggttaaaacaccaaagaactggtttatttggcatttttatattactagttgttgaggggaattgcacaagtgtgtaggatctttgagcatttagatcaaatcctcattgataactgggagtaaatgaagcatactttaaaaaataacgttcaaaatggaatactctggggccctgaaaaccagtaaaatgttaggttcaagtattatgtgaattaagggaaagaagatagtgtaaagcaaaaggccttcaccagaatcccaagagatctgaattctagttctgggctctgccactgattttctgtgtgaccttgtgttgactctggggtcaccacccattctggaaaattgaaggggtgtgaccaaatggcttctgaagtcacttgtatcactgatgttctgtgacccttgctgacaggaaggtctgaagagaaaaatgggctttccactagtctgaagcatgtagggtttgactgatgggtgaacacagtatggtttgttgccaagacaggcgtgaaaagggggaatgacatgtgaaaagcctcaccaagcagtgggtaggcactgcctgaggtcaactcaggttttccataagatggaaattttctctattcttacagatcttaaagggatttgagaaaggaggatattctgtctgtattcagtgaattaaccgtttagcgaaaatagatgtatgactgtcattatcaatacagttttttatagtggaagatttaaggattgtttcagtaaattttagcttatagctgctggaatgagtgaggtttttgatgcatgtaaatgcaatatgtaaaattggaatctaatttgaatttataacaagtcacagtctctatggagcccccaaatactgtactttaaaatcaaaatctcccatagactttaaaatggagtttcttttttgcaaagaaaatccaagaaaatttgatttctgattttacaggtattacacatcattttccccaaccataaggccattttggcaaaccttcaatacattgtaaaatggtttcttctgtagcctaagtgtgtccttaaggttttgcttatttgtcaaatatcaaacacagtaactttgagtgattaaa

SEQ ID NO: 4439 - DNA, 493 bp, Homo sapiens
  misc_feature (1)...(493): n = a,t,c or g
agctgcactccgtctgttcttcagagcatttacccaaatgtatgattgtgcatttctttactcatttatttgctctttttcccttcccgaagacgaggcatatgtctgtttcctcccttgttcccagagccaggcaaatacaaaatgacagatagctgtttgtgcagtaactgctgctgagccccctcaggagggaggcattgttattcttattcctagtaggagtagaagccgtcatcgttgtagtcatcacccgtgtcttataattgaggagacggaagcacagagtggataagggacttagttcagattgcacagccaggaagcactggaatggggattgaaacccaggactggcaggtttctcaagaccccttanccttcagcttcaaaacattnggcttcctcccttanggatttccttcaattttgagttttaggaccttaaccttttccaggaaggcccttccttgaattaccngttcagttgggt

SEQ ID NO: 4440 - DNA, 230 bp, Homo sapiens
  misc_feature (1)...(230): n = a,t,c or g
attccagggactgttcaaaacgtcattttcctgagacgctttaccctaataatccttctgtaaaaaatatccttcttgggctgaatgccaggtgnnnnnnnnnnnnnnnnnnnnnnnnnnnnnnnnnnnnnnnnnnnnnnnnnnnnnnnnnnnnnnnnnnnnnnnnnnnnnnnnnnnnnnnnnnnnnnnnnnnnnnnnnnnnnnnnnnnnnnnnnnnnnnatggtggtat

SEQ ID NO: 4441 - DNA, 791 bp, Homo sapiens
tatttatgatcaaatagagtagtgcttaaatatctctgtcctttgaatgaatttgtggtagatttttatgactcctggaaatccctatcttctggatatgctagttttgattacgaagatgcaggctaccagactgcagaacttgtaaaaatggatattctactgaatggaaatactgtagaggagctagtaactgttgtacacaaagacaaagctcattcaattggcaaagccatatgtgaacggctgaaggattctcttcctaggcaactgtttgagatagcaattcaagctgctattggaagtaaaatcattgcaagagaaactgtgaaagcctataggaaaaacgttttggcaaaatgttatggtggtgatattacccgaaaaatgaagcttttgaagagacaagcagaagggaaaaaaaagctgaggaaaattggcaacgttgaagttccaaaagatgcttttataaaagttctgaaaacacaatcttctaaataattggtgggaaaacaaagaattttcattgcaatttgtaatatgctgacaacagaaagaaaattataaaatttgcttgttactttcagggtattcaggttcaaattaacctactagtctttcgttgaaagggagtagttagtggggtaggccaagagcttaggttttgaagccctgttgcctgttcttcaaatttctgttcccaccactcacttgttaaggtgaccgtggccagattaacctttgtttcctcttcagtaaaatagagattatactactacctaaaaaaaaaa

SEQ ID NO: 4442 - DNA, 420 bp, Homo sapiens
gatgactagtgaatatgaggttttccattaggctggtaggaaacaggagctatttccagccccatgtgagctccaaggttctggttcctagccttggctactttccttacccatgtgtggttatcagtactcagttgaagacatgagtgggctctgcaggtctctgccatgctctttctgggcagctctttcctctgccactctgccctgttgtaaactctagtcttcttggcctccctgggttgccaggtctgcctcttcaactaatggagaacaactcttctggctggctcccccgtcctgggtgctgtggcctagcaagaaggtagggtaattatgaagtttccctcatttgtttccttctctcagggatcaatgtcctgtactgcctgaaagtccactgtttcaaagtcattgttt

SEQ ID NO: 4443 - DNA, 1363 bp, Homo sapiens
  misc_feature (1)...(1363): n = a,t,c or g
cttcccgaagtccccttctccagtgcttccctgggagaggccagctgtgttcgagtcctctgtgcctgccctggcgttctcacagcctcccccttcccctcagcaggcggctctctttgccttacccattcagaaggctcgccctcggcgtctgtctgcctctgcctgccagctcatcacgatctgcagggcattgaccctttgctttccctttctgctccctctctttccatctgtttggctttttccctcagggaacttggtctagaaggcactgggaagctcatcagagaaaatgggtgctgggcctgagtactcccgtcggaggggatggacagtcacccctcccgttggtttccagccccgccccccttcccaaggcaactctggagggtaccctaggtatgctgctgagccctgccccccgtcctgctccagcctgcccgtgtgtaacctgtaagatgtactgtgtgcctccggaagacaccacctttcccttcagcattccctttcatgacctgaggcactctgcgatgtgtgccccaaagcagaacttacagggcctgcaggaagctggtgtcagggagagaaacccaaccccactgtcaacatagggagcatcaccaactccagactggctcctgtgggtatggtgtttccgctgggctgggtcctcaacattgccaaggtgctagtgggtccctaagagggcccatgttggggggtgaagtcatgaggtcctgaaggcttaggccctgtcattcccaccctcactcttgctgcacagttgtgtttactttttctgggtagaggatgctgaactgactcagcaccctcctgcaggacggggttagggaatttggtgctcaattgctctcccttgctcttccccaaactgaaaatacctactgcaggatccctcggggcacactggaagcttggctgccaaccctcttacttcctttgttacagggaggggttggcttggggtgaaaagttctggccctccgcagggagncagctcccagctgccctggcagtgctcccagtttgtagggaagccacacccagatctgggtgccttgggagaaccagtccttccttttgacccaccccaggaagatggagtgctcttttctaggcccatgttctgccagcaaccgggatgcgtgggcaactggactctgcacgggggtctacaggttgagggaggttggtcacaatgagaacctcggggtttgaggtggccatgggcagacagccgaaagggagggagggtgtgggtgtgcgtgtgtgcatgtgctggtgtgtaagggggaaagggtctttcctggttttatttaaataaagtagtttatgtaac

SEQ ID NO: 4444 - DNA, 508 bp, Homo sapiens
ctctgttacttgccttctctacaaaactgcttttctgactaataaaggcatggagtagtttttgtaggcaaggagaaacaattctgggaaaaagctttgtaaggagcaatattaatagacatctatgcccaaaatttgattcctgtggtattttccctacaaatttcttataggctagttcaaggagaaaagcatcataaagtttgaaagaccagctaaatcagtggaaattatactctcccctttcccattaagaactctattctcttactatgaaaacaccactgttctttcttatctcagagtgcagccttttctgtatactgatgccaaatgggtaacattttagtgagacatttgaaagttgtgatatgcaactcggtgggggacaaacaaggtcatttaaaaggtctcttcattgagaacatcagagctttcaaaagaggcacacagcctttcccgcataattgggggtaaatgaagaaaaagcccataaagtacaaaaaaa

SEQ ID NO: 4445 - DNA, 692 bp, Homo sapiens
tttttttttgaggttgttgggaaaaatttaatcagctacagatattttaagtaccaaaggctgcctctggagggaaaagaaaactacccctctggttctggttgacagaagtatgtattatcagattccctgtgaggctttacatcccatgtttgctggagaacagagggattctctaagagtgtagtgatttcttcagatagttccttcatcttgccttcaattatttcagaggcctcacaggcagtccccattattcccagtcatgtattcatttcagcttatttccaactcagctatccttggctctgaaaagctgtcatcactggcatcactgtatctatcactggaagacagtttgcaaccctgttgcaagtaggcattcaggttcccagttgctgcaagtaacagccccagatacggaggggaaggcttcatcggcctagaagaaaactcaggatggaactggacaccaacaaaataaggatgatttgccagttcaatgatttccatcctgtctccatcaacatcctgacctacaaaacttaagtcattctgctcaaattgtttgatcaggttagggtttacctcgaaccgatgtctgtgtctttcttctataaaaggaacatcaccataaagtttccttaatattgaattttcagttttgaaaacagttcttcttaatcccagtt

SEQ ID NO: 4446 - DNA, 234 bp, Homo sapiens
cttcttcaggaggtggcttttgagttggaaactgaaaggtgggtagaatttggtcaagcagaattaaagaactgaggggaagggaacattccagttagaggaaatattgtgcaccactatggaagtactggccttatatgataaggataaagttaaatttggtaggtgtataacatttgaagacaggagaggagagcagttagattagagacagagattctagaaaggtactga

SEQ ID NO: 4447 - DNA, 211 bp, Homo sapiens
cagtcaatcaatcagtcaatcagtcaatcaatgtaagggtcttaaaccatccccaaagcaaaggagtctatgtttatgtcccgggcatcttaaccctccaattcaatcagtgtttattaagcatcttatagagctaagaattttgaaggttgactttaatagctttacctgtggagagtctcatggcagggaacatgagaggtgctggcgt

SEQ ID NO: 4448 - DNA, 170 bp, Homo sapiens
tcaacccggaagtctgagttagatagaggccaaagtgttggctaaaacctctttgaaaaacaaacgttgagttttgtgctatcttcaagagtccacagaacttctgaaggaatgggttcgagctactctacaagtaatttatacaaagacagaatcactaattttagggg

SEQ ID NO: 4449 - DNA, 759 bp, Homo sapiens
gtaacaaggaggtgggggtacaaatcctcagctcctgcttccgcaagcactaacctgctctgaagtgagccaggcagctctggccatcttttcccagccacagaatcaggtgatggtccagaattaagagctgtcacctgtgtcattcactcacaatggaagaaatgaagaagactgccatccggctgcccaaaggcaaacagaagcctataaagacggaatggaattcccggtgtgtccttttcacctacttccaaggggacatcagcagcgtagtgggatgaacacttctccagagctctgagcaatatcaagagcccccagggaattgaccccctcgagtcagagtgaaggtgtgatgctgaaaaacgatgatagcatgtctccaaatcagtggcgttactcgtctccatggacaaagccacaaccagaagtacctgtcacaaaccgtgccgccaactgcaacttgcatgtgcctggtcccatggctgtgaatcagttctcaccgtccctggctaggagggcctctgttcggcctggggagctgtggcatttctcctccctggcgggcaccagctccttagagcctggctactctcatcccttccccgctcggcacctggttccagagccccagcctgatgggaaacgtgagcctctcctaagtctcctccagcaagacagatgcctagcccgtcctcaggaatctgccgccaggagaatggcaaccctgggccagatagctgggaagaacagggt

SEQ ID NO: 4450 - DNA, 757 bp, Homo sapiens
  misc_feature (1)...(757): n = a,t,c or g
gggttttagttaccccagttgaaagagaaatttttcatattggggttgagaagaatggaggctattaggagcnaagctttaatgagtgaaagtctggtgaatcctgcaattttgatatgtttccagtggattttgagaacacagttttaggaccagagtagatgttgttccctagaaaatagagtcagctattgatattgtgcctcccatccctcatatctcagtgttttaaccccacctgagtttggagaccagtttgtccaaggatctttcaaacatgtgagcccagagtagaacttctgagtcaaggatcatgtctttttctgaggagctttgcttggggcactgggaaatcctgttttagatcaggactattggaatattatcctctccaggggaagtgccaggttgaacatttaagggctttgcttctaggcccagctatacattcaccagcaaatcacttaacttccaaaatttcttaaaatcggtaaaatgggatcattcnaaaaggcctaccccanntgatgncagantgcatcnatnggcatntnagggncnacgttannttaaaaangnncanangattanggggnnttnnnanggngnttncttgaaantttnnaattggggggnggggngtnnccaacnttgggacnttngccattcngaaanagcntngggnatttgnggnagncccaattnttnaaaaaanntnnggnttgnccccaagtnntgggggccacnttggnttcgg

SEQ ID NO: 4451 - DNA, 520 bp, Homo sapiens
cggccgcctactactactaaattcgcggccgtgcgacggagggaggtggctattgcgataaatgggttttaagaagagatcattatgaaggaaccattctgtaccttggctggtggaatccacactgatctacacctatgatagaatttcagagctaagtacacattacatgtaaaatgagtgaaatctgggtgttggtagattgtatcaattgtgtcagttttctgtctgtgatactgtactacagttatgcaaagtgttaaccattggagggaaactgggtgaagggtatatggggtctctccttgtgtcatacaactccatgtgaatttacaattatctcaaaagtgaaagttaaatattggttaattgctgacagctgtcataaaactatagaattatatgtaggaatattaatgttaaattgtagtggaaaattttaacatatagtgtctgcgagcactttgaataatggactatgcacaagagagggtcgtattggaagtatatagatggttcg

SEQ ID NO: 4452 - DNA, 475 bp, Homo sapiens
  misc_feature (1)...(475): n = a,t,c or g
gctcattctttcctttttccactatgttcagttagtttccaagttctgtgaattaggctttagataagtctctcatgtccatttcttcccctttctcttcattttaaattctctgtgactgctcttcttgtctgggtcttgaactttaaaccttaaacatgtgctgttgcaaccattccctgcttagcctttctggcctctcctttctatctccagtctgtcctacatattgacaatagctaattttccttaggatatcactttactttttttttttttaatttggaaaatccattttcaaatcaccttctcatggcttactaggttgtttctggctcnggggcataaatatggggcataaagtggggnttggggggttggccgtggggtgcccaggttncttaatccccttggactnggggggaggatccttttccattaatcncccccattggattggacaggtattccccag

SEQ ID NO: 4453 - DNA, 431 bp, Homo sapiens
gagtatagacccagagactttccttcttccacttctattttgatgtcattgtttataccctgtgaaatcatgaggctcttgttatttaaaaaccagtagaatagttaagaacatgggctttgcagtcaagcagatttgggttcaaaccccaaattcactagctgtgcaactgtgggcaagttatttaacctctctgggctcagtgctctcatgtagaaaatgatggtaataccaccttagagagccattatgcgggtcagatatgcataagaatggaggctttagtctctggaacatagtaagtatgcaataaacattagctggcaatcagtaaaattctctttccctacggaacagatgcagggtaaaaatgtagggttgtatggctgagggttacctggacctgggaaggtgtagtcaggctcaggagt

SEQ ID NO: 4454 - DNA, 348 bp, Homo sapiens
ggttaaatgaagcttagtccatctcaggtagacactggtagttactgacaaggtaatgagactcttaggcactgggacagagagggtggggggaccacagacacaataaatgtagggagcttttcctttagggattaaagcaagccaaacagtcaggtggaccccagcatccattcccgagagcaagtgctcatccttggcaataaacgaagactgagtccagggccagaggcgaggggtcctatggctcccatctgggaagcagcccctcagaaatggcagtaattcacagtctggactgaactccccaggactggaggtaaatggtgaacccaccaaggtaggttt

SEQ ID NO: 4455 - DNA, 3309 bp, Homo sapiens
ggttcccaggcacaggaaccaatcctggtctcagccaagaccatgctggagagttcatcgtacctcattcgcactgcacgctctctggccatcaaccccaaagacccacccacctggtctgtactggctggacattcccatacagtgtccgactccatcaagagtctcatcacttctatcagggacaaggcccctggacagagggagtgtgattactccatcgatggcatcaaccggtgcatccgggacatcgagcaggcctcgctggccgccgtcagccagagcctggccacgagggacgacatctctgtggaggccctgcaggagcagctgacttcggtggtccaggaaatcggacaccttatcgatcccatcgccacagcggctcggggagaagcagctcagctgggacataaggtgacacaactggcaagctattttgagcccttgatcttagccgcagttggtgtggcctccaagattcttgatcatcagcagcagatgacggtgctggaccagaccaagactctcgcagagtctgccttgcagatgttgtatgcagccaaagaaggtggcggaaaccccaaggcacaacacacccatgacgccatcacagaggccgcccagttgatgaaggaagccgtggatgacatcatggtgacgctgaacgaagctgccagtgaagtggggctggttgggggcatggtggacgccattgcagaagccatgagcaagctggatgaaggcactcctccagaaccaaagggaacatttgtcgactatcagacgactgtggttaaatactccaaagccattgcggtgacagctcaggaaatgatgactaagtcggttactaacccggaggagttgggaggactggcttcacaaatgaccagtgactatgggcacctggctttccagggccagatggcagcagccacggcggaaccagaggagatcggattccagattcgcactcgtgtgcaggacctgggccacggctgtatcttcctggtgcagaaggcaggggccctccaggtctgccccacagacagctacaccaagagggagctgatcgaatgcgcccgtgccgtcacggaaaaggtctccttggtgctctcggctctccaggccgggaacaaaggaacccaggcatgcattacagccgccaccgctgtgtctgggatcattgccgacctggacaccaccattatgtttgcaacagcggggacgctgaatgcagagaacagtgagaccttcgcagaccacagggagaacattctcaagacggccaaggccttggtagaagacacgaaactacttgtgtcaggagctgcgtccactcctgacaagctggcccaggcggcccagtcctcagcagccaccatcacccagctcgcagaagtggtcaagctgggggcagccagcctgggctccgacgaccccgagacccaggtggtactaaatcaacgcagtgaaagatgtagccaaagccctgggagacctcatcagtgcaacgaaggctgcagctggcaaagttggagatgaccctgctgtgtggcagctaaagaactctgccaaggtgatggtgaccaatgtgacatcattgcttaagacagtaaaagccgtggaagatgaggccaccaaaaggcactcgggccctggaggcaaccacagaacacatacggcaggagctggcggttttctgttccccagagccacctgccaagacctctaccccagaagacttcatccgaatgaccaagggtatcaccatggcaaccgccaaggccgttgctgctggcaattcctgtcgccaggaagatgtcattgccacagccaatctgagccgccgtgctattgcagatatgcttcgggcttgcaaggaagcagcttaccacccagaagtggcccctgatgtgcggcttcgagccctgcactatggccgggagtgtgccaatggctacctggaactgctggaccatgtactgctgaccctgcagaagccaagcccagaactgaagcagcagttgacaggacattcaaagcgtgtggctggttccgtcactgagctcatccaggctgctgaagccatgaagggaacagaatgggtagacccagaggaccccacagtcattgctgagaatgagctcctgggagctgcagcatccatcgaagctgctgctaagaagttagagcaactgaagccaagagcaaaaccaaaacaagcggatgagaccctggactttgaggaacagatcttggaagctgctaaatccattgcagcagccaccagttgcactggtaaaggctgcgtcggctgcccagagagaactagtggcccaagggaaggtgggtgccattccagccaatgcactggacgatgggcagtggtcccagggcctcatttctgctgcccggatggtggcggctgcgaccagcagtctctgtgaggcggccaatgcctccgttcagggacacgccagcgaggagaagctcatctcatctgccaagcaggtcgccgcttccacggctcagctgctggtggcctgcaaggtcaaggctgaccaggactcggaggcaatgaaacgacttcaggctgctggcaacgcagtgaagcgagcctcagataatctggtgaaagcagcacagaaggctgcagcctttgaagagcaggagaatgagacagtggtggtgaaagagaagatggttggcggcattgcccagatcatcgcagcacaggaagaaatgcttcggaaggaacgagagctggaagaggcgcggaagaaactggcccagatccggcagcagcagtacaagtttctgccttcagagcttcgagatgagcactaaagaagcctcttctatttaatgcagacccggcccagagactgtgcgtgccactaccaaagccttctgggctgtcggggcccaacctgcccaaccccagcactccccaaagtgcctgccaaaccccagggcctgggccccgcccagtcccgcagtacatcccctgtcccctccccaaccccaagtgccttcatgccctagggccccccaagtgcctgcccctccccagagtattaacgctccaagagtattattaacgctgctgtacctcgatctgaatctgccggggccccagcccactccaccctgccagcagcttccagccagtccccacagcctcatcagctctcttcaccgttttttgatactatcttcccccacccccagctacccataggggctgcagagttataagccccaaacaggtcatgctccaataaaaatgattctacctacaaa

SEQ ID NO: 4456 - DNA, 402 bp, Homo sapiens
gagtttataaaaattacacgatggtcagaggcaaaaggaagagatggacaattttttacccctcaatttaagataattatagggaagtcatagattttgtcataatgccatttctgaaaataacacttttagaagttatgaaggcagtacttattcattaaacaaaataaggaaaatatagaaaaacataaagaaaatggaaataatctacagttctcctaaccaaagcgaggcattgtaaacatatatagtacattcccctctttctaacctcaagttgctttgtgtctatgggatgtgccataatttttttaactacccccctttaccccatggaacatttagggttgtttctcctgcccgcccccccggcttttggctattatagggacaataattcat

SEQ ID NO: 4457 - DNA, 1130 bp, Homo sapiens
gtcagagtagggaccatgctgtcccaggttcaaggataaaaaccatcaggcccaagtgccatccatagtccatctccagagtcttcctccacaaactgggattcatccccgctgaaaaagcacaatctaacagcaagggaacaaaaaaaccatgctatcacataatactatgatgaagcagagaaaacagcaagcaacagccatcatgaaggaagtccatggaaatgatgttgatggcatggacctgggcaaaaaggtcagcatccccagagacatcatgttggaagaattatcccatctcagtaaccgtggtgccaggctatttaagatgcgtcaaagaagatctgacaaatacacatttgaaaatttccagtatcaatctagagcacaaataaatcacagtattgctatgcagaatgggaaagtggatggaagtaacttggaaggtggttcgcagcaagcccccttgactcctcccaacaccccagatccacgaagccctccaaatccagacaacattgctccaggatattctggaccactgaaggaaattcctcctgaaaaattcaacaccacagctgtccctaagtactatcaatctccctggggaacaagccattagcaatgatccggagcttttagaggctttatatcctaaacttttcaagcctgaaggaaaggcagaactgcctgattacaggagctttaacagggttgccacaccatttggaggttttgaaaaagcatcaagaatggttaaatttaaagttccagattttgagctactattgctaacagatcccaggtttatgtcctttgtcaatcccctttctggcagacggtcctttaataggactcctaagggatggatatctgagaatattcctatagtgataacaaccgaacctacagatgataccactgtaccagaatcagaagacctatgaaaagaaagttgtatgtgccacataaaactctgaatataaaagttgctgttctactattttaactactggcaaagccacttgcatttttcattagtagcaacaatagcaatttagtgattttccttttctgacattcaatttcaatctcagatcaaatactaatacaacaattagaaatcttac

SEQ ID NO: 4458 - DNA, 376 bp, Homo sapiens
aactcaggatgctgttggctcctaagcagaaagcaggcgccacccagccttcaagtgcttcaacaagtgaagagttaggacggagcccagcctgggaacattcacgccaccttctgcccccagtaaaattccttaaagctatgaggttctgactcaccacggggagtccctggccgccgctgggaggccttggccatgcaaatctcagtgacatagcatgtcttatttgcttcagaagtggcagaggagaaagtgacttgcctcacgctgcccggttccacccagggaccttgtgaagagacgcgggaaggctggcagaaaggagaaccgtccttcccgtggaatactcccgagatcgcaccactccactccagcc

SEQ ID NO: 4459 - DNA, 1142 bp, Homo sapiens
tttttttttttttttttaattttaaagaaggtatatttatttaacaaacatgtatgaactattcattaacaatccaggactgtggaggacaggggacagaaacaagcctcgaagagatcacaatatggtggagtgcatgcatggcacacctggctatctgaatcagacgtttgcctctgtgtgtgtgatgaagacagtagtgagtggaatggacagagagtaactgtaaattctgtagggaagaaaacgaacgtttactcattctctaacagtcttttgctttactatggtcatatacaacagttaatctcccatcctcagttcccagatacccaccagaaaaccggtaattaacctctggataaactttcactgattacagatgaggagcgaggcaaccttaagcccataaaacaaatattccctacagtatgggggagccgcaatcatctgaatgccagttttcagagccagcctgtgaacgtttcatctgagggatgttttcccgatgatcatcttatcattatcgcatcttaaaagctggagaagccctcaaagccggtttggcacaaatgtcaactcaagggaggaatgccctctgtaacactcctggcagctacaggctttccacagcagcggaatgtatttttaaccaacaaaaagtattagaaacagcttcctcgtactgaactaaatcctcctcatattttccaaccatttctctaatggaatttaattgtttccatttggtttctgaagcaatacagaattagcctattctctctcccatttccttcaagaatttgaaaacaattatcatctgtatttctgaattatctccagactgaacttccctaattcttttttatttttcttttgagaagtattttcaaagttatcaccatcttgttactgctcctgcaaacactgtactacttggccaaagtctgcttaaaatgtgatatttagaaaggaacacaatattccacaggtaattgatctttacactggaggtcccggggggattattcttttgatctaggcacatacttcccatcaaacacattccttaaaaaagcccttagttctcgcctcccgtccccctcccccggtgtgctgtaccatgagctggatattggaat

SEQ ID NO: 4460 - DNA, 208 bp, Homo sapiens
ggtggtttttaaaggccaccgcttcttcagtgttctgcaccaggtctgggaatgttctcagctcacctagtcatgttcagaatggacaaatccctcagaggaagcagacacggtttctcgggacggtgatcctttagagccacatgcacatgcttgctttcttcaattattatcttatgggagatggagtctcactccgccaccgagg

SEQ ID NO: 4461 - DNA, 1262 bp, Homo sapiens
  misc_feature (1)...(1262): n = a,t,c or g
tttttttttatatttaacaatatatatttatatatattttctaaatcagtacattcagtttttaacttgtttttttcttcacaaacagaagaactcttacaatagtagactttctaaaataaatactattaaaatagagcttcaaaataaatattctatacaaagaaaacctgtggcaactttgtggtggggtggaaatgggctacagtgagggggaaatgaagttgggatgtggcggggtgggagcctcgagcttttctgtttgtaacatgaaaccaagctgtgggacagtaagaagagaaagcaaggcaagacactgcacgcagttacccacagcagaaaatggcaacgcaagattcatcatcgactgtcacagtaagcagagggggcacaaaaatgcttgtcaaaggcatgaaccagaaggctagtgaggctcgcaggatgccctagtgaatcgtacagtgtagagctgtgctgcccacgcccgccagacacttcctgggacagcacagaaggagaacatgacgcttcaaggtgacagtcatccgggttctggtgcagatcaactttccacgtgtgccatcttggacaagtcattatctagctgggcctcactcgaggtatgatggcgactgacaggctccacaaggctgaaaagaactagccatgtcttccatctcagctctgagggggtgcgtaccaaaggaccaaaggaagggattggtcttcacccccttcctgctcaggaaagccttagttgtgcccatcttttctctgggagggctttgctacccaagacccagttcccagggtgctcgcggaagcgctgtccttcattaacacgggcagccagagcccccctagaagcgtcctggatcccaggtgcccctcgagttaagacagaacccccacctaccccaggtttaccaggggcgggaactaaccagcacttttcaaaaaaggtcaagccgaggcatcgtccagccaaacaggccattggtgacaggaaacacactcagccagaagcagctacacatgtgtgttgtgtctctgagtgctgggtccctcagtggctctcgactggccccagagccggggagggtccacaggcaagccagtttatccttctgnnnnnnnnnnnnnnnnnnnnnnnnnnnnnnnnnnnaatttttgccaagaagctgagaaaaacaatgctgagggattgctacacaaccaagctgggagaaccaaggatggttccttcgctcctttcccatgac

SEQ ID NO: 4462 - DNA, 427 bp, Homo sapiens
ggatgacctaatttagaaactataggagaattaggggaagctctttggaggaagtggtgcctaatgttgacataaaagaaataatgaagcaaggagagggagaccagaattacgggcagaaggaatagcatttgtaaaagtaggttccgggaggtaagaagggcaacttttacatgcctgttataggagctagcataaagtagagttctatggtgagaagagattatttagtgctgccattccagcaataactgagaggtagattttaaaatggcacaaataatacacatttgtttggtgatggggaaataagttcatggaaggctatgagttgtttatgaatagactaggttcatgatattggacttcttaccagtttggccctagttttgttgcagaacagattataactgggatcagagtattt

SEQ ID NO: 4463 - DNA, 717 bp, Homo sapiens
tttttttttttgacagtttctccactttattagcctggagctcctccctgccagccccaggggttcagctggtccctgggcacagtgagcagggctgaggtcagacgggttcggcccttggcatggcagcttggttgggacagccgggccaagggaaaaaaaggtgcaaaagtccaaatgctggcacttcaggtgtggccggcacccagccaggcgcagtgggtgggcagggcgccatgcttctctcctggcgacaggtcggccgtgtagcagcgccccctcccagcagccactaggaacagctggtgattctcgccaggaactgctgcgcccaccactcgtctaggtcaatgggcacaaagttctgcagccggggattgggggtcctctccacgtactgcacaggccttggcctgccctcaccggctgggccaccatccagctgctgttgcacctgctgccaggcttcggacacaaagcggacattctcctcgtgggccactgtgtaggtctcctgggtcccctcgaaggatggggacgtggagggggcccgccggccattcacacgattgaacacaagccttggccctggactacagccggaggtgggagccgggagtcctgggctgcgcctgctccgccaggcactcgcggtcccggccggcctgttgccttcctgggctcaggtgccccagcgccgctctcggttcctcctcc

SEQ ID NO: 4464 - DNA, 126 bp, Homo sapiens
taagtggccacggcgaagcatcactgtgatcagtcagaaaggtaaataaaaatcaaagagcgttcgaggcagccgcattgactcaccttgcagacaagcaagcagagccgcagagcaggtgacccg

SEQ ID NO: 4465 - DNA, 989 bp, Homo sapiens
atcatggccaagtggaacagggcaagctcctgtaaactgtcagaacttttatcactggacctacaaggtcctgttagtaatagccccactgaagttcagaagcacaacctatcatatctgttttataactggagcattacgaaaaggacacttaccgtttggctaatctggttcactggaagtttgggattctactcgttttccttgaattctgttaacttaggaggcaatgaatacttaaacctcttcctcctgggtgtagtggaaattcccgcctacaccttcgtgtgcatcgccatggacaaggtcgggaggagaacagtcctgggcctactctcttttctgccagtgcactggcctgtggtgtcgttatggtgatcccccagaaacattatattttgggtgtggtgacagctatggttggaaaatttgccatcggggcagcatttggcctcatttatctttatacagctgagctgtatccaaccattgtaagatcgctggctgtgggaagcggcagcatggtgtgtcgcctggccagcatcctggcgccgttctctgtggacctcagcagcctttggatcttcttcccacagtggtttgttgggactatggccctcctgagtggagtgttaacactaaagcttccagaaacccttgggaaacggctagcaactaacttgggaggaggctgcaaaactggagtcagagaatgaaagcaagtcaagcaaattacttctcacaactaataatagtgggctggaaaaaacggaagcgattacccccagggattctggtcttggtgaataaatgtgccatgcctgctgtctagcacctgaaatattatttaccctaatgcctttgtattagaggaatcttattctcatctcccatatgttgtttgtatgtctttttaataaattttgtaagaaaattttaaagcaaatatgttataaaagaaataaaaactaagatgaaaaaaaaaaatt

SEQ ID NO: 4466 - DNA, 3886 bp, Homo sapiens
  misc_feature (1)...(3886): n = a,t,c or g
cgggggacgtcagcgctgccagcgtggaaggagctgcggggcgcgggaggaggaagtagagcccgggaccgccaggccaccaccggccgcctcagccatggacgcgtccctggagaagatagcagaccccacgttagctgaaatgggaaaaaacttgaaggaggcagtgaagatgctggaggacagtcagagaagaacagaagaggaaaatggaaagaagctcatatccggagatattccaggcccactccagggcagtgggcaagatatggtgagcatcctccagttagttcagaatctcatgcatggagatgaagatgaggagccccagagccccagaatccaaaatattggagaacaaggtcatatggctttgttgggacatagtctgggagcttatatttcaactctggacaaagagaagctgagaaaacttacaactaggatactttcagataccaccttatggctatgcagaattttcagatatgaaaatgggtgtgcttatttccacgaagaggaaagagaaggacttgcaaagatatgtaggcttgccattcattctcgatatgaagacttcgtagtggatggcttcaatgtgttatataacaagaagcctgtcatatatcttagtgctgctgctagacctggcctgggccaatacctttgtaatcagctcggcttgcccttcccctgcttgtgccgtgtaccctgtaacactgtgtttggatcccagcatcagatggatgttgccttcctggagaaactgattaaagatgatatagagcgaggaagactgcccctgttgcttgtcgcaaatgcaggaacggcagcagtaggacacacagacaagattgggagattgaaagaactctgtgagcagtatggcatatggcttcatgtggagggtgtgaatctggcaacattggctctgggttatgtctcctcatcagtgctggctgcagccaaatgtgatagcatgacgatgactcctggcccgtggctgggtttgccagctgttcctgcggtgacactgtataaacacgatgaccctgccttgactttagttgctggtcttacatcaaataagcccacagacaaactccgtgccctgcctctgtggttatctttacaatacttgggacttgatgggtttgtggagaggatcaagcatgcctgtcaactgagtcaacggttgcaggaaagtttgaagaaagtgaattacatcaaaatcttggtggaagatgagctcagctccccagtggtggtgttcagatttttccaggaattaccaggctcagatccggtgtttaaagccgtcccagtgcccaacatgacaccttcaggagtcggccgggagaggcactcgtgtgacgcgctgaatcgctggctgggagaacagctgaagcagctggtgcctgcaagcggcctcacagtcatggatctggaagctgagggcacgtgtttgcggttcagccctttgatgaccgcagcagttttaggaactcggggagaggatgtggatcagctcgtagcctgcatagaaagcaaactgccagtgctgtgctgtacgctccagttgcgtgaagagttcaagcaggaagtggaagcaacagcaggtctcctatatgttgatgaccctaactggtctggaataggggttgtcaggtatgaacatgctaatgatgataagagcagtttgaaatcagatcccgaaggggaaaacatccatgctggactcctgaagaagttaaatgaactggaatctgacctaacctttaaaataggncctgagtataagagcatgaagagctgcctttatgtcggcatggcgagcgacaacgtcgatgctgctgagctcgtggagaccattgcggccacagcccgggagatagaggagaactcgaggcttctggaaaacatgacagaagtggttcggaaaggcattcaggaagctcaagtggagctgcagaaggcaagtgaagaacggcttctggaagagggggtgttgcggcagatccctgtagtgggctccgtgctgaattggttttctccggtccaggctttacagaagggaagaacttttaacttgacagcaggctctctggagtccacagaacccatatatgtctacaaagcacaaggtgcaggagtcacgctgcctccaacgccctcgggcagttcgcaccaagcagaggcttccaggccagaagccttttaaaaggtccctgcgaggttcagatgctttgagtgagaccagctcagtcagtcacattgaagacttagaaaaggtggagcgcctatccagtgggccggagcagatcaccctcgaggccagcagcactgagggacacccaggggctcccagccctcagcacaccgaccagaccgaggccttccagaaaggggtcccacacccagaagatgaccactcacaggtagaaggaccggagagcttaagatgagactcattgtgtggtttgagactgtactgagtattgtttcagggaagatgaagttctattggaaatgtgaactgtgccacatactaatataaattactgttgtttgtgcttcactgggattttggcacaaatatgtgcctgaaaggtaggctttctaggaggggagtcagcttgtctaacttcatgtacatgtagaaccacatgtttgctgtcctactacgacttttccctaagttaccataaacacattttattcacaaaaaacacttcgaatttcaagtgtctaccagtagcacccttgctctttctaaacataagcctaagtatatgaggttgcccgtggcaactttttggtaaaacagcttttcattagcactctccaggttctctgcaacacttcacagaggcgagactggctgtatcctttgctgtcggtctttagtacgatcaagttgcaatatacagtggggactgctagacttgaaggagagcagtgattgtgggattgtaaataagagcatcagaagccctccccaggctactggctcttcgtggagacttagtaaggactgtgtctacttgagctgtgggcaaggctgctgtctgggactgtcctctgccacaaggccatttctcccattatataccgtttgtaaagagaaactgtaaagtctcctcctgaccatatatttttaaatactggcaaagcttttaaaattggcacacaagtacagactgtgctcatttctgtttagtatctgaaaacctgatagatgctacccttaagagcttgctcttccgtgtgctacgtagcacccacctggttaaaatctgaaaacaagtacccctttgacctgtctcccactgaagcttctactgccctggcagctcgcctgggcccaactcagaaacaggagccagcagagcactctctcacgctgatccagccgggcaccctgcttaagtcagtagaagctcgctgggcactgcccgttcctacttttccgaagtactgcgtcactttgtcgtaagtaatggcccctgtgccttcttaatccagcagtcaagcttttgggagacctgaaaatgggaaaattcacactgggtttctggactgtagtattgggaagccttagttatagtatattaagcctataattatactctgatttgatgggatttttgacatttacacttgtcaaaatgcagggggttttttttggtgcagatgattaaacagtcttccctatttggtgcaatgaagtatagcagataaaatgggggaggggtaaattatcaccttcaagaaaattacatgtttttatatatatttggaattgttaaattggttttgctgaaacatttcacccttgagatattatttgaatgttggtttcaataaaggttcttgaaattgtaaa

SEQ ID NO: 4467 - DNA, 451 bp, Homo sapiens
  misc_feature (1)...(451): n = a,t,c or g
ggaacttccaaactgttctctttcagccatatgaagtgaaaaccatgctctgtaagtgctcacctgacttttagttcctgtgaaactgctgcttttgtgtggatagttgccaatcttagtcttcctgcggggggagtgggtatgatcggtggtgttctctattccaccatcttgctccacccatcctaaaaatgttttcttaggaaactcataacataatgaacaacgtaggttgataaagtatataaaaagataaactgtacaaacattaatcagcaacagagtgacactattaatatcaaatacagtagactccagagcaaagaaaattattagacaaaaggaacattatataatgataaaaggatcaatccaacaaaaatgcaatgatcgtaaatgtgtctcnagcaaacctcaaagtacacaaaccaaactgattgantgaaaagag

SEQ ID NO: 4468 - DNA, 1484 bp, Homo sapiens
  misc_feature (1)...(1484): n = a,t,c or g
tgccccggccacttggagttcaagttcgagcctgaggactttgccttcccctccacggccccgagcccccaggtggcctcaggggggctctgcgccaagaggcctggtgtgcgctggccttggctaggtccccaggccagcccatgtcaggggaacagcctggaacagaccacccactgagtcacctccgtgcctgctttgctccagcacagcagagaccagcaggccccccaacccagagactgggtctgctggagtctccacacagtgtggggaggccttctggacagacggcanggngccccagagcaagaaggctggtgagggaagggncagcttcccaccccacgtacagcaagggactcccaggtgcggcccaaggctccggaccacactggccccctgcggcggaggccaacgcagggcaccaccaccaccaacttgaattccgtcatcaatgctcaccgtcaatatgtttacaagttgttagcagttgggggaaaacagtcaacctccccagtgtaaaaccaagattcccagtgaagcacctgaggccaagcaggggagaggaatgaggggagcagctggacatgggcctcctgaggcctcggggctgtccttcattgcccacatggatagacggagctgtggtgcagagaacttttcccgcaacaggtgcaggactgccagggatcggagtgcgggccgcgcacggtgccaggattccgccgaggggaagccgctcacattgcagtcatcacagacttacgcacttgtttggacagtttttccagaggggatgggaaagggccttgttctagctgaatctgtgtatcatgaccatttctgacaggcagaatgaattgtctggtagccctgtcctgacccatccaagcgctgttggggctggtggtgacgtggtcacatgtcctggcatatctggggccacgcagtttagtctcttgtcccaggagaattgttagtgacccctctttctcttgcaagccccctccacactgggttggatgataccttaatgagtgacgctggcgagaggcaccctacccgacgcagctgtgaatggccggtgatgtatgtcaggaggccacagggagcggaggagcggggcaggcagccacagggccctgcggggagcacatcctcgcctccgtccggctgctgcccttcaacaacaagccctgatttttccagcaatgccagaaacctggattttaagtcttccaatttgattcaaaaatatttttaacattgtgagccagctagacccccagtgcaccaccccatattgaaaaacagttgtctggcatcagcttcaggagcggtccggtcattctgaaactgtccctccagaggttcttccagccccacttctatgcgatgtcatcttttctaaaagagacaaatgaagccacagggaaagtgaaataaagccttgaacctcaaaaaaaaaaaaaaaaaaaaaa

SEQ ID NO: 4469 - DNA, 475 bp, Homo sapiens
tccttgtcttatcattacaatctactatacagcttctagggtcgtcaggaactgaaacgctatcttcttctgtgtgaaatggttctaaagctgctttaataatggcccaatcattccatactataagtggaatgatattacccttcctacctgcttgttttagttccttaccaattcttttccagtcttttagatctaaagttccttgttctggaaaccatgggcaaaattgttctattatttgaaatagcttgattagatttttttgtagatactttaactccccctctttttaaaagaattttaataaagctgagataagaggcatatttacttttaattttacttttagtttgccccattattaccctagcttcttccgagctcacaagcttaccgtacggctgactgtatatgtactcgggatctctcgtcgacttgtgctcaatgaccacgccgagccctatgcagtctc

SEQ ID NO: 4470 - DNA, 324 bp, Homo sapiens
gatttaatgagagcatcttatccttgcatgtctcttcatggaggcattgatcaatatgacagagatagcatcataaatgactttaagaatgggacctgcaaacttcttgtggctacctctgttgctgcccgaggtctagatgtgaaacatctgattcttgtagtaaattatagctgccccaaccattatgaggattatgtacacagagcagggcggactggaagagcaggaaacaagggttatgcttatacttttatcacagaggatcaagcttcgctatgctggtgacataatttaaagctccttgaattgtccaggggctgc

SEQ ID NO: 4471 - DNA, 439 bp, Homo sapiens
gaaccttcttgtggaagtcacctctgatcttttccttgcataatatgatgatctgttctctagtctcttcttactcagtgtatcagcagcaatttggacagagttcccctcctttctgaaagcacttcctgtgtttggcttttggacacctactacactggttctccatctgcctctccttctccatctcctttacgagttcctcctcaagttctcaatacatattcagcagaatgtcccagatctcaaccttcgaacctctcctcaccatctgtagtcagtgccaggtgatcttaccaagtggaatgactttaagcactgaattccaaaattgtgtcttcagcccacatcatttttcctcaactccacagactactcataggttgccttacaggttaacatgttcaaaacacagcttctgatctcaccccacactgcc

SEQ ID NO: 4472 - DNA, 1757 bp, Homo sapiens
gaagctgctcagtgctgaggagcgcatcagccagacggtagagattctaaaacacacggtggacattgaggagaagggagtcaagctgaagctcaccatcgtggacacgccgggattcggggacgctgtcaacaacaccgagtgctggaagcccatcaccgactatgtggaccagcagtttgagcagtacttccgtgatgagagcggcctcaaccgaaagaacatccaagacaaccgagtgcactgctgcctatacttcatctcccccttcgggcatgggctgcggccagtggatgtgggtttcatgaaggcattgcatgagaaggtcaacatcgtgcctctcatcgccaaagctgactgtcttgtccccagtgagatccgggaagctgaaggagcggatccggggaggagatttgacaagtttgggatccatgtataccagttccctgagtgtgactcggacgaggatgaggacttcaagcagcaggaccgggaactgaaggagagcgcgcccttcgccgttataggcagcaacacggtggtggaggccaaggggcagcgggtccggggccgactgtacccctgggggatcgtggaggtggagaaccaggcgcattgcgacttcgtgaagctgcgcaacatgctcatccgcacgcatatgcacgacctcaaggacgtgacgtgcgacgtgcactacgagaactaccgcgcgcactgcatccagcagatgaccagcaaactgacccagggacagccgcatggagagccccatcccgatcctgccgctgcccaccccggacgccgagactgagaagcttattcaggatgaaggatgaggaactgagggcgcatgcaggagatgctgcagaggatgaagcagcagatgcaggaccagtgacgctcgccgcggacacaccgtccgtctccgggacgccctcgcacccctgggacaccagaccggactgttcccgacccggagacgcggggccacagcccccagctgaccctaatttattctcagcaccaccccctcccaggtcattgtgtctgtttccgaggggcctggaccgtagcccccgcccagctggccctctctgaccttgggggatcaggagcgaagttgggcgggacttcagagatccgcctcccttgcccttcccccgcccccggacggtcacagcacccaaaccgcaggccctgctctggcaggcaggcaaagctaggcagaagaggattcccaggatcctgggtctgttccctgccccagtgctgcagaacggacttgggagccctcctttgcctgctcccgcgggtcacccagcgagtgctgagaccccattttctgtcgaggcgggccgagtcttcccttatccccagacgcctagcgggcagggttgggctgaatcaaatgggagccctccagacataaggaggccagaggctgcaaggagcggggtcgtgaccgcttacaccccttctccacagcccggcccgacctggagggcccccggggcactgggcggtgagccacctcctggcaactctcggtgccgtcccctgccctcgctcgaggcctcttctccccagcaccgctgtggtgtgccgggatcctgagcctaggcctcccgatgttcccacccgcatgatcccttcccgccacacgatgctccgttttcttccgttgtgaatgccgcgtcctgtcctggtgacaggagaacaatgttggtgaacgtccaaaaaaaaaaaaaaaaaaatcc

SEQ ID NO: 4473 - DNA, 377 bp, Homo sapiens
gaaatcagaaaagacaaattaactacaaagaagactcagaaagtgacggttcccataagagtttgcgacgtggtaaagaaataaggcgagtacacaagcgaagactttccagctcagagagtgaagagagctatttgtccaagaactctgaagatgatgagctagctaaagaatcaaagcggtcagttcgaaagcggggccgaagcacagacgagtattcagaagcagatgaggaggaggaggaagaggaaggcaaaccatcccgcaaacggctacaccggattttagacggatgaggaggagagtttttgacattgctcattggagatgcaaatcagcctgcccgtgacagccagcctagggtccttgcccttcag

SEQ ID NO: 4474 - DNA, 317 bp, Homo sapiens
gacttcatcatgtgcttcagaagaaagagagcatgggcatgtgtttcatcgggaagaggaattttgaacatttccttcttcagtatctgcagcctcgacctggtcactttatttccatagaagacaataaggttctgggaacacataaaggttggttcctgtataccttgggccagagagcaaacataggtggcctgagagagccctgggtacgtggtgggagaaggacagcgtcaagggtgacgtgtttgtgggccccccggacagaccacccagccctgttacaggggaccttgcttgagggacccagccgcttg

SEQ ID NO: 4475 - DNA, 530 bp, Homo sapiens
  misc_feature (1)...(530): n = a,t,c or g
gggacaaaaatgtcaccaatcttccacaaagcgggtaccaaggctcagagaccttcagggagaatttgaacttggtggcccgcaagggngccttgctgtgtttgcactttgctgccacagctggcaaatcagcctgatctggctaagctttttgggcctaggcaattctcaggtccagcctttataactgtgactggactgtgtggggcttttggccccttaaactgagctttactctagtaaggctgggagaccctcaaggagggcattacagagcccagaattaacacacacagggcaggctaatctaggcaaagagagtactttatctggggatttggcagaggctccctgggtgggtccagtnaccttgtttagccacttgggtgctttgcgtgggccacatccctttgggttgannnttccnttgcttaaaanggtcnattangncctccncngtnggtttnnctncncctcanggganagtcnccncagcnnttgcggaangnnnnnctgccctcagggnagcg

SEQ ID NO: 4476 - DNA, 97 bp, Homo sapiens
gcctatgcatacacgagtttgagaaccactgctccagtggacgccccctcaacccccttataacattataaatgtaatgggccaggtgcggtggctt

SEQ ID NO: 4477 - DNA, 2822 bp, Homo sapiens
cttattcatacatcagatcagattcaagtatcagactgggaatttcacaatccatatgtggggatattgtgggaatgaggccagcagaagaagtgtattattctacatacttactgattgctactgacccaaccaactaaatgagaaaagtttaatttataaagaaacatacatgttaaaatcagctcgttattaacatatctcctcaattctacaacacagtaagtcctcccttgtcggtaaattgaaaccaagaaaacttgtttttagaatatttcgtctgaataagtacagtagccaaggaatacaaacataattgcatgtttttaaaaattccttggaggctggaaggggttaagccagaagtgcaatcaataggaattagggaatgttgtatatttatatatgtaaactttttttgtaagaaaagttggtgacaactaaaccaactttttccaaagtgcgctatgcatatttttaatgaaagatgacatgtatttgcacaaaaattctcaggcacattaaattattgtaaactgaagtaaaacccgggtgcttgctttgagattgtggttttttcttcctaatgtaaaataaaataaaacacatctgccttcttgatatttatagaattagagaataaactttttaatgggggagtcaaagctttttctttttctctaaggttctttttttttattcaaactgtatgaaatggcaaagtgaggctctggggttagatttcagcattcagcagttgacacaggctaagaaatggaaagaagtagatctgttttttctcaatgttgctgagcaaagtctgcttctcatcagatgacgtggctttgtctagacagcacgcagttcagaaagaaatgtctttatacaaaagacatgatagagaaaagatgagagaggggactaattattttgtttatgaaaatggcaagtaaattacttgatctttttggtgcttaatttgcaaatgttttgttcctttgtcctgacttaaaggcagttttctgaagaactcttgactcttgctcctatggttcccataggcacacctattcccaggccaaggagagtccttcctctccccttttgaggcatccccgccatccccccacttagagctatgtgctcaaaaagccaacatgaatgcagtggtaaaaatttgttagtttcttatactttttagaatctctcaataaaatttttctaaataaattccacaaaaacaaagggtgaagatggtctctccctttcggttccccttcactcagttgtgctgaggtcaatagagtgtagagtttcagaaaggattccagcaggtttatatgtgaatataagtgtccctgaatggggcaggcattaaatagaagaatccctgctgtttaaatttcccgcatattccaattcacttttaaaaaataccatttgaatttgtatttcataaagtgactctggggtgcttactttagtcaattcttaaaattttttatttgttccctaagaaagtaattactgtttctgttgcctggacagttacagtttccaggaaacatcaggaagtaggaaactgtagggccagagagtagtacaacgttaaattgtcccgatttatgtgtattacttaaagctataaattgaactagatcttgccgtgctctgtattgagtataatttgtatacttttttataattaatgactaaatgatcactttggaggcagggtggtgggggtgtattagcagccaaataagcacatctgatcaaaaagaaccaggcttagattttttttaagtacattgatgttgatggttccaccagaaacaccttaagtgtatactgttgtgtaatgtctctagaaaggaatcctgtcttaaaactgggttttgctgttttttgaagtttctacctaaaatcatttttggtatatcctgataatctctataatactagaattgtctgcaaaatatagtaagaagaattggagcctaatagctgattcctcccaatttatctgttatgttttgtcactattcacattttagtcttttctacgataaaaattgtatgtgtactttcatgccagtataggaaacctcaatctttttttttttttcgcctttaagaaggttttcagtgattatacctcaggtatttctgagtgtcctattgtctaataggagaaatatcttcccggagctcaggaattaaaagttctcctaaattatgaagatcccaaatcttatgtaaataaccttaggcatgagtccttagggagaagttaatgaccattgttaaagtgcttttttagaaaatgttgtgctgtatgttcttgatttgacataaatgaatagactttggcaagggaggaaataagttaaaaggcagcttacaagagcctattccctataaagggtataattttacacagtactcaaagcttgttatcttttctgaccattttagtacagaattagtacttggtggttactaacatcaacttgtgacatctagaactagggctcttagtgtttagtgggccacttctctgatgtcagatgcatgcagacctgtactccacatgcaacccaacagcagtgcagtgtgataactgagcggtcgcatggcagaggacatccccctcagaggtggggcacaagtgccctctagggcagccaggggaatactattgttcgatacctgggatttgactttgtcaaacagctctttgtgcccctatctttgttttgtcaaatgtagatcagttaataaacatgagtagcttgaattttcaaaaaaaaaaaaaaaaa

SEQ ID NO: 4478 - DNA, 313 bp, Homo sapiens
tggtggaacaaggccactcgccaaggtacaaggagcctctagaaagctgaacaggatgtcagctgacaatcaacaagaaaacaaggacctcacccttaagaccaccacgtggatctgaattctgtgaacaacttgcaagaatttgggagcaaattcatttccagaacctccagcaaaggaatccagccctggtgacaccttgatattggccttgagagactctaagcagagaaccagctgagccactctgcacctaaacttctaactcagaacattgtaaaccaatacatttgtgttgttttaagccactaaa

SEQ ID NO: 4479 - DNA, 673 bp, Homo sapiens
ctgatgatgagagtaatgttgcagttaccagacccgattcagaaagttcctgtgtgctgagtgaactacatcctttggtgttaccgcgagtgccacagtctaaggtgctgtacattacctcaaatccgatgagtctctgtcaagcaagcagacatcagccaaatgtgaatgatctcttggttcatggaatgcctctacagccaagaaatctctccctaatggacaagctcctagatcttgatgacaagctacttatgaggcctgggtccagtaccatcctttcaactcgaaattggccaaatcgagctgtggagtttagtacatcatctctgtcatacacagtgcagtccaccaggagacgcaatccaccaccacgaactcttcatccgatcagcacgagccattcatgtgctgaaacaccaagatctgtggaagaaatcctcagaggagcccgagtgtaggtttcaaaagcagaacttctggaaaccgtgcccagtggcacccgactcgctctcctctccctcaccgacgcccctgagtcgaaataatctgctaccacctattggcacagctgaagtggaacatgtgagcactgtggggccacaaagacagatgaaaccccatggcgactctagtcgagctcaaagtgcggtggtggatgaacctaactatc

SEQ ID NO: 4480 - DNA, 1311 bp, Homo sapiens
ttttttagaatttgaacaaaatgtatttataacactttttattgttggaaactcaacttttattctgggttaagcctctagataaaatcttaagtctgccaaactattattccccccaccttttctttccccaactatcaagaccattctaggaagtacgtcactctaccaaaaatgattgagttgtgttgggcctggggaaaaagtcgggcaaaaggagcctttcttgtggctgctgatagttaggttcatccaccaccgcactttgagctcgactagagtcgccatggggtttcatctgtctttgtggccccacagtgctcacatgttccacttcaggctgtgccaataggtggtagcagattatttcgactcaggggcgtcggtgagggagaggagagcgagtcgggtgccactgggactcgggctcctctgaggatttcttccacagatcttggtgtttcagcacatgaatggctcgtgctgatcggatgaagagttcgtggtggtggattgcgtctcctggtggactgcactgtgtatgacagagatgatgtactaaactccacagctcgatttggccaatttcgagttgaaaggatggtactggacccaggcctcataagtagcttgtcatcaagatctctagtagccaaatcagaaacccacaatgaagtaaagatcagtatgtcaaggaagacaagactaacggggtaaaaagccttagactagaaactacatttagggggaaataaagcaaaaataaaaacctttcaataagtaacactagtttccagatggtactctagctcaggcatgagaatctgttcttaaaagtgggacattatttcaatcataaacataatttactagaatggacatttggcaaagcaagtccattatccacctgccatcacagtcacttttttagtcaccagtgaaggcaagcctgaaggacacctactccaaagtgcttcccaaaaatttgccacaggggctgattcctactctgtttgaggcattcttttgtgctgaaagattgtcaccagaaagacaactgaaagacaaatattgctgcttgggagcagttgtggcaccagtgtggctcccactgtagcaattaaagtgctgagcaagttggagctggcagggatttgggtttgggttctttggaaagctgggagtgggcaaagggtcttgtgctgcccagagccagagctgttgggaccacagtagccctatttgcataaataactgaaatacaacccttttctgtaagtcgtccaataaataaaataataccacacctaa

SEQ ID NO: 4481 - DNA, 510 bp, Homo sapiens
tttaatcccaaaagcagggactgtgagtgctttttattccatgcaaaagagagaagtgggtctctgaggagtatctggggctggctggctagagacgctagggaaaggtagacaaggcttcctgagtgtgtggtgctttcttgctgacttgccctatatacctaaagtccatggtagaaacctgaacctacagaacctccaccaaaagagaggagagcacgggattctcagagactggcttccacttgaacagggaaggccaattccctgtgggcctgtcaacatcaacttcagttctctcgcccttacaggaggcctctgactgtatcactattttagaaatattgctgccatgtaagcttctttcaaggtgaagcttggaagctattctccaagtccatcctcagcagctgaggccacaacagattaactgaagagaccccttggctttcttcctcttgacctttgacagctgaggtctctgcagagggcctgaagtacccgtggacc

SEQ ID NO: 4482 - DNA, 510 bp, Homo sapiens
  misc_feature (1)...(510): n = a,t,c or g
taggaaatgccatgcaaccaggaactactggacatgactcttccagctcatgatctaacccagaccctgcccctctttagctgtagttccccgtttcccactgctcgctggacagtgctacttggctatctctgtgtcttcttaaattccatgtggtnnnnnnnnnnnnnnnnnnnnnnnnnnnnnnnnnnnnnnnnnnnnnnnnnnnnnnnnnnnnnnnnnnntgaggccaggagttcaggctgggcaagatggtcaggtccatctctattaaagaaatagataaataaaaaattccacatggcccaaatttgtcacagtcaaactgagctcacttttctgtttgatcttctctcatgttcttgtctggagaggtggcctcgctgtctgtccagtgacccatagcaaagataaggcagctccctggactctccattctttctcccatcccttgcaacaggtgggttgccagatcctgtaactgacccatcagatccagcagccactgtc

SEQ ID NO: 4483 - DNA, 899 bp, Homo sapiens
ctcgcaaccttacagcgggtcgcaggtgcccgttattcctagactgtcccaggagccaggaaagagggattcggatcatatttaaccctatcttctggctcgcagatgctgcttctctcatggtttatcaccggaatggaaaggaggaaacggggagtgggggaaagggcgaagccaccagaagcagctgcggcattttgctgactattcgcccatggagccggtttgccatccagtgatgccagagtcccggcgcgacagaaagcaggactcccaagatcttcctcctgctgcattttaggcactgaaccccaatcccgaccgtatgttaacactgaattctgagtaggagttttgttttggcagtgtgacgactgcgcatgctcggaaaggggacgcaagtccgagatcccaaacgcggtacagaccaaaccgcagtccacgttacggatcggcttactccgcggagttggcctcatttctgcagtcggcgctccctgtagtttctcctctcgaacgccaggtggagcaaccggccggataccgccacagccctggcaggcggcgctgtgatgcctgagctgatcctgtatgttgcaatcactctatccgtggctgagcgactcgttggcccgggtcacgcatgcgctgagccttcctttcgctcttcccgctgctccgcccctctctgtcttctctgcagtgggagcagctctcctgccacagctcctcaccccctgaaaatgttcgcctgctccaagtttgtctccactccctccttgggtcaagaggcacctcacaggtggtggagccgtccgctatctgcagtggtgctgaaacgaccggagatactgacagatgagagcctcagcagcttggcagtctcatggtccccttac

SEQ ID NO: 4484 - DNA, 34 bp, Homo sapiens
gcatctcggcacctctgatctcaaaagtcagttc

SEQ ID NO: 4485 - DNA, 310 bp, Homo sapiens
  misc_feature (1)...(310): n = a,t,c or g
acggggacccaggaagtgggcggtcaggaccctggggaggcagtgcagccctgccgncaacccctgggagccagggtggccgacaaggtgaggaagcggaggaaggtggatgagggtgctgtggacagtgctacggtggccagtggtggtgcccagaccttggcccttgccgggtcccctgccccatcgcncggccaaggctggacacagtgagaacggggttgaggaggacacagaangtcaaacggggcccaaagaaggtacccntggggagcccatcagagancccangccccagccnggcagggac

SEQ ID NO: 4486 - DNA, 10716 bp, Homo sapiens
agggggcggcgctcccggccatcccttagccccgcggcggccgtgtgggccggaggctgcctgcaccgcgtcagggaggccggcctagaaaccctccctcccagaagaaagccgatcccagttcaggtggggtcttcctcggttgcgtacctggctggagccgagctggtgggcggccggcagccggcgtttctggtgatgacagccccgaaatgaaagcagcgcggccgccgcctccgagggctgcagggagatcagcgtccagcaaataagaagcaagtcctggacccggaggaggaggagcggccgagcatctctctctgctccgccgtgtcctttagatgagcactcccggccggagccggaggtggatccgcagagctgcctctgggcgcctgaccccgcgctgacatcacaacctgtgacaggcgcatcacgcccggtacctgctcccggccgctgtccgtcctcccagcctctttgtatgccgcagacatggccagccagcaggattcgggcttctttgagatcagtatcaaatatttactgaaatcctggagtaatacttctcccgttggcaacggttacatcaagcctccggttccacctgcttctggcacgcacagggagaaagggccgccaaccatgctacccatcaatgtggacccagacagtaaaccaggagaatatgtcctcaaaagtttatttgtcaacttcaccactcaggctgaacgcaagattcgtatcattatggcagagcccctggaaaagccattgacaaaatctctgcaacgtggagaagagccccaatttgatcaggtcatcagctcaatgagctccctttctgagtactgcctgccttccattctacgtacattatttgactggtataaaaggcaaaatggcattgaggatgaatcacatgaatacagaccaagaacaagcaataaatcaaaaagcgatgaacaacagcgagattatttaatggaaagacgggacctcgccattgattttattttttctttagtattaatagaagttttgaaacagattccacttcatcctgtaatagacagtttaatacatgatgttattaacttggctttcaagcactttaaatacaaagaagggtaccttggtcccaacactggcaatatgcatattgtggcagacctgtatgcagaagtcattggagtgttggcacaagccaaattccctgctgtaaagaagaaatttatggcggagctaaaagaattacggcacaaagagcagaacccatatgtggttcaaagcattatcagcttaataatgggcatgaaattctttcgaattaagatgtatccagtggaggattttgaggcctctcttcagtttatgcaggaatgtgcacattacttcctcgaggtcaaagacaaagatatcaagcatgccttggctgggctttttgttgaaatacttgttccagttgctgctgctgttaaaaatgaagtaaatgttccctgccttagaaattttgtggaaagcctgtatgacaccacgctggaactttcttctcgaaagaagcattccctggccttgttccccctggtgacctgtttgctctgtgtcagtcagaagcagctgttcctgaacaggtggcacattttcctcaacaactgcttgtccaaccttaaaaacaaagatcccaagatggctcgagttgcactggaatctctctacagattactttgggtttacatgattcgaattaaatgtgaaagcaacacagctactcagagccgacttataaccatcatcacaacacttttccccaaagggtcccgcggtgtggtaccaagggacatgcctctgaacatctttgtgaaaatcatccagttcattgcccaggaacgtttagattttgcaatgaaagaaatcattttcgattttctttgtgtgggaaaaccagcaaaagcattcagtctcaacccagagagaatgaacattggtttacgggcattcttggtcatagctgatagcttgcagcagaaagatggggaacctcccatgccggttacaggagccgttcttccttcaggaaacacgttaagagtaaagaaaacatatttgagtaaaacactaactgaagaggaagccaaaatgataggcatgtccttatattactctcaagtacgaaaagctgtagacaacattttaaggcaccttgataaagaagtaggaaggtgtatgatgctgactaatgtacagatgttaaacaaagaaccggaagacatgatcacgggtgagagaaagccaaaaatagatcttttcaggacctgtgttgctgctattcctcgactgcttcctgatgggatgtcaaaacttgaacttattgacttactggctaggctctctattcatatggatgatgaattgcgacatattgcacaaaattctcttcagggtttacttgttgacttctcagattggagggaagatgtactattcggctttaccaacttcctgctccgggaagtaaatgatgtgcatcacacactccttgattcgtccctgaagttgctgctgcagctgctcacccagtggaaactagtcatccagacacaaggaaaagtctatgaacaagccaacaaaatcagaaattcagagctcatcgcaaatggctccagccacagaattcagccggaacgaggtccccactgcagtgtactccacgctgtagaaggttttgctctggtttcactctgtagtttccaggtggccacacgcaaactgtccgtcttaatactcaaggaaattcgagcgttgtttattgccctggggcagcctgaggatgacgacaggccgatgattgatgtcatggatcagctaagttcttccattctagaaagttttattcatgtagcagtttcggattcagcaacattaccactcacccacaatgtggatctgcagtggttggtggaatggaacgcagtcctggtcaatagccattatgatgtgaaaagcccttcccatgtctggatatttgcacagtctgtcaaagacccctgggtcctctgcctcttcagcttcctccggcaggagaacttacccaagcactgtcccacagccctcagctatgcctggccttatgccttcactcggctccagtcggtgatgcctctggtggacccaaatagcccaattaatgccaagaaaaccagcactgccggcagcggagacaactatgttactttgtggagaaattacctaattctttgttttggagttgcaaaacccagtattatgagcccaggacacttaagagcttccactccagaaataatggcgaccacacctgatggtacagtgagctacgataacaaggccataggcaccccatcggtgggagttctgttaaagcagttggtgcctttgatgagactagagagcattgagatcacagagtccttagttttaggatttggaagaacaaattcccttgttttcagagaattggtagaagaacttcatccattaatgaaagaagctctggaaagaagaccagagaacaagaaacgccgagaacggcgagacttgttaaggctacaactacttcgaatttttgaacttttggctgatgctggtgtaataagtgacagcacaaatggagccctagagcgggatactttagccctgggagctttgttcttagaatatgtggacttgacccgcatgctcctagaagctgaaaatgacaaagaagttgaaattcttaaagatatccgggcacattttagtgcaatggtggccaacttgattcagtgtgttccagttcaccaccgaagatttctcttcccccagcaaagtctgaggcaccaccttttcatcttattcagccagtgggcaggacccttcagcattatgttcactcctctggatcgttacagtgacagaaatcatcagattacaagatatcagtattgtgcattagaagcaatgtcagcagtactgtgctgtggccctgtctttgacaatgtgggcctttccccagatggctacctatataaatggcttgacaacattctggcttgtcaagatttacgagttcatcaacttggctgcgaagttgttgtcttgctactggaacttaatcctgaccaaataaatctttttaactgggcaattgaccgatgctacacaggttcctaccaacttgcatctggctgcttcaaagccatagcaactgtgtgtggaagcaggaactatcccttcgacatagtgacattgttaaaccttgttctattcaagacctctgacaccaacagagagatttatgtaatctccatgcagctcatacagatccttgaagcacagctttttgtatactcagagaaagtctctgagcaaagaccgggaagtattctctatggaacacacgagccgctgccacccctctacagcgtgtcacttgccctcttgtcatgtgagctggccaggatgtaccctgagctcacactccccctcttctcagaggtaaaccagcgattcgccacaacacaccccaacgggcgccagatcatgcttacctacctgctgccctggctgcacaacatcgagctggtggacagcagactcctcctcccggggtcgagccccagcagcccagaggacgaagtcaaggaccgggaaggtgacgtgactgcttctcacgggctgagaggaaatggctggggctctccagaagccacgtcactggtcctgaacaacctcatgtacatgacggccaagtatggagatgaagttcctgggacagaaatggaaaatgcttggaatgctttagccaacaatgagaaatggagcaacaacctgaggatcaccttgcagttcctgattagcctctgtggggtcagcagcgacacagttctcctaccctatattaaaaaagtggcaatatacttgtgccgtaacaacaccattcaaaccatggaagagcttctctttgagctgcagcagacagagcccgtgaaccccatcgtccagcattgtgacaacccgcccttctaccgcttcacggccagtagcaaggcttccgcagcagcctcaggaaccacctctagcagcaatacagtggttgctggccaggaaaatttcccagatgctgaggagaacaagatattgaaagaatctgatgaaaggtttagtaatgtcatcagagcccacactcgcctcgagtcaagatacagcaatagctctggaggatcctacgatgaagataaaaatgatccaatttctccctacacgggctggttgctgactattacagagaccaagcagccgcagcccttaccgatgccttgtactggaggatgctgggcccccctggttgactatctcccggagaccatcactccccgggggccactccacaggtgcaatattgctgtaatttttatgactgaaatggtggtggatcacagtgtacgagaagactgggcgcttcatctaccattattacttcatgctgtcttcttaggtttagaccactaccggcctgaagtctttgaacacagcaaaaaactgcttcttcacctcttgattgccctctcttgcaacagcaatttccattccattgcttccgtgctcctgcagacccgagagatgggtgaagctaagactctaaccgtgcagccagcctaccaacctgaatatctctatacaggtggctttgacttcctgagagaggaccagtcatccccggtgcctgactcagggcttagttcaagctccacctcctctagcatcagtctgggaggcagcagtggaaacctcccacagatgacccaggaggtagaagatgtggacacagctgctgaaacagatgagaaggcaaacaagctcattgagtttctcacgaccagggcatttggtccactttggtgccatgaagacatcacacctaaaaatcaaaattcaaagagtgctgaacagctcactaattttctacgtcacgttgtatctgtatttaaagattccaaatcaggcttccatctggagcaccagttgagtgaagttgcattgcagacagccctcgcaagctcttcaaggcactatgctggtcggtccttccagatattccgggccctcaagcaacctctgtcagcacatgccttatctgaccttctctcaagattggtggaggtgataggagaacatggagatgagattcagggttatgtaatggaagcgctcctaaccttggaggcggctgtggataacttgtctgactgcttgaagaacagtgacctcctaactgtattgtcccgctcttcctcaccagatttaagctccagcagtaaactaacagcaagcagaaagagcacaggacaactaaacatgaacccgggaaccaccagcggcaacaccgcaactgccgaacggagccggcatcaacgaagcttctctgtgcccaagaagtttggtgtcatcgaccgatcctctgacccacctcgaagtgccacactggacagaattcaggcttgtacccaacaaggcctctcctcaaaaaccagaagctcatcctccttgaaggacagtctcacggacccatcccacataaaccatcccaccaacctgctggccaccatattctgggtcacagtggccttgatggagtctgattttgagtttgaatacttaatggccttaaggctgttgagcagactactggcacatatgccactcgataaggctgagaaccgagaaaagcttgagaaactccaggcacagctgaagtgggccgacttctccgggctgcagcagctgctgctgaaaggattcacatccctcaccaccacagacctgaccctgcagctcttcagtctgctgacaccagtgtccaaaatatccatggtggatgcatcccacgctattgggtttccactgaatgtcttgtgtctcctgcctcagctgattcagcattttgaaaatcccaatcagttctgtaaggatatagccgaaaggattgctcaggtttgtttagaagagaagaaccccaaactttcaaatcttgcacatgtcatgactctttataaaacgcacagctacacgagggactgtgccacgtgggtcaatgtggtctgtcgataccttcatgaagcatatgctgacattaccttgaatatggttacctacctggcagagctgctggagaagggcctccctagtgtgcagcagcccctgctccaggtgatctacagtcttctcagctacatggacctttctgtcgttcctgtcaaccagttcaatgtggaagttctgaagacaattgaaaaatatgtgcaaagtgttcactggagagaagctctgaatatcttgaagctggtagtttctcggtcagccagccttgttttaccttcataccagcacagtgacctctcaaaaatagaaatacatcgagtgtggactagtgcttccaaggaattacctgggaaaaccctggacttccacttcgatatttcggagactccaatcatcgggaggcggtatgatgagctgcagaattcttctgggcgtgatgggaagcccagggccatggccgtcacccggagcacatcttccacttcctcaggctccaactccaacgtccttgttccagtgagctggaaaaggccccagtattctcagaagagaacaaaagagaagttggtacatgtcctttctctgtgtggccaagaagtaggattgaccaaaaatccatcagtgattttttcatcgtgtggggatctggatctgcttgagcaccagacaagcttggtatcttctgaggacggtgcccgagagcaggagaacatggatgacacaaacagcgagcagcagtttagagtcttcagagacttcgacttcctagatgtggagctggaggatggagaggaacttcagggtgagagtatggacaatttcaactggggagtgcgcagacgttctctggacagcctggataagtgtgatatgcagattctggaggagcgccaactgtcaggaagcactcctagcctgaataaaatgcaccatgaggactccgatgaatcatccgaggaggaggacctcacagccagccagatcctggagcactcagacctaatcatgactctctccccctctgaagagacgaatcccatggagctgctcaccacagcctgtgactcgacccctgcagaacctcattcctttaacaccagaatgtccagctttgatgcttccttgcctgatatgaataatctgcagatttctgagggttcaaaggctgaagctgttcgtgaggaggaggacaccaccgtgcatgaggatgatctttctagttccatcaatgaactcccagcagcttttgaatgcagcgacagctttagccctggacatgactgagggggaagaaaaaggcaatcgggcactggaccagtttaccctggcgagctttggagaaggtgacaggggagtctctccccctccctcgcccttcttctcagccatccttgccgcctttcagcccgcagcctgtgacgatgccgaggaggcctggcgcagccacatcaaccagcttatgtgtgactcagatggctcctgtgctgtgtatacatttcatgtgttctcctccttgtttaagaatattcagaaaaggttctgcttcctaacctgtgatgcagccagttaccttggagataacctccggggaatcggatccaaatttgtcagctcttcccagatgctcacctcctgctctgaatgtcctacactttttgtggatgccgagactctcctttcatgtggacttctggacaagctcaagttcagtgtgttagaactgcaagaatatttggatacctacaacaacaggaaagaggccacactctcttggcttgcaaattgtaaggcaacatttgcagggggatcaagagatggagtaattacctgtcaaccaggggactccgaagaaaagcaaatggaatctcttgcacaattggaactgtgtcagagattatataagctacacttccagctgctattgctttttcagtcctactgtaagctcatcggccaggtgcacgaagttagctccatgccagagctgctgaatatgtccagggaactgagtgacctaaagaaacacctgaaggaagccagtgcagtcattgcagctgaccctctctattcagacggcgcgtggtccgagcccaccttcacgtccactgaagcagccatccagtccatgctggagtgcctgaagaacaacgaactcggcaaagctttgcggcagatcagggagtgcagaagtctgtggcccaatgacatctttggaagcagttctgatgatgaggtccagacactactgaatatttatttccgtcaccaaactctgggacagacgggtacttatgccctggtggggtctaaccagagcctgaccgagatctgcaccaagctgatggagctgaacatggagatccgggacatgatccgcagggcccagagttaccgagtcctcactacttttcttccagactccagtgtttctggcactagtctctgacaggagcctcctgtccccactgggttccaaactggcagtgctgccatgctggggcaacgtcattcagtgtcttctcggccttcaaaaggcttggacagactgttctccctcttgttacctgtagggctttttctaaagaggatggcagaacttccaacgtgtagcaatactataagaaccaaggtagcttagaacgtcctggacagactccactcatcatgctgtgtggcacaaatgtgttacatttgaccgagcatatgcaactcgctactgaagaagtgacttccgttgcataccaaagccgactacactgaacagtaccttcctttctagaaacaattttagattggcaaaagtgcaatgttttcttcactcaaaaaattttatattctcaaacatgtatattctttccctgtcttgttccattttcttttcttttttcttttttctttttcctttctttcgtgggctgagaaaggggcaggcaaaatgaagctggccactgaaaactgtaagatggtcaaaagctgacagcctgtgtatgtgaaaagggaattgtaaatggactgcaatgtaatgtacactgtaatttgaatacaattactgtatctaaaaggagctgctatgaagtacctttcttatgttgctaggctactgtttctgaaagccctggatctctttgcaccaaaaatggtccagatagactctttttaaggatcttggctgctttttactagaaggttgcttttatgagcatatttatactgctgaaggatgagtgttaattttaattaactttgccgttttgtagagaaaactattcacaagataaattccaagtcttttcacctgtcaggcatgccatattttaatatctgtttggatagtcagaagtagaatcataaaggtaaaatatgagttgttactttgtttcttcgatgtcatattttatgtgtaatatatatgtaaagggccattcttaagttctctccttaaacttaatgctgtcaagtgttagatgtgtgcatgtgaacttgttgcactgcagaaacatattcagagtttatctatgtaacttattcactctgtaaatacatttaaagtttttgtgatgtaagcttaattgatattctgttcagaactttctttag

SEQ ID NO: 4487 - DNA, 807 bp, Homo sapiens
  misc_feature (1)...(807): n = a,t,c or g
aagtcaggtatacttgagtccattccacaccttgcttcctaattgccacctgattttagagaagttttctaaccctctttgagctgctatacagtgaaaaaaaatccctcttgcaagattactatgaggattgatgatgatctgtgtagcatccctggcacttagtaggtgctccaagagcaggtgccattgccacacttcactccagaggaggcagcataactaggagagaagtatatggaccttggagctggccaaccttaggttcaaaggccagcctctgccacccaccagccgagtgacctcgagcaactcatccaatgagtttgagcctttctttccagtcagtcaaatagatagtagtacttacttcatgggattttgtgagaattaaaagataatgtatggacagagacctgcacagtgcctggtgatgattgggtatccaataaatagaattaatgatgcttatgatagcatttctgcgatgtcttgcaatttcctaagatgttcagtaccttccacccccgacagacaacagcaaaagcaatagtaacatagatccttccccagctgaaccgaagtgataccttcaggaatgtttcaaactgttttcagtctctctgaagctcctgatgcataaggcaaatacccacaggatggccatggaaggaatgggaataggagtcctggactgggctatnccttttctggacccttctggagtggacttaagattcctggcagaaattgtggacagnaaaaaggaaagtttccnttgggagatgggggcngggaaattggctt

SEQ ID NO: 4488 - DNA, 553 bp, Homo sapiens
  misc_feature (1)...(553): n = a,t,c or g
gtccgtgggggaagaggtttgttaatacgttcgccatgtgctacgatcttgggacgaactgagccacgagcgtggctttgagggccgtccgaacgctgcaggccggccaggtccctgggcgtccaggcctggcctacgcaccactttgtcccttagcgtttaaaggtttcttcccgaatctcaggccctcagctacctgcaggtaagactgggccgggcttgggttcccttattctcccagtctgtgatgaattgctttgacttctgacacctcgtatgaaaactgcacgtgcagtctgattatttagcaagactgaggcttgagggtgcgcactcctgacggggagctgagagtggaaacaggtgttgcccgaaacgaaggagtggggacttaatgtctgtattttggcgctgactttcaggtttcgtcgcgagccggctgcaagttttgaacctaagtaaacctcaatccggagggcctaacggnaaggngggcnctgtgctattgangggcttagcataagaaaggnagtgngttgaaaaaaaaaaaaaa

SEQ ID NO: 4489 - DNA, 246 bp, Homo sapiens
ggcatgttagagagtggtaagtaccacagagaaaaataaaatggagaaaagaaacacgaaaagttggggagagaggacaactgtttgagggggtggccaggggcagcttcatctcatcaagggggtgattttttttgagtacagacctgaaggtaacgagtgcacaagccacatgggtacctgagaacagcggcagaacaatggcagggtgctgggagggctatttaccacccatgctgtttagaa

SEQ ID NO: 4490 - DNA, 516 bp, Homo sapiens
gttttgtttttcgtggatgaggcttttaatccggggtcagccaggtacagcattggggacatccccaggcccagggctggcgatgtgctgggaaggaacttaggtagagaggtgggaagtgaaagcatagggaggccatagccctccagaggggaattctaagacagacagttgaaggtgaggcctttgaaaaacaatgggaacatcacctcccaaagagggactgaggtggctggaggaaccagagccgcctctgcactctgcaccgagggtcgcgtgtggctgtcaggagagcagcgtaacgctggtggagcctctgctcgcttcctgctcagaaagccagaagagagctggggcaggccaccagggcaccagacactcaccaagcggccatcaggactgggatgagaggacagaggaaggacactctgtccccaaaccctcccgtgtcctgacggccctagaacttggaggtgtcaggacacaacacagactcaaggctcctggattgaaaat

SEQ ID NO: 4491 - DNA, 253 bp, Homo sapiens
agaaatgaaaagtctgccttatggaagacaaggcaccgacgctttccctgacagcatcatcatcacccaactagggcagctgacccgcgtcttcctcacgacgtgggaatggtttgagtcaagggttttcatggccatgagccacgtgggaggctgtgcttgttgtttcctgtgagaaatcttcaaccagcgccactcttcagcctcccctcttgccagcgcttctgtgggctggcacctggcattcgtgggg

SEQ ID NO: 4492 - DNA, 380 bp, Homo sapiens
  misc_feature (1)...(380): n = a,t,c or g
accgacccacctggcacccacctggcacccaggcctcactctctaagacttcccaataaaaggacctggggctccctgcctggnacccaggcctcactctcttaagacttgnnnnnnnnnnnnnnnnnnnnnnnnnnnnnnnnnnnnnnnnnnccgggccanggcanggaatgcaagaggaggctggagcaccctgcagtgccaggaagtcaggacgtaccccaaaatgaaaagtctgttgaaaggggtgcatcaggggacccagtgaccgacggcaggagctccctagggccaaggacagatggtgtgcttcacaagaaagtagtgttgccttctagctcagagtttaaaacacatataaaatgagcccatccggatac

SEQ ID NO: 4493 - DNA, 526 bp, Homo sapiens
caagctttcttatcccaagcgccaacctttatcaagtctagcctagtcctctatcatctcctaagtgtccctcatgagtgatcacttcacattcctcccacatggagagctcacccactgggggcgtatctttcccattggaaaagtgtggttattggaagtttcctctttttagaaagaacaggattggaggtgctctctggggtgtcctcctaccaagcagcctgttgaaggcctcgtggtgctcagggaggatgggtgacactcgctgttgcttcagcttcatcttgagcccacacagcatctccactacccaggtctcctcaggctcaggggcgagctccttctccggctcctcctcagattcatctgaccactccctcttccttttccagccaagggacctacatggggggctgggatctaccccaggggctgagtaaagaaaccaggccaccgtgtaatgcttctgcatctgatcaccttagaccccgaccccaaaccccaaaccactctccatcctccc

SEQ ID NO: 4494 - DNA, 392 bp, Homo sapiens
gaagtccggacgcagtagctccctgaagcggaggcgaaggggagtttaagccccagcggcggcaatggcggagaggcccgaggacctaaacctgcccaatgccgtgatcaccaggatcatcaaggaggcgctcccggacggtgtcaacatctccaaggaggcccggagcgccatctcccgcgccgccagcgtcttcgtgctgtacgccacatcctgtgctaacaactttgcaatgaaaggaaagcggaagacgctgaatgccagtgatgtgctctcagccatggaagagatggagttccagcggttcgttaccccattgaaagaagctctggaagcatataggcgggagcagaaaggcaagaaggaggcctcagagcaaaagaagaaggaca

SEQ ID NO: 4495 - DNA, 1608 bp, Homo sapiens
  misc_feature (1)...(1608): n = a,t,c or g
ttttttttttttcattttttaacaagacttttatttgtacaaagcattacaatcttctcagcattcttcactcacaaacttttcactgtatttaacaagttaacagtgtcaaactacacgtcactacctgtcaaaccccaagcactcaacttagaaacaaaaagcgcttggagcactgaatggaaacagaaaaaggctaagaaaggccaacagagatattttagaagcagttaaagaggatggtttagggagagttagattcctgagcaccatcagatttcccttaaggttttttgtgaaggggcttcacaaaataatttttagaagacatgaggacaaaattaggccggggcttggtggcacgcatctgtagtcnnnnnnnnnnnnnnnnnnnnnnnnnnnnnnnnnnnnnnnnnnnnaggatttcaaggatgcaatgagctatgatcatgccactgcatcccaccctggggccacagagtgagagactccatctcttaaaaacaaaacgtgagattagaactaaggaatcaagagatcagaggaactcacactttggagtattaagcaggttatcaaagcttacagactgacagaagtgagaaaaggaggcagatgagaaagtgggatggggagcagaggagaggcaggagagagaaaggaagcaggaggcacagagggagaaagctgtgcctagagaaaatcaagtttggcactcgtcatgaattgaagaatgaaaagccatagtcacaagtctgggagatggactacaagaagaggaagcctggggttttacaccttccgggaggtgatgacaaatcctaaagctgtacagtagcagagagtaaggtacatctgacactatgccatctgtttttgtaaaagacactggcaccatgtttgactaataccattccacactgctgatttaagaatatctgtgatcagattactaccacaccagcaggccgatcatctacaggcaatatagaaaggttttgggccaagtgggtctatgaaaaacaaaattcagttaatgcttctgtcaagtgaagagagagaacggattttgttattctcccacagcattttagtagtttcctaaagcttactcattctgagcagtcttagtaagctactattgtcaaagactgtgcaatcaaacataggctgaccataagcaaagccccagtttttcctgagccttggctgcctctgtgatctggaacacagcaggcagcatggaagttattattacttatttgggggagtagggaagactgcagatcaaaaaccatctaaccatacatttaagtaaacaaaagcgagcaaactgactaatttagtcgttcagaatccctcttgtcaaaaggccataaccttcagattgatgaagcaaaacaggattctgctactcagatgctctgagtttggtaagtgctggttttgacggtatttctagtcagtttttattctgatcttttcaggcacttttgcctgagactactctgcccagcatggaaaagcttcacagaaacacgtagcacgtctcatttcaagtggtaccttccaaggtgccacagtctcccgcccttttcagttgtatac

SEQ ID NO: 4496 - DNA, 488 bp, Homo sapiens
  misc_feature (1)...(488): n = a,t,c or g
gtgagcggccagctgggggctgttggtgctgagttcagctttgaagccaaaaaggttccagctgacttccagacagacccggcttccgttttcaatgccaagatgagctgggcgaatgagtgggagcggacagaggcttttggccgactgtgatcgctattgtctggagtccccttgaccctctggaggtactgcctctcctttcatttgtacacaccggtttttctgcacggttccgcctcttgtcagctctgtgagctctggggacaccagcttttccgtttcccatactgccagatggctttgagcaaacaagaggaaggccccagtgtgggtgcagcctgtggngttttggttcctgcctgtttacccggggggtnaaagcggaaagggagcaggctttncagggaacccaggttggcancccttnttcgtcccttgccattngtttctctttnttggnccttgggattggtnccaaaattttt

SEQ ID NO: 4497 - DNA, 486 bp, Homo sapiens
gagagaatgttactggcaaagggaaaagcatgtgctagaagcaagcagagatgagagattaagcttgatgcttttgagaaattaaaagaggttcaagttcgtaatggctacagctgtgagatcaactcttttaagtctcatgacagtacctgtaactaataatattatcccctccatttttatggttgtggcaaatgaggaaaagatgttaaatattttgccctaggtcatccatctctagtaagtggcacagccagggattgaacccaggtcatctggctgtagcatattggctcctaactaccatactggattgcctctcagctggggcatagtcttccttagtaaatggaatggtctgtgtctggtactacctaccataaaaagagctggagcttataggatctggattagtttagaaatacaggtttgctttagcttttattcttgattgggaatgaaatgcttcatttgatatgcaactct

SEQ ID NO: 4498 - DNA, 839 bp, Homo sapiens
tttttttttgagccgccgaggggctgggtcttcgcctttatttctggtgcacgtctagaggggcccgggcagaggccacccacggtccctgaagtagggcctcagctcctccaggctgagcggagggaagtaggctccgatcctcttccgcacccaccacttgccctcggcggcgtgcctgcccccaggacggctgaacttgtacctgtagtgctctcctcggacccacctgggcgggggcctgcccgcgaaggggttgtgtgccagcagggacaaggcctcggcgtcgctggccaggagcttgccagccaggtggatgatccagtcgttgtgctcgtaggtctggaaggccgcgaaccacatcagccagtccaggcggtagtggtacggggagatgaggcagggccgtctgctggggtcacctggcttgcacttgaactcgtagtcctcccacatggcatcgggggcgctggcgttggagctggctgtgccctgcaggatcacctccgcccgctccttggtgatgcttccgaaggccccgtaagtgttgacgatgtgaagagagttgaagtgggtgttcatgacctgcctggagctcagcaagttgaggaccacgggcacgctgagccaggccagcaggacgcccagcgagacgttggctgcacgccgcaccacggagccgaatctgggctcgggccgggcccctcggatgtccctctgcatctgcagaactcggtccttcaggctgcctggcccagaggggaacaagaatcccagggtggcgtcatcaaagcaggccaggctgggcaccatagtcagccagttcaggaagctgaggc

SEQ ID NO: 4499 - DNA, 459 bp, Homo sapiens
acagagatggggaagaggaagaggaagaggaggagccattggatgaaagctcagtgaagaaaatgatcctcacatttgaaaagagatcatataaaaaccaagaattgcggattaagtttccagacaatccagagaagttcatggaatccgagctggacctaaatgacatcattcaggagatgcacgtggtggccaccatgccagacctgtaccaccttctggtggagctgaatgctgtacagtcgcttctcggcttgctcggacacgataatacagatgtgtccatagctgtggtcgatttgcttcaggaattaacagatatagacaccctccatgagagtgaagagggagcagaagtgctcatcgatgctctggtggatgggcaggtggtagcactgctggtacagaatctggagcgcctggatgagtctgtgaaagaggaggcagatggcgtccaca

SEQ ID NO: 4500 - DNA, 765 bp, Homo sapiens
  misc_feature (1)...(765): n = a,t,c or g
ttttctgagaacacattcgtattttttgacccagaccaaaaacttttggtcctttttaacggtacattcctacattaagaaaataattagtgataaatatattctctttttgtacaaattcaattccagtttttaacaccctaattcacaaaattcatgccaatgtatgcgctgataggctgaagccaagctgtgaaacttcagaacacagttaagggcagcaatcaagcccgttccaggctgacgcgcagggcgttcttacatcacatcccggggtgccagctcaaccccggcacgtcagcacctgggtgaagggagtgccgggcactgatgggatcaatacaagacacagaccccttccgtcgggagctggctagtctctacagtgccccacaccactgatttctatcaggctccagggcctcccatggaggagaagggctgtggcccctctgattcttggggacgtggtattcaggcaaaggcgcagttatttttcacaaggctcctctgacaagaactggacatcaatccactgccacccggggcttccaggttccactcgaagacccagagagattttaaactttctgggaagtcttgctgtcccgctgtacacctttttgggtttttctccattttaatgttttcccacggccaaagcagggtgtcggctgcagactgtgctgcaggggccgccaccaggctctccaggtgcgttttgctttttgaccttggcgaccgtngcctccatgccgcttgatg

SEQ ID NO: 4501 - DNA, 2259 bp, Homo sapiens
gtggctgcccgcgcggggaccacaaccaaagtcgcggccgccgcagccatgcgctgggtgtgggcgctgctgaagaatgcgtccctgggcaggggcgcccaagtacatagagcacttcagcaagttctccccgtccccgctgtccatgaagcagtttctggacttcggatccagcaatgcctgtgagaaaacctccttcaccttcctcaggcaggagctgcctgtgcgcctggccaacatcatgaaagagatcaacctgcttcccgaccgagtgctgagcacacccaccgtgcagctggtgcagagctggtatgtccagagcctcctggacatcatggagttcctggacaaggatcctgaggaccatcgcaccctgagccagtttcactgacgccctggtcaccatccggaaccggcacaacgacgtggtgcccacccatgggcacaaggcgtgctcgagtacaaggacacctacggcgatgaccccgtctccaaccagaacatccagtacttcctggaccgcttctacctcagccgcatctccatccgcatgctcatcaaccagcacaccctcatctttgatggcagcaccaacccagcccatcccaaacacatcggcagcatcgaccccaactgcaacgtctctgaggtggtcaaagatgcctacgacatggctaagctcctgtgtgacaagtattacatggcctcacctgacctggagatccaggagatcaatgcagccaactccaaacagccgattcacatggtctacgtcccctcccacctctaccacatgctctttgagctcttcaagaatgccatgagggcgactgtggaaagccatgagtccagcctcattctcccacccatcaaggtcatggtggccttgggtgaggaagatctgtccatcaagatgagtgaccgaggtgggggtgttcccttgaggaagattgagcgactcttcagctatatgtactccacagcacccaccccccagcctggcaccgggggaacgccgctggctggctttggttatggggctccccatttcccgcctctacgccaagtacttccagggagacctgcagctcttctccatggaaggctttgggaccgatgctgtcatctatctcaaggccctgttccacggactcggtggagcgcctgcctgtctacaacaagtcagcctggcgccactaccagaccatccaggaggccggcgactggtgtgtgcccagcacggagcccaagaacacgtccacgtaccgcgtcacgtaagggccgccgtgcatctgcacctgagaggacggactgccgcctctgggtccccccaccgtggtgcccctcaccatcctcctgggggagcagggggtgggttctccctgatgaccaggttctgtctctatggaagtcactgcggtgataggtctgtgatggtccctaagtgccagtccatctctgtggagacccctcggtggcctccctatctctgtgggcgatgcctgagggttagggatgtctccaccctgatggggtgtcccagagacattttcccatggcagtcctcctctctgagaccagggctgtcacttttctgccaggggtactgggtccccctcagcaccctccacagcacaggccttccaagtggatgtcccgttgccttattcccccagcccacaaaggcaccctggccttggcctgctgaagtgttaggaagagggtgggtgccctccagacctggggactgagtggggaaaggagtttacacccgtgagtggggaatgaggctggtcctgcagcctctccctccgctcagggcttgaaggtcggtggcggagggggtggctctcacagggcccaactctaaagtggaagaaccttgttagaccgagagcttgccatccagccaagctgctcgaggccctgcagtggccttggcaatgtctgtgccacctcctgagccctcccagcatgtcctcacatgctcatgcccacccgctcctccacaagcctagtccatcctgcctgagctccagcccccagcccccactgtgcccagacatgtgtgctcagggtggctttctccctaggaccttctgtgtatatagttagttttataaccctgaatgcccccacccttcccctaagcacacaggggttaaagctgtgtgtccctcccagtggctgtggcagtgacagtgacacccacacccacagtaaagaggagactgaatgagaaaaaaaaaaaaaaaaaaa

SEQ ID NO: 4502 - DNA, 59 bp, Homo sapiens
ggagagagcttacatcagaatcgagctttgtgggcgctccgggatttggccctttaggc

SEQ ID NO: 4503 - DNA, 521 bp, Homo sapiens
  misc_feature (1)...(521): n = a,t,c or g
ctgagcacgtcccagctggactngtctgccactgtcaccctagcttcttccccaggngctttccatgtgtcacacaccacgactgtgacccagggtcggggtcaagagtagcctggggccaagccctcccacccatgagcggagaagtcctccccaggcctcaccttgcctggcgcatggtccctcccatgagctttgctttcagcctttcagcttcctccacagggtggcagtggttgtaactcatccattcatcccttcatcccttcattcattcactcacagccaacagacgtttttaaaaaattagccagtgctatactagagctgggtcccaaggacccgcttgccgcattgcctttttgaaacaaaacaatgaacacgttggtaaagggggccgtgcttgtgtgtcggtgacaaggctagancctgagcaggncaagcttgaaaatccaggtctgttgccaggttnaatgcccnttgctttggcccctgncaaaaaggtgaannngaantaacca

SEQ ID NO: 4504 - DNA, 1138 bp, Homo sapiens
  misc_feature (1)...(1138): n = a,t,c or g
gaagggcaggaccagcactgattgaaaaggagggcttgttcagtgtggaggaagaatcagaagggggaataagttaccttctccgagccctgcaagaacaaaaaacaaaaagcagaaattaaaatcaggttttcactgctatttatatatttctcctttcccaaatgatttttctaaagctgggagtggaggtaggagggagaaacagaaggtgagcagggaggctatttagatgtgtcaaacccgggtgatcattaataatttgggcatatatatgctcccaaacttactctgccnnnnnnnnnnnnnnnnnnnnnnnnnnnnggtatgggccttttaggcttgggccagccagctttcttgagatgagtgaataaaagcgtattgtaatttcatgtctgcttcagatcatggggacagtgccacccaggaactggctgctgaggcctgggaagctcccttgccttcgggtttggagcagtggcatcatcccaccaaacctgagccatgaaagggctgagccagaaagttaaatggtagtttcctgactggaagccacacgtaggtcacttgagtagtcaggaagcacagtgggtgtggagccatcatctgtcttgggctggttcctcccaatctttgtccagtggtataaatggactgtctgctgatggccatacgcagcactggttgttaagatggggaaggggtacatcaggattccactcatagccctggttcgttattgttactcatggctctgacgtccccaagccctcttgaattgttggaagcaatgttaaatatcacacctcggtcctccttttgagccagcccaggttacctaaaaggaaggtcaacccaaacttggggttttaaacttccaagttggccaatcaaaaggaaggggttccaaggtttattggnaaggtttttggggaaggnctttgggngtttgggacccgcttggggnttaaaanggaangggggagggaggtttggactttcntncccaattggggttttttccttttnggggggggaaaaaccccaaggccccangnttttngggggnggggnaaaacngggnnnnnnggggttttccnaaaagggannnttcccaaanccaaaggggtttctc

SEQ ID NO: 4505 - DNA, 1133 bp, Homo sapiens
  misc_feature (1)...(1133): n = a,t,c or g
agagcttgtcccctatggttcctatggagccccagcccctgcagaccagagcccatggaagcatgtccagcacctgccgagcctccttctccttccctccacagtctgcagcagggctgaagctaagggcagagaaaaatatactctgggcttccccagacacccccacccagcacagccagggctgggtgccctaccccaacccagtgccaaggtggaggcccttgctaggggctagagccagtggtggccctgcccagccctcaggggcaccagccaagccaggaactcgatggaccaccctcatggggccccagagcagcctgagccagggtcagatgggcagaaaagctcctcctctcttctccacttcccccccgcccgctctccctggcccgctccctgtcccctgctatcccagtctcatcctggccccctttccctcctaactccgctgtcacttctctcctcttggtccctagaagtgagagtcctgaggcacaggaagagtgagtagctgcgtgcgcggctcctggctgaggctgaggcgcggggtggggggaagaggcaggaaaagcaaggcagaaggggcccagacttgaggaaagggcaggggcaggggctggcaggcgagagaacctcgaagaatgggtggggccttgcacctcatacctaccctcatacccacatatgcacccaagcattctgcacctggctgatggttttgcctaaataaatgagccagccacaccgattttccctttctcctactcttctcccccaccacccccacccgctgtgactgcattctgggatccccagcctgggaatccaagagctgtcggcccattttattcctccctcccagacctgaccccttcatcggggctcaagagacctctctctccaaatctccatttgcctcctctggctaagctggaaaatgcacactctgccctgggtgtttccatattatccgcctgcccttcctcctgggtgcctcccgtagccttagtaagggctctgctttcctggggcccctagagctgaggccatgctttgccataaagggtgctcccgggcttgcaaccaatgtgtctgcttgtggaatcttgtcctgtggngttgtgttg

SEQ ID NO: 4506 - DNA, 913 bp, Homo sapiens
atttttttttttgagtgaaccggagcccagatgagagcgctttaatggggctgcgaggtggcggagacagggtcgggatggggtgcagcagttggagacacagggtcagggcccctcatcctctattcactccaccggggcagtgaaagggtcccggcagcgagtgggtctggctggggacggggcgcagacttgagggaggtggggccagaggtggggtcccgggggccacaagtgcggcccggccagacaggcagttttcatgtttctggtaaacaaatgactgagaggaaacccttggcggggataagaaatgaggcccgggctaggccgcgcgcagatctgggtcagagaggaagggaaaaccccttccccgagctcggggcctgcctccacccaggatgcgccagcgacgccggttccggggtgcgggggagggggctgcatcctggagggggctgagcccccgcaggaaaacaaagtcaccacccacggggctggggagagctctgcactctttgatagtcaacgaacatgcaaatatgtgtaagtcggcatgcaaataagcagcatttgttgttgtttgcgtcagcagcttgggcactttttctgggcaaccgtggcggcgtgtgcactccagtgttgccaagggctggggatacggggggccagggtgggggtcagggagggtttccagcgcaggaggggagggctgtgcggctcccagcctttccaccagggcctggctggctggggctggggcggagggccccacggagctgcgaggctgcggacaggagtctgcggcctctagtacttagcgatgtcccccttcttcaggatgacctgtcgctgccaggggcgccagcttgctctcatcgtagcccagcgtccgcagcttctctgactgttc

SEQ ID NO: 4507 - DNA, 485 bp, Homo sapiens
ttgacagtgacattatatctgcaaaatagggttcatacctactgtgttagttttagtttcctagcctgctgtacaaagcccacaaattgggtagcttaaaataacagaaattgtttgatagttataaataaaggtcagatgtctaaaaccaaagtgttggcagggcgtccctctgaaggcactgaaaataaaatttccagtccttctaatttcttgtggttccttaacttgtggcagcataactccagtcttcacatgaagttcttcctgtgtgtgtatctgagtcctaatataaggagactagtcatattgggattgggggtccatcctgctctgttaaggacctcatcttaggctgctggacatctgtaatggactctatttaccaaataagggtcacagtatggagggtagtagggggctagggactttttaaccatacggattattgggggagggacacagtttcaacccctttaacacct

SEQ ID NO: 4508 - DNA, 901 bp, Homo sapiens
ttttttttttttttacaaagacatttattttccccaaaatatacccccagtttacaaaatccctccgagtcccacatttaaattagaagtcctcacatcttccattcctggggcagggagagatgacatccggaaggcatcagaacgtctgaagtctcactctaccagaggccaggagctggccagaggcaaagccaggaaaagactgccccagccccagaatagcaccatggtgggggtggggggcagtcccctcggtgtccccaaagcattcctggccctgccctgccccaggctctgccttttctgctgctatgaaaggtccagagggccttggtgcctgcccacctgcccacacctggacagacattttggacaccaccagattctctagccgtggcgaggggctatgtccctctctccaggtttccgccccaaccccatgctctgggtaagaattatgggtgggatgggggtgaggtatccaggaagccttgagccacagaggaggtgtggagcagggagcccaggcaggagccccctgcaaaccgcagggtgcagtgtagttagttgtctgtctcccagctggatggggagtccttgagggaggaactttatcttcccacgcagggcccccagcacctaacacagtgctgacatctgtagttgctcaataaacatcaactgaatggatacatgaaaagaaaggaacaaagaggtgagaaggcagagggacagaagctgacccccaggggccccatcacagaccccctggagaaccagtgtgaccagcacatgccttccgtggggaggatgggcaggggagaggggcacctgcagaggaggctgggcccaggggggaacccacacgtgttccagcacgtgcacctgcaggtctcca

SEQ ID NO: 4509 - DNA, 296 bp, Homo sapiens
ggaactgcactgtgacaagctgcatgtggatcctgagattggactctagactctcccctggttcttcccttccctgagttctggccggttcttggaccagacaaggcaaggcccaagaaatggtagaatcaagaattttttagcctttttttcattagttccttccctagtattcttctagatttttttttttcttaatcacatgaaattttaataccgcagatgtactatatatctgtttatgttctgtatatgttctgtgctttatacataaaaaagagtaagatttttttttc

SEQ ID NO: 4510 - DNA, 376 bp, Homo sapiens
tcgacaggtgagagggagctgccaggcaggcacacacatgcctggtttgtttgttggtttccccaggttggcagggccctgccagagctcagcctgaggtgtgccaatggcccatctgcctgttgctccctgtatgggggatgtgagggaaggttgtctgagcggcgcttcctctagcgccatcctggaggtccttttgctacccatggtgagaagccagtgctgagcacagggagatgagggaaggatctcatgggcacagaatggggcctaagccatgccactcttcagccagtttgctgccatgagcttgcaggcatataactaatcccaaatctcaaataagatagccggccctctgtatctgtggggtcga

SEQ ID NO: 4511 - DNA, 480 bp, Homo sapiens
  misc_feature (1)...(480): n = a,t,c or g
caagaagccaagaagggagagtttcgtgcactgtggttaacaggagggccgcctggaggcagtggctgagccagaaagtaacacagagctcatgcttggagagatagagtcttggccatggctttcctgcaagaccactgacgagcagtcccatggtgataaagggcagcccggcgggtcccagcatctcgagaccctctgcagaagtattatcagagtagagctgacttccagtacccgggcagccagctctgtctccagggaggcctggcctggaggaggagtccactaacaggaaacacttcttcacccccttcacacaggcccagggggagcccctgggaggggaaattccttggcaggggaacaggaaatgtggtcgcctctgccccactgccagcctgagtgggcaaggaagcaggtggatcccccagaaggaaccgcagctcgcgaggtcacctgcttccncgttccccaccc

SEQ ID NO: 4512 - DNA, 1108 bp, Homo sapiens
gcaaggctgcggggaggcgcaggatggacgcgttagctgtcatgatgtaggacctcctgacctagaaccatgcccggcgcagggagaacaacgagcttatggaccgggtgcgggggctgctgtgcgagaaagcctacctgctggcccgggagcgttcgccggcccacctggtggctttccctggacgtttaacggcgactccgcccggcctcccgactttttgatgcaggcgttctcttacatgactttcttcgaggctagattctcgaaagacatcctgaaggtggctttcttaattagctgcctcaccggctggcggagcagttcgtagtcccctacatcgagagggagagccccgtcctggctcagtactggggcttcgtggacgcgttgtagcgggtcttcgccgtcgtgggtaggaaacagtcgggccggatccccggtgtctggggagcggctgccggccgggcccgcgcgagccgcttcactcctacaagcccggctcactagttccaagctgctggactttgaccctcgctgggaagcttgatcgccgcctgttctcgccaatctctatgcctttgcactgcccagcaacccggtcactgcccaggacctgttaaaagttgaatggacctcccagaatcacgccgctgccaccgccgttttagagacggcttttggccacctttgagaatcagggtcaaacttggaagggcctgcatttgtcacacttcctcggacactaatttggatagttcaggcccagagacggcttcccgggttagtgtgcctgacaacactgaagaaaaattgtgacattttccttccccagaattacttcgttttatacatttcacttctcttctgaaatcacagccaatgcccagtttgcgccttttggtctgaggaacgcaggccctggccactaccaggaaaaagtatttacttttaaaacttgaatgtatatctttaccgtatgcctagtacagtagtgcttggaagaaacagattagtaagacaaaatatatgtcttcaagaacacttacgttctgagaaagaattctgaatgcagattctaatgtctggtaaaatgctttacagtgta

SEQ ID NO: 4513 - DNA, 971 bp, Homo sapiens
accaatctaccaggagttggacattcaatggaatctaagttggcatctttgggaattaaaacttgtggagacttgcagtatatgaccatggcaaaactccaaaaagaatttggtcccaaaacaggtcagatgctttataggttctgccgtggcttggatgatagaccagttcgaactgaaaaggaaagaaaatctgtttcagctgagatcaactatggaataaggtttactcagccaaaagaggcagaagcttttcttctgagtctttcagaagaaattcaaagaagactagaagccactggcatgaagggtaaacgtctaactctcaaaatcatggtacgaaagcctggggctcctgtagaaactgcaaaatttggaggccatggaatttgtgataacattgccaggactgtaactcttgaccaggcaacagataatgcaaaaataattggaaaggcgatgctaaacatgtttcatacaatgaaactaaatatatcagatatgagaggggttgggattcacgtgaatcagttggttccaactaatctgaacccttccacatgtcccagtcgcccatcagttcagtcaagccactttcctagtgggtcatactctgtccgtgatgtcttccaagttcagaaagctaagaaatccaccgaagaggagcacaaagaagtatttcgggctgctgtggatctggaaatatcatctgcttctagaacttgcactttcttgccaccttttcctgcacatctgccgaccagtcctgatactaacaaggctgagtcttcagggaaatggaatggtctacatactcctgtcagtgtgcagtcgagacttaacctgagtatagaggtcccgtcaccttcccagctggatcagtctgttttagaagcacttccacctgatctccgggaacaagtagagcaagtctgtgctgtccagcaagcagagtcacatggcgacaaaaa

SEQ ID NO: 4514 - DNA, 1206 bp, Homo sapiens
  misc_feature (1)...(1206): n = a,t,c or g
agaaaaccactttggtagtgccagtgtgactcatccacaatgatttctccagtgctcatcttgttctcgagttttctctgccatgttgctattgcaggacggacctgtcccaagccagatgatttaccattttccacagtggtcccgttaaaaacattctatgagccaggagaagagattacgtattcctgcaagccgggctatgtgtcccgaggagggatgagaaagtttatctgccctctcacaggactgtggcccatcaacactctgaaatgttacacccagagtatgtccttttgctggaatcttagaaaatggagccgtacgctatacgacttttgaatatcccaacacgatcagtttttcttgttaacactgggttttatctgaatggcgctgattctgccaagttgcactgaggaaggaaaatgggagcccnggagcttcctgtctgtgctcccatcatctgccctccaccatccatacctacgtttgcaacacttcgtgtttataagccatcagctgggaaacaattccctcctatcgggacacagcagtttttgaatgtttgccacaacatgcgatgtttggaaatgatacaattacctgcacgacacatggaaattggacaaaattaccagaatgcagggaagtaaaatgcccattcccatcaagaccagacaatggatttgtgaactatcctgcaaaaccaacactttattacaaggataaaggccacatttggcctgccatgatggatattctctggatggcccggaaggaaatagaatgtacccaaactgggaaacctggtctgcccatggcccaagttgtaaagcatcttgtaaagtacctgtgaaaaaagccactgtggtgtaccaaggagagagagtaaagattcaggaaaaatttaagaatggaatgctacatggtgataaagtttctttcttctgcaaaaataaggaaaagaagtgtagctatacagaggatgctcagtgtatagatggcactatcgaagtccccaaatgcttcaaggaacacagttctctggctttttggaaaactgatgcatccgatgtaaagccatgctaaggtggttttcagattccacataaaatgtcacacttgtttcttgttcatccaaggaacctaattgaaatttaaaaataaagctactgaatttattgccgcaaaaaaaaaaaaaaa

SEQ ID NO: 4515 - DNA, 888 bp, Homo sapiens
ttttttttttcacaattcagaagaactttaatgcatataccatcattgccactataatagagatagaagatacattaagaaaattcagtttgtatcaataaaacagatcaacacagaacaaggaaacaccatagatatttgtaaatgagatcttctcttttgctactgtatatatatattcctttatatttatacaaactcacaacacatgacatttcatatttcatatgccactgagaagaggtgtcagtatacagaacataggaagaagaaaaaagcatgagaacatctgcttagttagaatctgatgaggagagacgtgagagctattgttcctctctctgctcaggcctatcgagaggcaactgcagtttttgctaattgttcctcctgaggaattctgctcatactgctatggtacatctcctaggttggcatgagaccagcctggtccccagttgaataaattagaaagagcagttgggggaattgaatatgatatgcaaattgcataaggtgacatctctctgtgtggccacagagatagatcatctgctcctggctccttgatctgagggaagcctctgctgttcaacctgctccagggtttaattctgttggggttgtggggctgacaacaatgtgttcctttccttccttctctcccacaagcagaggaagtcatacgtagacaaaacagatgtttaggttttctcttcagcaggcttcctcttgttcccctctatcacccccagataggtgaagttcagaattaggactgcccactgcggggggaacagaccctcccctgttctgagactaaccctgccatttactgccttctctatgtagtcttggataggttgcttcactgatgcaggcctcagt

SEQ ID NO: 4516 - DNA, 370 bp, Homo sapiens
  misc_feature (1)...(370): n = a,t,c or g
tagtcgtatctttttaaaggtatcatgatttcagttgtggtcaggaagtatgtgccttaaatcctctactctagacccaaagtttggagagctatattatttaataagttgtttgtgacagccttgttacctttttcatttgatttgagggagaaagactgtgatcctgacagattccttctcataaaatggcctaatgtgtatcagtctaggacttctggggagggaacctctaccatgcattctgtcccaggatgtcaaagtcataagaatccaggggtcccctggaaaataaaatccactggaaaaggatatggttctggttaatatntttattttanaaaaattttatcctgggtgcccaccaaag

SEQ ID NO: 4517 - DNA, 620 bp, Homo sapiens
gagggctagaagagaagtcaccaaacacctagggacagtcctaggcctagaaagccctttaaagtaatagtgaattgttttaaaattaagttattgagtggcctactgactgccatccaaaaacctttatcaccaaatttgttcagtgtttgctattgggagattgtccatatccctccgtaattaagggccagcaagtaatacgatcttcttacagccaaccttgctcttcccaaagggagaaagtaatacatcattaacctggaatttgtgatataacaggtagccttggttaatgtttaccttttcactatgtaaaaaagaaaaaacacacagcaaatagtgcaaataaaatttggtcttttaaagcattttagcagtagctatgtaaaaaaagttaatggttattattcctaaattttcataagacccttggtagacaaaactatcggttatattatgtatatatgaggttagttaagctgcatttagttaggaacatttaatttttacctaaatgatcctttttttcatccagaggtagagatttttattgtcattatgaatgttactccccatttagtccaaaatacgtgagccttttaagttgtgccaggtac

SEQ ID NO: 4518 - DNA, 773 bp, Homo sapiens
gaaaatgattttctttgtaaatatatagcatcgtgtttggtttgggatgtagagtctatacctggctgctgattgcgtcgtttactacagctttttttaaataagatttttgctttaccatttatcataatgtagtaatgaagcaaaatggtcaaaactgggtgtgtgtgaacagagatacacccatattcgtgtatatacacatccacctacatgttttggtctgtggtttaagagactatttcaaggttccatttttataagctaaaacattctaagttaagatggaagaaagccctaaacacagtagattctgagtttttatgtgtattttaaccagagtttctgatagtactgtatctggctacctatatttccagatctaaagcaagaactactctaagtactgcatttggaatcctcctccattaggaatggccaggacaagtggagctagccattttcattacacggccatcccaatggacactggatccctggtccaactgtctaaaaggccagttgttcctttctgtggatgtggatgtctggccttcacctgaggtagagcggggactataaacacacatcaactttctttctgtttgctttcttttccttcttttcaaactctttaaacttcaggcctttatgctgtgagtgactagtccaagaagcacacattttgtagtagtcctggcaccagccctgctcttgaataaaaagggaaattactggctgcacccaaatcttctagtacttgagtaaataag

SEQ ID NO: 4519 - DNA, 477 bp, Homo sapiens
  misc_feature (1)...(477): n = a,t,c or g
gactggctttaaaaatatgttggatatgctttcaccatttattagtaaaatcttagggcaaagacagctccttcaaaatgattagactctcctgttgtacatggtatgacttgatactgaatacatggaaatacctagaaatgttatttgctaaatcttacgggaagcagctgttagccactgcaccaagcagattcccacaggaccactgactctgtacctctgtgccccttctgtgcttcactgaacacaagtccatagtttgcatgatagagcctcacaaagctccactcaatgtcattaagctatacagcaaagctacactgccagagagaggaacagagacagagagtgaatacactaaaaacagagggccctgaaagagtaagacctatagaaccaatttcttcttggggtactacatccagaaaatctggacttctgggtgtgtnacttaactagcattaccacagtgct

SEQ ID NO: 4520 - DNA, 305 bp, Homo sapiens
gctggaactctccaaagtctcagaaaaagtctttgatttataaagtacatttaaattcacttccattgaaacgtacacacacccagggtctgccagagaggacaagggaggacactgacatttccaaatcaacctgacaccaccaggatataggagacccccaaggacctccacgggacctggggatttggggcgtgggtgagaagtgggcattaggaaggattcaactctttgcacttcttctgacagcaaggagggaggtgcagggaatgtttctatctcctgcttgcatccttaaggaatgg

SEQ ID NO: 4521 - DNA, 879 bp, Homo sapiens
tttttaaaagttcaaagttttaatccaaatttagacagtgttgagaaaaccaaactttggccatagaaaccattcccctcccgggcccgcaatggggaccagaccacgccccctgatgccctgagtggtcccagatctccggcggtacctccagaccacgtcctcgcgctccgattggctgccgcttttgggcggattagaagctggattgtagcagagtgactcgcagaggccatgccccctcgtcttgtggcaggaccggaggggcgatcccggcatcccacgcgggcccccagggggtgggacctcctccacgcccactccctcggcgagagaaccccgtggaacccgaattagccaccgggggagatctggggggaggggtctcctggcgcgtggggtccgaagagggcagcggcacaccgggaagagggtctccctgggagtccaaatttccacctgtcatcattctgtgccactgcgacgcctcagtagccagggcttgggagaggctgagaacccgctcccggtgaccttcggaagtcggcaagtaaggggtggtgttccttggactactccaggacccagagcttctgagccatttctgggctcccgagtgtcctacgacaggcctttgctccacgtcaggctggcgtctggctggggacagtgtccttcccagggtgagaagccggggggaggtcgggcgagggaagggccgtccacattcctggtttctgcgatccgctccagctgctcctgggcactcaatccggggccgggccaccggggccttggttcctagctgtggggaagggaggtggcgaccctcaggctggaagcccgggagaccctcggagacccaagacctggaaagac

SEQ ID NO: 4522 - DNA, 220 bp, Homo sapiens
accatctgggatgctagcagtcacagcagttagctcagatatctgagctgtctgccacacaaagcctgaggagatcatcattcttcagtttcattcattacttaatgaatgccaaattaattggcaggaagaagaaacactgtgtgatatactgaacaagcctgtgtgcatgaataaggagccactcaaaaagccaattttgagctttatttctccgttg

SEQ ID NO: 4523 - DNA, 749 bp, Homo sapiens
  misc_feature (1)...(749): n = a,t,c or g
cccctcgtggcctctggaatgtgtctcgacttgttggctccttgcttctagcactccaaggctcatagatcgattgtgtcttaaactagaagaatacgttttccattatctcaagtagcagaacatgttccatatgcttcaaagaaaattctaaaccatcacagctgtagatcatgcacttgatacactgctttttttcaacccccacatcctcaccacctgcttctttgatcaccaataaatagtgtgggcttccagggctcggggcctacacagccttcatactagtgttggcccctcgcgccactttatgcactcttgtctcatctgttttgactcgccggacttcatagtccccacagcctggagttgggtctgatcaccccaacattcctggcgcccaatatgaggcaacgaacaccccagtgaaggaacactagagtgtgtgaaagaggatgcatcatcagaggacacccgaggacgactgaaagaagctcagcaggaaagcctgagcactcggaaggaccagggtaacaatgggcacaaagtgaaagcaaacattcctgctcgggatgttttaatacagcttcttacatacaataatgctaatgcagtgtcaaactgctattagacccctgacagggaagggtcagttagctgaatgtattaaggcttgcgatggcatttggaagnaacttncntaangctnatcttttaactcaagcnattgctggattgaaagtaagaaa

SEQ ID NO: 4524 - DNA, 497 bp, Homo sapiens
acactgacccagaagccacctccttgctctgtgacaaggtataaaatctgggtaccagataccattctgccacccctcaaccaggtggtgggggaggctgaggaaagagacctgagtggttccttcagaatgaggagagggtgatcacaaccagaaggtgggcgctcctgactcccagtccagtgctcattctgtgcctcactgccttcatccccctgtcccagaggctgcattcaactcacccttgcctggaaaaagaaggaagaatgaacagagaataaacagggcaaatagaaaacacacaacaaacagtttcaataccccaattaaagctgagattgtcagagtggatgaaaaagcaagacccaactacatctactgctacaagaaatccacttcaaatataaagatataagtaggttaaagatagatatagaaaaagacatactgtgctaacattcatcccaaacagctggagtagctattttaatatcaga

SEQ ID NO: 4525 - DNA, 248 bp, Homo sapiens
cgaagggatgaaatgacagaggctggcagagtgtgatgataaatgacagtgactcgtggcctgggaatgggtgggatctttggaaaattggaaagtctatcccacctaagcaaccctccctggcagtgctactcagttccacctccaagaaggaggtttccaattttttttccatgacaagccagaagttctgatttttagtttgttttctgatttaaaaaaaatattggcaatagtccgtgagcccc

SEQ ID NO: 4526 - DNA, 420 bp, Homo sapiens
ttccaggcgctcctgaggaggaagttgaaaagcagagaaatcagctttcagtggacacgctacagtttctgctcttcttatacattcaacagttgaacaaggtctccctaaggacatctttgattggcgaagagtggcccagtcccagaaacaaatctcagtctcctgacctgactgaaaaatctaattgtcacagatcgtaagggagagagcagatatataaaagattcgttgcaacgatgaatctttacatgtgcccccgccagagtgtctgagctcttagccagtgtctgcttgtaaacctggctcatcactaccagtcggtgcatcctaggggccacatgagtattacaagcaatcttagctcttttggtggtcccttcaacttgatgagcccaagccaatttctttccagacttg

SEQ ID NO: 4527 - DNA, 244 bp, Homo sapiens
gcggaaatactcatcacctgttcaggaattcaggcatcaagtggttcgtagggagagttcagcttgtaagcttctattcttttggttaatattaaaattagctagttttgaaacttagccataaccccatgtaattctaccagtggtgaacaagatattaatttaaaacatatcctgtggctgaactcagtttatgtcatgagaattgtcgtgatattctctggtttagctaactcaccgtagg

SEQ ID NO: 4528 - DNA, 166 bp, Homo sapiens
gctcactgtcccagattggggagattggactgactttgagagacagttttttgtgccatgaatctccagtcctctgcatctggcagtgggtgaaagtcctttgtaaaggctgcctgcagaggcccaggcgggggttttttgacttccaaggagggcatcctgaagc

SEQ ID NO: 4529 - DNA, 632 bp, Homo sapiens
ggagtggtgctgggattatgcaggctgaggcctctccacacattttcatgaagtggttgctcaccctctaagtgagacgtaaagactgcagtgttcggagccctttgggaaataaatgtggtgaaaagaaaggagggacgaggtttaaaggaaggggaaatggaggttaaggaaaaatggctagaaggtgtgttctggaacaatcagaaacctgaggcaacttgaaatgggggaaaaaggcaagaatggagagatgttaccagaacgaaatctagtttgagcagagaaaaagactggctttctagtaggcttgtaaaatgctttcctgcagcaagctacttgtgtccatagatcttctctggagggttaaggtagccttttgtaaaccaaaggaatctataatatctatatttgaaataattaatgagttggaaaagccacccagcgtagaagagtcaatccaagctttaattctgccatctcagaatggtgataaaccatttctcccccatcatctaaatggaatatattgtgcttatagatattttcctttaaaagaaaaaaaagaatatattgggaagggactggccaggggtcactttcccctgctaaacttgggtgtttggtagatt

SEQ ID NO: 4530 - DNA, 578 bp, Homo sapiens
gcggcacgagtagtttaatttttttattagtgtctgtttaacaatcggttcaatttaatattcagctgagtggtttaaatatgagataccactgtgattatgcctcctcattcttgtctttcctcctcagactttttataagcccatggccctaaactctcaagaaggaaatgagtgtccttagaatgtgaccttcctctccaacttgtcccacacctgctaagacacagagtggaaggagctgaaaagccagagacccacttaagatccagaagcataagcagcagttgcagagaggcacacagactagccacccatctctcaagaagagttgttccaagtacaggtttggaatcttcagtctgaaaacggggtcttttgatctctccccactttggtgcagtctgctccgattagtgccgagattgagactggaacaaaccatggtagctgtcaatggcacaaggaccccatctgctccagacttgactgaccctggctcttgtactccctgccacccactcctacaccctgtcttccctccttctccaatgacaagagatattcattgaaacaac

SEQ ID NO: 4531 - DNA, 442 bp, Homo sapiens
tcaaactcacgggctcaagcaatcctcccatctttggcctcccaaagtactgagactacaaacatgagccatcttgcccagcccctagaacgtgttatcaaataaacaccgatgcaaccctcactcagccgagaagtaaaacattgccagccaatccctaaatgcttctgcttgccgcttcccaatcctaaccaatgccttctcctgacaattatgatggtcatgtctttgcatttctctaatgtttcccatcacgatcaaactagttttgttttgcctgtgtccaaactttgcataaatgagcagcatgtgtctggtggacctggcttcttccactcaacattatgataagaagattgaccatttggtgcccatagctattgctcttgcattttcattgctctatagattcttactcaacataccttaaaattttttttat

SEQ ID NO: 4532 - DNA, 1012 bp, Homo sapiens
  misc_feature (1)...(1012): n = a,t,c or g
tggccttccctggcaagctgtctcctgaaaaccaggtgctttccacccccatccactgacttcctcccacttcacttattatctgggcaggaggctgtcacctggtacatcagacatagaaagaactagagaaaaggccatgtgcctccaccagccccaggccaagctcttgcccattctggctgggccgtgcggcgggcttggacaaggctctgcctgccttgtctgaagagcagtgggaagagggttcagaaggccagagagatagaattcctagatgacgctggaagactcagcctgtggccctggcttgccaggactggctgagactccaaattcaggcccttctccttctgcggctgccctctgggtctgtccctaagcccacacctcctcctgctcgcacgcaaccattcagggtctcaaagagctgcttgggacagtgccaggattttacatttcagagagtgcttcaaactggtcaggaaagaactgcatctttctaaaatttgccgagaaaacagaaagaagggcaagatggtctcactntactacacaccccgaggacagcagcaggaagtgagtttgctcgcctgtgggcccagagctggctcaaccataaatgagtctttcaagccttggcattcaaccagccttcagacatgaatcaggacatgtctggaccggccagagctattacatatgtttggccccagaacccacatcggtatagaaaccactgacacccaaaggcacaaaataagacaacactaatgagtcctataaacgataaacaactgcaaccatctcagaaacaccataggattataacagtcaatcatcacatcctggacaaaagtccttccttttcatgtgctgtttgtcactcctacaaggaaagaggcctatattattatcccttttgaaaggtgaggaaagcgaggcttaaagatgcttaccaaggtcacccagcttcaataactagaaactaggtctgactcctcgtccagtg

SEQ ID NO: 4533 - DNA, 146 bp, Homo sapiens
gtggctgagagagaagcacatcccctgggttagtggttttacagtgccctgctctctattgcctcacccttaaaataaacaccacaccctcagtcagagtttgtaaaagttttagttttaaacaggtaaaaagtccataaaaatca

SEQ ID NO: 4534 - DNA, 274 bp, Homo sapiens
gactgcatctgcatgtctgtcctttgaacactttctctccctgcccaaaaggaaacccaaattatttgtgggatactggggaaattgtagtgaagggcttaatgtagttaataaaagttaaaagtcagtagaaaacaggtgcctcagccttcaaatggttgctttttttccattttccctcatgaatagactcaccagcattttaccccccttgttataaaactgtgcagagcacgaagatgatacttatttttgaatttgtatttttaaaact

SEQ ID NO: 4535 - DNA, 3510 bp, Homo sapiens
gtcccgagcgccggcctgcggagcgtagcagcccgggccagacgccggaggagggcgcgcaggccttggccgagttcgcggcgctgcacggcccggcgctgcgcgcttcgggggtccccgaacgttactggggccgcctcctgcacaagctggagcacgaggttttcgacgctggggaagtgtttgggatcatgcaagtggaggaggtagaagaggaggaggacgaggcagcccgggaggtgcggaagcagcagcccaacccggggaacgagctgtgctacaaggtcatcgtgaccagggagagcgggctccaggcagcccaccccaacagcatcttcctcatcgaccacgcctggacgtgccgtgtggagcatgcgcgccagcagctgcagcaggtgcccgggctgctgcaccgcatggccaacctgatgggcattgagttccacggtgagctgcccagtacagaggctgtggccctggtgctggaggagatgtggaagttcaaccagacctaccagctggcccatgggacagctgaggagaagatgccggtgtggtatatcatggacgagttcggttcgcggatccagcacgcggacgtgcccagcttcgccacggcacccttcttctacatgccgcagcaggtggcctacacgctgctgtggcccctgagggacctggacactggcgaggaggtgacccgagactttgcctacggagagacggaccccctgatccggaagtgcatgctgctgccctgggcccccaccgacatgctggacctcagctcttgcacacccgagccgcccgccgagcactaccaggccattctggaggaaaacaaggagaagctgccacttgacatcaaccccgtggtgcacccccacggccacatcttcaaggtctacacggacgtgcagcaggtggccagcagcctcacccacccgcgcttcaccctcacccagagtgaggcggacgccgacatcctcttcaacttctcacacttcaaggactacaggaaactcagccaggagaggccaggcgtgctgctgaaccagttcccctgcgagaacctgctgactgtcaaggactgcctggcctccatcgcgcgccgggcaggtggccccgagggcccaccctggctgccccgaaccttcaacctgcgcactgagctgccccagtttgtcagctacttccagcagcgggaaaggtggggcgaggacaaccactggatctgcaagccctggaacctggcgcgcagcctggacacccacgtcaccaagagcctgcacagcatcatccggcaccgagagagcacccccaaggttgtgtccaagtacatcgaaagtcccgtgttgttccttcgagaagacgtgggaaaggtcaagttcgacatccgctacatcgtgctgctgcggtcagtgaggcccctacggttgttcgtgtatgatgtgttctggctgcggttctccaaccgggcctttgcactcaacgacctggatgactacgagaagcacttcacggtcatgaactatgacccggatgtggtgctgaagcaggtgcactgtgaagagttcatccccgagtttgagaagcaatacccagaatttccctggacggacgtccaggctgagatcttccgggccttcacggagctgttccaggtggcctgtgccaagccaccacccctgggcctctgcgactacccctcatcccgggccatgtatgccgtcgacctcatgctgaagtgggacaacggcccagatggaaggcgggtgatgcagccgcagatcctggaggtgaacttcaaccccgactgtgagcgagcctgcaggtaccaccccaccttcttcaacgacgtcttcagcaccttgtttctggaccagcccggtggctgccacgttacctgccttgtctaggcactcgctgtccccaaaacctgtgcttggggcaggattccaacctcagttctctgagctgcttctgcaaaggcccccatgtccctccccacaccggccctgggcatagcctcagccccaggcctctgtcctgccgagccatcctcccggcgccacactccgggagcacagcatcctcctctcacctgtgggtcagagcaggacagtgatggtgtccccagggctgagcaccaccccacgccctgccctcacccctcaccaccatctgtgcactgatgagtctccagtttagccaagggcttcgttcctggcatggagaatttgttcctggctgctgtgtttccagggggtgctgggggaagggttccgtggagcgagacaaggtgtcctcgggagcagggttccaccgggaagcgtttgggagccctgtatcacacggggcaggcgggtttctcttccggggtctctgctcttatgcatcaggacgaccccgggacggctgtggggccccacactgcacccacagggctctatgcgacaggggcccaggaacagcctgaggccaccacccagcaagcccgccttatcacccattccagctcacccagaaccttcaccagcaaacctcctgctgaggtcctggcaggaggccaccgtcttgttaccgtttccttttcgtttgctgagggtcacagaccccaacagggaaatcagtatctgtcttcccagtggttgccctgctcgccgggcactccacggggtcccgcccttgtgtgagatgggccaggatccttcggcaaggggcgcctggggctggggctgattgtgggcggtggagcgccagacagaaaaggattccaatgagccccagccccaggcgccccttgccgaaggatcctggggctggggctgattgtgggcggtggagcgccagacagaaaaggattccaatgagaacttcaggttaaagtcagatgccacctaccagggtctacagtcaaaatgttggctttttcttattttttaatgtatgggagaaaaatgtaaaattccagttcttttctaattgtgtttctgaaattaggagtcagctgccagcgtttttgtgtggctgcagtgtgcctgggcccagctcacgggcagtgggtggacctaactgcccaggcaggcgagagctacttccagagccttccagtgcatgggagggcagggctaggtgtagcggtgtctcctctttgaaattaagaactatctttcttgtagcaaagctgcacctgatgatgctgcctctcctctctgtgttgtctgggcccttgtttacaagcacgcgttacccttcctgaggggagccatgctctagcccctggagggcctgttgcaggggcagggcgggcccgtcgcctttggcagctcctggagagctgtggacatgcagtccccctcagttcgtgctgcaataaaggccatcttctcttatttctgccctcctttctctttggaccctggagccacaggctcagcctggcctgtcgccccggctgtcactgaaaagccccggataccaagaagtcacccacaaaaagtgggagaa

SEQ ID NO: 4536 - DNA, 573 bp, Homo sapiens
cagatacaacacttaaggaacctaggaaaggaaagactcagacacatgggaataagaggtatcctggtctcctcacctttcctatggaggttataccaaacttttagttttcaaagccaataattttcagcctattatttaaagttatacaagtaatcactggaataactctaaataaacttacatagtttccaaaatacccataaagaagaaaacaaaaagaacacctctcacatagcaattgtaagaaaattaagaagcatgtaaagcagaaaaaagaaaggactagggttaaacatatctattagaatgtaaatgagacactcacctattaaaagaaaaggtacttattagatttttaaacatcaaaaacaaaacctgccaggtgcagtttttggattacagtggctcagacacctgtaatcccaacactttgggaccacaggcgtgagccactgcacccggcctaaatcagcatttttaagggtgagatccaggagtcgatatattttttttaactcttgaagagattgcaatgtacagtcaagactgagaatcattaatttaaaacaa

SEQ ID NO: 4537 - DNA, 378 bp, Homo sapiens
atggaagagggggcatgagccaaggagagtgatgaccttgcagctgagtacggcccttggccaacaatgagcaaggaaatggatttcagtcacataaccacaaggaactgagttctatgagtatcccaaatgagcaaaggaaacaaatcctcccctagagccaagaaaggaaggcagctctgtggataccttggttttggcctggtgctgcccatgtcatacttttgacatacagaactgtaagatagcaagtgtatgttgactaagctgctaaattggtggtgattgcttatggcagcaatagaaagctatatatcctagaagaataaagaaggctagagctgcctgtgggaatgcaccttggggaaagctgggcta

SEQ ID NO: 4538 - DNA, 1378 bp, Homo sapiens
  misc_feature (1)...(1378): n = a,t,c or g
gcctgcgagcagcgcgggcggcagcccgggggaagcgtccgggaccatgtctggagaactaccaccaaacattaacatcaaggaacctcgatgggatcaaagcactttcattggacgagccaatcatttcttcactgtaactgaccccaggaacattctgttaaccaacgaacaactcgagagtgcgagaaaaatagtacatgattacaggcaaggaattgttcctcctggtcttacagaaaatgaattgtggagagcaaagtacatctatgattcagcttttcatcctgacactggtgagaagatgattttgataggaagaatgtcagcccaggttcccatgaacatgaccatcacaggttgtattgatgacgttttacaggactacgccggctgtgctgttctggcagtggattaaccagtccttcaatgccgtcgtcaattacaccaacagaagtggagacgcacccctcactgtcaatgagttgtgaacagcttacgtttttgcaacaactggtgccgtagcaacagttctaggactcaatgcattgaccaagcatgtctcaccactgataggacgttttgttccctttgctgccgtanctgctgctaattgcattaatattccattaatgaggcaaagggaactcaaagttggcattcccgtcacggatgagaatgggaaccgcttgggggagtcggcgaacgctgcgaaacaagccatcacgcaagttgtcgtgtccaggattctcatggcagcccctggcatggccatccctccattcattatgaacactttggaaaagaaagcctttttgaagaggttcccatggatgagtgcacccattcaagttgggttagttggcttctgtttggtgtttgctacacccctgtgttgtgccctgtttcctcagaaaagttccatgtctgtgacaagcttggaggccgagttgcaagctaagatccaagagagccatcctgaattgcgacgcgtgtacttcaataagggattgtaaagcagggaggaaacctctgcagctcattctgccactgcaaagctggtgtagccatgctggtgagaaaaatcctgttcaacctgggttctcccagttacggaaaccttttaaagatccacattagccttttagaataaagctgctactttaacagagcacctggcgtgggccaagtgcctgatactcccttacactgaatcatgttatgatttatagaaatacctttcctgtagcttttatagtcattgtttttcaaagacgatataccagccctcacccaggttttaaaaaagcactggtaggcatagaataggtgctcagtatatggtcagtaaatgttctattgattatcaatcagtgaa

SEQ ID NO: 4539 - DNA, 362 bp, Homo sapiens
tgtttcatggtgtgtctcaaaaattgtttgactgtgatgacagggaagtttggaagaagttcactgctaatgcatgtctccaggaagcagggaatgatctcacagtgacacttgaggcacattgctgaggccgtcgatgagaattcatgtaactttctccagcttacagtggactagattgacatgcaagctgatccagtccaattggtagggcatcatggtttctcattactcactgacttaaaatacttttattgccatcctggtgaagcactgcactgggtagataacacaggggcaccttgctgatcagagcccttggccaggtacaaagagctcagtttctaaaactctgtcatttc

SEQ ID NO: 4540 - DNA, 652 bp, Homo sapiens
caggaatagcgctccagttacctgctgctggggtcggggctggagcctcactcactcggaagtgcttggaagtgtcatctaccctggccatccccgggatccctcccctgctaatctgaactgtgtcctgaaccccagctattggccaggcccctgttacaaactgcgcagaccacccatagccctgctgctgccacctgccctgctgccaggcttacatcttcccagagaactatgctgccacttcacatccactcaccacatcccacctacagactaccacctttcgagatcaggaccaacctggaaaatgccagagttggctatgccttttcagacattgatttggacagctcaccaacccctgaaggggccgttcagcctggttagttttctacctactccgagtgtcctcccctgccccaccagattgctgcaggggcgcggtgtgcctggcagccaaattgttgacacttcttttttcctatgcactggttttacacagctgtcatttttctttcaaaattgcagcagtcccacagatgtgtgcatttggacaaatacgtacttaaaaacaaaacaaacaacgcactcagcccagctcctcaatactacctggaaaaagcattggcattattttcaataaatatca

SEQ ID NO: 4541 - DNA, 506 bp, Homo sapiens
gatatagatcattaccacccacatggaaagagcaagggctaaaaatgctgtttaaagaaacagctacacttttggttctattacattttaagcttaaacattacatatttcaatatgcatcttgaaaaaagtagcagctttctaaacattatgttcagcactctctcttttcacctctaaacttgcacagaagtctctccttgaacttcttcatctttattttgatgttcaactttctgcagaagcctggggcccagtaaaccaataagcagacttccaattggggctgtgatgaggatggacaaaaatgccactgtcaacacatccattccatagtcttctaattgtttctctccatgtgaccttgctgtgtccaaagccacagatcctattgcagcctgaactgtggcctttggaagccatgcaaaagaaataaatatcttttcttttaagttaaaaccagcaaaacacaccatcagaaatgtagtcaaaattcgtatcaatac

SEQ ID NO: 4542 - DNA, 548 bp, Homo sapiens
cgatcatcaaggatctggaaccctgaggtgtgcacagcgctgggatgccaggttcggcctcgaagcggaggatccctgtgtcccagccgggcatggccgacccccaccagcttttcgatgacacaagttcagcccagagccggggctatggggcccagcgggcacctggtggcctgagttatcctgcagcctctcccacgccccatgcagccttcctggctgacccggtgtccaacatgggccatggctaatgggagcagcctgggccgcgcagggcaaggagctggtggataagaacatcgaccgcttcatccccatcaccaagctcaagtattactttgctggtggacaccatgtatgtggggcagaaagctgggcctgctgttcttcccctacctacaccaggactggggaagtgcagtaccaacaggacaccccggtggccccccgctttgacgtcaatgccccggacctctacattccaggcaatggctttcatcacctacgttttggtggctggtcttgcgctggggacccaggataggttc

SEQ ID NO: 4543 - DNA, 455 bp, Homo sapiens
  misc_feature (1)...(455): n = a,t,c or g
gttagatcttattacctctcttttatactacctccattactttccatttttcaggttacaaaataagaaaacaatggatttgagtataattttttgtcacacagtgaagttgtctcgctgggtgagatattagatactgtgttcacatgtaatacattaaagttcaaaaaaattttaaagttatgtttcattcattcattcatttagaatagagatnnnnnnnnnnnnnnnnnnnnnnnnnnnnnnnnnnnnnnnnnnnnnnnnnnnnnnnnnnnnnnnnnnnnnnnnnnnnnnnnnnnnnnnnnnnnnnnnnnnnnnnnnnnnntgaagttattaaaaaaattttaacagcacaagtagccagggttactggatggaaacttttctactttanatctctaattttaaccttttcatctcaaattttaaaaacctctcccacactttttgggctt

SEQ ID NO: 4544 - DNA, 234 bp, Homo sapiens
tttttattacataagaaaggcatcttttctaatagatgttggttgactcagaataaatgttaacatctagaagcaaaacgatacctgaatgattcaactgaactttaaaaaaaattttttgaataggaatgagtgtaaactctagacagtatttctagttgcatatatgagtattttgcctggggtacagcaccctttgggaatgagtgggccaatcaaaaatggcccacaggc

SEQ ID NO: 4545 - DNA, 458 bp, Homo sapiens
  misc_feature (1)...(458): n = a,t,c or g
tggttgccatctctcagtggcccatcattcttacatatttcatcgccattgttattcttttcaggtcattacatcttcattgtaaaatttatcctctcacctgggtttcttctttgtgccaccttagtttcttagataaatcatcatattttcctagattcccatgaagatctgtgaaaggaaaagaggtggtgatttgggacagaataggattcacagcctatagggaactctagagggacaaagttcttgcatattatctaatcagaatgattttagtgccaacttgtaggatctcaaaacttggaaaaaagtaaaaattgtcaaaatatatcaagaatggatgagaagggattaaaaccaggtgataaggatgggaactctcctgaaaggtccattattagaacattctacctttnttatgccccnctttttggnaaaggnccgggcttgtcctt

SEQ ID NO: 4546 - DNA, 139 bp, Homo sapiens
gaaagactttattactaggccacctggcattttccattccattgtggatatagtcatttcttaaagcaagtcagaggcataagttcattccttggcctttgaattccttaattagtatttgtcaggtattgctcgtgcc

SEQ ID NO: 4547 - DNA, 677 bp, Homo sapiens
gggcaaagactcatttcctaatgacagccttttgtaactgaagatctaaataaggtaaaaaataaaaatgcttctccatttctacaagaagtggccagccaggaaagggacttcttgtctaaccctcctgtgaaaatgaggctcattcagtcagatttcaacccagccttctccactttctgcctccatcacccttccgggggcagaatttagcagtggtctgccaccccgaggcagccgctcccacaggaactgcctcattaagctctgtgaccagtaactcccaacttaggaaaagctcaaggagggaccactcctgctttggtttgcacttttccaagaacccttactacataaaacgttctaaacttgggaaaactaacttttgcactgtttcccaccgagccacagagctcgcaccagcatcacgctctccctttgccaggatctgagctcgctggaggaaaatacaagttcctctttcagcttctttccttcacttctggagacaagctttccagctaccaaaacagaacgtttcccaggttttcctcccacacctatgaactttgttccttgattaaatcctagtttcccctctaaacagaactggaccatgtccaaccaatgtcttcagtttctgcaaacattaactctgatgttttttttcaaaaaaa

SEQ ID NO: 4548 - DNA, 408 bp, Homo sapiens
  misc_feature (1)...(408): n = a,t,c or g
gcactctttttgggcaccgagggatgtaatatttnaagaaaatgtgattcagccccatattctccttttaatggcaaattataggttgcatagcacattctgtggttatccaactaaaattaaaatactgcagtttttttactcaaactacccccttgatctcagactttacttctattttacatgaaacaagatgccaacaggaaagatgttaaggaaaagttcctgggagtagcatccatgagtggtgagtgcaggtttgaagacttcagccttaggcccacagtcattagagggtctgtctgaatcctgggttctgtttgctatcctcagtggttcagtgtaaatctaaattgtagaaggttctgagatacaggccaacgtggtcagtcagttgtccagagaagg

SEQ ID NO: 4549 - DNA, 387 bp, Homo sapiens
gccgtctcgctctcactccagcgcgccgggatttcgcccccgcggcgtcgggccccgcggacgctacgccgcgacgagtaggagggccgctgcggtgagccttgaagcctagggcgcgggcccgggtggagccgccgcaggtgcagatcttggtggtagtagcaaatattcaaacgagaactttgaaggccgaagtggagaagggttccatgtgaacagcagttgaacatgggtcagtcggtcctgagagatgggcgagcgccgttccgaagggacgggcgatggcctccgttgccctcggccgatcgaaagggagtcgggttcagatccccgaatccggagtggcggagatgggcgccgcgaggcgtccagtgcggtaacgcgacc

SEQ ID NO: 4550 - DNA, 794 bp, Homo sapiens
ttttttttccacacacacagcctttattgagcagctactgggcagtgacgctgccgaggcgggaatcccaccacagtcctgaccgcagctgggacccctttgcctcctctgacacccccacctcaatttgatacccacttcctgagcaaatgtgacccctagggcctgggattcccaagaccaccccgaaatgcagcggccccaccgtctcctgaggccggtgagcagggggcagcagtgcggctcagcaggtgcgaggcaggcttaggatttcggaatcaccacctggaacttacagacgggcagggctgccacggaggcggtgaccacgctctcaatgcccagggtatagagggcgccgcgcaggaggccgcaggtgaaggccaggaacttgggtgcttcctccagatactgcaggccagaggccatcgggaggaggagggggaagctgttgtcttgcaggacgtaggtcccctggtgattggtgcgcaggctgtccatctgcttctggaacaccgccacccacaggtctttgcacaagaacttgaggacatccagctcctccctgaaggccagcgtctcccggggcagcctctcgcctagagcctggcccacacggaaccccataccctccaggaccgacaggctcatcttctgtcccttggtggcccccgcttcctccccacggagcccggcgctcacccccgggccggggtcggggtcgtgagcccacagctcagccactatctccgtgtgaagaaactcaaacaacacagtatccgccatgcccctcc

SEQ ID NO: 4551 - DNA, 1040 bp, Homo sapiens
ttttttttaaaaatagagcctaagggcctgtattttaatgagaaaaaaaaaatttccaacatagttcgggtagctttgaatggtctagtcaaaaaatacttttggtatataaaaagcctgtacgtacaattcacacctcagtgaagcgccctccttgccttgaggctgggcctgggacaaaggtggcctcacagccagcccaggcagggagatcggcagagaggggtggcccctgaccccagctcctctgccccagctgctgctccttggtggcggcccctcctgacaccaggcgtctgccatccttcaggcaccaaacagccccgtctacctggccctggtctgccctcacaccagttccacccccagccccaaccccaaccaccctccgctgccacggcctccagcacctgactccattcagggaactgaatttgagcttgcaggggtgagaaccacactgagcagcatgacaggctgtgagatcggaggagaagagtatatgctgaggctctcccagttgtcacttggtcttaggggtcctggtgcccgtggcgcggcagtccagccacagtgctgggccctgccacaatcagcctttaggtgaaactggaacaggaagcggaacccccaaggcggccgagcagagtgggtactgggaggcatacacactgggcagcaacactggaacatgtttcccatacagaggcctcctttggtgatgaagggaagaaggatcatgtgtgggaagtgtgagaaaggatgagtgtccgattcggtgacggggggcagagcggtcgcaggggagcaggcctcacagcggcggacagtgttcactgctggagggggtgaatgcctcggggccaagtcagtaagagcttctgtcttcactggcaaccaaccgggggttatgggacttcttaatggcaagaggggtgggtgttttgaaagtgggtatttatttggatttatagtaattggcaaaattcagtccttggaggcgaaagtacctctcccagttaatgggcaaactggagaaa

SEQ ID NO: 4552 - DNA, 284 bp, Homo sapiens
atttgagctgagtccaatatgatgagttaagatggcacaatagtagaatagagtgacaggcattctagagagaatggcccatgcaaaatctcagaggatgggaaaggcttagcgcatttcaggaaccaaaaggtcagtgtggctagagtgtagtgaacagatggcatagtggagtgcactacaattaggtagacagggagccattctcttacaagttttgtcgtttttaccaccaaaatgtattgcaagtgatcttcaaggcctacctggccaactgcattaac

SEQ ID NO: 4553 - DNA, 108 bp, Homo sapiens
ttttttttgacaagaggcttaatgcagaattgaatagccctaatttttttttaacttttattttaggttcaggggtacacatgaaggtttgttacataggcaaactca

SEQ ID NO: 4554 - DNA, 1667 bp, Homo sapiens
gcagcaccaccttgtggagtacatggaacgccgactagctgctttagaggaacggctggcccagtgccaggaccagagtagtcggcatgctgctgagctgcgggacttcaagaacaagatgctgccactgctggaggtggcagagaaggagcgggaggcactcagaactgaggccgacaccatctccgggagagtggatcgtctggagcgggaggtagactatctggagacccagaacccagctctgccctgtgtagagtttgatgagaaggtgactggaggccctggggaccaaaggcaagggaagaaggaatgagaagtacgatatggtgacagacttgtggctacacaaatctctcaagtgagatcaatgaagattctgaagcgatttggtggcccagcttggtctatggaccaaggatccactggggcaaacagagaagatctacgtgttagatgggacacagaatgacacagcctttgtcttcccaaggctgcgtgacttcacccttgccatggctgcccggaaagcttcccgagtccgggtgcccttcccctgggtaggcacagggcagctggtatatggtggctttctttattttgctcggaggcctcctggaagacctggtggaggtggtgagatggagaacactttgcagctaatcaaattccacctggcaaaccgaacagtggtggacagctcagtattcccagcagaggggctgatccccccctacggcttgacagcagacacctacatcgacctggcagctgatgaggaaggtctttgggctgtctatgccacccgggaggatgacaggcacttgtgtctggccaagttagatccacagacactggacacagagcagcagtgggacacaccatgtcccagagagaatgctgaggctgcctttgtcatctgtgggaccctctatgtcgtctataacacccgtcctgccagtcgggcccgcatccagtgctcctttgatgccagcggacccctgacccctgaacgggcagcactcccttattttccccgcagatatggtgcccatgccagcctccgctataacccccgagaacgccagctctatgcctgggatgatggctaccagattgtctataagctggagatgaggaagaaagaggaggaggtttgaggagctagccttgttttttgcatctttctcactcccatacatttatattatatccccactaaatttcttgttcctcattcttcaaatgtgggccagttgtggctcaaatcctctatatttttagccaatggcaatcaaattctttcagctcctttgtttcatacggaactccagatcctgagtaatccttttagagcccgaagagtcaaaaccctcaatgttccctcctgctctcctgccccatgtcaacaaatttcaggctaaggatgccccagacccagggctctaaccttgtatgccgggcaggcccagggagcaggcagcagtgttcttcccctcagagtgacttggggagggagaaataggaggagacgtccagctctgtcctctcttcctcactcctcccttcagtgtcctgaggaacaggactttctccacattgttttgtattgcaacattttgcattaaaaggaaaatccactgctgagaaaaaaaaaaaaagtcgac

SEQ ID NO: 4555 - DNA, 167 bp, Homo sapiens
aagtggattcattggaaatgtatactgtaaactctagggcaaccactaaaaaaagtttttttaaaaaaagaagcatagttgataagctatgaagggagagaaaatagaatcatataaaatgctcagttaaccacagtgggcagaagaactgtggaagacaaaaagag

SEQ ID NO: 4556 - DNA, 268 bp, Homo sapiens
gatttcttcttttgttgaaatttattcacctagataaaggcagcagtttgggactcagatctttattttatcccaccttcttgtcttctgtattccactcttcttatgttctttcccttcatctgtttccttggcctggccagagcagcagtgctgatcttcatttgggaaaggatgttcctgggtattaccaattagtatacagataagtaaagactagttttccagatctaatacttttttttgaagtggttttgctctgtcattt

SEQ ID NO: 4557 - DNA, 1144 bp, Homo sapiens
  misc_feature (1)...(1144): n = a,t,c or g
ccgtcgccctccctacgggcagcccccgggggttggcgaccgaagtctaggttttcgagaaagccagggtgggaaccctaactggactcttcgggacccccaggaaggatctgaggcctgagccatcctcctttctaccctgtctgccccccaggactgggcagttgcaggaggccctgggggggggcccaggactgtggttgtgccccccccccaaaggccggacaggatgggaccaagttagtctgtccagtctcacccagcacctcccaggcccagagagaacccccggggctctgaaagcttgccctgccgcctgaccgccatggagacgaagctgccccctgcaagcacccccactagcccctcctcccccgggctgtcgcctgtgcccccacccgacaaggtggacggcttctcccgccgttccctccgcagagcccggccccgccgctcccacagctcctctcagttccgctatcagagcaaccagcaagagctcacaccgctgcccctgctcaaagatgtgccggcttccgagctgcacgagctgctgagccggaagctggcccagtgtggggtgatgtttgacttcttggactgtgtggccgacctcaaggggaaggaggtgaagcgggcagccctcaacgagctggtggagtgtgtggggagcacccggggtgtcctcatcgagcccgtctacccagacatcatccgcatggtgagcacctgccacccaggctccgagggccggccgagagggcgtgtgatccccgtttcctgtccgcaggacccctgcgtggagaataaccctgtactcatcggcttggctcagtccacgacttccttccccccgacctgctgctgcccaacacccactgaatgcctccgggcctgccccacgtccacacctttgcttatgcttgcctgagacctgggagtgccctgccccacaccccataccatccatgggcctgggcttcaggtgccgcctctgccaagaaggccgctgttcaataaaccaagctgggaaatcttttctttttcctggcccgtaggacctcacaggtttttaggcnttgtttcttccccattgggatttggcaactggctaggaagggngggggnattgttgttcccattt

SEQ ID NO: 4558 - DNA, 855 bp, Homo sapiens
ggctgcgtagacccgggagatttgaccgagaggtggtcattgggactcccacacttaaacaaagaaaggaaattctgcaagtgattacctcgaagatgcccatctccagtcatgttgatttgggccttcttgcagaaatgacagttggctatgttggtgccgacctgacagcactctgtagggaggctgccatgcatgccctccttcatagtgagaagaaccaggacaatcctgtgattgatgaaatagacttccttgaagcttttaaaaatattcagccctcatcgtttcgaagcgtcattggattaatggatatcaagcctgttgactgggaggagattggtggccttgaagatgtaaaactgaagttaaaacagagcattgagtggcctctgaaattcccttgggaatttgttagaatgggcctgacacaaccaaagggagttctcctctatgggccccctggatgtgctaaaaccactctggtgagggccctggccacaagctgtcactgctctttcgtttcagtgagtggagctgatctgttttcaccgtttgttggagattcagaaaaagtgttgtctcagatatttcgacaagcaagagcaagcactccagcaattttgtttttggatgaaattgattcaatcttgggagcctcgctcagcccagcaagacaggatgtgatgttcaagaacgagttctttctgttctcctgaatgaattagatggtgttggacttaagacaatagagagaagaggaagtaaatcaagtcaacaggagtttcaagaagtttttaaccgaagtgtcatgattattgcagcaacaaatagacctgatgtgttagatactgc

SEQ ID NO: 4559 - DNA, 1026 bp, Homo sapiens
ggcataaacatcgggtggtgttcagatcctgctgccggcagctcgaggctaggatggctggagatgtgagggcctttgtctcatcacatccgagcacagctcagcaagatgctcttagctagaaaacagattttatgtgttaatgttaaaaattttgcagttatttatcttgtggatattacagaagtgcctgacttcaacaaaatgtatgagttatacgatccatgtactgtcatgtttttcttcaggaacaagcacatcatgattgacttggggactggcaacaacaacaagattaactgggccatggaggacaagcaggagatggtggacatcatcgagacggtgtaccgcggggcccgcaaaaggccgcggcctggtggtgtcccccaaggactactccaccaagtaccgctactgaggcgccctcagtctgcgcggataaatgtcgtggagccctttttgtatggaaacgttttaagctatttaaagcctttggaaaatacaggaagctccagggctggagcacctctgagatggaattgataacatggtcttaactcaccgaaataaacaagcacgtggtgagaggagcaggcctacttgtttgttctcaggaaacttaatgaatagattactgattttcctagtcaaagttaattcttacccttggagtaaaacgaaggtgtttatcctgtgagcctgtgcgttttgcatactgggttggtttgctggggctgcggtgacagcatatgccgcgagctgggctttaacagagatgtgtgctctcacagctttgcaggcgggggtctgagatcagggtgtcgcgggtggggggtcactgctgaggccgtgaggggaatctgctcaggcctgtccctggcttctgggggctgctggtggtattttcagttccttggtgtgtggatacttcgccccatctctgccttcacctgtgtcctccctgtgtgggtgctggtgtccaaaatttccccttttcgtagtgacaccagctgtgttggattg

SEQ ID NO: 4560 - DNA, 420 bp, Homo sapiens
caatttggaggaacttaagttagaccagcccttgatttagccatgggttgccttctgcagtcaaagtaccaggcaaggccagactctgaatatgactcagatgggaagtagaagtgagtattaatgcctggctccaggttgtccttacctgcctacgctggacttcagtgcgggagttctgaactatcgaggatcagtgctgcttaaacataaaatccagtgtactatggttctcaccccatgcttatctctgatccagaacaactgcctcttgttctacccactctccatctgctactcagaagaatttccccttgctcacagcacccatgttcagttggagccctaggggttaccatgtcagggaagtcccagggagtcactcagaaatagcctttggggcaaggtccagagaaggag

SEQ ID NO: 4561 - DNA, 651 bp, Homo sapiens
gaagatggtgagtgttgcgatttggcgcgtctctgccgggcctatccggctccatccaacctctgaccgtctcgcgggggccgcagttcgtccccgcggctacggcggcttgctcccgaccctgcaggcggctggatgttggggcgaggggcggacttggtgggtgtcgggacgacgcggggctgggaaggcctgtccgggccttcatgtccgggtcctcgtaacccggagccgcgagtgatccccggggacgggtcgaagcggtgtgtccctgtcgggcttctgtccccggcggcgccgcgcgtcttccgcggtgtcctcgggcccggtggccccgggagatgggtgtcgggatcccgctgacgcccgatccgcgcccgcacaggcagaagtagagcagaagaagaagcggaccttccgcaagttcacctaccgcggcgtggacctcgaccagctgctggacatgtcctacgagcagctgatgcagctgtacagctgcgcgccagcgccggcggcctgaaccggggcctgcggcggaagcagcactccctgctgaagcgcctgcgcaaggccaagaaggaggcgccgcccatggagaagccggaagtggtgaagacgcacctgcgggtacatgatcatcctacccgagat

SEQ ID NO: 4562 - DNA, 328 bp, Homo sapiens
  misc_feature (1)...(328): n = a,t,c or g
ggtttggaatgcctttagatgaacacaaattctcagttttaaggtagtcatgtttactaatgtttccttacagttaataggtttgtatcttgtttttgaaatccctccgtacagtgatgtcataatatcaggaacatagtttcaaacttttgtagttttattttttatagttaaacttttttttccccctccatgtttgtagagccagggccttagtatattgcccgggtgnnnnnnnnnnnnnnnnnnnnnnnnnnnnnnnnnnnnnnnnnnnnnnnnnnnnnnnnnnnnnnnnnnnnttcncccacctcaggccgggcgacagagt

SEQ ID NO: 4563 - DNA, 384 bp, Homo sapiens
ggaaaagaaagtactgacttacagtgatttagcaaacactgcacagcaatcagaaacttttcagtttcttgcagatatattaccaaagaagattttagctagtaaatacctgaaaatgcttaaagaggaaaagagggaagaagatgaggagaatgacaatgataatgaaagtgaccatgatgaagctgactcctaaaccaaaagtgctttaaaaaccagcctggcgaggacagccctggacccactccactgtctctaagtaaacacagcactgcccgcttttagcgtcttcacttcttcacagagttccagtgcgtggtattctttcgaggtattctttccaggccgagattgagcacctcatgtacctacgccacagacagc

SEQ ID NO: 4564 - DNA, 532 bp, Homo sapiens
cttctcttctgcttccatattacaggatggccatttggaaacacgatgtgcaagatcagtggattggtccagggaatatctgtcgcagcttcagtctttacgttagttgcaattgctgtagataggttccagtgtgtggtctacccttttaaaccaaagctcactatcaagacagcgtttgtcattattatgatcatctgggtcctagccatcaccattatgtctccatctgcagtaatgttacatgtgcaagaagaaaaatattaccgagtgagactcaactcccagaataaaaccagtccagtctactggtgccgggaagactggccaaatcaggaaatgaggaagatctacaccactgtgctgtttgccaacatctacctggctcccctctccctcattgtcatcatgtatggaaggattggaatttcactcttcagggctgcagttcctcacacaggcaggaagaaccaggagcagtggcaccgtggtgtcaggaagaagcagaagatcattaagatgctcctgattg

SEQ ID NO: 4565 - DNA, 745 bp, Homo sapiens
  misc_feature (1)...(745): n = a,t,c or g
gacctatcctcatctgtgcaaggaggagtggccaactctggagcccaggctgttgcttcctggtctggtggtgaatcctccatagtctggtgagtgtagtgcccaactctggagcccaggatgttgcttcccggtctggtggtgaatcctccatagtctggagatctcagccctgctgagctgatgatgctgactataggagatgttattaaacaactgattgaagcccacgagcaggggaaagacatcgatctaaataaggtgaaaaccaagacagctgccaaatatggcctttctgcccagccccgcctggtggatatcattgctgccgtccctcctcagtatcgcaaggtcttgatgcccaagttaaaggcgaaacccatcagaactgctagtgggattgctgtcgtggctgtgatgtgcaaaccccacagatgtccacacatcagttttacaggaaatatatgtgtatactgccctggtggacctgattctgattttgagtattccacccagtcttacactgggctatgagccaacctccatgaggagctatccgtgccagatatggacccttttccttacaggacaaggacaccggattaggaacagtttaaaacaanttgggttcntagtgtggggttaagtgggagtttntttgtggatggggtgggaactttttggggccnttccagaggattacagagttatttttatttcggaantttacatgatggnttttccg

SEQ ID NO: 4566 - DNA, 1172 bp, Homo sapiens
ttttttttttcgaatgacaatcagttttattgcatgagttatggtgtccaaatgagttaatttgcttttttcaccgtctgagtcaaaataggccacctgcaggcctcatgcaaaatgtagaaactggatagatgatttaagcctcaaaaacgcaagtaattttttggggtgcacgcaggagagggcggatctggggtgtggtcagcagatgaccagccgtggccttgaaggcagtttccagtctctgcagctgcgggatgagggtgaagcccccatttgctctgctcagcctctctgttgagtatttaagaaatcctgattctccgtgttctgccagggaggatactgcagaagagtggactggtgtggccattatttcagcatcttcaccatgtacgggccttgtaatctgtagccgatctttctataataattcctggtgccgaccccttgcaaagtgcctagagtgaacagcttctgtggtggcctcccctctgcctctgccccaggacatccactcctgatatcacagcgattttcccagacccatgctcttctctagctattctttctgcttcctccatcacgcagcatgccaaatccctgatgctgaaatttagtaggatcccggctgctcacagggaccacactcccatacacatgcagctctcgtactatggagacacctccacccaattcgaaacggaaagtttcttctgaacacttgcgtaatcgtaggaggccaatcaaaatgtcttgatctgggtcttcgtatgacaagaatgtttcccagccaccatttgcaacataatctctccttaccaattcaacctggtatggccgtactttgtgatgaatttcttggattccaacttctctggttctcacatctcgacactgtattccgaggtctttcattcttgcaagtgccagctctctcaggttaccatgctctactcctgagctaactaaaggcattggaatatccctctgtactcggtacactcgagtccatggaggcacgagggctaggatccgagccaccaattcaaccaggtcactaggagagtaactcttatatcttcctgatttccaaagctcataaagcccggtcccacgaatcaccagggtaggatagagtttcagcccatcgggacgaaaagcagggttct

SEQ ID NO: 4567 - DNA, 643 bp, Homo sapiens
gccggtcggagggctcctagtgcgccaggttgtgggaagtgaggctggcggtggcgacaaccgaggaggaggggcgggacgccgtggagcacggcgaccggctgagcgtcatggagggctcaggggagcagccgggcccacaaccacagcatcccggagaccaccgcatccgcgacggcgacttcgtggtgctgaaacgtgaagatgtgtttaaagcagtacaagtccagcggagaaaaaaagtaactttcgaaaaacagtggttctacctggataacgtcattggccatagttatggaactgcatttgaagtgaccagtggaggaagtctacagcccaagaagaagagggaagagcctactgcagagactaaagaagcgggcactgataatcgaaatatagttgatgatgggaaatctcagaaacttactcaagatgacataaaagctttgaaggacaagggcattaaaggagaggaaatagttcagcagttaattgaaaatagtacaacattccgagacaagacagaatttgcccaagataaatatattaaaaagaagaaaaaaaaatatgaagccatcaatactgttgtgaagccattaacccgtattcgttcaattatgtattatgcaagagaacctgg

SEQ ID NO: 4568 - DNA, 308 bp, Homo sapiens
cccacctcagcctcacaaggtgctgggagttacaggcgtcagccactatgccagggcccaagagggatggtttttgaggtggttgtttgagatttattctgaacccagggagtctgttcttagctatttcgactggtccttgtcctctttggtaacctagttagcctatgggttagctaatatcactgtcaaatctaccggtccttcttttttatggctgtgtggtgggggaaaaaaaaaaggacaaagctatcagtgtttaactccaataaatattcagaaagaaaaaaaaaagctatcaatgtcct

SEQ ID NO: 4569 - DNA, 996 bp, Homo sapiens
gcaccgctcgagctgccgagagaagctcgctctgcccggctgccctcttgtagtccgccggcgaggggcagttctcggtgaggaggaagagagcagcggacggcacagcacccgcgcgggccctccggcaggcggcttctcagagttttcaggtggcgaaactgactggtctggttagagcgcgtccaagccaagccgcagtgctgtttggatttttaaatttctccttctgagtgagaaaatagcaatcgagatggaaccatccgcacaacagctccagctggcaagcatcacttcccgccaatttatccaacttctgccaaggctctgaaatgccaacaacgtcgaggcctgcacttgatgtcaagggtggcacctcacctgcgaaggaggatgccaaccaagagatgagctccgtggcctactccaaccttgcggtgaaagatcgcaaagcagtggccattctgcactaccctggggtagcctcaaatggaaccaaggccagtggggctcccactagttcctcgggatctccaataggctctcctacaaccacccctcccactaaacccccatccttcaacctgcaccccgcccctcacttgctggctagtatgcagctgcagaaacttaatagccagtatcaggggatggctgctgccactccaggccgaacccggggaggccaggacccctggaaaacttgggactttggggcccaggcggggaggggcagaatcactctctccttctgctggtgcccagagccctgctatcatcgattcggacccagtggatgaggaagtgctgatgtcgctggtggtggaactggggttggaccgagccaatgagcttccggagctgtggctggggcagaatgagtttgacttcactgcggactttccatctagctgctaatgccaagtgtccctaaagatggaggaataaagccaccaattctgttgtaaataaaaataaagttacttacaaagagaa

SEQ ID NO: 4570 - DNA, 295 bp, Homo sapiens
  misc_feature (1)...(295): n = a,t,c or g
gagtggagagtgtctgggacccagctgggtacaggaccagggaggaggggacgctggggaaggtccctgacagcccctagcctggcctgcttcctcatctttgcctgctccatctttctgcctgcactttcttgccccatccttccctcccctcccctcatgtccattaaggtgaggatggacagtcacctccctatattgtcccaactaacccttgccccttgttgctagggcatcaaggttacagagcaagggcttccccctntatttttgctaaaaggggaaggtacaaggg

SEQ ID NO: 4571 - DNA, 705 bp, Homo sapiens
gcaaataaatggggaatgacagattttcactaagaaaagttagttctctaccttatataatgcataaaagaaatattccagatggaatacaaatccacatgtaaaactaaaaccattcaaatatcaaaagataatgatttgacaggtaaagagcttggaagttatcactgctgtccccacaacaagaaaaaagctcagcaaatggaaaatcaacaactcttctcagatccatcagagaaatgaggtcatggggcaaactgctatcctgaaaactggagagacaggtgaatgcagagaatcagaacttacctgagaagccagggaacagaagctgctgctgggagccagtactgtcgggacactcacaggcccaactgacaaatgtaattagcacagaaatgagaagcccaggcatggtgtgcacctgtagtccccagcctacttgcggggcaggggcagaaggatctcttgagccccaggagtctgaggctgcagttactattttcaattactaaagcagttttttaaaagtataatccccacttctggaaaatgatggtgtaattggtatacattgttttggggcagcattaaactggtttacattagtacatgatgacactgaaatacatattgatacatatccgttgtcataaaaatgttcacacctattaactaaagaatctcagtttagagtattttgtc

SEQ ID NO: 4572 - DNA, 843 bp, Homo sapiens
  misc_feature (1)...(843): n = a,t,c or g
tcccattgaaagcatctattgattgtacttaattcatgcatctagagcaatggagatattcttctcttatttacatgagagctcttcaggtttcttcctcaatctcatcttctccagaacaaatagcctctcttttcagtggctgcctcgtcaggttccagatccctcactgtcctggccttcagttttggaggctgaatatgtgaagtttctatgtttggttcatgaattctgcatgggcacctagtatatgtaggatagtaataaaaatgccttaagttcccagaagggctctgtggttttaatgggtgctttccaattcttcccaacccgggggtaggggggaggatatttttccccattttggactgtggagggaacctgaggagccttttcttaggaacaaacagacatcatttaattttagagttgggaaggctttgcatgccatgcccgacctcacatcacagaagagaaactagaagctcanaagagttaagggactngcttcaggtcacatggccaaagttngnntgtgcccatggaaattggactccatttttaagccctttttaacccagaagttgaaccaccacactgtgctgcgtctgtgttgtgcaaaggatgagagaagcataaagcaaataacgggctccttagtgcaaagaacttgcacaggaatagaatgaatgatttgttttgcctttctgtttagttcatttaaaaaattccagccgcttacatgataatagggtataaactataggagaaacattcacagggaggatagtttagagcacactctgaagaacattaggttgtgggagaaaagaatagaagagt

SEQ ID NO: 4573 - DNA, 653 bp, Homo sapiens
  misc_feature (1)...(653): n = a,t,c or g
aatcttagggcttttctttcaaaatcctgcaccatggtgttttgcttttgtgttctctgtatatgcctatcctccacatcaatcccacatcgaagggtgctggcttcttactagctgtgtgacctctgagcttcattccttacaagtgtaaaaatagccaaatggggtaataggtagtaattnnnnnnnnnnnnnnnnnnnnnnnnnnnnnnnnnnnnnnnnnnnnnnnnnnnnnnnntacaggcatgagccaccgcgcccggctaatagttattattttgttttactggtttctcaattattgtcccagtcaggcaagggttactttttttttttgagagacagggtctcactacattgccagactggagtacagcggcagtttaccatcactgcacttacaaacctccaactcctggtgctcaagccatcttcctgactcagcctctcaaatacctcaaaggactaccggagctccccatgcatcgcgcttttttctactttttcgtaagctattggtttcaccagaggtgtggtgttttttttttttcatcacttaagctttaggcccctgccaagcccttgtacctgattttataatttcctacctgtgtaattagagaaagctataaatgtgtaggcttcaaacccac

SEQ ID NO: 4574 - DNA, 823 bp, Homo sapiens
  misc_feature (1)...(823): n = a,t,c or g
gtgcacatcaggcagagcaggccacggncagggacgacgcatcgggacagggctctgcaggggaccgtgactacaggccagctgtgagtggtcccctacagaggctgcccacccaaggtttggttggggtgaaacatgatgacaacacatacacttaagaaggtggganccnngggccgggcgcggtnnnnnnnnnnnnnnnnnnnnnnnnnnnnnnnnnnnnnnnnnnnnnnnnnnnnnnnnnnnnnnnnnnnnnnnnnnnnnnnnnnnnnnnnnnnnnnnnnnnnnnnnnnnnnnnnnnnnnnnnnnnnnnnnnnncagtgggaacagagttgtcacctacctaacagggctctgagagagccgggaggcccaaagtggctggaagaaggtaaaggaaaaatcctgtcttgggctcaaggtcacagagtggggcccagggggagttcctgctgagggcagggccttgccaggcttcagtctccagtgccaaaggaggaaatgcccaggctgtcagcatttccagatgagagcagaagggagaagcttaaacccaagtcacacatccagcaatggagtccgacagcccagcaccatctgggaactgagaagcacctctgcccgggccccacaccgtgtgggaaagtgaggagcacctctgnctgggccgccaccccgtctgggcaagtgaggagcgcctctgcccggccgctgtgcaaccttccaagtgtgaagtgacagccttgtgtgtgatgttttctgccttccccaagtttgcactttcgacattaaagtttactttttagttaaaagttttaaaaaa

SEQ ID NO: 4575 - DNA, 855 bp, Homo sapiens
ttcacagctccagaggctgaccctcatccactgggagtctcaggaacaccccgtgttgaaggtgagagctccaggctgtcctgcacatcagctgtgacactctgggactgttcagtactctaggaagtgggtcaggcaccttgggggcccaacgctgctccgtggggatgtctgcttgcctgcctggttctcttttcctgctgtttcctccagcagggaggtatcagaggcggggacacccaagtaggcctggcatgggcagaaaggaggtcacagctaaggcggtagagtggggttggcaccagccacttgtctgtttcccttgtggatcttagcctgtcgtctcccaaccccagctgcccctctgtctccccgcagctggtaggtgagtgctgtcctcggctcactttcctcaagctctccggctgccacggtgtgactgctgacgctctggtcatgctagccaaagcctgctgccagctccatagcctggacctacagcactccatggtggagtccacagctgtggtgagcttcttggaggaggcagggtcccgaatgcgcaagttgtggctgacctacagctcccagacgacagccatcctgggcgatttgctgggcagctgctgcccccagctccaggtcctggaggtgagcaccggcatcaaccgtaatagcattccccttcagctgcctgtcgaggctctgcagaaaggctgccctcagctccaggtgctgcggctgttgaacctgatgtggctgcccaagcctccgggacgaggggtggctcccggaccaggcttccctagcctagaggagctctgcctggcgagctcaacctgcaactttgtgagc

SEQ ID NO: 4576 - DNA, 397 bp, Homo sapiens
gaatgaccagaaatgtctacctttacataaattagtgtgtccactctttttggggctggtggggtgtcttctgactggccttcatgtgtgggaatagccccattccaagtgctgcttgattgtaaaattggaccaagcctgtcatcacactgcccagtctttgggtagggggagctgagagattctgtgaatattgtcagaagggacatgtttttggatagggagggaaaaaaagcaagatccccaggtcccctgattttaaccatgacgtaggaaaactccacacaggaccctcctcccttccgccctgggcacagagtcccgttgttccttttcatagggcggtgttcaggaaaccctgtgggtggaaatttcaggcctgtgggatttccaggaa

SEQ ID NO: 4577 - DNA, 544 bp, Homo sapiens
  misc_feature (1)...(544): n = a,t,c or g
atgggatctgcctagcctgggctggagtccttgctttgctgctgctgagcttggggccacctcctgacagcagccctgagacgcccatccaaaaccctgttgtgaaacatctgctgcagcagtgccgcctggtggagcggatcctgacgtcctgggaggagaacgaccgtntacagtgtgcgggaggccctcagaaaggctacatgggtcacctgacaagagtggccggtgccctggtgcagaacacggagaaggggcccaatgcagagcagctgcggcagctgctgaaggagctncccaactagcatcnngannagtgggaagccttttatttggngccctgncggagaccaanttntnaacattgtngacctnttaacnctacnattnaattttccntgactatntgacacgcttaaggnttaattccttgagaggctntgctgnncatgcnttnttganttnnnatcancgcttnactttctttattaccattngctcatnataagnttnggaacanatgaaagtttagtngttttttcca

SEQ ID NO: 4578 - DNA, 489 bp, Homo sapiens
  misc_feature (1)...(489): n = a,t,c or g
aattctctcatccctccagggctccccgtgctatgttctctttaccccttccccctcttctcttgctcaggcctgcaccactgcagccacccgttcatttattcattcattaaacactgagcactcactctgtgctgggtcccgggaaagggtgagggggtcagacacaggccctgcccctgccctcagtggactggccagtccagcccaggcggggagagatgtgtacataggttttaaagcagacccagagctcatgggggcctgtgttctgggtgttcaggtgctgctggtcctccattacccactgctccccaaggctggtgggacggggttcgggtggcaggggcaggtatctccttcccgttcctcatccacctgcccagtgctcattcgttacagcaaaccccagggggcctttgcagggtnaagggttctgtgaggagaggaccnagggagttttngggggcnttttggggggttaagttg

SEQ ID NO: 4579 - DNA, 490 bp, Homo sapiens
agcttttgtataaaattgggtgagcttattaaggtgaactcactttctgattcatgtatagtgcaatattctggcagtacctggttgaagtgaaaagacctaaagtcctgtctcctttaatacaaaattcattttaaagatgtcccagtagagggctgagcacagagggctaaggttttaacaaaggcttgtttaattgaaatgaggacataaactccaagaggtagcggaggagagaagttagggaatctgctgactccctcctctcagttcttgctgctgcccgagttcatctttcttcagttcgtccagccctgcaacaaaagagcgcttcagtcagcagagcagcgtagagcttcacgcatgctgagcaggagggctgtcgagagaaaccgtgtagtaaatacagaacgctcattgaaatgccaagtgtcactactttggcatttaattatctgacttgctggcagctggaagtagggaagcaagc

SEQ ID NO: 4580 - DNA, 891 bp, Homo sapiens
ggcctcggagactcggactacaccatcgagatcccggatcagccctgctggagccagaagaacagccccagcccaggtgggaaggaggcagaaactcggcagcctgtggtgattctcttgggctggggtggctgcaaggacaagaaccttgccaagtacagtgccatctaccacaaaaggggctgcatcgtaatccgatacacagccccgtggcacatggtcttcttctccgagtcactgggtatcccttcacttcgtgttttggcccagaagctgctcgagctgctctttgattatgagattgagaaggagcccctgctcttccatgtcttcagcaacggtggcgtcatgctgtaccgctacgtgctggagctcctgcagacccgtcgcttctgccgcctgcgtgtggtgggcaccatctttgacagcgctcctggtgacagcaacctggtagggggctctgcgggccctggcagccatcctggagcgccgggccgccatgctgcgcctgttgctgctggtggcctttgccctggtggtcgtcctgttccacgtcctgcttgctcccatcacagccctcttccacacccacttctatgacaggctacaggacgcgggctctcgctggcccgagctctacctctactcgagggctgacgaagtagtcctggccagagacatagaacgcatggtggaggcacgcctggcacgccgggtcctggcgcgttctgtggatttcgtgtcatctgcacacgtcagccacctccgtgactaccctacttactacacaagcctctgtgtcgacttcatgcgcaactgcgtccgctgctgaggccattgctccatctcacctctgctccagaaataaatgcctgacacctccccacaaaa

SEQ ID NO: 4581 - DNA, 546 bp, Homo sapiens
  misc_feature (1)...(546): n = a,t,c or g
ttttttttttgagacggattcgcntctgtcacccaggctgtacccaggctttcttgtgcgagcaccacaccaagggcaggttgggcttgaaggagcccttgaggaaacacgggttctccgaggggtacaccaggcagggccttcagcttaaagtcgccggctgcgttgccaccgagcaatagggtcaggaggtctccggcggctttgacccaggggccgactcatcttccacaggaaaatgaacgtcctctcggcaggcgcttacagaggaacctgggcttattcatggtgaacaccagccagagcttattcatggtgaacaccagccagagtgtgtagccgccctccgggattcaccctgcgcattaacgctgggttcttgcacgctgcgttcttgggccgctggccccgatgctgctcaagctgtggcgcgccttaaagccagcgaatcaccctcgaccggccccgaagctactcgggctaggcgccctcgccctgctcctgcttgcggttctcgaacgggctgtgggctttctcccgaatgag

SEQ ID NO: 4582 - DNA, 939 bp, Homo sapiens
gcggcacgagtcgcggccgagatggaccctgggctcggcgtcctccggaaaactgcactgtgaggcggggcgatggggaagggccgaagccgccagcccagctaaagcagacggctcgcactgcgacccgaagcgggcccagcacagggatcacattgtcggggtgacctggatcctacttgaagcctttgagctggactgtggctttatccctgaggccaggcttcatgtccagatggccatgccagaggttgacgtggcagagaaggagtgtgacacaggccagtggagcgagtggagccagcctgtgtgcttccaggctccccagagacaaggaacagtaagaggaccttgtgcatgaataatttgtttccacactacagagtgggtaataagcagattagtaaaaacaattctgcttcacttcaataacagcctcctccaactcattttttctcaacaaacttatttttgcagcagaagaatcccagacttcttagagaacccagtgactttttgcaccttaaatctgtgaaatcctcatgttttcttctgccgtatccatagttcaaacaaagatgaggcaaagctagacgcattcctgaaggaacccaagaaattcctctctttctctctctggaatgaaatgaattctctagaccaccagttctaaccttcaaaaaccaaacctgtttgtgagatctccttcaaatactactgtagaccccagtgtttattcattaaattttttaaatatttgttttatttggaatcaaagtatttgtaattttagtatttgtattaatataagggagaaatgtttaaatctgtctatgccacatgtgcctctggcttattgcccaattaattgtagcctcaggctaaactttggtttctgtctttaatttttgtcagaagaaatataactgatctcaaaac

SEQ ID NO: 4583 - DNA, 1219 bp, Homo sapiens
ggcacgaggcgatgtctactacttcagtccaagtggtaagaagttcagaagcaagcctcagttggcaaggtacctgggaaatactgttgatctcagcagttttgacttcagaactggaaagatgatgcctagtaaattacagaagaacaaacagagactgcgaaacgatcctctcaatcaaaataagggtaaaccagacttgaatacaacattgccaattagacaaacagcatcaattttcaaacaaccggtaaccaaagtcacaaatcatcctagtaataaagtgaaatcagacccacaacgaatgaatgaacagccacgtcagcttttctgggagaagaggctacaaggacttagtgcatcagatgtaacagaacaaattataaaaaccatggaactacccaaaggtcttcaaggagttggtccaggtagcaatgatgagacccttttatctgctgttgcccagtgctttgcacaccaagctctgcgccaatcacagggcaagtctccgctgctgtggaaaagaaccctgctgtttggcttaacacatctcaacccctctgcaaagcttttattgtcacagatgaagacatcaggaaacaggaagagcgagtacagcaagtacgcaagaaattggaagaagcactgatggcagacatcttgtcgcgagctgctgatacagaagagatggatattgaaatggacagtggagatgaagcctaagaatatgatcaggtaactttcgaccgactttccccaagagaaaattcctagaaattgaacaaaaatgtttccactggcttttgcctgtaagaaaaaaaatgtacccgagcacatagagctttttaatagcactaaccaatgcctttttagatgtatttttgatgtatatatctattattcaaaaaatcatgtttattttgagtcctaggacttaaaattagtcttttgtaatatcaagcaggaccctaagatgaagctgagcttttgatgccaggtgcaatctactggaaatgtagcacttacgtaaaacatttgtttcccccacagttttaataagaacagatcaggaattctaaataaatttcccagttaaagattattgtgacttcactgtatataaacatatttttatactttattgaaaggggacacctgtacattcttccatcatcactgtaaagacaaataaatgattatattcacagacaaaaaaaaa

SEQ ID NO: 4584 - DNA, 389 bp, Homo sapiens
  misc_feature (1)...(389): n = a,t,c or g
ggacaatttcgtcttattatttttgaatttatttctgattttactgggtttttaaatgtttttctccccttgagtatgtgactttaatgtgtgtagtgtatggtcacctagctttggctctgggtgctttcagtggcaaagactgtgtatgagctctttggttgtagagaatctttgtgcagtggctttcttagctgctggttgtagtagcagtgtgctgggtgtgtgagaaggctcactgtctccctctgccattgaatagttcagccttcatgctagtacaggcacccacaggtaaaaaccagctgcagctgaagtangtgggtatatgcagtacccatttgtgggcanaaggccaaccttgactgaactggctggggancnccaat

SEQ ID NO: 4585 - DNA, 538 bp, Homo sapiens
tgggcaaaatttgaccccccgggcagttgggagaagcatctgagtcagaggtcacttacctgcttgcataggccgctgacctataccaagccttagtttcttcatcactaaagtcagagaaagaacccactccacctgcctctgggacagctcagaacgtgttaaccctttcagcagtgggtccttcttcatcttcttggcgctgtttggatccctgtagcgtgacacataaaaaagcacacatccggccttaggatatgggtaggctctggtttgggcacttgagaactctcacagggagggaagcaagcatacaattcaacaagaatggcacggtgtgttgcattcattctcaagatgatggggtgaggcttttattagtgctgagcctgctgtttgtttccacagcagggctccaggggagaggtgatgtttgagttgggtctcggaggattgctaggagttctctgagcccacccaggcacaccagctttggggggcatgtagggtattgaagctcatggtgctagctctctcc

SEQ ID NO: 4586 - DNA, 558 bp, Homo sapiens
agcgtgggctgcagcgcctcgccgctctctcttccccaggtgtgtgcagtggcctcagggatccggaaagtctaggactgaacttctcctaacatccagtaatggggacctggaacctgggcgtactagagtgccgcgcgtagggctccaggtcgctggcttctgcgctttcttcctctccaaagttgagtatctcctatctgtgtcctcatacatactgccgcctgaggtgccatggcccccaagccgggggccgagtggagcacagccctgtcccatctggtgctgggagtggtgtctctgcacgcagccgtgagcacagccgaggcaagtcgaggggctgctgctggcttcctgctccagggtcttggctgccaccaccacgctgggccccagggctgaggcacacatgaagactgccttgctggagcctgggtggccaccgtcatcggccttccccttctggccttcgatttccactgggtgaatggggaccgctcctctgccaacctgctcctgggaggaggcatggtgctgggcagtggctggcggccacct

SEQ ID NO: 4587 - DNA, 867 bp, Homo sapiens
ggttgactgtaacccctgagggcagggactgcctcccagccaattttgtccctgcatctcaggattcctttcattcttggaagatcccttctgatccttttctttgttccctgctggggaacaaggatccaggagaggaggaggcagccagctcaccagaagcacctcatccacccgcacagggattactgggctgctgtcctggagggacagacctggaccagctatattgtttcacttattttactggaagccctaaaagttgtatgggagcaagtggggtggggtatggggtgtttatcttgttatttgaaagagccctgtaagattgaacagtctgcactctctgtcctttcctggaagcagagggccccggccaggccccagggactgggcgcttgttttcttagagcacagcgtacttgaggcttggggccaggtggagccgtgctggcctgcagggaggctggccctgctttccctaccaggaaacagagatgacaaggctttgagccctggaattcctccctgcctccgcccttctctcctgctcactgagggcgcgtcctgtgccctgtcatcccagggccatgtgactccaattggcgtatctgtattccaattccaatgctgaccgtttctccagggctggctgttttccatctgatgggctgggtaattctcaggataccaggtccctgggcagcaagccacgctgttcccatctcccttcccagaaagatgcaaaagtacaaagtcacccactcccccagggccgggctgctgaccaagtgccagctctcagaacagaattccatgtctcagttcctgttccagctcctcggccgcccctaacaccagcagacg

SEQ ID NO: 4588 - DNA, 1384 bp, Homo sapiens
gagccggagcccagtgacaggcgactgcctcttgccgccccggaccccgggcgcttacctgtggctgctggggtcggccgcccgggaccaggctgggagccccgagggttcccttctggagaagagtcaccgggtttggttctgtttcccctttctgctcgacacttctgggaagcttggttctcagaaacgcttcgttaagggactcaggcagtacgggaagaacttcttcagaattagaaaggagctgcttcccaataaggaaacaggggagctgatcaccttctattactattggaagaagacccccgaagcagccagctcccgagcccatcgtaggcaccgcaggcaggccgtgttcaggaggattaagacttcgcaccgcgtccacacccgtcaacacaccctccagacccccgtccagtgaattcttggacctaagttcagccagtgaagatgacttcgacagtgaggacagtgagcaggagctgaaggggtacgcctgccgccactgcttcaccaccacctccaaagattggcaccacggaggccgggagaacatcctgctttgcaccgactgtcgcatccacttcaagaaatacggtgagctcccgcccattgagaagcccgtggacccgccaccgtttatgttcaaacccgtcaaggaagaggatgatgggctcagtgggaagcatagcatgaggacacggcggagtcggggctcgatgtcgacactacgcagtggtcggaagaagcagccagccagccctgatggtcgcacctcacccatcaatgaagacatccgctccagcggccggaactcccccagcgctgccagtacctccagcaatgacagtaaagcagagacagtgaagaagtcggccaagaaggtgaaggaggaagcctcttcccctcttaagagtaacaaacgccagcgggagaaggtggcctctgatacggaggaggctgacaggaccagctccaagaagacaaaaacgcaggagatcagcaggcccaactcgccatctgaaggtgagggagagagttcagacagtcgcagcgtcaacgatgagggtagcagtgaccccaaagacatcgaccaggacaatcgcagcacgtccccgagcatccccagcccccaggacaatgagagtgactcggactcgtcagcccagcagcagatgctgcaggcccagcccccacgttgcaggctcccactggggtcaccccagctccctcctcagctcctccagggacccctcagctgcccacgccaggcccacgccctctgccactgcagttcccccacagggctcccccacggcctcccaggcccctaaccgagcgcaggctcccacagcgcctgttccccacacccacatcc

SEQ ID NO: 4589 - DNA, 1150 bp, Homo sapiens
gtcatgtcctccgaggtgtccgcgcgccggatcgccaagaagctggtgcgctccccgagggcctgcgcatggtgcccgaacaccgcgccttcggaagcccgttcggcctggaggagccgcagtgggtcccggacaaggaggagccaccttcctcgtcacgtttggaaactcagagaaacctgaaactatgacttgtcgtctttccaataaccagagatacttgtttctggatggagacagccactatgaaatcgaaattgtacacatttccaccgtgcagatcctcacagaaggcttccctcctggaggaggcaacgcacgggccacaggcatgttcctgcagtatacagtgccggggacggagggtgtgacccagctgaagctgacagtggtggaggacgtgactgtgggcaggaggcaggcggtggcgtggctagtggccatgcacaaggctgccaagctcctctatgaatctcgggaccagtaattctacgtggggctgagcttggagtacgtgtggtcaccaggactgagtcgcttggaacagcagagcctgctccttgcgtaccacagggattaatcctgcttgtgctgggaaatgcaactcactcatgtatttggagaaacaggagtgttcacttatctagtgcaatatgttcacagtttattaatgctttaaacagcttcatgttttagaatttgtgtattgtccatacttaattgggggtgggagagactgagctacactactgctaaactatttttagcataatatataccatttttatgagttcgcaggtctactagaaggttctggcccatcaatattcatttcatttaattcttccacagaaccagtttgggcagtaggaactcaggcttctggtctgcagtggagcctgttcgcctctaatagccagtttacagcacttgccttagcctgtttcacagacttgtccacttaccttgtcactaatttggggcttctgggctgtgagtgatcctttgatacttcaccaaggggaacgtgggggctttgtgttttgtacttttcactcactatttcactttattaagatgactgtacagcaatttgtatataaagcttatgattaaaaactattttgaacatacggaaaaaaaaaaaaaa

SEQ ID NO: 4590 - DNA, 531 bp, Homo sapiens
  misc_feature (1)...(531): n = a,t,c or g
gcgggttctgcctgatgctcagagggtaactggatgctgaaaactgtgagtctttcttcaactcaggggaatgtttccagggcacgccaggcctcactcacgcaggcctccgcgacaactgttcagcactgactgagggtgaagtgaaatcctgaaagctnnnnnnnnnnnnnnnnnnnnnnnnnnnnnnnnnnnnnnnnnnnnnnnnnnnnnnnnnnnnnnnnnnnnnnnnnnnnnnnnnnnnnnnnngagaccaggacccgtttaggattaagcaagttttactnnnnnnnnnnnnnnnnnnnnnnnnnnnnnnnnnnnnnnnggannnnnnnnnnnnnnnnnnnnnnnnnnnnnnnnnnnnnnnnnnnnnnnnnnnnnnnntgggcccatttagatcaagtaaatttactgagtcctcaaaggaaatcctcagggncaacccccatttnggatgaaaanaattgancacgtacgtctttaacaatgcacactgacacggngacacagagcttaaaaggngtgtaaccc

SEQ ID NO: 4591 - DNA, 67 bp, Homo sapiens
acaacagaaaaagcactgggtgaaacctaagggaatctgaagaaacaattgactttagttaattttt

SEQ ID NO: 4592 - DNA, 573 bp, Homo sapiens
  misc_feature (1)...(573): n = a,t,c or g
ggttgaacagaagtggtggcagtaggcaactttgtctcattcttagtaacattcagtaattcaccatcaactgtgtttgtggaaaatttttgtagatactcttcatgaaataaaagatactccctttcatttttagttgactaagaattgttattaggaatgggtattgaattttatcaaatgcttcgttctatcaggatggatcataccgatttttcttcttttgttcctttggtcttttgttcctctgataaattttacacatttcttttcatctttattttgaatgttcagaaattcctgaatatgatccttatgacttcaaaaataatatttattgctcagaacatgtagcttttaaaatctattcttcattaaacactgattatctcatttgaagtatttcacataagtgagtatgcgtaagagtttttgaacacaggccaggtgcagttgtcaagctctaatccacactttgggagctgaagtgggtgggcacttgaggcnngagttaaaaccagcctgccacattggtgaacccctcttactaaaatgaaaatagctggggggtgg

SEQ ID NO: 4593 - DNA, 705 bp, Homo sapiens
  misc_feature (1)...(705): n = a,t,c or g
ctgctgtgtgttttcatcttgcttccttatggtccatgatgccagccgaggttgtcagtgcaatgaaaccaaactggcaggatggaagcagattattctgccatttttctagatctttgagttgcacatcaaatctgaggctgatcactccacacttgtttagcccgcctgtgaggttcacaacaattttcccagctctgtgatcatcaatgatttcaaatttgccaatgtaactgagttaggagtttttcctgccgatgggtttgtggtctcgctaactttgatgannnnnnnnnnnnnnnnnnnnnnnnnnnnnnnnnnnnnnnnnnnagtccacggaccaggagagtgagcagcagctgtttattgaatgaagcgaaaggaaagcttccacatgctggaaggggacccagaagggttgccattgctagcttgggcggctagagctcatatccctgttactccctcccctttctttctttttgtccgttaagagtggttcttccttcaatccccccttggagtggttaattttgaatccttcattcgatcagttaagaactcaaaaccctgagtcangggggtcttttgtaaaagtccccaaactggcccaggaagtcccgccaactccacccctcattaggatgcatcactggcctcgtgcaccggcttcaccagcactngcacccnaatcaaaacaggggc

SEQ ID NO: 4594 - DNA, 1061 bp, Homo sapiens
tttttttttcagcccagcccttggggcccctttattgaaacaactcacagcacagtatttgagacagacagtgttggccggcggaaccccaggaggctgagaagtcgaggttgcggcatccctcactgccctcctgggggaggcatcctccaagcagacctgagcggccccgggctggggcgggcgatccacacacagaggcgataagagcacttggaatcagggcagccatgcagcactgccctaggcggggatcccccaaagtctgacagtttgggcatcagtggggtggcaggtgccccctcagctgcctttatgagcgcgctcttccacgtaaagctgcatctttaaaatgtccgacgtcatggtttttagtggtatcagccgggggtcatgcatgtggacatcctgctcatccgccaggatccaggggaaatccttgatgacctggatcttctccatgttgcgagtggcggcttctctcgtgtgcaccaggactgtgaaggtacagcctggggggttgtggtccaggacggcatcgcacacgctgatcttcaggatgaaggcccggagcagctgctccacatgagacaacagcgagtctgagctgatggacagcagtggaggctgggtgatctcaaagacgaatttctccactgggcggtgctctttatccaaaatcaccaccaccactttctccacatcattcttctccaggagtggcttgacgcagtgcagcgtgtcctggatatactgattcagctccgggtggcaggacatctggaccggcacgttgtacttcttgcgtttctggaagatgcccacggggtagacctcgcgcacgtagaggatgagatgcacagccacctccaggaactcgcagagcacatcgccctcatttggccaaagttgaggtcttgtcgtgtgcgcgtggtcagccttcccgctaccggctctgcgctcggttccccgcgagacgtcgggcccggcccgccgcggggagccacctgaccggaccgatcgcgcctcccgctcaacccggggcctcgcgccgctcggtg

SEQ ID NO: 4595 - DNA, 325 bp, Homo sapiens
ggatgaacacctactcatctttctggactgagctcagatgtcaccttctgaagagacccttcctaactactgcttttccctgttccccagtccccattagaagttggcagcccagtccttgcagctccagctgtcatgtgcacactgtggcccaacacccatgaggcttcacggggttccctgatggctgtgagtctcttctgtaatctcagcttctgggggataggcatggtgttccattctgcatgctgcttgtcacataataggccctccagaaatactactgaatgaataaatgcatctaatagtcaagaaacatatgaca

SEQ ID NO: 4596 - DNA, 216 bp, Homo sapiens
gagaaatcccagtggaaaaagacctggctgtctgatattgcgtggtcctctagcctctctagacttttattaccttgtctgggtagagaggatattattatgggaatgttattatttggaaatcaaattagatcattgacagaaaaatagtaaacttctaccccttagctcactccatactgaagcagttaaacccacaaagaaccacatgcttaa

SEQ ID NO: 4597 - DNA, 415 bp, Homo sapiens
  misc_feature (1)...(415): n = a,t,c or g
ggcacgagagatgttaattcattaaaaaaattgtcataatgtgaagaaaccctttaattggatagcttttccttgactctgtcaagctgtggaaatggttaagatctaaaaatgctgggaacaagttagtatgtttgaaggtacgtagctattccacacacgtgtgcacttgctgaggatatctgaggtcactttgtcattaggtgcagatagctggcatccagctaggacaacagttgatgccagctgaaaacacagaccccttggctgttaatacacaagcagaaaagattcttgtgttcaccatgcagcttgggttttaaatttaatccaagttgcagttttcaaagtatagttttttgaaatcctttcatcattattttgggcacttttacnggtgtggcctttaattttt

SEQ ID NO: 4598 - DNA, 839 bp, Homo sapiens
cgtagacggtcccctatagagccaccggaggagcagctcacctgagagacggagccccggctcgcccgtgtgcagagcggacaaggcaaaatctcagcaagttcggacctctagtacaataaggcgaacctcctctttggatacaataacaggaccttacctcacaggacagtggccacgggatcctcatgttcactacccttcatgcatgaaagacaaagctactcagacacctagctgttgggcagaagagggtgcagaaaagaggtcacatcagcgttctgcgtcatgggggagtgctgatcaactaaaagagcagatcgccaaactgaggcagcaactacaacgcagtaaacagagtagtcgtcacagtaaggagaaagatcgccagtcacctcttcatggcaaccatataacaatcagtcacactcaggctactggatcaaggtcagttcctatgccactgtcaaatatatcagtgccaaaatcatctgtttcgcgtgtgccctgcaatgtagaaggaataagtcctgaattagaaaaggtattcattaaagagaataatgggaaggaagaagtatccaagccgttggacataccagatggtcgaggagctccacttcctgctcattaccggagcagtagtactcgcagcattgacactcagactccttctgtccaggagcgccggttagctgtgcaggtacattcaccctgtgtctcccctttttgtccccggaatcccaggatggtagcccttgctcaacaggagatttgctctatgatcgtgataaggccagtgggagtgctcccgttcccgagtttgcttctctccaacc

SEQ ID NO: 4599 - DNA, 443 bp, Homo sapiens
  misc_feature (1)...(443): n = a,t,c or g
gggtgcacatgtctgcattcttgagttaggtggttatctccatgcactggtgcagttgtttcagttgagaggcagctacctgtcttctcaaacatgatgaagtgagcctgtcacttcagggaaaacaattgaaaattcaaggtttaaagcaaaaattaaaatttagaaaacttgtatccactgccgtaacctgccagcttcccagtactttaagacttttctggggaactcaatagtaatgttatgtgcatgtgaattaatgggtgtgacatttttgatgtgtaattacatgggctcaacgtttgggaagatctgcaaaagtcggtgaaccacagttttccaaatgatacggaaatccatgtacgggtaaaggnttgttccaaggtncaggttaacccaggtaggggtttggaaagttccttgntagggtttncagcntttta

SEQ ID NO: 4600 - DNA, 602 bp, Homo sapiens
  misc_feature (1)...(602): n = a,t,c or g
gccgtttttaccagaaatgcctgattgggtgccattttacaatcccctcctagcctagaccacagagccacctgattgggtgccaagtatcccaccccgacccccagaagccccagctggccttcaccctccccactagtatccttcttttgtttatgttgtgtattttgtgtatctagatcacgttttagtagccttgtagttccctgttactgggaagcatttcattgcctcccagcttgggagcatccaaagtagaanccatgactgggtcatgaaatgggttaatttggtttctttcattacagggcaaagttctccctgtggactgagaaataaacatattataaaagttacatatgctcatagaatagaaatcaaagagtaaaaagtattgagtgtaaaaaacaagtgtcttttttccccccagtctaactccccagaagtaaccttttttattttttatgttattttttcttaccttcaaggaaggagaaaagtaaccatttttgagttgatgcgtatccttcgcctgagagctatctttgtaatcatcctttttggttcctttttcattttttgctttctttctgtcgtagctg

SEQ ID NO: 4601 - DNA, 488 bp, Homo sapiens
gtcgacgcgagactaagtctcaaaaaacaaaaaaagcaagcagataaattctaaatcagtgttgagtggtgacaagtgcttgttcttttgctgtttgaatggataacactatcaaagctagacaggagtcagaatgtgtaccctgtattgtggtgactgggggaaggacagagacttaattccaaatttcaaaaaatttcagtgcagcaaaagcagtaacccccagttggtcctacctgaggggaaagcctgccctgtgaacggagaggaaaggggttctggaagaggtgggcagcactgggcaggttgatgtttcacttaagttcaacactgagccctagcaaggggtggatgtcacgctgggctcgcctccagccaggcctgcattcccaaatctattgccagaaaccatgtatggctcagctcacaaagtggtttagtgaggtataagaggagacttcactcttcttcctcctcttatcctggtc

SEQ ID NO: 4602 - DNA, 1007 bp, Homo sapiens
ataggaaacatttttagtgaaggcgtttgttttaaatgtattctaacctagcaatgtagaaagcaggcaaacatttaaaaaaaatttaaccagtttctaaaacatagtttggagctcagattctggggaaatgattaacacaccctacatccaaggtctcctttcctttctagaaagaaagcatctttaaacatacatattcatcagaaatacaaatatttgtcatcagtgatactaatttccaggcaaacattttaattgcagtcaatgtattagattctaccaggttttaatttggatcggtaatacgggtttgattagggttctaggcctaattataggtcactagtcttcctttaggattatgcaccatctgttattttaaattgaccattgagggggttcccaagggttctccttcgttttgttatcaaacgttaggtttaggattcttgcgggtggtgggatccaaagccagagacggtttcaacaaaaatgcaagcgcgaatttgtcttgcgtctgaacgcactgttcaaattaaacaatttagacatgccccaactatgacactaagaagtgaatggtatagtacacttttgtcacaaattcaagggtaatttaagtgcccgatggtagaggtctggcttcccctgggtttctggaacaaaagaagcgttcgcgaggagaggggtaactccccgccctccccctcccaaagtaaatcaaatcaaggaatatgagtgcctgcagacaagcctcgcttcttttcttccccttcagggctagcgtttggggaaggcaaggctgcggctactcttggagcttcagtgtcccgggaggaagaaaggcccagccaagggtcctcacactggcgtggaattcggcgcgttcgtaggcgatcgaccccagagacgaaagctgcttctcaagctgggggagggagaggaaacggcgcacaaaagcagtacgacctgtcccttatcggcgtctaaggggaagggtggag

SEQ ID NO: 4603 - DNA, 542 bp, Homo sapiens
gggaaaagtgatgtgtctccacaagtgaagaaagaagaccccaaagtgggggtccagcctgctgtgtgtgtggaaaagaagacaaaactggttgtccccaacaaaatggaaatcaatggattgaacacctgccaggaagttaatggtgtggatcacgctgccccagaaacttatccccaagacattttctctaatgggcttaagccagctgggggactcattcatctggatgcccttgatgggaaatcaaatagcctggatgattcaactgaagaagttcagtctatggatgtgagtcctgtttcaaaagaagagcttatctctatcccggaattttcaccagtgagtgaaatgattcctggggtgtctctggaccaaaatggaactggtaatgcccgagcacttcaagatctcttagatttcactggtcccccgacattccccaagagatccagtgaaaatctcagcctggacgactgtaacaaaaaccttatcgaaggatttaacagtcctggccaagaaactcctctcaacaccttctg

SEQ ID NO: 4604 - DNA, 590 bp, Homo sapiens
ggctggtggttaggtgacagtattttggtgagtctgtatctttcttaggtctttctaacttctatagccttaaaataaatgagtacctactataataaactattgcaacttttcgtcagtggtggaaaacttcactgtctagactactttttataaagtggttatgaactacttgttatgaactataaaccagtaaatcttatattagctgcttcatagacattgctgatatttgtttatccatgaaatggtttttcctagatacctaaccttgtagtttccttggggagatacaaaatgattctgcacaaaaagcagtttttacctaacttgtaatcagagaatactctttggaggaatttaaattggagttttgtaaagaaaaacttagatggctttcttaatttttcttaaaggatgggtcatcagttaaggaagttgaaacctaccaccggacacgtgctttaagatctttgagaaaagatgcacagaattcttcagattctagttttgagaagaatgtggaaataacggagcaacttgctaatggcaggcattttacaaggcagttggccagacagcaggctgat

SEQ ID NO: 4605 - DNA, 526 bp, Homo sapiens
tggtttcctcgtcatgtaataaagaccaaacgggaagatattcgagagctcatcttgaaacttcatttacagcaacagaagggcagcagtagctagttaatctgtacaaacatgacacagatgttctctaagattactggaaagcctcttaccagcatttgtgttagccagctcacagagaagaaaataacttgcagtagttttataataagtcattggaacattatttaaaatatgtaggacacattattagaattgttgggatctcatagatggaatgggaatgggggtgatatagataaacttactagatataaattaaaattttataaatatttcatatttttctgagtaaatatgattggattatgcaacagcatatgtaatatgggaatgttttgtagataataaaacttacatgatctgtacttccacgtgactgggtgctgaggggagttaaagcctccctggtgccagccccagtgcttgtcaaatttgctgacaggtcacatcatatttgtaattc

SEQ ID NO: 4606 - DNA, 505 bp, Homo sapiens
  misc_feature (1)...(505): n = a,t,c or g
ggggaggaattaatttaattacactttgtaatgtgttccctcttataaaatctccagagtgagattttcctttatatggaatcatctgcatttaaaaaaaaacttcgtaaaacatgcaaagagcagctgcctatatttgcagctgcaagacagacatttttactacacagtttctgcttgaaccatgacaggtgaagtttaaaaggattcattctagggcaaagtggttagtctttaaaaagttttgttgttgttgttcttgttttatttctaggcccaatcaaggcatcctttttgggaaagttctttctccagtttcaggaatgtaggagcctagttatgcttctcattcctcctaatacaaaagatgtttgtatttaatatgagggaaccaagtaggtgaaagattctggactctgaagtcagcctgggcctgaacctcattntgaaacttattagccgggaatcttcggaaattaaaaggtctccctaaggtgcttatttt

SEQ ID NO: 4607 - DNA, 335 bp, Homo sapiens
gtgaacaggacagagatctctgcattcctggagcttatttgagggggaaaggagaaacggggtgaattatagataattaagtaaattatacggtgtagtaggaggtgataaatatcatgggaaagaaaagaaatctttttcctcctcgcaaaggtggcatttgagccgagacttgaagatacgagaggtctgagagaagagtcgtccaggtagagggaacagcccccgggaaggtcgtgaggtgggagtgtgtctgaagggttggcggagcgtcaaggaagccagcatggcagaggcccatggacaagggggacagtcataggagaggaggttat

SEQ ID NO: 4608 - DNA, 504 bp, Homo sapiens
  misc_feature (1)...(504): n = a,t,c or g
gatagtgtattaacactactgtttggatttccaaaagatcttgctagtatgcagcatcttattcatgtcacatgctttttctgaatttcaggacccgatacccagtctctagtgggtggatgctgaggacagcttggaaggtgccatgctaacaggggcctctcagagatgaggttctgatattgcactatcaaattctgacttgtcctatcccactccaagtcataggaagtcacctttatttaaatgtggtttgcttaaatgtacttgataattaaaaagaaacacacacacacaaatatattcacaactctatttcaaaggaactatcttgtgggcctcattgaatgtgggcaggagttgcagtgtgggaaaagttaatggcagccactaatggcatttcactcagctttgggggaagccctaaaaacagatctgaggcacagactgggagactcaagncaagttggaggggctntccttgagaccaggactgcagctatt

SEQ ID NO: 4609 - DNA, 3579 bp, Homo sapiens
tctacaggagccattttaacagctaaaacttgtcggattgctttttattttcaagctcaaaagacgatagagaaagaatacttgaaggccaagaagcttgagagaagaaaaatttcagaaaaattgtctcaatttgactagaatatcaatgaaccaggaaaactgaagcaccttccctaaagaaaacttgggtatacaattactccacagacagagctgagggttttttacccaaatcagtcactggattttgctgcctgatacgtgaatcttcttggaatttttctcatgtggatctaaggggaatgctttattatggctgctgttgtccaacagaacgacctagtatttgaatttgctagtaacgtcatggaggatgaacgacagcttggtgatccagctatttttcctgccgtaattgtggaacatgttcctggtgctgatattctcaatagttatgccggtctagcctgtgtggaagagcccaatgacatgattactgagagtttcactggatgttgctgaagaagaaatcatagacgatgatgatgatgacatcacccttacagttgaagcttcttgtcatgacggggatgaaacaattgaaactattgaggctgctgaggcactcctcaatatggattcccctggccctatgctggatgaaaaacgaataaataataatatatttagttcacctgaagatgacatggttgttgccccagtcacccatgtgtccgtcacattagatgggattcctgaagtgatggaaacacagcaggtgcaagaaaaatatgcagactcaccgggagcctcatcaccagaacagcctaagaggaaaaaaggaagaaaaactaaaccaccacgaccagattccccagccactacgccaaatatatctgtgaagaagaaaaacaaagatggaaagggaaacacaatttatctttgggagtttttactggcactgctccaggacaaggctacttgtcctaaatacatcaagtggacccagcgagagaaaggcatttttaaattggtggattctaaagcagtgtccaggttgtgggggaagcacaaaaacaaacctgatatgaattatgagaccatgggaagagcactcaggtactattaccaaaggggtattctggcaaaagtggaaggtcagcgcttggtgtatcagtttaaagaaatgccaaaagatcttatatatataaatgatgaggatccaagttccagcatagagtcttcagatccatcactatcttcatcagccacttcaaataggaatcaaaccagccggtcgagagtatcttcaagtccaggggtaaaaggaggagccactacagttctaaaaccagggaattctaaagctgcaaaacccaaagatcctgtggaagttgcacaaccatcagaagttttgaggacagtgcagcccacgcagtctccatatcctacccagctcttccggactgttcatgtagtacagccagtacaggctgtcccagagggagaagcagctagaaccagtaccatgcaggatgaaacattaaattcttccgttcagagtattaggactatacaggctccaacccaagttccagtggttgtgtctcctaggaatcagcagttgcatacagtaacactccaaacagtgccactcacaacagttatagccagcacagatccatcagcaggtactggatctcagaagtttattttacaagccattccatcatcacagcccatgacagtactgaaagaaaatgtcatgctgcagtcacaaaaggcgggctctcctccttcaattgtcttgggccctgcccaggttcagcaggtccttactagcaatgttcagaccatttgcaatggaaccgtcagtgtggcttcctctccatccttcagtggctactgcacctgtggtgaccttttctcctcgcagttcacagctggttgctcacccacctggcactgtaatcacttcagttatcaaaactcaagaaacaaaaactcttacacaggaagtagagaaaaaggaatctgaagatcatttgaaagagaacactgagaaaacggagcagcagccacagccttatgtgatggtagtgtccagttccaatggatttacttctcaggtagctatgaaacaaaacgaactgctggaacccaactctttttagttaatataccaaagcttatgaataattgtttgttaattgaacattttcaattatatgcagactgactgattctaagataaattctaaggaggtttctaattttgtaattgttaaaaatagagttaattttgactttgttagatgagggaggaaaactcaactgtttctctttgttatctaaatgtttcagaattcaatcgtgaaggaacaggcattttacactatgaagacattcttttgagatttttatttcagttgctatatcataagcatttttaaagtttcttttctaattttacattgtattagattttctgattcttttgtaaatacagaacttaaatagaaggcaacaggaaatttatataggaactattttcattccacttgtgtaagttaagtcttgactctttcaaatgcaaaaaacctattttatgctttgttaaaattatggtgtcacttagattgactttagttgactgcactatataatatagaactatgaatatgtagaataacatgaaaaattggaggtgctggtggtatggctgaccctgtttcagaagcaggatagtataaaagcatcagcctaagaatggcactcccactaactagctatgtaatcttgacctctttgggctttagttcctctcataaaaggaagagatgtattggactagactagatgatcaccactttctcttctagttctaatttttttaattctaatacctatattttcaagttatgtcaattaaatcattatcaggttatttcctaatgtaagaatagctaaaatgttgcagagaaataagtgacccaacaaaatttattcatctgttatgggtaagatctgccataaattcttcctaaataatttgtttactaactctttaggccactgtgctttgcggtccattagtaaacttgtgttgctaagtgctaaacagaatactgctattttgagagagtcaagactctttcttaagggccaagaaagcaacttgagccttgggctaatctggctgagtagtcagttataaaagcataattgctttatattttggatcattttttactgggggcggacttggggggggttgcatacaaagataacatatatatccaactttctgaaatgaaatgtttttagattactttttcaactgtaaataatgtacatttaatgtcacaagaaaaaaatgtcttctgcaaattttctagtataacagaaatttttgtagatgaaaaaaatcattatgtttagaggtctaatgctatgttttcatattacagagtgaatttgtatttaaacaaaaatttaaattttggaatcctctaaacatttttgtatctttaattggtttattattaaataaatcatataaaaattctcaaaaaa

SEQ ID NO: 4610 - DNA, 418 bp, Homo sapiens
taaaccccctgagtctgagggatttggagacaggctgttccttaagcagagaatgagcttactctctcagatgacttcgtctcccaccgactgcctgtttaagcacattgcatcaggtaaccagaaagaagtggagagacttctgagccaagaggaccatgataaagataccgtccaaaagatgtgtcaccctctctgcttctgcgatgactgtgagaaactcgtctctgggaggttgaatgatccctcagttgtcactccattctccaagagacgacagggggcacacccctctccatgtggctgctgtctgtgggcaggcatccctcatcgacctcctggtttccaagggcgccatggtaaatgccacagactaccatggagccactccgctccaactggcctgtcagaagggctg

SEQ ID NO: 4611 - DNA, 386 bp, Homo sapiens
aaaatcacaagaagccttcaagatcttcagcagaaagatattggtgtgaaaccggagttcagctttaacatacctcgtgccaaaagagagctggctcagctgaacaaatgcacctccccacagcagaagcttgtctgcttgcgaaaagtggtgcagctcattacacagtctccaagccagagagtgaacctggagaccatgtgtgctgatgatctgctatcagtcctgttatacttgcttgtgaaaacggagatccctaattggatggcaaatttgagttacatcaaaaacttcaggtttagcagcttggcaaaggatgaactgggatactgcctgacctcattcgaagctgccattgaatatattcggcaaggaagcctctctgc

SEQ ID NO: 4612 - DNA, 971 bp, Homo sapiens
gttattgtttttttttttttctactactaattcctagtggtgcacaacgagtttctgagaacacagtaataacgccaaagtagcagtgcatctgagaaacataatttttacctcgttgctttcccaaaaataaatatctcagtcatggaaaacactgtttatttgaaaacaatgagacctcaaatatgaaatatagttaacaatgacattgacactgttgctagcactttcccctaaaccacccataagtcttggacgcatgtgcatgcagcacacacacacacacacaaaaaccaaaaacaaagccaaaaaaaaaaaaaatcccaaacacaacaatccatgattgttcaatgactcctgatgccgggaggacaggctgttaaaagaatttgtctcccacaatatctctggagtgggcacaaagcccatcacctgttagtgatcacagacattcagttaacctgtccttccagtaatcagagacaacaattcagaccctggacttctcagaatccatgtactgctgagtcttggctttgagacaagacaagtcttggctaaattgaggcaggacagcagccccttccatatgtttggtcccatttgatagaaagtctaatttagagttataaatgtgctcatctatttactctgagctcaatctaatttgacaggtaattcctcacattttctccattagccagctgagagtcagctgtggtagagacacacgacatgggttcaagcccctcatgagccctgtggtggctggcaagtcctttcctttctttaagccttaatctcctcacttgatagagggggagaaattgacccaatgatgataaatattgtgtggttctatatttctagcctagacaattgttgctcaagtgtaacatgtgactgccaaataggatatctcttaagatgaatatctcctaactttcctcacctggtatgatcacatattc

SEQ ID NO: 4613 - DNA, 529 bp, Homo sapiens
  misc_feature (1)...(529): n = a,t,c or g
gcggcacgagccagactccgccacaggggccatggccctcagtgggcatgttccggtctcccaggtgacaccaacgggtcccacagagaccagcctcatctccgtcctggctgatgccacggccacgtactacaacagctacagtgtgtcatagagctggaggcgccccgtccggtcagccctcgcgccctctccttcctgtgccttgagtggcagaggagccgtccagccacaccagctttcctcccaccgctcagggcagggaggtctgaactgcggccccagagcctttggcctaagctggactctccttatccgagtgccgcctctatccccttccccacgttccagcccctgcagcccacattttaagtatattccttcaagtgagttttcctccagcccctgagagttgctgtctccaagggaanngtcnctgncggntttttttggaagcattatcgaacctaatgggggacagacttgatagccaagggccctttgggcaantttctgattaaggtttttt

SEQ ID NO: 4614 - DNA, 636 bp, Homo sapiens
  misc_feature (1)...(636): n = a,t,c or g
accaggctgatggagcctgacactaaagattgcccattagagaagtctcggccctagtgtccccagccacatggagtgtcccagagagcgcagctttggtgtgagctctgagggagcaagtcctcttggaggttctctgaaagaagatctaagctgtgcacttcttgggctgccttaattatgcttcaagggtcagaagggtccaactcttgtttgaaccgagactcaatcccagcctgcaaatgactttccctgattgattacaacttgctttaaaagtccagagacttttatctcttaatgaaagatatttaaatgagggtgatttattactttgaggtcgcggtgatcacgaaagtatgactgagtatatgtgattgatatgggccataatgcttcattcattcacaattcagcagaccaaattaaagagatgcgtgtttaagtttcaatcctgccatgactgtgatcttgggcaagtcacttctctctcagcttcagctccctcatgtccaaaataagtgggttgcactaaatgagatccagcatcctccagttcaattattctgtcattctccttccttcgagcttgactctgatgaggccgggaataaaaatgnatgatttctcacttga

SEQ ID NO: 4615 - DNA, 2193 bp, Homo sapiens
gcgattggagccacaccacatgaatggatcattagggtcaggcgacatagacggacttccaaaaaattctcctaacaacataagtggcattagcaatcctccaggcacccctcgagatgacggcgagctaggagggaacttcctccactcctttcagaacgacaattattctccaagcatgacgatgagtgtgtgatccccccttctccgagacgctgagagagcaggcattgcaggcgggaagatgccagaaattatgcaagaagtgaggtgtcattatccaggagctggtggggagggcatctccctgctcccctcaaccccctcccaccccatccacgccccctacctttcccaattttagtttcatgcaataaaaaggccaaactttttattccataaaacaaggaaggacaaaactctcaaaaatgtatttcaagtcagtgaccagaaaaatcccaccccttgccctttccccaaaggaccttttctgtacatgacacttttttgttgttttttgtttggggttttaccattgttgggatttttttatttgttttcaggggggttttttgggggaaaatttttttaaatggaagcttctagcaagccccccaccccaatcaacctctatgctttcttcttaaaaaaaaaaagaaaggaaaagggaaaagaaaaaaaggaaaaccagaagccctgctgtctgtctgtgcccaagcccttccaccagaaaagctagtctaggtgtgagagcccacattgtctgtagccatcaaaaataataataataaactggacagtttacaatcgttggtttctttcaaaaggccttttttggaaagaagaaaaggcagtcaccgttttccacttggggttttggtttgtgcaacaggcaggggaggagtggggacgcgtttgttctagcttgatttccatggcaacagcagcggcacgcttgggaccccagaacccagcaccctcatcctgtggccagaggggccggaccactgacccctttcaggattccaccacagcccagaccgtcaccgtgacccggtggcatgcactgttcccaggacaccctcctcctctcctggacctcccttccgtcctggcctccctgcctctccagcccctcctctgcccccaccccagtcttcccagtgagaatcctgccagctgggtggtggcctggcgcagagtggggagaggctgcactgacaggatggctatgacctgggacatggaaacagtgacctccgcgttctggtcccgagatcctcgcatcagcgtcatcgtgtgcaccggcttggggggctggagttccggttttctttgttttttctctttattcgtcctttctcaaagatgggatactgatcagaattgctctgtatatgcttgggactggatggaaagactttggagcagctgtggggggtggggggacaccgacaaccaaacagacgtgctggctccagtcctgtttttactttcaaaaaccaacaagcccgacagtggagcctgtcccctcccaggagggtgctcatggccccactcacctcatcaccccacggaaacctttgtgtcttgccctggaagacacccgaattctttgtacattgacatgcccttctccttcctccctcccctgtagctggtctttgttttactccctccctttctgatccatgtatatcatattatgtgagatatcatctgcctgaaaaaagactttgtgcggattattgggaacattgtagctgtttctgtgttttttcttaccttgtagtctggttctgaattaagagaggaaaaaaaagtaattatgatacattgtagtttgtgtacgatatatgttgataacgttttattaaagggacatcttttttccgcagcccttcctgacatgtttggggaatgtgggttggagtttattacactgattacaaaatgcaaggtgacttcttgggcacagtttttgttcctggtgcataacaagatgttttgtgtttgaggcgtctgcgttcttttcctgggcctgcaagttctgtgttcttgtggagtcgcgatggccttggcggaaggtgggttgggagggaaggtatccatctcactttaaatatttgggggccgtctaaaagccattttccatttcttgtcttgcaaacacattttggtccgctggaatgt

SEQ ID NO: 4616 - DNA, 419 bp, Homo sapiens
  misc_feature (1)...(419): n = a,t,c or g
gggcaccttctgctggggtcctgatctgagccagttgtctagcgatttaatttggtgaatttaccactgcgtcccagagtttatattggcacttaacagcagtaatatgtttctctctcgccaagaactattttcccgaccaagatggaacaccacggcacaaaaaataggtttgtgaactaatctggctgccctgacaagtgtcatttcacaggaatcactgcttataggaggcgcactcgggaatttaaatgagggctggggggttgtctgggccnggggttcacagggtgctttttttccccanttcagtttaacagggagttttgggggntgaggacaccctttttccctngcaggccgaggaacttttttcaaaaatcacacttnttcagtattttcattgacaggattttttt

SEQ ID NO: 4617 - DNA, 130 bp, Homo sapiens
gcggcacgagagctcatgtgcatttcgtccacagctaaaagagagacctaaaatcattgttatattgttagaataactcagatgtaaattaaataaaaaggagaagtttttttgggcagatgagagttag

SEQ ID NO: 4618 - DNA, 474 bp, Homo sapiens
  misc_feature (1)...(474): n = a,t,c or g
cagagaggcacagggctgagcaggtgaagggagtacaccgctgtggtttgacctgctcaatatcccttcttcctgaaacagaatctatcttttcttcttggggagccacccctccactacttttagcccttggcttaggttcctcttttaagactcagttctaccagggagggtaacctctggtaaattctcaaatcccagtgccagggttaggcatgcgatcaaggcaatatatccaagaagcggtatgggaggcaatttgagccaatgagatgcaactcaatacctggagcccctggncaagagacttggagtttgtatatctgcaattgttggggttttgccttctctccaagaaagcctgagtgaggatgaagacaacaggataaagcagaaacgagagggagagatggattcctcctgacaccatttgagctcctccttctccagctgagcgtgactaagccctgcatt

SEQ ID NO: 4619 - DNA, 418 bp, Homo sapiens
atcgctccggaacttgtcatctccaacgacaaaaggagcttttgccactgactcggccgtgtcctgacacctccaggtgagtatctcctctctttccgagggaggtttaaacggcaagtcctggagttggcagacgttttgaaaaattgccactcactcggtttagggaaactgaggccagagagggacaagtgacttgcccatggttgcatcaaatgaatggcagagtcagtttccatgtgatgtgcatttaagccttaaatgcgcctgggccctgccctcccgcagtggccgagggtctggcaaagtatacatgggtccgactaaatacaagtctttctgttccatgttgtatagggagctgtcttcggcagccccctcccagctagtgtcaattccaagtaggaggggtagcgca

SEQ ID NO: 4620 - DNA, 1277 bp, Homo sapiens
  misc_feature (1)...(1277): n = a,t,c or g
tgcaaaccaaaccaaatcattttattgtgcaatttccttctaccagaaaattactaaaaatataaatattaactctctaaaaaatactcagaatagatctgtaatcttcctcctcctcctcagaactggagccaatcttcttctttaaacgctgatggattgcatacatgtatgtcttccatatcagccacatacacaacattcagatacacttccgtctgtgcagggggatacaccagcctcctgccaggttctggaagctcaccttataatctaccaggataaagctgtgtgctgagtaggaggttatggtggggttggggagtaacaaggagataaaagaccttgtggtcccaacttccttatgtggacagagaagataggtcctttactcctcctcattaccctgccctctcatggactgggctaactgaaggccaagctcccagagaagctggactcactgtgcgggattactgagggtgtggctgccaggctacagtcacaggaaggccagactgttgagatggacatggaaaccaggtgaggctttggatggaaagctggtctgggccaaggcctctgcaggatgagtagtagctgttcctggctgggctttgggcagcccctagaccctagcaccaggtactatgtgcagcatctaagaccagacaccagtctcagagagcctcccgaggtagcagcaacatccctgcagcagggggacgggcaggttgtaggcagttagattggagcagggtcccatggcactgtattcagtatcagacacaggtctgaagaactctgggntcaccctggcaatggtcctggacaaccttggtgggatccttttgctcatcctggggtctaaggtccttggacttcagcagcagctggnctatagagtggaggcagggtacttaagaaaggctgcacctgcaatacctgtacctatggctgccatatcatcggcccagagccgccctgggctccaggagaggagaaccccagagtgcaggggcttgctaggtttcccatcaaagcacaaaccatgctcctggtatgggaagctcagatgaagtggcttgctcccaggatgtgtgtttggggactctatccctaccctcagctctggtgttttgtgtgataccccaaaccattctgggaacactcaaaggaccccgaatgctagtcctgagacctcctctctgacatcagggtcagatatcacatccttagagtgagaaagaatgtacacgtaagcctgttgccgaatt

SEQ ID NO: 4621 - DNA, 913 bp, Homo sapiens
taggatccccaaccgcctgcgaaacccaagccgccgcgtaggagcgtgcgtatcgggccctcttctcccacctgttcggccagcctccacgatccagctgccaaccatctagcctaccctgatctctgagcaggggtcgtcgtcattttactccagaggagactgaagccaaaagactccccatccccaggatgtcaacctcagtccctcaaggccatacctgggacccaacggtgaaagaaagacgatgaggaggaggacccgctggaccagctgatctcccgctctggctgtgctgcctcccactttgcagtgcagggagtgcatgggcccagcaccaggactggcggcaatgccagccacaggtgcaggcgtttcaaggattgcatgagtgaacagcaggcgaggcggcaagaggagctgcagaggaggcaagaacaagccggtgcccaccactgagaccccaaaccacctatccccagtagatgggccctgcccaaggaccagcacccagcaagattatagaggaagaaatcctaaatgctggtgtgggaggtctaaaacatggggagagtttttggatctggagttgagagccatgggtttggacatgactggcacaaacagctgtcatatgttcatggtcagatgtcatacattctcagctgtcttgttccaccagtatttaccaggaaaacaaagaatgtgttaagggatgctcccccaccccacatcttaagtcagtgtgccaagtactgagatgattttagggacattttattttaaattaaatttacaatctaatggtaaattgattacctaattagtgcctttctctttcatcacttgttctggatgtttcaatcagtttagtggaaggaaaaataaatggggaaactttttattcaaaaaa

SEQ ID NO: 4622 - DNA, 265 bp, Homo sapiens
gagctgagttggagaagatttttcaagacaaaaaccaggctgaacgggcccttaggaacctggagagtcatcatcaagcagccattgagaagttacgtgaagacctgcagtccgagcacggccggtgtttagaagacttggagttcaagttcaaagagagcgagaaagaaaaacagctggagttagagaatcttcaagcatcatatgaagacctgaaggcacaatcacaagaagagatcaggcgcttgtggtcccagcttgattt

SEQ ID NO: 4623 - DNA, 86 bp, Homo sapiens
ggtcgtggctgaacattgtgaacgtagtctggaagacttgcttcgagaaaggaaacctgtgagctgttcaacggttttgtgtatag

SEQ ID NO: 4624 - DNA, 863 bp, Homo sapiens
tttttttttttctcatgtgaagagattctttatttgattttcatcacctttcaatgaaagagtgggtcctgtcagcactacgtaaaatatatatcttaagagcattaatttctttttaaatgaaagacagtgaagaaagtctgtgttagaaaaaggcataatagaagcttggttaaatgtaagcaggtttctatcaagaaagaataaaagtaccattactccattaaaccagtaataaaaacatactattgtgcatgttctcaaaatagttgttcataaaagtgaagcttgttagtccttttcttctttttagtgaccaaatcaacatgctgtgtatctaaccatcctggcaagacatgagtcaagggaatgagaagcatggttgctaactctatgcctcaaaggaggttcctgggtaggaataccagccctgttttccagaaggtagagagatacataacagtttcagatacaactaacacaagacctgtgagggtcatggctctggccccattaagtctgggtagctgacataactttagttctcttgggttctttctctggtctcagttcccttagcgctgacgatctggcaggaccgtagtcactgggattgggtattccaaggcattgcagtcatccaacaggaataccaaatctctcctgcagaacgagttcatgatggtgtacagcttccgtgctttgtccttcaaggaatctacctgggccactttccaacacgggggcgaggccacaaagtcccgcagcttgtccagcacacagtaattgtgtatgtccaggtacagcctgggcaggtatctcacacatggctccgagggctccgagacctgcaggaggttgaa

SEQ ID NO: 4625 - DNA, 265 bp, Homo sapiens
tacctgctgctgcagcacctgctagaatggtaccagtaaagtggatgccttgctctggccaccaccactctcccattggtggaatctaaattatatctagaaaacctagctgcaaggggagtgttgggaaatgtagtttttcaactttctgtcctttatagaactggactgaaaagaggtgggaacaaatattgagtggaccaatccaccacaaagtgttagcaattaggctgccagtactgccttggtcaaggaaagcttctct

SEQ ID NO: 4626 - DNA, 66 bp, Homo sapiens
gcggcacgaggactgttgtgacccggagtcctcatcaagatgagcgcgctccatgagggagctgct

SEQ ID NO: 4627 - DNA, 410 bp, Homo sapiens
cttagacatgtagcccaaattgccattttacagatgagtaaactgaaccctggagatgggaagtgccttgtccatgctcccctagatgttcattgcagagccaggactagagagcaggtttcctgtttccctctctagaactgtatttttttcccctctaagccatgatgctgttttaatagcatggactgttgagacgcagagaacacgtgacctcttgagctctctgggtgcctgaaattcagtcattttcagtccatgcgaggagagaatcttcccttttccctctgctttcccctcacagtacagtcccagagaccactgaggacatgataggatgacatgcccaaacttgtggccctctgctgcttcaaaagggagcagagctgggcatcaggacccacctctgg

SEQ ID NO: 4628 - DNA, 360 bp, Homo sapiens
gcggcacgagattatgagaaaaatggaaaagagaattccatatggagggaatagcattagcaaaataagaatgctcaagatttgtatggaaaataagtggttcattttgttgacgatacgatatatgaaaggaattagcagagcgtaagtttggagaggaatgttggagctactgatagaaggatttgaatgcaggaataaggaattcaagccttactctgtttgaaagccccagtgataaaggacattatcaggactatctttatgagtttgacaatgttacgtggaaagacagactgaaataaataccgactggttctccgaataatgtttcattccgatgttgtttcattataatgt

SEQ ID NO: 4629 - DNA, 1314 bp, Homo sapiens
atttactcagtgaatttattgtaaaaataaagaaactcaattattccagttaatggatttcacgttaaatagtttaactttcaatgggctttctgaagagctgttcataggatgatatttggaagagtcctttccttaaggaaaaaaagggtcgaacaataaataaagagttacttgcgttaacggtcacgttatttcattaaaagagaggaggagcagaaatctatgacatagttgcccaacatggcatttatctgctgcaacagaaagctgtaacactggcgggcatttcacagtatttgcgcatagtaaacttctgccattgttaaagtctgagttagaattatcaatgaattcttttttttttgtctttttaaattttcttgattttaaaaaatgtatttgtgttttgcaggttggaacgcaaacccagtctggccacgtcccgtgaagttgtggacaaaatgtttcagtttctgttcacctctgtgcgtgtgtgtgtatgtgttgtgtgcatgtgtgtgtgtgtgtgggggtgggggatggggtaggtatgtgcttttggctcatgtttgtgatgataactgaagtcttttgtgggtccgacctgttgtagggtgtgggggaaagtgaaggaagagaatgaaggtgagtccccgccgttgcaaaccttcaccaaaccacgcggcccagttttcgtgagtacccctgtgtcccagagaggaggacccagcgtcctcggctctgccgcaggccttcttggtctggtgggtactcgaggcagttgagaaccttgctgagctgagcgggcacctcgccttgcctgctggttcgacacctgaccccctccccctgggattatgtacacgcatcattgggcttcatggatgtggaaaggggagcaaaggatggtttggggggtacgtccggctttagcgagggcgtacgcttcagccccgaccttgtcagtgagttgtaggcgttgaggctgggctgcctcgagacagtcacggcctggccagatggctgggagctgtgcacctggatggagtccaccctctgcggggcgggcggcgggttgtctcccctgccaaagctctggtttctggagaggtgagaggaattggaggagttagtgttgtttcttttgagagtggtgcctggtggcttctcgtgagcgagttcgtggggtagctcctcttatagtcaaccccgtaggaagaggagtggtgcatttccagccgcttgcttagaccggtctgagacagggaggctcccgggggacccagggaggcctcccgctgtggaactttg

SEQ ID NO: 4630 - DNA, 388 bp, Homo sapiens
gtccaaaccaacacccgttggtctgggtgactgtgcacacagccagctggactgttttgactgaatcgacccaacacttaagcttattttttaatacattaaatttaatctaataaataattaggggaaaaaggagacgttcaactctgtttgattcaatgaattagctcttgaactaacctaaacggttgtttgaattgtttgacaagttcctttgtgtggtgagtgtgtctgtgtgttttcgtacaacttgcctgtcaatgcagtcaaaactgtgtgcaacataaacacagcttgcaaagtgttctgagaactgattactgtcagatttttttaatccattggagtcccagaggtggccatgttaaattagaaattttaattttta

SEQ ID NO: 4631 - DNA, 535 bp, Homo sapiens
  misc_feature (1)...(535): n = a,t,c or g
gggctcggcgtgggttcaacatgtgtattatgcaaggaaagaatttagtgccaaagattacagagataacaacaacattgtgccccaggctgtttcaccctggtgaaggaaattaaaccttgtgttggagcagataaactttanaagaganatatctgttcttgccatatctttagcagtcaacaggtgccccctggaattctggggtttgtgggcttgcatggtggccattaaagcctctgtatatctatcanagtcacctgaaaacttgccaagatcccccttaatttgctttaagtcctgtaggganaaggggacctggacatcactgggcctaaattcactgggcatctgttgtaggggcaagagtganactggggcttgtttagggtgaggatttcttggagggggcaagtgagaggctgaagctggatagggaggtcngggtggacccaaaggancangacntganggaactggtccnttctggnaatgcctccggganttgtntcttaaatgcctgggcttgcccttc

SEQ ID NO: 4632 - DNA, 2589 bp, Homo sapiens
attcggcacgaggtgacgtcaagaaagttcctaaaggtgttcccctgcagtttgacataaacagtgtcggaaaacagacagggatgacgttgaatgagcggtttgggatcctgaaggaacaaagagccactctcacatacaacaaagggggaagccgctttgtcaccgtgggataggtcccatgtcaaaggaacttttgagtgatgactctgagaagttgaattgcttgaagagttcatcacggaaattcaagaaactttacttcaaaatattcacaaggctaaataactcttatttttatttttgaaggtttttttttttaaaaaaaaaaacgtataaaataatgccctgaaagaataatagggattatacctgtctgttcttaaagatttcatggttggctcagacagaacaatcatctgtttgacttctttggttcctcatgcagcagaaggaagacagaaagatagaaattgattatttttatgatagcagtattcaggatctcatcacctttgcccgtgttttagactttgtcatggtaaatcctggtcttcataaacatgagtaggtcccttggttgctgtcacttgccctttaatagtgttgatgtagtcagtgccgttgccttttcttcattagagacacagaacaatgtattagaatttccagctgtgggtttgaagacttagggggacatccagaacgtgcttcctctttcagacggtgtaaagtcccctggaattacacagctttagtgctgagcttttaacaggaaatgtggccctaggtattagtcttagtttaaaatgttggtgtttagagactgtaaatgcatattcacaaagttatctgatagggccttggaggagaaggtccagttttaaaaaatgacagtttgtgtttaataaatgaaggcatgagaggaagtaagtagcaagttgaaggacaggtagttgagatgaaacacttcaaaaccctggttatagatgtactgtttggatgtagcatagtcttgagtctagcgtccacaaagaattattcaaatgatatttagaagaattataactattacattgaatggagtcccttggatattttgatagtaaaattaatagccataaagtcctagacttcttatttgaagttaaaatttcttatttgaaaagttgaaatttatgagctttgaagattgctaaattaaataatttatagctccaaaaacaaaaatatacttgtatatgtcacagagaaaaaaaatgcaaaatttataatagagttacattaaccttgttgtttacctttcactgatttcttatatggtataaattaaagttcaggcatttatggggagaaaaggccctccccaccgacccgccacctgccacctctgacggagtgggagaagttagtcctgtgctaagatagtactgagtccccagatgttgtatactgtaaattacagtataatgccaaatgcagcaaaatcttccagctgtacgttacaagtttggtcattttgaagcttgacattttagtttgccattatgttaaaaacatctaaataggtgttaagtttctcaggagtagattgttagtgttgacttttcctgtaaagcagacatcgttcttgggcctgcccctggcattgtatactagatttcattgttgtctctcatgcttcttgagttggcttcatgggtttatgctcgccatggaaagctatcagtaacagtttcatgcttatacccaaagaattaaatctgatctttaatatctgatattttcctggtactcgtactgataagggattattggaagtcagtcacagaatttggaaataaattctagtctctccttagctatttgatgcttttcatataggccaagaactcattgcaaaacatttttgcaaggatgaatgcctgtatttggtctaggaacagtacattttagtctgatttagaattactggtagcttattttaaagcaaggaaaagcagctgagctcaagtttgctgtctttagaatggtttgtgaaaatatggtataaaggtgttttcattttcctgttcttacctattattgtatagagctattcatgccattttttgggaaaactttaaaaattgccccaaatactgacattgagtgcattaaataacaaattatctttgatacattaaacttttattcttcatgcatctgtaatttaattttaagtataatgttttgcctttggtacaactaaattaaaactcttggtggtcacatattgtatataaacaaaacaatatgctttgttgaaggaaaattttctttattggaatgtggttgtaatccttgttcagttcttaagtttcggttttttttaaaaacaggatgcaacttaaacttttctttgcatcaaggtatatgcaaaacattggtgccgtgcatcaccaaatgaaagtttgtatttaacgaggaggtgctttacactgtactttttggtgttttttggaaaagttacatttagatctattctgaagctgttcatttttaacaaataaaatgttacaggtttcacatgatttattctcagctcta

SEQ ID NO: 4633 - DNA, 246 bp, Homo sapiens
cgtcctgtcctgcagaaagtgccagcgatgccgcccctctgcagaggtcccagtctctcccacactcggccaccgtcacgctgggtggcacatctgaccccagcactctcagcagctcagcgctgagcgaaagagagcgctcccgcgtcgacaagttcaagcacgtcgttgccggccccaacacggaccttgaggaattacggaggttgagcttgtccgaatcctaaggcagtgcgtccatgacgt

SEQ ID NO: 4634 - DNA, 849 bp, Homo sapiens
aatatttgtgtatttttaataagatatttaatacgtgttcaggtagaagtaggtacaatgacagaaaataaggtagaggaatgtgctagacaccacagatacgtaatgatggacaataaatgacatgatgtggagagttcacccacacatgcagacttcttatgttcacataaacatttatctgcatgcatcacccagtagagacaaactgcacttacactgtgaagtcaacgaggagataaagtaaaaatcaaatacttatggagagagtcagtctctccatttagtgggaaacccttcagaacacgcacacagcatctcccctcccttctgaataccatccatagcctgcagcagtagatggcaaatcacagcctgggccacccttcccagaatgtcaaaaacatggacatgcagaccacagaattcaccagatacccaagatgggtggtgcgaggctctgaaagacatgcttcaagtaagagggactagaaaactctgccagggagcaacagggatcagggattccaggaggatccaggggcctgtgcgaagagcaagcagtgagcagatgtgtgtgtcagtgattcggtggcatgaactcaacaccatctaatacagcagctcacgtttctttgtgcatcagactcacctggggacttgttaaacacagattgttgggtctcactcctagagtttcttcttcagtattctggggagcagcctgtgaatctgtatttccagcatgattttcaggtgctactgatactagttgccaaggaccacactatgatctaatttaacatcagattaggggaggaactaaggagcaaagaagcaacagaatgg

SEQ ID NO: 4635 - DNA, 852 bp, Homo sapiens
ggcctctgctcctctgcccttcttatagccagaacttgtatcttctcagcaaccttcactttgtccttgtccctttaccattccccatcaaagagtagtctgctatatcaatttgtgtagatatgtctgtctttttgggtcctcagagaaaatgcccattttctcggagaattctctgcactcctctctgcttcacattcaacttccctgttctcatctttggtaggattctgccagttgcttttgcatcttctgttcctggggtaatggtggggtcttaatgggaggctgggtggaccactggcccgtccactctttcaacagggagggaacaggcatggccaccacagttaacacacattagagaaaggacagaggtctgctccttcctgccacctttctcctggccccttagcattcccccagtccctccctcttcaccttgctccgtctatgtcttcccagctcagccttttccccactcttaaatactgtactacttcactgtaagaacgaaagaatagttaggataccaatgagtaaaagggttcctgttcactctgactctgtgcaaattgtattacagtagaccgctgacgttcccaagtgacagatccaggggcttttcaaacatccccaaagtcatggccatactcaccattagccagtttctaacatctgtttcagggtatccagctgtagatgttcttatcccccatacttgtgagttattggggttgctcacaaatactaggggtttttgttgtatttttaacaaatatatcctaatgtcatatttattctcttttgtaactgctgtctttacaataaagaaatcatctgcctttctaa

SEQ ID NO: 4636 - DNA, 624 bp, Homo sapiens
gcgtcgaccgcagcaccgcgcatgctccttctttttcagccccggtaccggaccctgcagccgcagagatgttgatgcctaagaagaaccggattgccatttatgaactcctttttaaggagggagtcatggtggccaagaaggatgtccacatgcctaagcacccggagctggcagacaagaatgtgcccaaccttcatgtcatgaaggccatgcagtctctcaagtcccgaggctacgtgaaggaacagtttgcctggagacatttctactggtaccttaccaatgagggtatccagtatctccgtgattaccttgcatctgcccccgggaggattgtgcctgccaccctacgccgtagccgtcccagagactggcaggcctcggcctaaaggtctggagggtgagcgacctgcgagactcacaagaggggaagctgacagagatacctacagacggagtgctgtgccacctggtgccgacaagaaagccgaggctggggctgggtcagcaaccgaattccagtttagaggcggatttggtcgtggacgtggtcagccacctcagtaaaattggagaggattcttttgcattgaataaacttacagccaaaaaaccttaaaa

SEQ ID NO: 4637 - DNA, 529 bp, Homo sapiens
catactagccctgttagaatgcccagtttacctggatggcaacccaacagtgctcctgcccacctgcccctcaatcctcctagaattcagcccccaattgcccagttaccaataaaaacttgtacaccagccccagggacagtctcaaatgcaaatccacagagtgagccaccacctcgggtagaatttgatgacaacaatccctttagtgaaagttttcaagaacgggaacgtaaggaacgtttacgagaacagcaagagagacaacggatccaactcatgcaggaggtagatagacaaagagctttgcagcagaggatggaaatggagcagcatggtatggtgggctctgagataagtagtagtaggacatctgtgtcccagattcccttctacagttcccgactttacctttgtgattttatgcaacctcctaggaccccttcagcagtctccacaacaccaacagcaaatggggcaggttttacagcagcagaatatacaacaaggatcaattaattcaccctcc

SEQ ID NO: 4638 - DNA, 828 bp, Homo sapiens
  misc_feature (1)...(828): n = a,t,c or g
aagattcaaaaatggaatcatttttggacatgcagctaactgaagacctgggattccttaatacagaatgcttttgagaaattgaactcttctcctgatgaccaagtatactcatttttgccttcacaagatgttaatagttttaatgactcaagtgagtttataaatcctgattcaagtaatatgactcccattttttctacacaaaatatgaatttgaacggtgaaaatttagagaattctggttctactttaagtttaaacccattaccttcacattcagttttgaacgagtccaagtgttttataaaggataacacattgggctttgggaaagtaactacccggaaggattctcttctcagtagttctttaaatgtaggcaagtgactccatcgcaggttgtagcagtcttcaatcaaaaacagaaagaacttttagaatctgagtgcgttgaggctcaattctctgaagctcctgtagatttggatgccagtgaacctcaggcttgtttaaaccttccagggcttgatttaccaggtacaggtggggatcagaaatctactcgggtctctgatgtgtttctaccttccgaaggtttcaacttcaagccacacaaacatcctgaactgccaactaaggggaaggatgtgagttacttgcccggtacttgcttcctctcccatttgctgtttgcctnctccgccaccttcaccgatgtggggattccaatggattcctgcttttggacctttttcccaggggaaaccaggggnttttgttagggttcccgttttgttaaaccacaggntggcacantggggggat

SEQ ID NO: 4639 - DNA, 751 bp, Homo sapiens
cttcttttttttttttttttttcacttctgaccctttattggggcactgtcggccccaaataaatataatacattaaacccagagctgagggaatcgtgcaccccaggaggcgccccccacaacctcagccgggcaaaataagttagtggggggcctgccagagcgccgggccagctccctggtctaaagtgcatctcggttccgtggtccccacgtctgcacagcccctggttgggccgtcgggaggggcgggtgggagatgcctggcgctcacaccgtgccagcagtggccgccgaggctctgtgtgtccatctgtccatgtgggggaacagctgcgtggccggggtcctcaggaaaagctgtcatcgggccggggctgggtgtcaaagggagggtctgagactgtgatgccttggtgcagcttctccagcgagaacttcatctcatccaggagctccacggaggccccgcaggatctgccctccacttgtgcaccctccacgctgtggaattgcttctgcagcgcccaggatctcggcccactctgtggccgtctgggggaacttcgcctatgccagggccaggctgtgccaggactcaaaggtgtgggctgtcctttccagggaccagaggcggtagaagagcaggacgttgagggcgatgaggatgataaggacaatgctgatgagaaccagggcactggggatgccctgccccggggccctggtccacagatggttcggagaagc

SEQ ID NO: 4640 - DNA, 1969 bp, Homo sapiens
  misc_feature (1)...(1969): n = a,t,c or g
aaatgaaagtgaagtaaatgagccagaagaagaggagggttctgataatgatgatgatgagggagaagaagaggaggaagagaatacagattaccttacagattccaataaggaaaatgaaaccgatgaagagaatactgaggtaatgattaaaggcggtggacttaagcatgtaccttgtgtagaagatgaggacttcattcaagctctggataaaatgatgctagaaaatctacagcaacgaagtgatgaatctgttaaagtgcaccaactagatgttgccattcctttgcatctcaaaagccagctgaggaaagggcccccactgggaggtggggaaggagaggctgagtctgcagacacaatgccgtttgtcatgttaacaagaaaaggcaataaacagcagtttaagatccttaatgtacccatgtcctctcaacttgctgcaaatcactggaaccagcaacaggcagaacaagaagagaggatgagaatgaaaaagctcacactagatatcaatgaacggcaagaacaagaagattatcaagaaatgttgcagtctcttgcacagcgcccagctccagcaaacaccaatcgtgagaggcggcctcgctaccaacatccgaaggagcacctaatgcagatctaatctttaagactggtgggaggagacgttgatccagcagcacgtgtcatttnattaggtcctgtatctgatgttgtggttagtggagtcctccagcaattgaatgagagcagtggacacatctcagcaggtcggtctagagagttgcgaatctaaacctgggacaggctggggccaggaggcagaaacaccagcctctgccaacaccggaacaagccgacgcttccagacaaggcggaaaaggccttttgtaatggaaatctcgcgagggttaatcttctcttgagaatggcagtcaagaaatgagatggttcacttgactactgagcagttacaccaaggagagcgtgaaggagatgattgagccagagaagaaacgggttgtgatggtaatggtgtgggggaaatgaacttgagctttaaacttgatttgagtttcagtgtctctgaatttgaacatcccacgttggaagaagatacatttgggggctccaggactacagtagaaaagtatagagcaagcaggaaaatcttctagtaaaacttacatgcaggacaacaaaatgatgaaagatatccaaataccagataatccaccaggaaggcttttgtttaggaatttgtttcaagaggaacaagggatgagggagaaaaatccgttttatccatcagagtcagtgctataaaattgcctattaaggtaaaagaaaaatgtggagactattttactatacagagagcattaattcagatggcttagaaaagtgataccagcccaagaacagggatctaggtgagcccattgtaagtatcattgaaaacaaaacatgcccgtcaacatgtcacagaaaacgaacgaaggacaacaagaagtggatgagaatattttgttgaccttcatgggtttacagcctctgtctctaaacaaagtatggaaacaagtagagcttttattttgcttttgtttttgttttgtttttttttttgttttcccccactaaatagaaatgagggtccttagtctgtttctgacaatctgttaatttcttaggacagctgtctttggtttgctttccagcaggcgtagtatatttagtcggagagcacatctgtatgcgacaacttgattacatctttttttctagctattttgcattttttcttttaccatgtttcagtttctgcatgtagatttaaataaaaaacaaaacttgtaaagttgtaacatttcacatggaaatgctgcccaatcttcaccagcttcagaaatctgacctttgccgatgctgcaataaagtgttgtaatttaaaaaaaaaaaaaaa

SEQ ID NO: 4641 - DNA, 453 bp, Homo sapiens
ggcacattcggcacgagtgacaccttcatgtttggaggccatgacaccacggccagtggcctctcctgggtcctgtacaaccttgcgaggcacccagaataccaggagcgctgccgacaggaggtgcaagagcttctgaaggaccgcgatcctaaagagattgaatgggacgacctgggcccagctgcccttcctgaccatgtgcgtgaaggagagcctgaggttacatcccccagctcccttcatctcccgatgctgcacccaggacattgttctcccagatggccgagtcatccccaaaggcattacctgcctcatcgatattataggggtccatcacaacccaactgtgtggccggatcctgaggtctacgaccccttccgctttgacccagagaacagcaaggggaggtcacctctggcttttattctttctccgcaggcccagggact

SEQ ID NO: 4642 - DNA, 439 bp, Homo sapiens
gcactgatacccttgcttgatgcagggttgccacaaaacctttaatttgttaaaaacaaaacaaaactacccatctgtgagttgagtgcggtaaaatgaggtgtgcctctatgtgattgatgtccccccatatctgctggtctaaaatctgaggtggcgtccataagattcttttccgtttgactcagagataataagcatctcgaaaggcttcttttcatttcagggtggtagatctgggaggcagccaatgtgttgccaaattggtggcagaaacctctactgctgttttccatatcatgttattttcccagactgtaattttgcctcctgccctgaagtagctgccatcctgaattttgtgtttatatcctcctccttttttagtagtatatactcctaaacaaaatattgtgttggttagttttgcttgattagg

SEQ ID NO: 4643 - DNA, 342 bp, Homo sapiens
ggataattttcaaagaaaaacttatacaaaagcagaattattattaagactatattgaataaatttgtttttgatgattcagaaagtttaacagaatctgaccctatcctagtcatcattaggaccactaattttcttgctgataatatattatgtaaaaagcaagggttacaaatagtacgtatagtatgatctgaattttgcaaaaactacatatataaatgtaaaacagaaatcggaaaggtatacattggaaatgtaaataatggttgtgtctaggcgttggggatcataattttaattttttatttattattttattttattattattttttagggg

SEQ ID NO: 4644 - DNA, 465 bp, Homo sapiens
gggattatatagctactattttgtagtgaagatcaaatgcattcatacatgtacagcacttagattactgactgacacataaataatcaataattattagttgttaatataccatttattctttacacggatgcagagtatccactttatagatgagaacaaaaaagaaatctcatactgtataaatgatttgtcccaaaccacaaggctagacaaagtcagagatggactcatgcctggtcaaggtgtgtagggtgagtggaggagaggatgaactcagtttccaccaggtgagctccactacactttacctgcaggagccagtttggagagaggaaagttatttgaccaaggaacagtggctatgaaaccaggcagaccttgtttaaaatttatctttatcagctactagctgtgtgggccttggcaagtcacttaacaattccaggtacgtgtttcataatt

SEQ ID NO: 4645 - DNA, 321 bp, Homo sapiens
gctcaccctgtgccttgtacacagtaggcactcaatcagtaggtattggctaattgagctgtcactaatagtgccagccttgtaacatccgcttcacacctctcatgactgagacctctgccatttctgttgctcaccacttaactgctagaatgtggaggaaatcctgatgcaccaacaaggaagtttctgatcagataaggatttcaggacagttgcatgtgcaaaactattcgttgaggttccagaaacactgatatagagaccctcacagaagatacggtcccttatgcaccccactatgcttcactctttggggtg

SEQ ID NO: 4646 - DNA, 1367 bp, Homo sapiens
tttttttcatattttgtgtgctgattttttaatgaacaacttataatcttacaaaataactggctgtagctgttttacattacaatacagtagatcagctcctttcactacattcccaatcaagccatccccttgggtgttaactaatgcactcaatagtgatcacaaagaatacaggaagtgcccaagttcaatgccttgtaataggaaaaaagagaagatgagaatcaggaagagctctttactttcacaatcccttttactttaattttctgtcagtatctgcccattctcctcaccctgtccccttacctgcctttctgattggaggctgtcatgctagttgttagagccagcttagccctgggccacctgggcacaatcaaacacacagaagagtctctgagaaaggctctcaatgaccacatgggtggataagagtagcagaatgtggaccaccacatggattgagtgtgagttgatgttgctgggatctgtgaccacagtgtcttagtccttccactttatccagtgacctgagttgctcaaaacatcaggtcccaggaacaaagactggaagaacctgctgtctctgaatagctatagcctgactatggctgggaagccttatagcctaagaggctcttcacacacaacaggaactttccttttgctttcccagagcagtggtgaattgcagataataaaatattttaaaatgaaatttaaaacagaaatgttcttactgttgctcttgtggagagactgcatgaagacacacactggcatgaaccacaggctccatgttcctgagctgagtaatgcccaggataacaattcctctgcctcaatctcagacaaagtaggattctccaaggcagaacttagaatgtgtctagcaatttggacattttccccaataaaacaagtttataaaattttgaaaatagagtgtctaaacttttccattgtcctttgcatattgaagcctatcagaatcccaagaataaatatgtttgtcttcttgggggcactaagcatgacccaagacaatgaatggtatctgaactacattttctttacactagagattagtagacaaaaggttttttttgaatgggtgaactctgctctttccatttcccaataactttgcaaccctcattccacaaacccacagattaatgtgggtacatcaccttattcgtgttttattctctttcaggatattgttcttccctacgtgatagtgtggataatatttctatcattgtggtagtatttcctattcctatttgcacagccattgctctagtgttgatgggaagagtagaaaaactgctcgtgccgctcgtgccgctcgtgcc

SEQ ID NO: 4647 - DNA, 904 bp, Homo sapiens
  misc_feature (1)...(904): n = a,t,c or g
gatcacagaggcttccatcagacccttctggattaatagggccagatcatggcacacacagcttctcaagatcacatccctgctgatctctctggccctcctgatcactgctcccccacttcacaccctgtcctgcagccaggccctactgcttgctgtttcacaaattgttccatgtgatgtcacttccttagctctggtctggctggtccctgaacctgacattcccttcctccccttgtgaccctctaatgaacgccaactttcatctttgaaggggttagcttctattacctccttcatgaagccttctgggataacattggccatatccttctagggcatcttctaagaatagtgtaataggctgaatagtggcccccaggagatacattcactgggaatctccacgtgtgacattatttgggaaaaagtttttgcagatgaaatcaaggacctggaaatgagatcaacctgtagtagggtgggccctaaattcaatgactagctcttagaaaagaaggggaaatagacacacagagctnnnnnnnnnnnnnnnnnnnnnnnnnnnnnnnnnnnnnnnnnnnnnnnnnnnnnnnnnncctaagaattggaggaagtcactagaagctaggaaaacaggcatgtcacagattctccctcagagtctcctcaagctcngaggaccaccntccaatatctgattcagacatctgnnnnnnnnnnnnnnnnnnnnnnnnnnnnnnnnnnnnnnnnnnnnnnnnnnnnnnnnnnnnnnnnnnnnnnnnttaagaatctgatacatgtatctcgtaaaacacctctgatacttacctgcgcttgtggctgtgttttctgatactatgagagccgtagtatctggataccggagagtctgcgaact

SEQ ID NO: 4648 - DNA, 247 bp, Homo sapiens
tggctttccttggatacccactgtcacctgcactatgaagtcatgctggctgggcttggtggctcaaaacaaggcactgtcactgcccacctccttgggcctcctggaacgccagggcctcggcggctgctgaagggattctatggctcaaaggcccagggtgtggtgaaggacctggagccggaactgctgcggcacctggcaaaaggcatggcctccctgctgatcaccaccaagggtagcccca

SEQ ID NO: 4649 - DNA, 413 bp, Homo sapiens
  misc_feature (1)...(413): n = a,t,c or g
gggctccctgcccttggggttttgatcagtgaggaggggggcttgggtctgagtctgggtctgggtctgctgccgaaacactgcccccagtccctctcctcactagactctggggtctaggcgtgtctttgtggtcggccttctccaaaccctctaggcctctgtctgcagctgctgctgcctggacctatacacaaggtcccacccctcaccggggccaaagacgtggtttcaggccctggtggatcctttctgttttgctccatccccgtcccctcttgcgcccancatcgtcctggtcagaacttccgtttaaaccttccttgcctgccgtgcactccgagggggggcgtcacttttgccataggccccagggctgaaaatggcgggccatccagtattgggctcacgtg

SEQ ID NO: 4650 - DNA, 538 bp, Homo sapiens
  misc_feature (1)...(538): n = a,t,c or g
gggcgccccgacccgtgcccctctgccctccactacccctgccggctccagcccgtccgtgtctcaccgtctttatttaacaaagaacggagagactataaatgaccctgagcagagtggctgcgagcagggcccctggggcgtcccacgggcgtcatcctagccgcgtgagcgccgagcttgggcaccgggggggttggcgtgcttgtacacttgctccgttttctctaaactgccgcgatgaatgtcagtccccagagccggaaccgttcccggttttctctacttggatctgagaactctgtccctccagccctgcgagcgctttgccagggtgacgggcggaaatgtccccgcatccgtgcctgctttcccagatgggaccctccaacaatcccctccantgcccgtgcttcctcctaacanttcccccaangaacgcngnaggggcttctccccgcaaaggcnagcccaagttctcaaannccaantttcccggcccttccnaacttttaannaaccncccgnaaaacnattt

SEQ ID NO: 4651 - DNA, 294 bp, Homo sapiens
  misc_feature (1)...(294): n = a,t,c or g
tacatttaaatgtttgatgttcctaaggtgtgattcgatttaggttgttaggtatagttcaagtgaatttttattatttttattattttacatatatttaagtctaattttactgttttnnnnnnnnnnnnnnnnnnnnnnnnnnnnnnnnngagacagagcctcactctgccacccaagctggagtgcggtgtatgatcatagctcacagcagcctcaaattccctgggctactcaggaggctgaaatgggaggatcgaatgagcccgggagctgagggtgcagttagctgtg

SEQ ID NO: 4652 - DNA, 544 bp, Homo sapiens
  misc_feature (1)...(544): n = a,t,c or g
gtaccctgtcttttgtagaaatgtttaccatgtaaatacacagccagaccaagatagaagtaggattactaagttctgttgggacaagccccgggtaaacacagagtatcatgtaatggatgtgtgaggcaaggctggggagtatttggaggcaaggggtgaggagcattcacctgggctatcaatattccctgtaagcattaaaaagcttcagttccgcttccctgcctcagccagttgttttgaatacgtccagattagaacagccaaatgtgagttttagaagtaagaagtgcctcaatctgtccaactgttctcgagctgaactgacccaaccttgttggtcatggctccaacacaaagaagtgattgtgaccatcagaactcttaacacccaagggcaaagcaagcacttatccatgggatgttatatattcaatgggtgggaaatccntcccaaaggnatgccatgcaaaaggtttngggttttaaaaattccccaanaccccngaaacnnnnncagggaacantttttccccaccag

SEQ ID NO: 4653 - DNA, 1851 bp, Homo sapiens
ggcacgaggtaagatggaagatgaggaggtcgctgagagctgggaagaggcggcagacagcggggaaatagacagacggttggaaaaaaaactgaagatcacacaaaaagagagcaggaaatccaaatctcctcccaaagtgcccattgtgattcaggacgatagccttcccgcggggccccctccacagatccgcatcctcaagaggcccaccagcaacggtgtggtcagcagccccaactccaccagcaggcccacccttccagtcaagtccctagcacagcgagaggccgagtacgccgaggcccggaagcggatcctggggcagcgccagccccgaggaggagcaggagaaacccatcctcgacaggccaaccaggatctcccaaccccgaagacagcagggcagcccaataatgtgatcagacagcctttgggtcctgatgggtctcaaggcttcaaacagcgcagataaatgcaggcaagaaaagatgccgccgttgctgccgtcaccgcctcctgggtcgtccgccacgggttgcactgccgtggcagacagctggacttgagcagagggaacgacctgacttacttgcactgtgatcccccttgtccgcccactgtgaccttgaaccccatgcactgtgacctccccccttctcccccttcccactgtgattggcacatcgacaagggctgtcccaagtcaatggaaagggaaagggtgggggttaggggaaggttggggggacccagcaaggactcagagagtcagacagtgccacttggccacttggggtaaagccagtgccagcaataacagtttatcatgctcattaatttgggatttcaaaacacaaatgaaaactcacacccacccacccccaagtgcatgtctccatcacttaaaaagtaagttccatttgaaaatatcctttcttttttttttcttcctatttttgtttgtttatacaaatatctgatttgcaagaaaaagtgcatgggaggggttttagtggtttaatgaatttttaattaagaaagggtagtttggtagtctacttaaaaatgtttctgggaaattcactagaaacattaaccaataggattttggtgagcttagcttctgtattcctactgccgcccagaaaaggggcagggctctgcaagccgccaggacagacgagcaccccatgcctatacctccctccccgagctaagtcccagggcatctgggccttgcctggagactgggctagctctgtaggctcggagagcctggggagggtgccaaccccacctctagtattttgggagatagggaagtgaaaccgacttccccttcccatacccctcagggtggtttccctaccagccaggcttactacttccaagaagaaagcagagtgccagggagtgagattgcatccctgggcttagaagtgacggagagaagacttgtttagtattttgccatcagcacaaggaaaaccaggagagagtctgcctccaggactctgagccttctgcctcgtatgttcagaaggtggataggtcttcccactccagcatggcttgaactcttaggggtctgcagtgctccatctccattggtggccccagctcagtaactatacctggtacatttcctgtgtgcaatcagtaccttgaaggcagaacattctgaataaagttggaaaaagaacagctttgctttgcaaagattgatgacagactggttcctcagaggcctaggctacccgtcacccctttttccagagcgagggcctggaatgaaggcagtttatcctctgtccctggagcctggggtttgctttggctccttgaggt

SEQ ID NO: 4654 - DNA, 522 bp, Homo sapiens
  misc_feature (1)...(522): n = a,t,c or g
aagttcctggtcagcggcgaccagaagacagttggcctctacacctccatcttcggcgtgctccagctgctgtgcctgctgacggcccccgtcattggctacatcatggactggaggctgaaggagtgtgaagacgcctccgaggagcccgaggagaaagacgccaaccaaggcgagaagaaaaagaagaagcgggaccggcagatccagaagatcacttaatgccatgcgggccttcgccttcaccaacctgctgctcgtgggctttggggtgacctgcctcattcccaacctngctccccaanatctcccctttaacctngnaaaaatccgngcaaggnatnaancaatccgcngttcgggggccnntacgctgccgtgtacccctccacccatttcggaaacctcacgggattgnattccctgaaaaagggggntnttcgcctttnggaaaaaancgctnttttggggcaaaaaggggncccccaanggaaacccnnnnggtnaaattggggggggccc

SEQ ID NO: 4655 - DNA, 511 bp, Homo sapiens
  misc_feature (1)...(511): n = a,t,c or g
ggaatacccttccacgacagaagtggatgaaatcctgtcatttgcagccatgtggagaaacctgttcatccgcagatgaagggataaagaaactgtagtatatatacacaaatggaatactcttcatccagaaaaatgtaatgaaattacatcatttgcagccacactgttgaacctagaggacatcatggtaaatgacctgtcctgtccacccacagctgaagggataaagaaaccaccatacagatacactatggaatatgcttcagccataaagctttgggaaatcctgtcatccacagccatgtggagaaacccaagaaacccagaggatattaggtccaaggaaatgagcctggtagaggaagtcccacaccttttaatctcaggcatggagattccaaaaactttatctcctgtccatctacagatgaagggatcaagaaactgtaatgttttgcacaaagnatacncttgggcatcaaaattactaaaancntgtnnntttggg

SEQ ID NO: 4656 - DNA, 1979 bp, Homo sapiens
  misc_feature (1)...(1979): n = a,t,c or g
tttttggtaatataaagtttgttctgttgaaaactgattaacattttaaacagggggaaagaaaagcggtctactagattaaattttaaaaggattttgttatttactatacaaatatacatttcaacttttacaacattcactccagtctgacctccttgtctatagaagactaagagatcaacatttccagtctctgacttcaaggacattattacggatacacaatgccctctgaaagcttttgcaaatgacagaaaatactgaagatgaccagaggctcaggtgttaaggatgcattttccatgttttccaacagcacacaaactccttacaaaaaacaagcttatctagatggtcccacgagctggtcatcttcagtttacaatatgctgtggctgctggcccatgtcactgggctttcctataaaagctttcttttcttggaactgctgtcctcctgctccagtgtcctcttgtcccacctagagttcctcctggtgtgatgggtctcggaaccacacttctcctgctccccttcactgaaagccctggcctctctcctgtgacagagctcctcttccgggtcatcacatttgctctgacacgtggaagcctcgggactggcagctggaggttcgccccgcacgggaggttttgtgctcagagcagccactacacagcgggctgctgtacatggctaaggtcctggtgaacgacaggaagccggctcgccgtagnaggtgttgctccaggatgctgggggctcgagggttgtggatcccaaaggaatattcctcctttgacctcaatgcccatcctcttcagcagtcgtgggtccctgaaagttggtccatgaaacaggaggtcctttcagggtcctttgaagtaacagtaagagtaatttccttggagtcagagggtgtgtggtatagagaagcagcaacagatgtcttggcaaatccactgtctagcttgctgctgggcaaaccaccctggggtctggacccctctggggctatggtaggagggtgagtgagacttctctgcagcacaggcttgagtttcagaatcttcactgcatcatgtctatagtttttgtcacaggtcttaataatggcaccacgcttctgagcatcctgaatcagctgattccaatgctggttttccatcagggtcctnaaatgtccgaggatgaagaggctgtacttggctcgtgtgatggtgacantcaatctctgcaaacttgccaggaatccaattgaaccttggatgctatttgctctgacacacgtaacaataaaacaatccttctgccgaccctggaatgcatccacagtgtctacttctgctggtccttttctatcgaactctttgtccaaatccttctgaatcatcgtcttctgggccttgtaatgagttattatgccaatgtttcgaaaactaacatcctttcttttgtctttaataagcttaattatttccatcaccagttttatttcttgaacatttatatatgagtcattatcccgtctttctgaaccatctccaacatcaaacacaaggtatggctgaaatggccaatctgatgaacatcgaatggcttctgtctgtctatttgtttttaagtttctgttataaacataattagaagggaagaggcatatgtctggatgcatcctgtactgaacagtgagctgtagaatgggcagcctgctgatcatgttgtgttctacattctcttccagcagtctgcaggaagcgagccatcattgactgggtcgtaggccatactcctgtggctttcatagagatgactgtcgggggggagctgcttaggggtctcctactaggatgagcttattgcagctatggatgagtggagtaagagtctcaagttcacaagactgtccagcctcatcaacaatgacacagctgaaggggacacccccttgcccacggaaagcagactcaagtag

SEQ ID NO: 4657 - DNA, 89 bp, Homo sapiens
gggcagatacgtctgtaccacgctctgaatttgctgtaggtgttattgggaagtttatttacgccgtagcaggcagaaccagagatgag

SEQ ID NO: 4658 - DNA, 398 bp, Homo sapiens
ggcccagctccatgggatggaagaccccactcagcctgactatgaggccaccagtcagagttacagccgctgcctggaactgatgctgacgcacgtggcccgccatggccccatgtgccacctcatggtggcttcccacaatgaggaatctgttcgccaggcaaccaagcgcatgtgggagctgggcattcctctggatgggactgtctgtttcggacaacttctgggcatgtgtgaccacgtctctctagcactggggcaggccggctatgtagtgtataagtccattccctatggctccttggaggaggtaatccccttacctgatccggagggcccaggagaaccggagcgtgcttcagggtgcccgcagggaacaggagctgctcagccaagaa

SEQ ID NO: 4659 - DNA, 405 bp, Homo sapiens
gaagaaatctgaatgtggtgtttttccttttgtataaaagagagttataaattatgtcatgacctcagtttcctatgagagttgccttattgtggggaggaaagggctatttaatgctttatggaatgtagatttttaatcttgatgttcattgattgattttaggggaaatctgtgaattacccaaaattatatacaaaattttgtgcacaggtgtatttctctggacgggagatacaaaattttcatcagatcatgtgtgcttgtaaaaataaacctttgggtaatgaatttcaaattcttccacttaggccttcagcctcaagcaaggctttaaaacttggagccaaaggaaaggaagtagataactttgtggacaaattaaaatctgaaggtgaaaccatc

SEQ ID NO: 4660 - DNA, 880 bp, Homo sapiens
gccgatgcccacctatgccctttccagggcagtttaattggtatcatttgtaaaaggtcttttccatcacccccaaagcctttgcattccctttccaagaaggtggctgtttactggttttggccccatgtgcaacagtaggccttggtatgatgctgccataacactcccatgtgacactccaggtgacatccaagtgcaagtctatgttcagctctggacagcaggggggaaggtgaggagagtcaggtctgtaaattgaagctgggcagggccctggctggctggagatgtgtgggcaaggtgagcaggccccatgtgcaccccagctccagtgcccactgatgtggctgaagcccaggttggttgtggtcaaattagaggtcctgagagagaagcccttaggccaaagaagtgtgtgctgggaagcaggccagggcagaggcccagggaagatctcagcaggggcagtgtgagcatgagcgagtgtgtgcacctgtgacagtgcagacagcccaagatcagagatacaatgtgcaggggggcctttggtgagtgtgtagctgtgcccctcccttctgagatacaggcccagcccccgcctccggaggctaagggggcacacctgggggtaggaggagtctgggaaggaaactcagctggaaatggtttaggcctcagagcccacatcctgtgggaggggctgtcaaggggcctgctgtcccggtcctgtcgcagtcctcaaagatgctagagtgacagtcctctaggggtagagatggtcgtcctcccaggagaaggtggcccggagacttggaggtgggatcaatcctgccagtcctggatcaggaggcctctgtcgggcgcctcgttccgaatc

SEQ ID NO: 4661 - DNA, 546 bp, Homo sapiens
  misc_feature (1)...(546): n = a,t,c or g
ggagaaggggccacacttacccttttatcaggagccactcctgtgctaacagcgaggacnctttggtgaggacggagccctcacgacctcagcagtgttgcgttggggatcaggtttccgatggtgaacttggggacacgtccacaccacagcacgtgcctattgtgtttctcggtggctggtgtgtttgaggatggcgcgtgcatgcgttttccagctttctttgtggaggaagttacctgtgggtattaacctgtccccagccatcctctcactgagcttgggttgcctgggcctgggtttcctgttgttgctggaacgaatgaccacaagacagtggcattagacagcgcaggcagacatgacctcctgggcttctgcgggtgccaacactgccgctccttctggaggctcagggaggctcttgagggcattgggacatcgtgctgccggccgccgggcagagcggtttgtttattttttgagacttccgggaacatagttataaataactttaatttgccttgnctgcccactgcagtacag

SEQ ID NO: 4662 - DNA, 921 bp, Homo sapiens
  misc_feature (1)...(921): n = a,t,c or g
agtttcttgggggcttgttgattggtgctggctgtgccctctaccccttgggctgggacagtgaggaagtccggcagacttgtggctacacttctggccagtttgacctggggaagtgtgaaatcggctgggcctactactgcacgggagcaggtgccactgccgccatgctgctgtgcacgtggctggcttgcttttcgggcaagaaacagaagcactacccatactgagatggagctaccaagagcagacagaggagaagatgggccaaaggggcttggagaggtcaaaacatccacctaccttcaaaaggtgggatagtagttctaatccaatacaatgctaataaaatgaaacccgataaaatcaggaacatgatataggaaggaaggattgtnggagatttgtgggggaaaaaaaaggagagtntagantgatggagaaaaatggnccaanggctaaaaatattgaagggnatcgggtgtttctnttccacagagttttgttannnnnnnnnnnnnnnnnnnnnnnnnnnnnnnnnnnnnnnnnnnnnnnnnnnnnnnnctatatntacacacnggngngggcgnntcccgtttnnnnnnnngggggngcncncnnaaaannncagnttttttnaanaananagttttttggnggannggngcccccccctnnnnctnccccngggcacacangcccccccnngggncaananacacncagagttttttccccccccccncaggccntttntaaaaaangcnntnnttttctcacaantgtttnnggggnntnnnanaaaaaaaacnccctccncctcnncctcctttccnctntttnncaannnnccnccanggancttncccccncntnncnnanaaaananntaannnncctntcntaannnccccccccccc

SEQ ID NO: 4663 - DNA, 382 bp, Homo sapiens
agacatgggggaggggtaggttaggcatctttggggtctgagatgtgtgaggtaagcccgcctcacagtggaagttggatggaatccatttgagatgtatccacagtaaagagataacagggtatcagaaaattgtcaagtgaaccttagaaatgcaagactggatgccaagattgattctaaattaggtcatgtggttatgggtaacaatgcagtctcaccctatcagcaagtgattgaaaagaccaaaagcctttcctttagaagccagatgttggccatgaatattgagaagaaacttaatcagaatagcaggtcagaggctcctaactgggcaactcaagattctggcttctactgaagaaccataaagaaaagatga

SEQ ID NO: 4664 - DNA, 1823 bp, Homo sapiens
tgtggaggtcagagtggaagcaggtgtgagagggtccagcagaaggaaacatggctgccaaagtgtttgagtccattggcaagtttggcctggcccttagcctgttgcaggaggcgtggtgaactctgccttatataatgtggatgctgggcacagagctgtcatctttgaccgattccgtggagtgcaggacattgtggtaggggaagggactcattttctcatcccgtgggtacagaaaccaattatctttgactgccgttctcgaccacgtaactgtgccagtcatcactggtagcaaagatttacagaatgtcaacatcacactgcgcatcctcttccggcctgtcgccagcccagcttcctcgcatcttcaccagcatcggagaggactatgatgagcgtgtgctgccgtccatcacaactgagatcctcaagtcagtggtggctcgctttgatgctggagaactaatcacccagagagagctggtctccaggcaggtgagcgacgaccttacagagcgagccgccacctttgggctcatcctggatgacgtgtccttgacacatctgaccttcgggaaggagttcacagaagcggtggaagccaaacaggtggctcagccaggaagcagagagggccagatttgtggtggaaaaggctgagccaacagaaaaaggcggccatcatctctgctgagggcgactccaaggcagctgagctgattgccaactcactggccactgcaggggatggcctgatcgagctgcgcaagctggaagctgcagaggacatcgcgtaccagctctcacgctctcggaacatcacctacctgccagcggggcagtccgtgctcctccagctgccccagtgagggcccaccctgcctgcacctccgcgggctgactgggccacagccccgatgattcttaacacagccttccttctgctcccaccccagaaatcactgtgaaatttcatgattggcttaaagtgaaggaaataaaggtaaaatcacttcagatctctaattagtctatcaaatgaaactctttcattcttctcacatccatctacttttttatccacctccctaccaaaaattgccaagtgcctatgcaaaccagctttaggtcccaattcggggcctgctggagttccggcctgggcaccagcatttggcagcacgcaggcgggtgcagtatgtgatggactggggagcacaggtgtctgcctagatccacgtgtggcctccgtcctgtcactgatggaaggtttgcggatgagggcatgtgcggctgaactgagaaggcaggcctccgtcttcccagcggttcctgtgcagatgctgctgaagagaggtgccggggaggggcagagaggaagtggtctgtctgttaccataagtctgattctctttaactgtgtgaccagcggaaacaggtgtgtgtgaactgggcacagattgaagaatctgcccctgttgaggtgggtgggcctgactgttgccccccagggtcctaaaacttggatggacttgtatagtgagagaggaggcctggaccgagatgtgagtcctgttgaagacttcctctctaccccccaccttggtccctctcagatacccagtggaattccaacttgaaggattgcatcctgctggggctgaacatgcctgccaaagacgtgtccgacctacgttcctggccccctcgttcagagactgcccttctcacgggctctatgcctgcactgggaaggaaacaaatgtgtataaactgctgtcaataaatgacacccagaccttccggctcaaaaaaaa

SEQ ID NO: 4665 - DNA, 527 bp, Homo sapiens
tttcaaagtgtattgatgagttgtagctgattttgtttttctctttaaatatatgaacatttttaagaaattactaaacagaaaattttttcttagatgtattatatgcattaaacatagaaactgaaaaagaaattgtgttcctagtttattataactatttttcttttgctttgactcttcctgtgtgacttcattaactcatttcctcagggttttcaacacatcattttgatactggcagatgataacttacatgtgtagccctctttcaagtgttcgaaatgtgtattctttctaaatctaaagaaataattctgtaaaaatgttgatcttattatatgtattagtgctgatcttatacaaatttcattatctttcatctgatattcatatcaaaaattaatctcccattttgatagagatcctgcatgttagagattgaagaaacttgaatggccttataattttggaatcctaaactgtgttgtttagacattatgattatgtgtaactggagggtagga

SEQ ID NO: 4666 - DNA, 1530 bp, Homo sapiens
ggactcccttttctttggcaagatggcggagtacgacttgactactcgcatcgcgcagctttttggatcggcatctagtctttccgcttcttgaatttctctctgtaaaggagatatataatgaaaaggaattattacaaggtaaattggaccttcttagtgataccaacatggtagactttgctatggatgtatacaaaaacctttattctgatgatattcctcatgctttgagagagaaaagaaccacagtgggttgcacaactgaaacagcttcaggcagaaacagaaccaattgtgaagatgtttgaagatccagaaactacaaggcaaatgcagtcaaccagggatggtaggatgctctttgactacctggcggacaagcatggttttaggcaggaatatttagatacactctacagatatgcaaaattccagtacgaatgtgggaattactcaggagcagcagaatatctttatttttttagagtgcctggttccagcaacagatagaaatgctttaagttcactctggggaaagctggcctctgaaatcttaatgcagaattgggatgcagccatggaagaccttacacggttaaaagagaccatagataataattctgtgagttctccacttcagtctcttcagcagagaacatggctcattcactggtctctgtttgttttcttcaatcaccccaaaggtcgcgataatattattgacctcttcctttatcagccacaatatcttaatgcaattcagacaatgtgtccacacattcttcgctatttgactacagcagtcataacaaacaaggatgttcgaaaacgtcggcaggttctaaaagatctagttaaagttattcaacaggagtcttacacatataaagacccaattacagaatttgttggaatgtttatatgttaactttgactttgatggggctcagaaaaagctgaggtaatgtgaatcagtgcttgtgaatgacttcttcttggtggcttgtcttgaggatttcattgaaaatgcccgtctcttcatatttgagactttctgtcgcatccaccagtgtatcagcattaacatgttggcagataaattgaacatgactccagaagaagctgaaaggtggattgtaaatttgattagaaatgccaagactggatgccaagattgattctaaattaggtcatgtggttatggggtaacaatgcagtctcaccctatcagcaagtgattgaaaagaccaaaagcctttcctttagaagcccagatgttggccatgaatattgagaagaaacttaatcagaatagcaggtcagaggctcctaactgggcaactcaagattctggcttctactgaagaaccataaagaaaagatgaaaaaaaaaactatcaaagaaagatgaaataataaaactattatataaagggtgacttacattttggaaacaacatattacgtataaattttgaagaattggaataaaattgattcattttaaaaaaaagtcgacgcggccgc

SEQ ID NO: 4667 - DNA, 285 bp, Homo sapiens
gtttggccctctgatgtcagaaggtgaagcagaggacatgaaaactctcactgcacatccttcatagactggccagacccactctgtggttggtggtctcttatcaggaagaagtgctggttggttggtgtgttgaaactgctaaagggaggggcagtcaggaggttggttgaaatcagcaatggagcaagtctttccaaagggctggtttctgttcaactcttaggaaagagagtctaatggtggcaaaggagtgggtataatgattgagtgaccttacctctc

SEQ ID NO: 4668 - DNA, 522 bp, Homo sapiens
  misc_feature (1)...(522): n = a,t,c or g
caaatcaatgctgaggctgtatttcttagccgtccacaaactagtccataggtaaagagcatacaaaacagacgccgaggtgatcagtgattccaaaggctgacgctcagcagcgccacctccatgccagccaactaggctacgggatggaggggcggtctgtgaaacaccagccatcccgtgaaagctcagcttgccactgtcatgtaacagggtgggtggtggcacagcagaggctcacacttgtcaccttcagcctctaaaagctccccgtggggcacgaaggctggggacagatgtccctgaggttttgttacaaggctanaccttaaaatcccttcaaagttcatcccgcctcaagtccnngactgctgtgtttttaaaccccttgttccanaanaaacccctttttccaangggtcctggccanggacntcccnggacccanntttcccnatnnccccctnggncctggcccttnctaggcccgggcccatctgnantncggggcangngttaatt

SEQ ID NO: 4669 - DNA, 674 bp, Homo sapiens
cttcggcacggaagagacaaatcactacccttttggagctttcattttattcagtagtcagggaatacaaaatacgtaagtgaagctgtgtcagaaaagaataaatgccattgtagaaggaaaaatatagaggaggaaagaagagccaggcgtatctgtattttttaatagggtagccaggacagttccttttgagctaggctgtaactgaacaaacacctgaaggcattagctatgacgatactgggaaaggaaaggggcaaaaagggactgatagcgcaagggccctaagagacacaaaccccaagacttccaggtaccaccggaggctaacatggctggagtagagagaggggtagcagtaagggaagtcatggcaggaggtgatgggagagtactacaggaatttgtaggtttttatagagattaaatgtcactttaccagactgtttttaagaatttaaaagcctgagaggaaaaaaaattctcatagctatggaaaccatcaaagaccactgaatacattcaagcaagtttcaaatattttattttcttattcatacagtatgaagttttctaaagatcccacaacatgacgtatcatgcagaagaaaaactaaacattcaacataaaccatcccctcccttacccacccccacacacaaactaaaaa

SEQ ID NO: 4670 - DNA, 49 bp, Homo sapiens
gaaaagattgtttgttttatgacgagaactcctaaaagctaacaagaag

SEQ ID NO: 4671 - DNA, 733 bp, Homo sapiens
  misc_feature (1)...(733): n = a,t,c or g
gacatctctaaaatgtgttagcacactgcagtttcattttaaatgtgtctcataatcaccagtgattactactaaggagcttctctagagatcttaaaaacagattgcttccctaagggctggaatagttcagctgggtacctaagggatgtgtgaaataaaataaattcctagcgcctcttttatctctaatattctaagatcctggtggtttgataactttggacatggtcccttaatgcagacagaagagtatcttagtctcctaactctctgaccaacacttagatcaataaggcactgtcgacagtgcactagaataataaagaacccagataggttgaaaagccctttgtaccaatataactgtaatgctgttagaatcacctttccggtatgctctcagaaataagtgccgcttttgcaaagtgttaagataatttaatgtctggcttttctgtttcatcatctcatggcatgaggaatgctgactgctctaaacgttgaacttctagaagcttgaacccattgacttgccacgagtaattacttcaggaagactcctgagccagcgagaagccaggacaatgcacaaagcaaaggtactagaaaagaaaatgcaaactccaatgtatacttctgagaacagacaatatttgcataagatgcaagtgctggaaatgatccgtaaaagncaagaggcccaaatggagttaatgaaaagtcttcatgg

SEQ ID NO: 4672 - DNA, 377 bp, Homo sapiens
  misc_feature (1)...(377): n = a,t,c or g
aaaaaaaaaaaaaaaaagaattactagatgttcgtcataggaggtggttcagattatatcatccccagtattgctgagccagatcctcctatttattctcaggaacaagttcccaaatgctcacagccacagtagaaaaaaatgtttttccatacgactgcttaaagccattctctctgaaaggaacctggggaaagtgctgtcagtagttaactaggagatgggcagcatcctcagggaaaatatccagggggtcaacagttttggggcccacttacaacactgccctccaggggtcttactgtcctttcacagttctgggggcacaggagttcagggccggggnatcttccgggaacctgggttgaaagggnagg

SEQ ID NO: 4673 - DNA, 712 bp, Homo sapiens
  misc_feature (1)...(712): n = a,t,c or g
ggaaaagtatgcaggtcaagatattgttttcaagtgccttggagagaatatcctgcagaatgcttttgatggctacaatgcatgtatctttgcctatggacagactggctctggaaaatcttataccatgatgggcacagctgaccaacctggattaatcccaagactttgcagtggactctttgaacgaactcagaaagaggaaaatgaagaacagagttttaaagtagaagtgtcctacatggaaatttataatgaaaaagttcgagaccttcttgatcccaaaggaagccgtcagacgttgaaagtcagagagcatagtgtgttgggaccttatgtcgacggactttctaaactggctgtcacaagctacaaggatattgagtcgttgatgtctgagggtaacaaatctcgcacagttgctgcaaccaacatgaacgaggagagtagccgatcccatgcagttttcaaaatcaccctcacacatactctctacgatgtgaagtctgggaaatctggagagaaagtgggcaaactcagcctgggggatttagatggcagtgaacgagcaacgaagacaggcgctgnagggganaggctgaaggaagggagcaagattaacaantnnntcanaannttcggtntggttatnttagntattgcagatnagagtgctggcaaaaagaagaataaatttgttntatatngtgag

SEQ ID NO: 4674 - DNA, 440 bp, Homo sapiens
  misc_feature (1)...(440): n = a,t,c or g
acatccactggtctcacgtgccatgcccacttgccacccctgttcgtgaactttgccgacctctttctgcctttcccgcagcctccagagggggccgggctgggcttctttgaggagctctgggattcctgcctgccagagggtgctgagagtcgtgtgtggtgtccacttgggccacagggcctggagggcttggtgtcccgccacctggagccttttgtggtggtggcccagcctcctaccagctactntgtagcaatccacctgcccccggactcaaagctnctgctgcggctggaggcggccctggcagatggagtgcctgtggccctgcggaccgatgactnggccgtgntncccctggcgggggactacctccgtgggctggcggctgctgtctgagccccgggagaccaggtgggggcaggactgtggccctt

SEQ ID NO: 4675 - DNA, 741 bp, Homo sapiens
aagcagcgagggcgcgaccgcgggtactctgctgccggcttctcggagcggcgctgggcgaccagagcagggtcgagatgtcctacatcccgggccagccggtcaccgccgtggtgcaaagagttgaaattcacaagctgcgtcaaggtgagaacttaatcctgggtttcagcattggaggtggaatcgaccaggacccttcccagaatcccttctctgaagacaagacggacaagggtatttatgtcacacgggtgtctgaaggaggccctgctgaaatcgctgggctgcagattggagacaagatcatgcaggtgaacggctgggacatgaccatggtcacacacgaccaggcccgcaagcggcttcaccaagcgctcggaggaggtggtgcgtctgcttggtgacgcggcagtcgctgcagaaggccgtgcagcagtccatgctgtcctagcagccaccaccatctgcgactcctgcctgccgcctctctgtacagtaacgccacttccacactctggtccccatctggcttctgctgaccgctgggccccagctcagaagggctatagctggtcccagaggcctggcctggccttccttcccttctcccatccctgggcctggggcctcttgggaccggctttctctcctggacaccgaggattggaaataagggcctggagctgagtagtagccagtctgctgtgaccacaggctcaggtccgaccctgctgcttg

SEQ ID NO: 4676 - DNA, 487 bp, Homo sapiens
  misc_feature (1)...(487): n = a,t,c or g
ttgggtatgacctgggtcttattcacactgcattttggggttcctgagctgcttgtttgagcgagaggtgcttcaggttcaggtcttatgcctagccccttgggtgagagggcctattctgattggcccccagcccatgcatgtggagtctgggtctgagttgaactgctgagaaagagccccagacctccagcatcgtggtggagcactggagatgctctggagccagcctgcctggggtcaagtccgggttccatctctgactgtgtgacctcggggacgtgccataactgctctgtgcctcggtctcctcatcgggtgaagtatttccctcttaagggatggttgtggggaatgaagttgggtgaaaggaatgcgagtcctgagaaaccgtgtcctgcttttgtgcaacgtgctcaagacgcatcaacgaattctggcttcttnattccgcttctggtgccttttaagtgctgcaagggctgtt

SEQ ID NO: 4677 - DNA, 330 bp, Homo sapiens
tttttttttttttttgaataacaaggaactgagtatatgtatatttcatcaggggaggggctaggactcccacttggaggcctcaggagttctgctgggcgtcgcgaaggagcttctcctcccgccgcttccgtaacctctctttgaattcctctatctcttgaagcttctcaggtggccacagctccctcttgcgctgtatgacatcgtcctcaaaccactcggcctgattggaaacccagaacatagccacagggaaagtgaggtagattatcatccgaaatatctccagcttcacccccatctcgtttctcccggtcaacaaagccc

SEQ ID NO: 4678 - DNA, 328 bp, Homo sapiens
cgcggccgcgtcgactggagaacaggatgaagaagagaaggatgatggtgaagctaaagaaatttctacacctacccattggtctaaacttgatccaaagacaatgaaggtaaatgacctccgaaaagaattagaaagtcgagctcttagttccaaaggattaaaatcccagttaatagcccgattgacaaaacagcttaaagtagaggaacaaaaagaagaacagaaggagttagagaaatctgaaaaagaagaggatgaggatgatgataggaaatctgaagacgataaagaggaaggtcgaccacccgcgaatttagtagtagta

SEQ ID NO: 4679 - DNA, 1291 bp, Homo sapiens
gaaagagatgatgaaactgatgaaccaaaacccaaacggagaaaatcaggcgatgataaagataaaaaagaagatagagatgaaaggaagaaagaagataaaagaaaagatgattctaaagatgatgatgaaactgaagaagataacaatcaagatgaatatgaccctatggaagcagaagaagctgaggatgaagaagatgatagggatgaggaagaaatgaccaaacgagatgacaaaagagatatcaacagatactgcaaggagaggccctctaaagataaggaaaaagaaaagactcaaatgatcacaattaacagagatctgttaatggcttttgtttattttgatcaaagtcattgtggttaccttcttgaaaaggatttggaagaaatactttatactcttggactacatctttctcgggctcaggtaaagaagcttcttaataaagtagtgctccgtgaatcttgcttttaccggaaattaacagacacctcaaaagatgaagagaaccatgaagagtctgagtcattgcaggaagatatgctaggaaacagattattacttccaacaccaacagtaaagcaggaatcaaaggatgtggaagaaaatgttggcctcattgtgtacaatggtgcaatggtagatgtaggaagcctcttgcaaaaattggaaaagagcgaaaaagtaagagctgaggtagaacagaagctgcagttactagaagaaaaaacagatgaagatgaaaaaaccatattaaatttggagaattccaacaaaagcctctctggtgaactcagagaagttaaaaaggaccttagtcagttacaagaaaacttagagatttcggaagacatgaatttgcaatttgaaaaccaaatgaataagacaatcagaaacttatctacggtaatggatgaaatccacactgttctcaagaaggataatgtaaagaatgaagacaaagatcaaaaatccaaggagaatggtgccagtgtatgataaaatccatgtagtgatgaggaatggtgttaaataatgtaatatataaaaatcatgatataagaatgtttgaaggtgatgcatgtttgattttagtagtataaatgtattttagttcaaatgatgtataaagttttatgaatgtgagtttctgcttttgaaaattgcttgtaattcctagccttcaaattattaaacactccttgagtgaaataattttgcattgcaaagtgttttaggatgaactttgttatagttttaactccaataaagttcatcagtttaa

SEQ ID NO: 4680 - DNA, 603 bp, Homo sapiens
  misc_feature (1)...(603): n = a,t,c or g
ggactctataaataagccctttgcacagcagtgccaagacttggttaaagtcattgaggactttccagcaaaggagctgcacaccatcttcccatggctggtagaaagcatttttggcagcctanatggtgtcctcgttggctggaacctccgctgcttacaggggcgcgtgaatcctgtggagtacagcatcgtgatggaatttctcgaccctggtggcccaatgatgaagttggtttataagcttcaagctgaagactataagttcnactttnccngtctcctacttgcctggtcctgtgaaggcgtccatccaggagtgcatcctccctgacagtcntctgtaccacaacaaggtccagttcacccctactgggggccttggtctgaacttggncctgaatccgttcgagtattacatattcttctttgccttgagcctcatcactcagaagccacttcctgtgtcctccacgtccgtacttcanactgtgcctatttcatcctggtggacaagtacctgtcatggtcctgccaccgaaggnantgtgcccccacantctcctccanccanggggggncaagccctcacantccaaggga

SEQ ID NO: 4681 - DNA, 771 bp, Homo sapiens
ggtttgccaggcgtgaaaaaatacctcactgtgacctacgcatgtgttcccaagaacatactcacagcgattgatccagccattgctaatctaaaaccttctttgaagcagaaagatggtgaatatggtataaacttcgacccaagcggatcgaaggttctgaggaaagatggaattcttgttagcaactctctggcagcctttgcttacattagagcccacccggagagagctgccctgctgttcgtgtccagtgtctgcatcggcctggccctcacactgtgcgccctggtcatcagagagtcctgtgccaaggacttccgcgacttgcagctggggagggagcagcctggtgccaggaagtgacaaggtcgaggaggacagcgaggatgaagaagaggaggaggacccctctgagtctgatttcccaggggaactgtcggggttctgtaggacttcatatcctatatacagttcccatagaagctgcagagctcgcagaaaggattgagcgcagggagcaaatcattcaggaaatatggatgaacagtggtttggacacctcgctcccaagaaacatgggccagttctactgaaaaccacatgcatcttgatgcgatctgactttctgaaggagggaggatcccaaatgctcctccagttctggttcacctgtaccttctatgaaggagaattcgtcatgtcattcaacactcgtgaggccaggaagctattaaagggatgtttcaagctgtttctagcacattccaa

SEQ ID NO: 4682 - DNA, 407 bp, Homo sapiens
ggcaccatgagcttcaataccctgctattttgcagacctttgtcgaagtgaaacatttcacaggggttcaggccatgagaagtatcctgcctaaccacctgactacaagacaaacaaaggcccaactaaagaaatatccctatcctatcttgctggacaaagatccaaggaacaccacgatgacatcccaccggaacaaggcccagaaccacttcatcatggaacatcttattagtatcctgctgggcagcaagccatactgccaagacccctcccgcccatacctataagtacccccagcctgtaagcagcggtgggctctggcattaggcttgtcccccacttctgcaggttttatcctgggcagaaagcctgcatttgctgttgagccaccctctttctctctc

SEQ ID NO: 4683 - DNA, 54 bp, Homo sapiens
aacggtgagcattatatttctacgggactgctctaaattcatccgtcgaagcgg

SEQ ID NO: 4684 - DNA, 495 bp, Homo sapiens
gcggccgcaggtgatatacatcttcccctccagcgtcgcgcctgcgtgggcatacacctccctcttgagtggggccacgtatgcccaggagttggtggcagggtcgtagcgctccacagcattcaggtcattgtggtagtcacggcccgccacagcgtagatgtacctgcctacaacacacacggacaggtcggcgtgctcctgctgcagggactggatctggaaccagcggttgtgccgtgggtcatacctccagcatcgggactctgctcgaaatccttggacattgttgtcccctccaatcaagtatacgaagttgttgagcaccgcgatgccctggttggacatgcggggggccagggaggcagtgaagtgcttccactctcccagtaaggggtttagatacttggcctggtcgctgaggacagtggacggcgtggagtgaatgcccccgaagcccacaacgcactggaagtccgaccgcagctccgtttg

SEQ ID NO: 4685 - DNA, 640 bp, Homo sapiens
tagttctccaagggacttagttggattttgtctttaatcttgcagcatccacaaatccagaagaaatctcaatatatcaaatacctttgttgtgatgatgtgaggacactgcatcagtgggtcaatgggatccgcattgcaaagtatgggaagcagctctatatgaactaccaagaagccttgaagaggacagagtcagcctatgattggacttccttatccagctccagcattaaatcgggatccaagttcttccagcatcccagagtctcagtcaaaccactccaatcagtctgatagcggagtttctgacacccagccagcaggacacgtccgttcccagagcattgtgagctccgtattctctgaagcctggaaacgaggcactcagttggaagagtccagcaaggtaacagcttcgttttaatttacattgaaaattctgtggtattcttttgggtttaaattgttgctctcttatgtctttatcggggatcttatttggccttatttcagtctcctttattaattttcaatcttcctaattgtagtgggtaaagacagttcagagagacctgttgatttgacttccccttggaaatgagtattttacaaattggctctaatgacttaaaatctc

SEQ ID NO: 4686 - DNA, 365 bp, Homo sapiens
ggtgaatgaagatatgaaggcaagagaaagaagaataaaggagagatttagctggaggtaaggctagtgcatgccacaaagtcctctatactttgtgaaatgtgagccatggtttgtctctgagcttcctggcaggcaataggaggaagggaatatatttggaacacattttatattcactaagacaaaaggaatcccatttgtaagaagaaatgaacccattcctgatactgagggatgggaggattccgcccccaccccaatccttgtgaacattatcagctacaggatcaatccgttttctcaataagctcctttgtagcacaaggttttacaagctgcagatttgtgacctgtggtgtgta

SEQ ID NO: 4687 - DNA, 269 bp, Homo sapiens
gactggaagctcaagtacactgctgcactcactggctgcctcaggccactgcctctcctctagttaacattcctcaggagggatcatactcacctaatttctctcctcaaatagcccagccgtggttcctctctttgtagggccccagagtataaaaggaccttaggaatttgcagatcccaagtggaacaacatttagtaatacaaaacacaatgctacaaactctaacaaagaaaatactaaaaattaaccaaaggaaaaacatacc

SEQ ID NO: 4688 - DNA, 1269 bp, Homo sapiens
cgtggcctctggttctctgtgcccagtccagggtggcagtttgttggcttcttagggctcctctgtcctggagatcttcatgaaagtagctgactgtgaaaaccttgaattggggagtgtatggataggtgatcctgcagctgaaggagatagctgtgttggccagggaggcatgatgggcaggccggtgtgggtcactgactgtcctcctgccagtcgcagggtcccgggcagcagcagcacgccaaggaggagccagggggctgcggggagcccaggagggctgggaggcctggcagggccgccacctcacaggctggttctccatctgggggcctgcttgtctgcggcgactctttagcttgtctgcccgccgctgacctggccccgttctgtctctctcacaagctgtctttctcgcgcccactggccggtctctcctcttccccgcagttgcctccttctctgcctgcctgggtggccgccatgggcggaagcggtcatcactgattcctacccggttgtgaagtggagggaggggcccgctgggcacagcaagggggagctggcacccgagctaggggaggagccccagccccgcgacgaggaggaagcggagctggagctgctgaggcagtttgacctggcctgggcagtacggggccctgcaccgggatcacacggctgcagcgctggtgtcgggccaagcagatgggcttggagcctcccccagaggtgtggcaggtgctgaagacccaccccggagacccccgcttccagtgcagtctctggcatctctatcccctatgaggcaccacgtaagacctcctgcccttagctctcttgctcaccacccaagaacctcaggacagaagcgagagcccattgctcctgctcagctcagcccggctgcggaggaacccttggcaggcagaacctggaggtgtcagaggctcaactcctccatctaaccagcaggctcccagagtccccggaagagcctgcgcagctgaagcagagtgcttctagatggagagtggtcactggggaaaaggacctggccatcaccttccaatacctgctgcctgtctccctgacccatgatctggcaagttaggcacagtcagacatggacagttgatccatgaggaaaagatgctctcccacctaaggccaggaatctgagagcaggactggctgagctcccagggcaaggggttcactaatgcttatcaataaagaatattgagcctggaaaaaaaaaaaaaa

SEQ ID NO: 4689 - DNA, 271 bp, Homo sapiens
ggcagaatcacatgtaatgatcttgcaggactaaattatctctttaataactgactttatatgcctttggcagtcagtgctaagcagcctgtgttctcttgcagtgctgtctccatttaagtaacaagtctagtcacgtagacggaaaagaaattgcaatataatagatcatttggatcagaagagtttgtaagagtcactaggaagcagtaagactgaatttaactgtgtgctatctgctgggaagcttcatgttcaaagtaaaatataa

SEQ ID NO: 4690 - DNA, 281 bp, Homo sapiens
aacagagtagagcaaatgagtaaatatatactgttaggtaccagggttctctctgtgggaaaagggccttctcatatggaatgggggaaggcggtggattggagttggggccatcattatgctcttttgatggtataaatatgcaattgacaagtcataaccatagaaagaagagcaagaagccatgtccccctgtagcaatgcatgtatctagtgcccacatctctctatttcttgatgccagtctccatcagaaggagccaggtctccttggacaagtg

SEQ ID NO: 4691 - DNA, 370 bp, Homo sapiens
  misc_feature (1)...(370): n = a,t,c or g
gtgcacaatttattacatttatgagttcataataaaatggatacttaggaactttaaaaatgagttagaagtaacaattagatgtaaaattctcaaatcttggaaactgaaatattaaattctagaattttcttaaaaactctttcttatgaaagagaaatttgcatagtttgaaaattattatgtcctttcaagggaaaaaggaggaattaaaaaacagacccattgatgaaggcaatgagttcttctcagctggtttattctccactgaagctcaatataggattatattttctttacttacagggaagtgggtcactgctctgttttccaatanccctcaaaacagggacagcaatgcttacacggg

SEQ ID NO: 4692 - DNA, 1236 bp, Homo sapiens
  misc_feature (1)...(1236): n = a,t,c or g
cacgaggaccatggagtagagcagatatattagtccattcgatgtggaaatccggcctgtagttgtatattcgtatagctatatgttggtaggatggacctacatggtttaatgaaagtggaaggaaaatctattttcagtcagatcctatagatatttcataaggaattagaacttagttacttaaaaattatattctagaggtttataaagcaaacatttattatattcatttacctttttaaaaaattttaagcaaagcccatactcctgttttggggatatctgaaagagagagcatttacaactttagaattacagattcatgagggatctgattttattttctttttcaactttaatttttgattcagtgggtacacatacaggttttattacctgagtatattgtgtgatgctgaggtttggtgtacagataaagcgatctgattttatactcttatgcagtggatctaccactactacaatgactgctacagggctgctaatgtttctgaatattgtctaagtacttctagaaattggaaaggagatccccggattcttaaatcctcctaccttaagggagccttcaggataattattattttacaaaaaaatgcagctaggctattgtatacatcaaacaggctgttttttctcatggtgaactgaatctgcttcagtggaactttccccattctgtctgaggtctccctttggacacaatgtagaataaatctattgctctnctgcattcaaatagttgaagacttattttttacctcttcatcttctcttccctaggctgaacgaaacgaaaactctcagttccttaggtttctgtgcattatttctaatttattcttaattcataactctatagacacttacagaacacctactatgtgtgagcctggcatttttaatttaaaacccttnnnnnnnnnnnnnnnnnnnnnnnnnnnnnnnnnnnnnnnnnnnnnnnnngncctnggaanaanatttgnttganncccagganttcnagaccagcctgactctactaagaatttaaaaattancctgnnntganggancgtncctgnagnccnagttcccaggaggntgaggngganggatngcttgggccnagaattncanggnttanggggggancctttttcaaataattcctttaataaatcattttctttgganacaaacttaacctangaacttgataaaaagaaagcc

SEQ ID NO: 4693 - DNA, 210 bp, Homo sapiens
gggggctaacagaatatagctaaagcaaggggaatttcttgaaaacctgcttatgaagttatcagatccccaggtccattcatcctctctagttagctggacaactgcccttccttcatcctgcaaaagtcagatagaactgctcaaaaaaaaagaaattcaaaactggaactgggtctataaagcttgatgtcacattcaggtttaaaa

SEQ ID NO: 4694 - DNA, 721 bp, Homo sapiens
  misc_feature (1)...(721): n = a,t,c or g
aacaaacaaaaacaaataaaaagaagttttggtaacttttctgttttgtgtgtctttaagtcgtggtgtttatataatcgacacccatttatttcagtaattcagcaagccttttagagcagtgtctcaacttcagcactgttgacactttggataattatctttattgtgggggactgtcctgtacattgtagaatagccagcaccttgtcctctacccactagatgtcagtaacttccccttgtttgtgacaacagtgtgttcagacattgctaaatattccctggggagcaaaattgtcctcagttgagagccattgtttaagagcttactctgtgccagcctggtggataggtactgaagatagaaaaattcaaggaattaatgcagtgagggcagaacgggcttataaacacataattggaaatctgtaagataagtgtaccagaaaatagcaatcaagacacctcaaaggcttgggctggtgagctatctcagaatatctcaggagcatttagtagacagctatgcttagaacatgaaatgatagaatgggtattggtaggaaataaaagcagaaaagacaactttattttacataaccatttaattgatgaagctcactgtttagtacttgcagtttattttttactgttgtgggtagtggctttaagtttggancccttnctatgtcntttttttttttaatgggccaatttg

SEQ ID NO: 4695 - DNA, 435 bp, Homo sapiens
gaaataaggctgaatgtcttataataattcttagaggtaaaaactgtgtgccctcttcctccagaggctagtggcagtagtggagaattactcaatcctttcttagtaatccatacacacattatagacagcaggatagcagtctccctttccagaaacactgtataagaagcttctttccataaacagtttatacatcaatgtgtatagatacctagttactgtagatctttttatgttaggcattcagatgtgtctcattctgactgcgtaacattgatgtacacctgattttgttaagaccagtttgctccttttgggcaggtgctgcaggaaatacccttggaacagttttttgcttaaatatttgtatgtatctgggaagggtacatttctagattccctggtgtcagtaaacatttttcaggtgataaa

SEQ ID NO: 4696 - DNA, 937 bp, Homo sapiens
gggtgacctccgaagatggcatcacaaagatcatgttcaaccggcccaaaaagaaaaatgccataaacactgagatgtatcatgaaattatgcgtgcacttaaagctgccagcaaggatgactcaatcatcactgttttaacaggaaatggtgactattacagtagtgggaatgatctgactaacttcactgatattccccctgggtggagtagaggagaaagctaaaaataatgccgttttactgaggggaatttgtggggctgttttatagattttcctaagcctctgattgcagtggtcaatggtcccagctgtgggcatctccgtcaccctccttggggcttattcgatgccgtgtatgcatctgacagggcaacatttcatacaccgtttagtcacctaggccaaagtccggaaggatgctcctcttacacttttccgaagataatgagcccagccaaggcaacagagatgcttatttttggaaagaagttaacagcgggagaggcatgtgctcaaggacttgttactgaagttttccctgatagcacttttcagaaagaagtctggaccaggctgaaggcatttgcaaagcttcccccaaatgtcttgagaatttcaaaagaggtaatcaggaaaagagagagagaaaaactacacgctgttaatgctgaagaatgcaatgtccttcagggaagatggctatcagatgaatgcacaaatgctgtggtgaacttcttatccagaaaatcaaaactgtgatgaccactacagcagagtaaagcatgtccaaggaaggatgtgctgttacctctgatttccagtactggaactaaataagcttcattgtgccttttgtagtgctagaatatcaattacaatgatgatatttcactacagctctgatgaataaaaagttttgtaaaacaaaaaaa

SEQ ID NO: 4697 - DNA, 706 bp, Homo sapiens
atttataatagatgtcctactaattccatgcggtcctgacacaccttgaaaaacaggctaagactgagctgagggggatgttgaaagaggcagcactttcaacaaatgtccagctattatataggtcatgttataactgcaggtgtggagcttctgctccagagactgctcctataaatgattttgtaaaacagattacacctactctcttgatttttcaacaattcagattttcatatactgagactgcttaaagcagaagtcttttatgccattctaaagcaagaagatatgctggtcattttgcgtagcccttttagtttttaggcatttttaaaatgcttaaaaaattaaataccaacccccaaataactcagtcaactcaattctactgactcaaaaggaaatggtttcagataaagatgcccacatggcttttagttcagccagttctttctaactacaagtaacataataatttcctttgcataggaaagttcttagaatcatcagtcatgaaaacagatgttgggcacagaggtgaagcagcagccagcatcagtaaatttgccattattaaccgcccaccgccaccctcaaccccattcccaccccctgttggaattggattagccttctggtattattttaagagtgattggaatttaattttagttaggaagaactgagtccattgtttacttac

SEQ ID NO: 4698 - DNA, 139 bp, Homo sapiens
aaaagcataattttggccacacactgtaaaggaagagctcagtgtgcaagaatagttatgcttatttttgccatttttgggatatttcagttctccattccataggcttcaccagaaagtgatccatgggaagagatac

SEQ ID NO: 4699 - DNA, 576 bp, Homo sapiens
  misc_feature (1)...(576): n = a,t,c or g
gattactctcctctcagctgtctgcttggctcactctctcaccttctgaggtcttagctcagataccacctttcactcacctgtccaacctatttaacacaaactggcccatctctgacgctcctgatcttcctgatgctctatttttaaattttttcaatagtgcttatttctttcagacattgtatatgtttctcctatttgtgatgttcagtggctactgtccccacccacattgtcccagggtgaattccacaaggtaggggatcttggttaggctcactgctgtacccaaccccctaacacagggcctggtgtgtaggttttcagaaagtatctgtaaaatgcatgggtggaggagggagcattttccttctggcactgctggggaaaaagaacctaaggccctccactcaccagggttccacattctctgtagtccagctgggaaatgctattaaaaggaccattctcgtaggccttgatgggtgggacccaggcatctnggcaattcagggaggggccttccaagttactcttgcctagggggaatgtcccagggaccattattacagt

SEQ ID NO: 4700 - DNA, 290 bp, Homo sapiens
  misc_feature (1)...(290): n = a,t,c or g
tcagatcatctccatgacccttcacccactctgtgaagtgggcagcttataggtgttgtcatctccctagagatgaggaaggtcagaataccaggaagtggccaagacaggactaggatcccggggttttaaagtcatcacagcgctgcttgggctgcagcctgcgggcccctattgaatgttcttcattcttacctcacatgctccttcgcgcttcatgggagatgccccttcccatttttcttccaacaccagcctttgagcctctcggctcctgncttctcccctgg

SEQ ID NO: 4701 - DNA, 523 bp, Homo sapiens
tgatgccccttcccagaccaggttaggattcctgggaaggccgcggattccggccctggaagaggcaggatcctggagcagttttgtgaggcttttgtgctcccatacgccccctggtggtgagtgtaaagaagactttgcctctcacaactacatgtatgtgtggcatttttgttagagatgagaaaaggattgagaaggataaactggaatcctggtaagaagcctttatgccagcccgacacctgctgtaattggggtgcatgagctatggagtcagatagttgttgggagggggaggacaagaagtctattgtttggactgtgtttgtctcacaatcaccacaaaataaaagtgtagaaaatgcttgtggtgtactaactcttttctgtacttaagttactcagattaacatgcacttctaattctaaacattttttttggagtcatcactgtcgctgtttaagtagaacaatgccaacgatgtatgagaaacagggaataaatcaggatttgtgtgtg

SEQ ID NO: 4702 - DNA, 1108 bp, Homo sapiens
ttttttttttttttttaagagaaaaggctttttaatatgaaaactatgtatttgggcacaaaaatgcaacacacagtaagaaaccatattctatcaattatgatattctgtaatctaagaacacagaaagttttgttattaggaaatgccaagaggaaaaagaactctgtaaagtcctattcaatttactttgttagggaaaaggatgtttatttggcttttgtcacagttccatcatgtctactcttcttgtaagttcagcttcaatgctatctagttctcgctttgcttcttcaattttcacttgagcaagagacggattcggcattaagtctaaataggactccaattttttcttcaaaggtatagtctgttgctttaatcttgccagtttctctgatagtgctactaaggactgatgagacagagaagcatccatgcctctggctgaaagttgctcctctgcagccttgattccaaatctgaattcctctgactttgcttttagaaagtccatgttctgacgacgattatcaactttggccctttctgtagacagatgcaactctgctttcttgacatcctcttgtagacatttttctaatactaaagttgcagttaaatttttttcaagtttttccagttcaatcttgatttcttcacttttggatttggtacgaaagagatcagaggtcaaatcattcactgcagggataaaactagctagcgaggtatcctttgtttcaaggggccacccgcactgtcaaccaaagcattcagatacctggaaccagtgctagagagattggcgggggaaaaattcacactctccatgagaaggtcttgaagatacttggcttctgactcgtattcacttgctttctgcttcaagtcctctattaccaggtagacatccctgtcccggaccctgttgcgttctgaaaggtgatgtaaaatctctgtggtccgtgggttcacctcatactgtggaataggatgatctccaaatattttttttaaccacgcagcaacctgcgtttctctctcctcctgcggctccatagctgcgctcccgccactttactaggaactcctagcgggagatgcg

SEQ ID NO: 4703 - DNA, 397 bp, Homo sapiens
tagctctgggctcatccagaccgtgttcatctccagttacatggtgttggcacctgtgtttggctacctgggtgacaggtacaatcggaagtatctcatgtgcgggggcattgcttctggtccctggtgacactggggtcatccttcatccccggagagcatttctggctgctcctcctgacccggggcctggtgggggtcggggaggccagttattccaccatcgcgcccactctcattgccgacctctttgtggccgaccagcggagcggatgctcagcatcttctactttgccattccggtgggcagtggtctgggctacattgcaggctccaaagtgaaggatatggctggagactggcactgggctctgagggtgacaccgggtctagggag

SEQ ID NO: 4704 - DNA, 945 bp, Homo sapiens
tcatgttctttattgaacaccttacatgggtatggacagggcctatgggtggggcaaggcagcaatgacagcctcagtgaagtcatggcaagtagcatagccacccatgtcagaggttcgaacctgtgggggagaatcatcatcatccatgtggcctgggctccatcctaacaatccccatcaccacccaacagtctgtcccctaaggaagccggcccaaggacaacctaggctctacccagcaaggtgaccatggtccactgcttagaggcacaaggtctcttccctggtacactgcactgaagggtatggggagtgtggtccttgcaaggttggaagaaataaagggctctagctccctttagtctgcaggtgaccgatgacagacttgatgaagtcggttgtggtgctgtagccgcccatgtctcgagtccgcaccttgccaactttgatcaccttcttcaccgcatctgcgatcatgctggagtgatactcaagattaagatgccgcagcatgttggaagccgacagcagcatggccgtgggattggctatattcctgcccactgcctgggcaaatgggtgccgggcacccgtctcaaagactgcgtattctgcactatagctctcaccagggaccacaccagctcccccaaccaggccagcagccagattgtcaataatgttcccatagagattgggcatcacaagcacatcaaactggtaaggattctgcaccagctgcatgcagcagttgtctatgatcattgtctcaaatttgattttgggggtacagttcagcaacttcctcacagcactgcaggaacaacccatccccaagtttcatgatgttggccttgtggacagcagtgaccttgccccgccccttcttggtggcatagtcaaaggcgaactttgcaatccgctgagacttggctcgtgtga

SEQ ID NO: 4705 - DNA, 580 bp, Homo sapiens
  misc_feature (1)...(580): n = a,t,c or g
aaagctcagcaggcaagagagaacatgaaaagaaaggaagagtaagtactgccagtcttctgtaaagtcagatcattcagtctaactgaaaacctcagatatttggactcataaatatgggacctcggaaacagtatgaagcttaggaattgactaattattagatattccatatttatttcttccctacctaaattatattaccaccacgggcctcagtttgagaggtacagcttcttaatataaaagtcaattcagaaacagaatgaaaaataagaatatcagcaaggaattttccagatggaaaagactgacaacaaggaaaaatattggttatttcttgattaacaggaatctttttttttttaaaattttcaaactgttgatataaaaagaactttatctgtatcttgattaagttgagaagaaaacttaaagtacaaaactcatcttaggcccnnnnnnnnnnnnnnnnnnnnnnnnnnnnnnnnnnnnnnnnnnnnnnnnnnnnnnnnnnnnnnnngaggtccaggagtttnagaccagctttggncaaaaatggngggaacccccctttttt

SEQ ID NO: 4706 - DNA, 871 bp, Homo sapiens
  misc_feature (1)...(871): n = a,t,c or g
ttttttttttatggtaagaatttttattctgtaagaatcttcaaagctcagcatgaagatacacatctttcccatgggaatccaggctagagaaatgcaagaaggcggttccctctagagtctcctttcctgggagatgcagctccagatgggtgggtttctgggcaggaggggagaggagggtggtgtttattcaactgtttatttgggatcatgttatgcgtcttcaaaaagcgatataagagaaaatattggaaagatatttcaaaataagaattaccttgaagtaattcccataattaatgggtaacatttttgtgtgtgtattttggctttttattgtaaaaataatgtattttcattgtagaaagtttttttaaaaaagtaacgagtacaaaaaagtagtgttatataacttttaatggaaaatgtcaaatagatacaaaagtataaatcgggttggcaagtgaaatacaggccaaaattgggcccaccagctgtttttgcacagcccaaatgttaagaatgatttttacatttttaaatagtgaaaagatgtaaaagggtaatatctaatgacataagaaaagtatgtgaaattcagattttattgtccaaaaagtttggaacacagccacatgcactggtgcgtgggccccctgggtggcggcttcatgccactactggccaagtggcaagagagccccaatgggctggaaaagccaacaaatctttaccatctggctccaagccctggtttcaantcccctggngtggtacctatccttgcagcctcaaatttcccggccaatcttggtttcatttatagttactcccagccccacgggtttcaaagggaanttcccggaaa

SEQ ID NO: 4707 - DNA, 640 bp, Homo sapiens
tttttttactactatttccttttatttgttgttgtgaattttactcagaattaaagataaatgattagtaattacaggaaaactaacttgtaaaaatcttaaagacattgaatgggttaatgtactgagcagctacggaatgcaaggcactgtaggagtagggtgagtatactccccacaagggctcagggtcaggcaggggaggtgagataaaaacccacagccatacactagctggcctgtcctgagggttgtgaggcacaaaatgctaggagactagagaagtaagaaatgtcttgacatgaggagaaatcaaggaaagcatggttttagaacatgtgtgggatgttttttgtatcgagactgaagaggctttttaaagtggagggaaggcaaactgaggcatagagatgccaataccaggtccttgtcaggaagaacagagtccaatttggctgcaggatagggcatatgtaggggaggggataagactggcatgggggcagagggggacttgaatgtcaggtgacagagtcaaagcttgcactcaagtaggtgattgataggtgatcttgggggcttttgagcaggaagagtgataaatcaacattggcttaggacaatccctttggctttggcc

SEQ ID NO: 4708 - DNA, 602 bp, Homo sapiens
ctgcgacccgagccacctgtcagcttcccttacctgcattatgatgccactctgcccttccactgcagtgccatcctggctacagccctggacacagtcactgttccttatcgcctgttttcctctccagtttccatggttcatctggctgacatgctgagcttctgtgggaaaaaggtggtgacagcaggagcaatcatccctttccccttggctccaggccagtcccttcctgattccctgatgcagtttggaggagccaccccatggaccccactgtctgcatgtggggagccttctggaacacgttgctttgcccagtcagtggtgctgaggggtatagacagagcatgccacacaagccagctcaccccagggacacctccaccctctgcccttcatgcatgtaccactggggaagaaatcttggctcagtatttacaacagcagcagcctggagtcatgagttcttcccatctgctgctgactccctgcagggtggctcctccttacccccacctcttctcaagctgcagtccaccgggtatggttctggatggttccccaagggagcagcagtggagagcgtcccagtgtttggg

SEQ ID NO: 4709 - DNA, 555 bp, Homo sapiens
gctttgttcttcctacccccaccatctactgccctttctccattgttcttttgagcctctatgaccttgcaaactctgctccccattcctggaatatcctttcaggtgaactttatcttattctctttttcttttcttccccagtgtcccaaatttgctttgtcctaagaatctccagggtctaggggcacgcagcacaccaaatccatcagaatctctagggcagaatcttagaaactggattttgttatccaggtatactcaagcaagagtaagaaacactggcctcaaaaacactcgagagacaatgggaaagaaaatttcaattcctatgtccatgttgtcttaaacatcacatcttctaactttatgatcaatgcttgtgattctcttcagaatgttttccagaataatctaaggtaaaatgtctgtgggaaaccaaaacagctgccactgaacctcaacatttatctgtatgcattatgtcaaggcgtgggagggggatgtacgtgtgcacagaaattcacacaaacacacagggtcacatgtatctga

SEQ ID NO: 4710 - DNA, 919 bp, Homo sapiens
ggaaatgtgaaatactaccagtcacaccattatagtaccgtggtgccacctgatgaaataacagttatttatagacatggccttcccttggtaacacttaccttgccatctagaaaagaacgttgtcaattcgtagtcaaaccaatgttgtcaacagttggttcattccttcaggacctacaaaatgaagataagggtatcaaaactgcagccatcttcacagcagatggcaacatgatttcagcttctaccttgatggatattttgctaatgaatgattttaaacttgtcattaataaaatagcatatgatgtgcagtgtccaaagagagaaaaaccaagtaatgagcacactgctgagatggaacacatgaaatccttggttcacagactatttacaatcttgcatttagaagagtctcagaaaaagagagagcaccatttactggagaaaattgaccacctgaaggaacagctgcagccccttgaacaggtgaaagctggaatagaagctcattcggaagccaaaaccagtggactcctgtgggctggattggcactgctgtccattcagggtggggcactggcctggctcacgtggattatacttactcagctgttaagagtaggcaatttcttcagttcttccacaagaaatcaaagcaacagcactttgatgtgcagcaatacaacaagttaaaagaagaccttgctaaggctaaagaatccctgaaacaggcgcgtcattctctctgtttgcaaatgcaagtagaagaactcaatgaaaagaattaatcttacagttttaaatgtcgtcagattttccattatgtattgattttgcaacttaggatgtttttgagtcccatggttcattttgattgtttaatctttgttattaaattcttgtaaaacagaaa

SEQ ID NO: 4711 - DNA, 424 bp, Homo sapiens
ttttttttttatgggggaaacagtgacattcattcatcagataatgacacacacacaactaattacacgttgtgatagatagccatgaaggaaaataacagagtgcaatgataacttcatcaccccacttttcttaatggcatttatcaaagtttgaaccttgtttacatttttcttccctttatcaccctctcaggccagatggtaagctccttcagaacagggcctccttgctccatcccaagaagtgaaactgtaggtgcccaagagatcaataatgttggggcagacttgatgctcaacgggcatctaacctaggctgggggaggggcgcatctgggggaagtttccctcaggcagtcacatttgagctgagggtcttaaggacacagggggtttaattggggggggttgggttgggagg

SEQ ID NO: 4712 - DNA, 1007 bp, Homo sapiens
  misc_feature (1)...(1007): n = a,t,c or g
cgcgcgcccagccagaacatctgtttttacacccagagagcgcccctcgttaggacagaaccacggtgcccagagccaggaagccgccctcctggcgcccagcatctgagcttctacacgtgatgggcgggctcaggagaggacagggagtcgtggtggaagttccacagctggccgcgtgggggggcccttgcaccgcacttgccgcctcctgactgccccgatccccgcagcccctgtgccggatttcatttccctcctctctcccagggtacctggccccagcactctcccatctgttcttcaggaaccgactcctctccagttgcaacaccagggagaaaggggcctccacatgcccaagtacccctgcaggatgaagggcaggccggcccttgatgtgccatttctgaataatagtcactgccgccgagtctagggatgtcctgtttttaacttagcccctgccctcgggatgcacccaccgatctgtggcaggagtggggtgtgggggagtgtggggtgaggggttcggaaattgccaaaggtctactttccagaatcaagtgccttctgcaaatcatgttggaaaagtccaaacctggagatgtccctgtgcctccgcccctacccaccccttttccttcagctgtgttaggaaggagaagttttcagaaccctctaggctggtggctttcaaacttcagaccatgatctgcagcaagaaacgtgccttccatcataaatcagtccatttgtttacaactgtgttccaagcaggtttcataaagaaattcttacccttagaacctcggatatcctctatgttttagttttcatttttttaaaatgcttcttaaaattcactaaattgggctaggtgtgggctcatgcctgtaatcccagcactatggggagggntgaggttagagggttcacttgagncccagnaggttgnaaccagntcgggncaacatagtgaggaccccatttttacaaanagtttt

SEQ ID NO: 4713 - DNA, 585 bp, Homo sapiens
tttttttttttgcacaaacagttttatttgatgaaccacagtgactaacaggatcagaagacagtgcagatattctgaagaaggcactgggggaggtaagggggtatcacagcaggcagcctcctctgcttctgtcccagttcacagatgagttccaggcaggaagtctctgcaggtcacccacggcggcctcagagggacaatttcttcccttctagaagcctcttccagtgttcactggatgctttgaggacagctctgggcagaggaggtgactctgtgaaagatgctatcttaagatggggagactaggctgtgaggagccccttcccctctcctcctccctctgcccccagagctggcgtcattccagggagggtcaagatgtccattcacatcaagctgggcttttcttatctccatcgctcatgtcttgtccttcactttcatagtcctccaagaacaaaacccggaatagacactcccagcctctagctcacaaaggccccactattaatttcatcctcacggtctctctggcagtgtagacatcatgctatctgcacacttgctccagtccctatt

SEQ ID NO: 4714 - DNA, 319 bp, Homo sapiens
ctctcaaaaagaaaatttacagaataagccaattcctggtagagagaagtattaagtttccatagagtttgaattaatatattttccttttattgccaggttgggtatctacagccattggttgctgttcaggtcagctttgccccctaacaacactgggaaagaagtaacagttgagtgcaagattgatggatcagccaacctaaaaagtcaggatgatcgtgacaagtttttggggacgagttatgtttcaaaatcacagcacgtgcattagtatgagtagggtatcttccacagagttaaatgtttgttgttgttc

SEQ ID NO: 4715 - DNA, 338 bp, Homo sapiens
ggttggaataaaatgacattagagaaaatcaaacattaaaaataccttctttataaagatcataagaatcatttaaaagcagctgaaagggagaaatatcaattgggcaaaaaaagaaatctttttttcagaaattgaattactatttctttcactggaggatttttgatgatagaagataattgtaagtaaaggtaatagactgaggtgggcggcaaagaggacaggcttcgagtcagcctcttctggtttcagattctggcctcaccacttaaccagcttgaccttagtcagagaggtttttttgagctaagactcatttttcttctctttaaacc

SEQ ID NO: 4716 - DNA, 270 bp, Homo sapiens
ttttttttttaatttcaaagatacatgaaaatcgttttatttatttaagaaacacaaacaattgaacaaacaatggaagcaagtccttttgcctaaaggaacacaaagggtcatgcggatgttgctcctccaaggatttcggtgttccccaacggctagttttgggtctagttcttctggaagatcttattcttggggagctacaggttctggcgtttggggctctttcaggttctatctccattttcccctcaattcctccccattctg

SEQ ID NO: 4717 - DNA, 505 bp, Homo sapiens
  misc_feature (1)...(505): n = a,t,c or g
ggaagtttgagttttggggattcttattcagcttcccagtgcaaagcctgtgggcaaggaatgaaaggcggaaggagcggtgtggagggaggcggtgcgtggcgcctcctgctttgttaatgtgcttcatttcactcttttgattgaatgattgctggaaagtgcaaggcattaagaattaaactaatgagaaccgaggcaggcagactgactcagattttaattttgatttttttttttttttttttttagatgaatgtgaagaagtagaacatcagtgccaaaagactattcagcaactggaaactgtcctgggagagccactccagagctatttctaagactttctgtggtgtttcatactctactcagagttcacactcatatttcatatttttatttttgggtgttgggtgccatgttacttttggtgccttaatacacctacttggnttacttacaaatgttttatcacttctttacaaaatccccaccctggcttgtg

SEQ ID NO: 4718 - DNA, 905 bp, Homo sapiens
  misc_feature (1)...(905): n = a,t,c or g
tggtactctgtctgtgcctgtgtgtgtgtgtgatagtcactcttgcatggcttccatgtctgggtttgtggcatttggggataaggtgctgaagccagagcatttgcagtttgtttgaggcctcgttgccaatgatagatcactcctgttgacctggtatgtctgcttgcttgctgcttttccttgctttctcttggaagaggaaaggactctggtcaggcccaggctgagtgagatgagctgcagctggctcatggccttcttagagcagagagaggagtatgtcattttactaagttcctaaacaaacatttatgcaggcaacactccttgcagatccagaaactgaggcacaatagggttatgacttgctcaagaatatgtagctgctagggggtaaatcaaggcatcacaatttctgttcagcgggcaggaataggctgtgaattgctagcacttttttttttttaagcaattactttttgacttgttcctctgaaagtgcaagaggcgtacacctttcccaaatgtagactagaatctgcaggatgccacccactgtatagttcctgctttcccagagaggaagaacttttagaaaccaaatgatcttaattgttattgcccacccctggcttttccgggtagaaaattcacagtaggaatgattgttaagagagagtgcttggaaccatgggttaacaggaaaggctacctaacttcacatatctgcaaccagagcagccaccaagcattacttagcagcaggaaaatgattgtatttgagttcctgtgtgtccaaaactgaggcaccatgttctttgaaaacatgccaccttcaaggctggggcgnggtggctcacacctgttaatcccagcactttggggaggccgaggcgggcggt

SEQ ID NO: 4719 - DNA, 631 bp, Homo sapiens
gctctggaacgaaggatgcccttgggaggtgatgacactcaggtaaacgggtgctcaacagattgcttcctcctatcctcagacggtctttgcatgcatgcagccattggcactcccattgtgtggaaggaaaccagcccagggtcacacagctggtcagcagcaacatagctgttctcaaatctaaggtgcctgaccatgcctccatgagggaccgcctccaagggaggttgatcctggctttggggagcctttcctgggctgcacgaataacctccattgttcgagaccccaaactctgctcacatcttcctttccctatctctgcttgggctatgatcacggtgactctagcagcccttcatggacattatagtactctctgccattcacttttgctctaatctgacttcaacccccacttacttggtctctccttttacaaccaacatggcaaaaccccatctccacaaaaattggataatttgataattatcattattgggtttctgagacgttacacatttaacattctcttctgcacaagttgcctttgtgtgagtatactaactttctgtagaggtatacttgtaatcacaaataagaataaattatataaaacaaaaaaaaa

SEQ ID NO: 4720 - DNA, 711 bp, Homo sapiens
ttcggcacaggagcataggcagcctcccgtgtctggagcacgtgtctctgctgaacaaccctctgagcatcatccccgactaccggaccaaggtgctggctcagttcggagagagggcctcagaggtctgtctggatgacacagtgaccacagagaaggagctggacactgtggaagtgctgaaagcaattcagaaagccaaggaggtcaagtccaaactgagcaacccagagaagaagggtggtgaagactcccggctctcagctgccccctgcatcagacccagcagctcccctcccactgtggctcccgcatctgcctccctgccccagcccatcctctctaaccaaggcatcctcggagatgagtgagtgaagcaggtctcatgagcgtgtctgctggcccggcccccacggaagaggggagggtgtgccgtcccgagtggagccgaggctcgggacacgcaggaaaggacgccgcctgcccgggctcctggagacgcagaacttggtgtgaggtcttgggaaaacagttcaacccgatgttttaagagccagaaaaacattcccaccccttgacctggtaaccccactggtggggattttctcttagagggataagataccgggaaggggaggtgaaatgctcaccactgccaaaacacgggctgcaactgcaacatcggaggatgagagggagagtcggctgtgg

SEQ ID NO: 4721 - DNA, 530 bp, Homo sapiens
ctttttttttagcgttgccattgaaagttaaaatgtttgcatggtttaccctctgagttatgtttcttctagtgagcatgcctgctgtcactaagtgaattatttactactttttgtaggtctatattttaataattattgggataataataattgtggtatgctttccatttacaaaccactcatatactttagtgtatgtcatcctcaataatctaatgaggtaagtagtataagtgttagctctttgcagataagaaactgaaacccagaagtttattgaattgcttcattgttacctagccagcaaggagtggaattaaaacttgaactcagatcttctaattttctgagctcatcctttctcttatacctcagattgcagactaatcaaattttacttaaaaccttcctgatatttttgttaccctggacaccctttctattctagaaaaggtttcccattttatatggaagtgactaattttcaagctggccaacaactttatatcggggtaatattttattcc

SEQ ID NO: 4722 - DNA, 550 bp, Homo sapiens
  misc_feature (1)...(550): n = a,t,c or g
attntannttcnanntttcnnntgnnntnnnancntactntgnnaaantntgnantanntnnanttntnnannnaaggggttgatnganaccgttatgactgatacnaattaannnnnnnnnnnnnnnnnnnnnnnnnnnnnnnnnnnnnnnnnnggcacgagggcnnnnnnnnnnnnnnnnnnnnnnnnnnnnnnnnnnnnnnnnnnnnnnnnnnnnnnnnnnnnnnnnnnnnnnnnnnnnnnnnnnnnnnnnnnnnnnnnnnnnnnnnnnnnnnnnnnnnnnnnnnnnnnnnnnnnnnnnnnnnnnnnnnnnnnnnnnnnnnnnnnnnnnnnnnnnnnncagagatggtgccactgcattctagcttaggcaacagagcgagactgtctaaaaataaataaataaataaaataaaatggannnnnnnatatgccaacagttggttganattaccctctttaactgnagacaaggaccancccttgtangntggaggagaggaaagngaataagttgagaagagagttnaaaatnnccaggccccacgg

SEQ ID NO: 4723 - DNA, 393 bp, Homo sapiens
aaataaaataaaataaaatcttttattgacaaaatgaagaaaagcaaagggaagagaatatttaacagtgtatgaacttgaacaagggcaatatgaaaagcaaaggacttcaagagaatatgtttaaaagaaacttaaaaacattttttaaattttaatactgccctcacaaagaaaagatttctaaaagctctcttgacataaaagcttacagaaggccagaaattacagccccagaaatggttgctgttggttcttctgcagtgaggaaagtacacaggagaggcaatattaaggtgaagccaaatgaagacgtgctaatttcatatgtgaacaaaggcgagactaaatgtttcaacatttatttttcaaaataaatttctattatgtgtg

SEQ ID NO: 4724 - DNA, 422 bp, Homo sapiens
  misc_feature (1)...(422): n = a,t,c or g
ctgtaaatgtttccctaaacattctttacatttgttccctattataactattttccccctcagagagcacccagaattgcagaattcacagaacaaaataataagaaataaagatttcttatactggatatgaccttttancccnggattcctcctaaaaacccaacttatactctgctctatatcttaatatgtaaaattaagaaatatccaggctgggcatgcctggctcatgcnnnnnnnnnnnnnnnnnnnnnnnnnnnnnnnnnnnnnnnnnnnnnnnnnnnnnnnnnnnnnnnnnnnnnnnnnnnnnnnnnnnnnnntgtctctacaaataaaggaaagacagagagagagatcgagagagagagaaatcaagagagagacagatctaacaattagcaataaagagaatacctatt

SEQ ID NO: 4725 - DNA, 1416 bp, Homo sapiens
agtttgtttctgaatgcatttatttcacaaatttgtttaagggctataaacaaaatttgtatcaacttgtttgtatatatttacaaaacagaaaattaagtcagcattaagtcaacatgagtagtcacagaatttttcccctttataaatgggacatattcaaggagacttcaaaaagtttgtggaaaaatggttaaaagataaaaaatataaactatatttttgaacattagctctatagcattcaagacacttttgtaagtgatgataccagctatttagtccatccctaaagaactgagagttctgggaatttatctacatcaatgcagtttctttatacattaacttgagaaaaatgtactgccctgaaaaatttttttaagattaggaaacaaaaagtcagaaggtgccaaaccaggactgtagggtggatgcctagtgatttcccatcaaaactcttgcaaaatggccttgtttgatgagagggatgagcaggaacatgttgtggtgaagaactctctggtctttctcggggatttttctgctgaagctttggctaagtttctcaaaacactcccatgataagcacgttaccattctttggccctacagaaagtcaacaagcaaaatgccttgagcattcaaaagctgttgccatgacctttgctctcaaccagtcctcttgtgctttaactgaactacttatcttggtaaccactgctttgtgttttgtcttcaggattgcgctggtaaagccatgtttcatctcctgttacaatttttcaatgaaaggcttcaagatcctgatcccatttatttaaaatttccattgaaagctctattcttgtctgtagctgatctgggtgcaatggttttggtacctatcaggtataaagtttgctgaacttttccagtcaaaattgtgtaaggtgaaccaactgagatgtctatggtgttggctgttgtttctgctgttaattgttggttttcttcaattacgccatgaactaacttttttctcacaaactgatgtggatggtctgctgcttcaggcttcttcttcaacattaccttatgccttcttaaaacgagttatccatttgtaaactgctgatttctttggggccattgtccctataaacttttcatagagtatcaatgatttcatcattcttccccccaagcttcaccataaatttgatgtttgttcttgcttcaattttagcagaattcgtgttgttctgatagagcctcttttcaaactgatgtcttattcttcttagtgcttcaaactagatccttattatataaatcttcaacttcttgatcaaataaatatgacaaatgatgttctttaagaaaaacacccttcaattttattccttccctgcatattttgagtaattatcttcc

SEQ ID NO: 4726 - DNA, 229 bp, Homo sapiens
tcagtttccctttgtttagattcaatctgggcttcccagctcccccgcgcttctgtacccgggatctgagagtcaacacagaccttgaaatccccgcaccgctccctccaccccgtgtaaattcaggcgtctccgtgagagtccggcgctcgcttccctgtgtgttaaaatcgctcggcacgggtcctgtccccgctcgttctggccttgggccagacacaggagtgtt

SEQ ID NO: 4727 - DNA, 757 bp, Homo sapiens
gagatgcactaacagatggggcccagccctttacctccctggaccccacgggcccctgtcccaggaaccccgccctctgacttcttgccctttggaaatggtgcagcactctggcatttatcacccccacctgggtcccctgcaacctcccatcaaaggatgacccctaaacacagaggagcggggcagggcagggaggcaaggactggagctaccttgcttgttgggggactgggtacagttggcaagctgtgtttccatcagctccctgtcctcctttcttccctcgttattgatctatagacattaggaagggagtgagacggctcctccaccatcctcagccagtgcaacccattccctctgcttctctctctctctctctctctccctccctttatgtccctaccctctcaccatctttcttggcctctctgagggtctctctgtgcatctttttaggaatctcgctctcactctctacgtagccactctccttcccccatttctgcgtccacccctgaactcctgagcgacagaagccccaggcctccaccagccttgaacccttgcaaagggggcaggacaaggggacccctctcactcctgctgctgcccatgctctgccctcccttctggttgctctgagggttcggagctctcctctgggactaaaggagtgtcctttaccctcccagctccaggctctggcagaaataaactccaacccgactggaaaaaaaaaaaaaaaaaaaaa

SEQ ID NO: 4728 - DNA, 690 bp, Homo sapiens
tttttttttttcaacttaacatttattgcacaactcacttcaggccactgctgacatcccaaaacacagcctagtaacacacaacttcaccttcaaggactgcagagatagaccaactatatataaataatctcgtggaaacgtaatttgggtgagaaaaatatgacgctagagactttgcgatgaatattttgcctaagttcagaagcttgaaaatacagttggcctacaatctcaaatttcacccaataaccgtggcccttagtcaccacaccttccatcatctttttacctctgcctgttcttgccctttacagttgcagctctctcaactcccttgcctctagttgactcctcttcccatttcctacaactttgtgggcgggagcattttagcaaagccatttcaaaggcgttcaaagtccaactgatccaatgcatttactcagaaatttataccaacagggatgctttcaatattttaaattacttgagcatttatattagcataaaaattttaaaaccaaatgcttaacaatagggtagttggataatttaacatacgtccacataaaattaaaccattaaaatttgcttttcaagaaatatttaataacaaggtaagtaacatatgcatatctaacatggaattttatgtcatctgctgctaaagcaaaacatcctgttcac

SEQ ID NO: 4729 - DNA, 425 bp, Homo sapiens
tttttttttatataggaaagtttttatttgataaatataacttcataaactttaaaaaattatgagtagctgtacaataatatactacatttactgacaatgcagagaatttttaaaggattacattagacagccacagtgtctcaggtccaaaattttaaaccaagtattgctacaatatttccagatactcattcctcataaaaatctaaattaccatgattacaaacatatcatgagttatgatctattttttataggaacaacattcaagttatttcacataaaacagcactttaatagtgttttacttttatgaaaatagataactcatttcaaaatagaaataaaatgtctgtacgtggggaccaaaattaataaaacatgttttacgtaactctttggtgtgttatttttattaatac

SEQ ID NO: 4730 - DNA, 807 bp, Homo sapiens
catgaaagcaagatgttgctcaaatgccaaggtgtgtctgaccaagctgtggccgaggcctgtgctctataatgctcttagaagagagttctcctcgccaagccctcacagacttcctgctggccagaaaggcaactattcagaaacttctcaaccagccacaccatggtgctggtatcaaggctcagatttgctcattagttgagttgctggccaccactctgaagcaagctcatgcccttttctacactttgccagaaggactgctgccagatccagccctgccatgtggcttgctcttctctactctggagaccatcacaggccagcatcctgccggaaagggcactggtgtcctgcaggaagagatgaaactctgcagctggtttaaacacctgccagcatccatcgtcgagttccagccaacactccgaacccttgcacatcccatcagtcaggaatacctgaaagacacgctgcagaaatggatccacatgtgtaatgaagacattaaaaatgggatcaccaacctgctcatgtacgtgaagagcatgaagggtctcgcgggaatccgggacgccatgtgggagttacttaccagtgagtccaccaatcacagctgggatgtgctatgtacccgcttctggagaagccgctcttgttctgggaagatatgatgcagcaactgttccttgaccgattacagactctgacaaaagaaggctttgactccatctccagtagtccaaggagctcttggtttcagtttgcaggaacttgaaagcagcaccagcaactcccacttca

SEQ ID NO: 4731 - DNA, 128 bp, Homo sapiens
ggtgggaactgcagcactaggtgatgttgaagtctgagtgatgatggcacattaggtgagcccagaggtgctgtgaggagtgtagaataaggccgctgctttggagtgcagtctggggtcaaactaaa

SEQ ID NO: 4732 - DNA, 281 bp, Homo sapiens
gactgacctcctcagaagaaaagggaatcctactagcagatggcctttggacttgaagagcagctcttccctgggtctccagtctgctgacttattctgcagattttggatttgtcaagcctttgcaatcatgtgagccaatttcctaaaataaatctcatcaggcaaggtggtaggaataggaagttatcgggcctcattctctgttcccctctctcccaggaaatttcaactaacaactattcattcagggcaagaataccattgtgaataacccagaa

SEQ ID NO: 4733 - DNA, 323 bp, Homo sapiens
  misc_feature (1)...(323): n = a,t,c or g
cttgttcacctttgttaaacaaaatctaggaggccattttttttcgactaaattcccgcactgggccccagaagaccagattaaaaatcaaaatggagtcacccacgctcaccaaactgaaactgagttgttatctggccttttgggaaatcaggagagagagagaatggcctagctgcctgaagaggccagttttcgctttctgtcataataatgaagctctgttttaatctttacaggaaagactgacctgaagtacctgatgttaaccaacccattatctttctattggtctatctncctgtacctgcttacanggaaag

SEQ ID NO: 4734 - DNA, 1039 bp, Homo sapiens
tttttttttttttttttgattatgaagacttttattaaattacagtgtattacagattatatcataataataagcctttcatctttaggctaatatgatacaaaaacctacttggccacattacttcttgagtttcttttgggcagctttcttcttgaccatctgtaatcgcttcatagcattgagctgtgattcttgtgaagttgggcctttaagggatgctgagggagagctgctggattctgaagtagttttgctggtagtacttccactaggtcctgatgttccactatttccattcccacttagttggctgctgcttcctggaactaaactacttggactaggaagacctactttgctgacattgtcacaactaactgagcgactaaggccagttttacccaaggttagaggtggaggtggttttaaaggtacagtgggcgtagtgctgttattggaacctattttggaacctattccacctttggatgatgttgccagaccagtcaaacccacaggtttctggttagctgacgaagtagcaggtttccccagtattgttttgtgttgttgaactcaattttgctgttgaaggaccagcagaggaagttttggctgcaaaagctgcccatccagttaagccactagttactgacgaggaaacgctggcactagaagaatttcctgaaataactgtggatgtcttgacttctgttctcttaaacgctagaaaagttgtctcttgtttcagtttagtttctggtttcttaaccaatggatctttgacagctggagttacagaaacaactgcaggggctggtttctgcggtggtttctgagttttttgagccattcttttcatttgtctggtacatcgggcacaataccacaccaggcgagggtcattcgcttccttgtctgtcacctggggtttatgacaatctcggtggtagagattatggcactcctgacattctactaattgattgccagatgccaccatcatttgcctacaaacaacgcaggccaatcccat

SEQ ID NO: 4735 - DNA, 442 bp, Homo sapiens
ttctacttcctcacctccttcgtggggctcatcgtgatcccggcgacatactacctctggccccgagatcagaatgcctgagcaaattcgattaaagaatatcagaaaagtatatggaaggtgtatgtggtatcgtttacggttattaaaaccccagccaaatattattcctacagtaaagaaaatagttctgcttgcaggatgggcattgttcttattccttgcatataaagtttccaaaacagaccgagaataccaagaatacaatccttatgaagtattaaatttggatcctggagccacagtagcagaaattaaaaaacaatatcgtttgctgtcacttaaatatcatccagataaaggaggtgatgaggttatgttcatgaggatagcaaaagcttatgctgctttaacggatgaagagtcccgggaaaaattgggg

SEQ ID NO: 4736 - DNA, 760 bp, Homo sapiens
  misc_feature (1)...(760): n = a,t,c or g
gcaagaagggcttcactgacccctcggtggagatctgagcctcaggatgcaggagcctcctcctcagaccctgttcttggccttccatcctctccccacggctgatggtccctccaaggccgactcctaaggaatcaccatcaccctcctttctattctgggggcttctgagagagcccagcctgatgccagaacaaaggacagagaatttaagcacagaaatcccagacctgttgttctctccatccagcgtgaccagggcccgagagacctgatggccagggtggggtgtccagcaccagccaagctggtgctccagcgcacctccccagagctccccgcactgacggggcttgcaggagcaggttgcagtggggcgcccacactgggccctgcagtgatgcagggcgggagggagataagaagaccccgcagtcaagtggagcatggccctccctggctccctgtccctgggctcagcacgaccacacaggacacccagccagggaattctgaagaccagagagcagcccacgggcatcacgagcgctctgctcctctcctgggcccctgctcttcccgagagctgcccccaaatcagacatacctctgtggctctcctctggttcacgtttacagagcataaggctgtcttggatcccaacaggcacccagccctgcatggggggagcctggggcctaataggcacccctgttacctcagggttttggcgggacaagagttnccccctttcggccc

SEQ ID NO: 4737 - DNA, 423 bp, Homo sapiens
gacattatagtctctaaacagtattaaacccttaaccacttctaaaataggcaagctcaataatgtctgccaacttcacattctggagtttatttcatttctttttgaagaccattttcttccattattgtagttgagcagcaccaagtggactgtcaggctaacaggaataagtggtagccttgctttctgagcaccatctaaagaattttaaacctctgcattatgtttagtgttctctgtgtgggcatgaaaacaaagaaatgcccctactgaagactgggctcaaaggaccaatgcagggctggttcttttaccccttggtttactcctgcacttgtcttactcattctgaatctctaccagctgctcccagaatcacagatactcagggaccatctcaggcatccagggcatggcaaa

SEQ ID NO: 4738 - DNA, 711 bp, Homo sapiens
  misc_feature (1)...(711): n = a,t,c or g
ggcacgagtatcaacatcagaacttaaggaaatgtctgagtactactttnatgggaaagggaaagcctttcgaccaattattgtggcgctaatggcccgagcatgcaatattcatcataacaactcccgatccgatgtccagttttcacaagctgattgctgagaaggttctaggcggcgtctgttaaaaagcattgctttctgttaattagacatgtgcaagccagccagcgcgccatagccttaattgcagaaatgatccacactgctagtctggttcacgnatgacgttattgacggtgcaagtcctcggaagagggaaaacacacagtttaataaggatctgggggtggaaaagaaggctgttccttgctggaggtttaattctttctgcagcatctatagctctggcacgaattgggaaatacaactgttatatctattttaacccaagttattgaagatttggtgcgtggtgaatttcttcagctcgggtcaaaagaaaatgagaatgaaagatttgcacactaccttgagaagacattcaagaagaccgccagcctgatagccaacagttgtaaagcagtctctgttctaggatgtcccgacccagtggtgcatgagatcgctatcagtacggaaaaaatgtaggaatagcttttcagctaatagatgatgtattggcttcacctcgtgtctgaccagatgggc

SEQ ID NO: 4739 - DNA, 337 bp, Homo sapiens
ggtaaacttttggcaaaacactagtttttctttatagcatggaatccagttttattgctggggtgaaaggatggggattatgaggtaaatgccttgagctcagttggcctctctcaaactgcaaattcgaaacccttccaaagcacataataatttccatgcaatttactatgtaaaagtctttggcaaaaggccctattagggaacataagactccagcttgctaggaacactattccatgacatctttattctagattcatttgcctggagttatttgtgcaaattcttgttgaaaatctgataactctgattatttacattggatagttgagtt

SEQ ID NO: 4740 - DNA, 1381 bp, Homo sapiens
ttttttttttactacaaccaaagagattcaacatttattttatcataaaagttcagcaaataaaactatatacaagatccatgcaaggaatccagttacacacaagacacatttaaaacctggttaaaacacaatctccacgatagcagggaataaaaccagtaagaccaagtatctttagtgagaaacataatcgtgtttatattttggatgctgcttgaatccaattctctccccaacaatgaggcactggatcacccactcttgtgacaccacaggcagctgcaatgcttcagcacacttcagcaccgaggctgggcatgaggggtccgtcaccaccacatcaaatacccctaaagcaatatctttgttatgggcacttgaatggtgctgcttcacagaggctgcaccaccagtcatgaggatctcagaccagagctccaggaagttctgctgttggtctgataccaagagtaccttcagattctggaaaggattttcacggggttgccagtccagaattctttgctcctcaaggctgtacccagctggcaacagataattacggtagttctggagctggttggcatggcaactatcatggacccagacatgagacacacaaggaatcccactggcaaggcacaggaagtacttccgggttcgacaatgctgatccgcaattagaagacactggtaagctgtgttacactgcaagaaaagaagcagagccaatgggtttggtgacttctgtggaaagctcctaagcagcagccataatgagccatgaagagcagatctgaagactcccaactactacccaaaatgtgatttagtctatcctgcccaaggccactcttctcactggaaggcccaagtaatttccatagatgttctctctgcctcacctgcagcatactgaggacctaaatcctcaacggacaaccaaaacctatgaactcagcctttcaggctaaaaatcagcaaccctaataggggtttctactactaaacataaacatcaatcttcttttgtcccagcaacagaaccatagccattaactaacccaaggtcctaccttctcttccctatacacaacaaaaattctatttcatgcaaaaacattttggcagtttctcagttcctgaaatctctggctactttatccaggttccccaacccctcccaggcctcttctcaacacagcaagttggctcttatcattgccactatattaggttacacaaagaaactcctcacctgggcttcattgaaatcttcaaggatatagccagctcctgctcgaagctgggattctgtatactgcttgttgaaaggaggaatttccaaaaattctatattaaaaaaaaaaaccaagat

SEQ ID NO: 4741 - DNA, 352 bp, Homo sapiens
gaacttatctataattactttcagcccaagaggcttttaagctatttgcttaattataagctatggttcatctgattccaattccatttttgtaagattgcatattaaatatttctttaaattatttaactttatttcctttgttcactttaaaatcaggctgatttgagagtttatgcctctgtacaatgaaaaattggaattgatcttggtgttacagcaattaattgtgaaatcacagctgaacctaattatcgtaaatattttataattaaagaaattttacccatccagcatgttataaatagtaagtggtcttcaaacatagctattccctctattccgtcttctc

SEQ ID NO: 4742 - DNA, 603 bp, Homo sapiens
gcaaaggaaaatgaatatttattcaatgtccagattggggaggggtctgtgtgtttaacaggaaaagatacagaaaaaaacctatcacacaggaaaagataaatatgtttgattattttaaaaggtgaaacccataaccaaaatttaaaggcaaattcacacaagtggaaatacagatgcccaactatcgtacaaagagaaccatgatcaaggtcactaacaagcaaagaattttaagtttttcttgtatttctcattgttataattggggagggggtggataactatgggcagtttgccccttttcctgcatcaaaactgggagaatgaaattccactttctcaattcttttctcacatttactccaaatggcattgtcttgccctatggacttcaggagttgcttctcaagaaacagccagcaagtatttctcagcctgaggggtggggttgcttactgtccacatagggcttttccggaatttcacttttttgctacaacctccagtgaaagcaattattttaaatgtgcagttacttggtgtgactaaaaagtagaataaatgcaagagataataatatgtgaatcttgaagcctattt

SEQ ID NO: 4743 - DNA, 449 bp, Homo sapiens
  misc_feature (1)...(449): n = a,t,c or g
ggcacgagtactattataaacagtatgcttgtgccctctcaatattcacatgttgaaagactaaccttcaatgtgactatgcttagagacagggcttgtgaggatgtaataaaggttaaatgaggtcacaatcgtggggccctgaatcagtagggtgggtgcacttagaggaagagacaccaaagttttctgtctctaccatgtgaggacacagtgagaaggcagctatttgcaagccaggaagannnnnnnnnnnnnnnnnnnnnnnnnnnnnnnnnnnnnnnnnnnnnnnnnnnnnnnnnnnnnnnnnnnnnnnnnnnnnatctgttgtttaagccatnnnnnnnnnnnnnnnnnnnnnnnnnnnnnnnnnnnnnnnnnnnnaagtggtgggtactttgaaactaatattttaactaaagcactcttgnctttanaaatcatatttt

SEQ ID NO: 4744 - DNA, 182 bp, Homo sapiens
accctcttcctggctcgtaaatggctgacttctcactgtatccttacatgacagggagagaaacagctcaggtgtttcctcttccaagggcactaatcccattgtgtgggctccccctcatgacctcaactaaacctagttactgccccccaccacctcctaatgtaattatagtaagagtc

SEQ ID NO: 4745 - DNA, 691 bp, Homo sapiens
  misc_feature (1)...(691): n = a,t,c or g
cagagcatctgggacaggctgattctgagctaaacagggctcctttaaggcaatatgaactgttgccttctataaattgcacattgaggaactctaatagacaaagattaggtgtcaggcagaaaacactcattgtaaatatactattagttgataaacataggactttcttattccccagtttttctttatcatataatttaaatatttattcattttgtatttaaagactacctacacatagatatatgattccaaagtcatactttctccatccccacattagccaagtgaatacagggccaaatgggttcttggaatgataataacaaagcattacaaagtgggtccccttggttccagccttgtccagagtttttggttatatatttctatttattacaatttaccttttaaattgtaaaataaacctttgtgtggacagagccaatgtttcaatcttgaatgagtaaagaaaatactttggaactgatcctcattttgaaattggttctaaattattatccatttccaatgtctgaaattctcttacttcctgctaaaactctctttctgccaaagttgtttcgtaatctgtctcaatgactattaatgtaaaatttaaagaaggtaaccctggcttcttcaagggggggaatttaaaagtgttttattggaantttactcaggg

SEQ ID NO: 4746 - DNA, 1325 bp, Homo sapiens
  misc_feature (1)...(1325): n = a,t,c or g
atatacatgaattaacatttatacatttatttccatccaaatgtctcagaaacagtctaagaatcacaatttcagtgttttgcactgagctaaaacagctgcatgcaatggatgtcttatcaaatcatgataagctttagataaattctaatgacttgatgttacccaagaacttgaactgacagattttcatttttgtctccaggaatgaacaggcagtccaaatactgttagtagttacattatataaagcacacaattaaatgtccaaatacaggcttggtagccttctaatcacattttgggagatactgtttataaaaagacaaatatagtaaacagtaaaatgcttactagtcccatgtcctgtgaccccaccttgcccaacaacaggaaaaccccaccaaaatgaaaatatgaaaatcaactcatgtaataaacctcttcagaggcaaaagactttagaggcaaaagacttaatgattaacggttgacttttaagactttactgcacattcagatatgttggaatcaattgagtttttatactctgaacagcaattaaatccagtctttacccgtcctattgctaaagaatatgacaaaagagtcttggtctcagaagtaggagcagcaagtgattactcatgatggcaatgatgcaccacattctgcagtgatgctcacatgcctgaatttcatctgaagcatgaaagttcccaaatcctgcaacagggtttcctttgttggagtccccgtccttgccgtcttcacttctataatcagctatgtgcctttgcagcaaatcaggaaaagctgtgttgagggttacaacttccagacatttaggtcttaacttccatcacagaaagcaatggcacttttttgaatatattaagaaaatatttattcatcccttcaagccactcactttcagaaagacaattgaacatccattttatcaaccttcatttaacccttttcctgtttagaaaaaaaaaaattgccagcgctaatttacataaacattctctttgaggcttaagcaaatctaactgattttcaatgtgaaaaaagataaaaactgagttatttctaaagagaacatcagaattgtctatttcaaaaaaattggattcatcaaatgaatcttcggccaacaactgttcgagaatgatgttaacatcatgtataggcatgctacgttttctaggatttgacattttcagtaatcaagagttactatattttgtaaatggaaataccgctactaaaaaaaaaaangaatgctataaatagaacaatgtcttttgtttccaaagtcc

SEQ ID NO: 4747 - DNA, 589 bp, Homo sapiens
acaagaagtaagtaccttctctcacttggtggaacaggccaaggagatcccccaagtacagcatcagcttcaccctgtgtaccttcctccagcaaaggaaggcctggccacaagagggctctggaatgaaggcctgaaattcagaagctctgccttgagataagaaccaggaaggggcaggaccaggcactgggaaccagccccaggttgctgggaagcaaggctttgaggcattttcctgttgtacaaaggagcctaggaaccctcaaagaccttttcccctacttacttcccacaaaaaagagccttgacaaaccaaggttttatttccagcaacattcagctgatacaaacacatagaaatacaatctcaccaaagagctaagaagccctccaacacacgcccaatttcagcatacagctaagactacacaacacacacacaagctcaacaaagagctaagaccactacacacatctccacagcaccacaggcacatctcaaaagggtctgtccagtagttccagccaagggaagggtgatggcctaagccaccagctccagctttcttttctttctttttttttt

SEQ ID NO: 4748 - DNA, 508 bp, Homo sapiens
ccaaaatgggaggtgttccagatccaaatcctcctccacctcagacccaccgaagattaagaaggtctcattcgggaccagctggctcctttaacaagccagccataaggatatccaactgttgtatacacagagcttctcctaactccgatgaagacaaacctgaggttccccccagagttcccatacctcctagaccagtaaagccagattatagaagatggtcagcagaagttacttcgagcacctatagtgatgaagacaggcctcccaaagtaccgccaagagaacctttgtcaccgagtaactcgcgcacaccgagtcccaaaagccttccgtcttacctcaatggggtcatgcccccgacacagagctttgcccctgatcccaagtatgtcagcagcaaagcactgcaaagacagaacagcgaaggatctgccagtaaggttccttgcattctgcccattattgaaaatgggaagaaggttaagttcaacacattattacc

SEQ ID NO: 4749 - DNA, 295 bp, Homo sapiens
ctggaagtatagtctccagccagttactctcatgatagtactgctataaaactcattcttgtgtggtgttctgtgctatagagtctgtgtattgctgttcatattcggagttctggttttgtttttcccttaaaacctgttaacagttttttttgggggtggggggattcagaactcttgtttcccattccatagcacctgacattatttcaagttttataatatcttaaggtgtatattttattttttttattggcttagttgttttttgttttgttttgtttgagatggagtt

SEQ ID NO: 4750 - DNA, 663 bp, Homo sapiens
  misc_feature (1)...(663): n = a,t,c or g
atgggcctcggagcgtaaaggcggcaaaaacaaaaatattaaaaaaaaggagagagggacaaaaaaaagaaaacccgaaagtttcagctgcattgctgcggaacgttttttagccagaaggcgaaagaagaaatcggaagtgacgtcgcggccaaaacaagcccgggcttggaggcctgtactgaagctggcctcagatgggaaggcccgactcgctgtctgctgtcgtcggtggtcgcgagactttggcactctcaccgggtcggcctccagcccctgtgcccgggatccgctcgccgcggatgagcgagagtttcttcctgggacttttcgggcacagctggccggtggcgacagaacggactttctttcctgcaagagtctcccctccagcgggagacagcgggctcctgtctcgggacgctgggacacctgtcgcctatttttaaatatccagattccaagaacacactggatactgctcttacaaaaccaagaggaaatcatgaagaaatgttttagttattgaaactacagttgaaatcatggatacatcaaacaaatcctggatattggagcccagcttatcgtggaaagaagtgtccccagcacttattagcctaacttgggcatgccagaccatttaaaatnggaacatccact

SEQ ID NO: 4751 - DNA, 6588 bp, Homo sapiens
  misc_feature (1)...(6588): n = a,t,c or g
ataaagacttcaaatggaaattagatgcaatattgaaaaacgtgcccaatttgttacacatggagtccagcaagctaaaagtacagaaggtggagccctggaacagcgtgcgtgtgacattcaacatcccccgggaagcagcggagcggctacggatccttgctcagagcaacaaccagcagcttcgggatttagggattctctccgttcagattgaaggggaaggtgctattaacctggctttggctcagaaccgaagccaagatgtgagaatgaatggacccatgggagctggaaattcagttaggatggaggcgggatttcctatggcaagtggtccaggaataataaggatgaacaaccctgccactgttatgatacccccgggtggaaatgtgtcatcttccatgatggcaccaggccccaatccagagctgcagcccaggactcctcgccctgcttctcagtcagatgcaatggatccactcctctctgggctccatatacagcagcaaagtcatccctcaggatctttagctcccccacatcacccaatgcagcctgtctctgtgaacagacaaatgaacccagctaattttccccagctgcagcagcagcagcaacaacaacaacagcagcagcagcagcagcagcagcaacaacagcaacagcagcaacaacagttgcaggcaagacccccacagcaacatcagcaggcaacagccacagggaattcgaccccagtttactgccccaactcaggtgcctgttcctccaggctggaaccagctgccttctggagcccttcaacctcctccagcccagggttctctgggcacaatgactgcaaaccaagggtggaagaaggctcccttgcccggcccaatgcaacagcaactccaggcaagaccatccttagccacggtacagacgccttcccaccctccccctccatatccctttggcagccagcaagcctcacaagcccacacaaactttcctcagatgagcaacccaggccagttcacagctcctcagatgaagagtttgcagggagggccctctagggtcccaactcccttgcagcagccccacctcaccaacaagtctcctgcctcctcaccctcctccttccagcagggatcccctgcatcctccccaacggttaaccaaactcagcagcagatgggaccaaggccacctcaaaataacccacttccccagggatttcagcagcctgtcagctctccgggtcggaatcctatggttcaacagggaaatgtgccacctaacttcatggtgatgcagcagcaaccaccaaaccaggggccacagagtttacatccaggcctaggaggaatgcctaaacgcctcccacctggcttctcagcaggacaggccaatccgaactttatgcaaggtcaggtgccttcgaccacagcaaccacccctgggaattcaggagcccctcagctgcaagcaaatcaaaatgtccagcatgcaggtggtcaaggagctggtcctcctcaaaaccagatgcaggtgtcccacgggccgccaaatatgatgcagcccagcctcatgggaattcatggcaacatgaacaatcagcaggctggtacttctggggttcctcaagtgaacctcagcaacatgcaaggccagccccagcagggcccaccatctcagctgatgggcatgcaccagcaaatcgtgccctcccagggccagatggtccagcaacaaggaaccttgaaccctcagaaccctatgatcctttcaagggcccagcttatgccacagggccagatgatggtgaaccccccgagccaaaatcttgggccctcgccccaaaggatgaccccacccaagcagatgctttcccagcagggcccacaaatgatggcgccacataaccagatgatggggcctcaggggcaggttttgctccaacagaacccaatgatagagcagattatgaccaatcaaatgcaggggaataagcagcagtttaacactcagaaccagtccaatgtcatgccgggaccagcccagataatgaggggaccaactccgaacatgcaaggaaatatggtgcagtttacgggacagatgtcaggacagatgctgccccagcaagggcctgtgaacaacagtccatctcaggttatgggcattcagggacaggtcctgcggccaccagggcccagcccacacatggcccagcagcatggtgatcctgctactacagcaaataacgatgtcagtttatctcagatgatgcctgatgttagcattcaacaaaccaacatggtcccccctcatgtgcaggccatgcagggaaacagtgcctcgggaaaccacttctcaggccatgggatgtctttcaatgcacctttcagtggagctcccaatggaaatcagatgtcctgtggtcaaaatccaggcttcccagtcaataaggatgtcacgctaacgagcccattgttggtcaacttattgcagagtgacatatctgcaggccattttggggtaaacaataagcaaaataataccaacgcaaataaaccgaagaagaagaaaccccctcggaagaagaaaaatagtcagcaagatctaaacaccccagatactcgcccagctggtctggaagaggctgatcagccaccgttgcctggagaacaaggaattagcttggataactcaggccctaaactgccagaattttcaaaccggccaccaggttatccttctcaaccagttgaacagaggccacttcagcagatgcctcctcaactcatgcagcatgtggcacccccaccacagccaccacagcagcagccacagccacaactgcctcagcagcagcagccaccacctcccagtcagccacagtctcagcagcagcagcagcagcagcaacaaatgatgatgatgctcatgatgcagcaggatcccaaatcagttaggcttccagtctctcaaaatgtccatcctccaaggggccccctgaaccccgactcccagagaatgcccatgcaacagagtggcagtgtgcctgtcatggtcagtctgcaaggacctgcctccgtgccaccatcacctgataaacaaagaatgccaatgcctgtgaatactcccttgggaagcaattcaaggaaaatggtctatcaggagagcccgcagaatccttccagctcgccactggcggagatggcctcactccctgaagcaagtggcagtgaagcaccatctgtcccaggaggcccaaacaacatgccttcacatgtagtacttccccagaatcagttaatgatgacagggccaaaacctggaccatcgcccctttcagcaactcaaggtgcaactccccagcaaccccctgtaaattccctgcccagctctcacggccaccacttcccaaatgtggctgcgccaacccagacatctaggcccaaaacaccaaacagagccagccccagaccctattatcctcagacacccaacaaccgccctcccagcacagaaccttcagaaatcagtctgtcaccagaaagactcaatgcctccatagcaggactcttccctccacagattaatattcctttacctcctaggccaaatttaaacaggggctttgatcaacaaggcctaaatccaacaactttgaaggccatcgggcaagcaccttcaaatcttaccatgaatccttccaattttgctaccccacaaactcacaaattagattctgtggtagtgaattctggaaagcagtctaattctggagcaacaaaacgggcaagtccaagcaacagtcgcaggtctagtcctgggtccagtaggaaaaccactccaagccctgggaggcaaaattcaaaagcccctaaacttactctggcctctcagacaaatgcagccctattgcagaatgtggagttgccgagaaatgtattggtcagtcccactcctctggccaatccccctgtacctgggagctttcctaacaacagtgggctgaatcctcagaattctactgtgtctgtggctgcagttgggggtgttgttgaggataacaaggagagcttgaatgtgcctcaggacagtgattgccagaattcccagagtaggaaggaacaggtaaacattgaactaaaagcagtccctgcccaagaagttaaaatggttgtccctgaagatcagtccaaaaaggatgggcagccttcggatcctaacaaacttcccagtgtcgaagagaacaaaaatttggtgtctcctgctatgagggaagcaccaacatcgttaagtcaacttcttgacaactctggagctcccaatgtgacaattaaaccccctgggcttacagatctggaagtaacacctccagtagtttctggggaggacctcaaaaaagcatctgtcattcccacactgcaggatctgtcttcttctaaagaaccttctaattccctaaacttacctcacagtaatgagctgtgttcatcccttgtgcatcccgaattgagtgaggtcagttctaacgttgcaccaagcatccctccagtaatgtcaagacctgttagctcttcctccatttccactcccttgcccccaaatcaaataactgtatttgtcacttccaatcccatcacaacttcagctaacacatcagcagctttgccaactcacttgcagtctgcattgatgtcaacagttgtcacaatgcccaatgcgggtagcaaggttatggtttctgagggacagtcagctgctcagtctaatgcccggcctcagttcattacacctgtctttatcaattcatcctcaataattcaggttatgaaaggatcacagccaagcacaattcctgcagccccactgacaaccaactctggcctgatgcctccctctgttgcagttgttggccctttacacatacctcagaacataaaattttcttctgctcctgtaccgcctaatgccctctccagtagtcctgctccaaacatccagacaggtcgacctttggtccttagctcacgagccacccctgttcagcttccttcccctccttgtacgtcttctccagttgtcccttctcatccccctgtgcagcaagtgaaagaattgaatccagatgaggctagccctcaggtgaacacctcagcagatcagaacactcttccctcttcacagtcaaccacaatggtttctccccttttgaccaatagtccagggtcctctgggcaaccgggcgaangcagttttcgttttagttaagggggcaaagggaaaagtggggacaaatttgggccaaattttgttgaccagggctgttaagggaagtttacaggctctcttgagaaaggggaagaacaatatggtgcagatggagagactgaaggccaagggctagacaccacagctccggggctcatgggaacagagcagttatccacagagctggacagtaaaaccccaacgcccccagcacccactctgctaaaaatgacctctagccctgtgggcccgggcactgcctcagcaggacccagcttacctgggcggtgctctccccaccagtgtacgctcgatagtaaccactctggtaccctccgagctcatctccgccgtaccgaccacaaaaagcaatcatggtgggcatagcatctgagtcacttgcgggtggcctagtggaggagaaggtggggatcccatccagaacttctacccagcatagccccgtcgcagaatttagtctcaaaggaaacttcaaccacaggcactgcagggcctctgttgccagaccagagctggaggtaaatgctgccatagtctctggacaaagcagtgagcccaaagagatagttgaaaagtccaaaatcccaggccgaagaaactcccgaactgaagagccaactgtggcctctgaaagtgtggaaaatggacatcgtaaacgatcttctcgacctgcttcagcctccagctctactaaagacataaccagtgcggtgcaatccaagcgaagaaaatccaagtaaacaagcaggactgcgacttgatacttggaaatgtgtgtgacttttacaaagagcaattttgagctgtgacttttttaaatcaatttctgtacagttagtaattttaataatgtggcccttttcctagtccctgcaacctgtttcataaagtgcaatggggaaagcaggactgttgagcccttttggtgttgcgagttgaagttcaagggttctaaaatgttgtcttgtatttgaaaggagctaatgcccattataaatgttactagttttcacatttcctaagcagcctagagtacagggtgagcatttttagatctcctaatgatgtattgtgccgtggaagtactgtgtgtgaatagcagtagtggggggcaaaagcaatcttctcatttggaaatgttgtaaataattttattatatagtgttttggatgtatttgttgtagaaatggaccagtgaataaagagaatctaaggatttgtacaatgtgaaataacgtgttaaataaatgtcattgtcatagaacataaagttatgttattggtaaggg

SEQ ID NO: 4752 - DNA, 493 bp, Homo sapiens
cttggtacagtagtgatatggagcagacattgtaaacccgtggaagcaagcttctatttgaaacaagtgtcgataggctagccatgtccaggcccagatcccagtcaaccagtcggttactcaatgtattgaattactctgtgcttatactagcatcctggggagggcactttgcaagcagggaaggctggtctgcatgtgattgggaagagagagggcccacttcaaatggcggtgtattatattgcgtattcaggtgatgttactcagagcctttgtccagggtcttttgaggcaatgatggaaaaacgcctaattagcaagcatggttaagagggaagaggcccattcagggggcatcctgagggcatggtgtctatctctgcatggcccacctatgaggaggagccaaaggagacttagtgctgtcctgtgcttgtgtgacaccaaacatcagagctcaccaagtgtgtggtggcaaagagcaaggtat

SEQ ID NO: 4753 - DNA, 327 bp, Homo sapiens
gtcagatttatgccaactttgctgagaatatggagggtatagatgagtgaacatcaacaaacataactttctaccatggttaaggattttacttagggaaaagtatttgaagtttcaaatccagatagtatttacatttggaaattgttataagggttattaatttaataaaattcatcatcaggtttcccctataagctttctcctaggttaattttccacaagcattgttttatatacactgtaatcaggataacacaagcttagtgttagatcttgtaggaaaccaagattagaaacattagaaatttgcagaatttaagaaat

SEQ ID NO: 4754 - DNA, 54 bp, Homo sapiens
agctatatagcaaaatgaactcagactggcactcccaactaattttggtatttt

SEQ ID NO: 4755 - DNA, 567 bp, Homo sapiens
tgcaaaagcaaatcagacccttaaagcaggaaggcttttcttcttctcctaaactagctttggaataaaaagttattttctttataccagacctcactcgtgttaattggaccctgcaaatggcatgtgactgaacctgtgtttggttacattatctttagtttctagtgaaaccaagcatcccctgattctaacttccttgttattgttttaggttactattaccttcttgtttatcaagttgctcatttacttctcaagcctagctagatgcctggaatttcccttgaaggaagtcaagattttcctttatctccatactggctgatggtgatcgagtaagcccctaagaggggtccctgctccatctcgagatgcccgctagattctacagtgcccaataaacagctctcgcctccgccgacaaagagctgcttgctctctggatagcaattccaaagtgaacagacaacatcctgtttggaagactgccactctgttagaagaagcatcaggaaaacctttcttttgagctatttataactaacagcaattgaccaagtatac

SEQ ID NO: 4756 - DNA, 880 bp, Homo sapiens
  misc_feature (1)...(880): n = a,t,c or g
caaaataattttttctttttgcagttgaaaattaactgcattattaactaattaataaaataaatcaagtggtataagggattagtttaccctcaagccgatgactccatggctactgatattagttagtttaggatttttaaaaagcatatcagacccccagtttcaggaattgagtataaatattgcttcttgtcaccctgggacagtaatgccttatagtggcactagtcaccttaagtagattacacatggttgaggtgaataaagctgcatgggaatttgctttcgtgatatatttcatttgcaaacttctacataatcaagttttatgtttaaaaccatcggttctatatatctagctttaggaagttgcccttacaggtgggaccttttgtgttaatctgttttctccccagtcatcttatttggctatgttaaaaaaaaaaaaaaaaaaaaagcnnnnnnnnnnnnnnnnnnnnnnnnnnnnnnnnnnnnnnnnnnnnnnnnnnnnnnnnnnnnnnnnnnnnnnnnnnnnnnnnnnnnnnnnnnnnnnnnnnnnnnnnnnnnnnnnnnnnnnnnnngtcttagctgtgtttttaattatgccatgcatcaacataacaccgggccatcttcctatcccttcctatcccatatgtttgatgaaaacatattttatgtgctaaattaggttaatttaccagagatttagcttagtgtttttaaaactataggaacaatacccctataggaacaatgtacagctgcacccaagggttaaaaagaggtagcaggggaaaacaaactttaaactcttttgtatntggggtggaaccccttcccttntcctggccctcttatgggnttgttttacatt

SEQ ID NO: 4757 - DNA, 670 bp, Homo sapiens
gcggcttggaggagccggggcctcggcctacagcgaccccgtgcggctgcgttaaccggctctggagacagggaatcttttaactgagccagtcggtacttggaatcttgtttctcggccaagaatggtactccaagacagccatccatttgtagctattctcgagcctgtttgaggattagaaagaggatctttaataatcctgaacattccttgatgggcctagaacagttttctcatgtttggattttgtttgtttttcacaaaaatggtcatttgagctgtaaggcaaaagtgcagcctcctaggctgaatggtgcaaagactggagttttttccacaaggagccctcatcgtcccaatgcaataggactgaccctggccaagctggaaaaggtagaaggtggagctatatacctttctggaattgacatgatacatggcacacccgtactagacatcaagccctacatagctgagtatgactcaccgcaaaatgtgatggagcctttagcagactttaatttacagaataaccaacatacaccaaacactgtgtcccagtctgacagcaagactgacagctgtgaccagcgacagctctcagggtgtgatgagccacaaccccaccatagcactaagaggaaacctaaatgtcctgaagacagaa

SEQ ID NO: 4758 - DNA, 487 bp, Homo sapiens
  misc_feature (1)...(487): n = a,t,c or g
gtatgataccagcaactggtctattatatcatttaaaccacatggctatctaaagaggtatttggctattataaataaaatagtgatgaacacgtgtacaggtgtttgtacggacataagttgtcatttctcttgagtaaatacctaaaaagtgggcttgctggagttttactacccttggatgctgctgttgacatggaaaagattgaggaacaatttgctaatctgcacattgttaaatgttccttagggaccaaagagcccacttaccttcttggtatagacacatcaaagactgtccaaggcaggaaagggaaaacttgggttgctgtttttatgttcttaatgggatccaatcaggaatatatggattaaaggaaagggtttaaatgttactacggaggattttagtggggtatccncggggncttctttaatggggagttcaggntttgccaanttccccgtggaccgtgttttntttcca

SEQ ID NO: 4759 - DNA, 402 bp, Homo sapiens
ttgaatggttgataaaatttactgctactatgggcctagagtttttttgttagaaaattttttattacaaattcaatctctgtagtagatatggagttccttaagattttctatttcttcttgtgtcagttttggtaaactgtgtcttttaaagtatttgtcaatttcatcaagttgcggcttgtcaatgaagttttccatacccactttacttttaatatatgtagggtctaaactgatgccctcttttcatttgtgatgtggggataatttatggttttcactttttttcttgggtgatatagtttggatttgcatccttgcccaaatctcatgttgaattgggggaggggtttgggtggggggacccattgggatcacagggggcccaatttcccccct

SEQ ID NO: 4760 - DNA, 1173 bp, Homo sapiens
  misc_feature (1)...(1173): n = a,t,c or g
cagacatcatggactcgcccagctctcctcggcctggggctctggccaaggatgggctggaggtcattcagttggtctgtctcttccctggaaaccttctgcaaagatggtgtggtgtacgtggcttccctgtaaccacatggggcttggccatttctccatgatgagaaggactggaatgcttctccgggcaggacatggtcctaggaagcctgaaccttggcttggcatgccttctcagacagcacggcctgggctccaactcttcaccacaccctgtattctacaacttctttggtgttttgctcctcctgtggttggaaacttctgtacaacactttaaacttttctcttgcttcctcttctcttctcccttatcgtatgatagaaagacattcttccccagggaggaatgtttaaaatggaggcaacattttggccaacattggaaagcactagagggcaatgggattaaaccaacctgcttggtctctattagtcagtaatgaagacgacagcctggccaaccaagggaaaggaaattagtatctttagtttcagtcattccttgtaggatatggtttagctgtgcccccacctaaaatatcatcttgaattgtaatccctataatccccacatcaagggagagatcaggtggaggtaattggatcttgggggcggttcccccatgctgttcttgtgatagttctcacgagatctgatgattttataagtttgatagttcctcctgtgttcattctccttcctgccaccttgtgaagatgccttggttcctcttcactgtctgccatgattgtaagtttcctgagggcctccccagccatgtgggaacagtgagtcaattaaacctctttcctttattaaattatcccagttttggggcaattcttgataggcagtgtggaaaatgggactaattacacttgtgtttatctgtaatttaaatttcatgtctttttctccttgccttacatagggtaaagaccaagaaatgccaaacgtgaactaaaatatgtaggggccttcaacttttttacttcctccagtatcttaggaccatcgtaattcttgttaggcatctctaaccngggagggcagctgaggggagggagggggaaaggaaggactggtaaaaaatccccccttcacta

SEQ ID NO: 4761 - DNA, 444 bp, Homo sapiens
  misc_feature (1)...(444): n = a,t,c or g
ccttaatcctatttgtgttgcctataaaggaatacctgaggctggataattttataaagaaaagaggtttatttgggtcacagttcctgcaggctgtacaagaagtatggtgctgacatctgcatctggtgacccctcaggaagccttccagtcatagcagaaagcaaagagggagcagatgtggcaagaaagggagcaagagtgaggggagggaggtggcagtctgtttttaacaatcagatctcgaggaagctaatagaacaagaacccactcattaccccaagaatggcaccaagnnnnnnnnnnnnnnnnnnnnnnnnnnnnnnnnnnnnnnnnnnnnnnnnnnnnnnnnnnnnnnnnnnnnnnnnnnnnnnnnnnnnnnnnnnnnnnnnnnnnnnnnnnnnnntatttcacttaccattcatagcaaaagcaaaaaaaa

SEQ ID NO: 4762 - DNA, 870 bp, Homo sapiens
ttttaacctgtaatacaccatattatgtctatatttatttatttataaattatttggatccagtactataataacaattacacacattgtaactcctacacaatttgaaattttcaagttaagacaaaggtaactatatatagaagcagtatgttttctgaacccttacagattgttttgcacactcctggattacacacatctcatcaatctcaagaataaaatcaaagtctttggcttgacagccttccacaatctgacctctgttttctcgccagcctcatctcctgtcattcacaacatttccagcattccaaccagtctgaacttttgcagtttcccacgtgcgctaggctctttcttcatcagcatctctatgcatgctgtctcctgctactggaatgccctcattctcgttgcttcctgttttgaagaaaagctgtgataccggcaacagtgtttaagtatcacacgggtagttaaaaggcaagttggtcctatctgacatgtggaaatggccagctcaagttagaaggcagtacctggtgaaaccttgtcaccacatcgaatgattttgaacacttcccatcaatcgactaccgactaacaaaaagaaggacttgattcccggcaattttttctcttctgaactgagcattcccgaaatccagcttgctgaacgcgcagatgcagggtgagaggcaccccaggaaaaatggaagggaaagtggtacaagttaaaacagtcttcgtggccgcagagacgatcgctacctcggccatggcagatctgggggtccggggcgggggttcttccctgataccaccgggcacgcgagttcacgccagcgacagtggaagccccctgtg

SEQ ID NO: 4763 - DNA, 928 bp, Homo sapiens
  misc_feature (1)...(928): n = a,t,c or g
aaggaatgaagggatttattgaaaatgaaagtacactccacagtgtgggggtgagcctgagcataggagcacaaaagccctgttacagaacttcagagagtttaaataccctctaggtgattccattggttacttggggcacacgttatgtagatggagagcctgttacagaacttctgagagtttaaataccctctaggtgattccattggttacttggggcacacgttatgcagatggagaggatgaagttacaaagtcatttgcttggcctatgtcctatggagaaggtatttcctgttacagccgaagtgtgaattggccttatgttccctgcctcctgaccctattttcctgcctcaggctcactgctcaatgtacacggaagcaataccatggtactgcctttgagaaaagaaagactttattgcaagaccagccaggcaaggagacaggaggcaggttcaaatcttcctccctgatttggggtctggggcaagttctaaggaagcagagggcaaaggaaaggacttagaaatgttggctgggcaggatctgtttgaaggccttcaaatttggccatttatggtacggtatgttgaggtggattttagcccctatcttctgggccaagagacccttcccttctgagagttcgaatgttcgggttccagtcatgtcccagtcttcttcgttccaaggagacgaatagttggttctggatgtttgttagagatcaaatctttttctatggtgcatgcctgggctttgtgacttaagagtttttggctctgttatacctgcaaggtaactcaacattgttacaaacagagtaagccccgttctcgtgccnnnnnnnnnnnnnnnnnnnnnnnnnnnnnnnnnnnnnnnnnnnnnnnnnnnnnnnnnnnnnnnnnacngntntcaa

SEQ ID NO: 4764 - DNA, 453 bp, Homo sapiens
attcggcacgatgcagagcccgggcgcaggcggcggtatggagcggaacggctaggggtcttgagaagcaatggccacagaagcccctgtgaatatagcaccacctgagtgtagcactgttgtcagcacagcagttgacagcctcatttggcagccaaactcactaaatatgcacatgataaggcccaagtccgccaagggacggacaagaccgagtctgcagaaatcccagggcgtggaggtgtgcgctcatcatataccatctccgcctccagccattccctatgagttgccaagcagccaaaaaccaggagcctgtgcacccaaatctccaaaccagggagcttctgatgagatccctgagctgcagcagcaagtacccactggggcttcctcttctctcaataagtatccagtccttccttccatcaacagaaagaacctggaggagga

SEQ ID NO: 4765 - DNA, 890 bp, Homo sapiens
  misc_feature (1)...(890): n = a,t,c or g
gaattcggcacgaggatcaaacaaatgcccancctatatttataatgaacaaattcaagaaaaaggactacggaaagttcaggacatcaaagaagtcaggcaaaactcatcttgacccctgttgcaggcaaaggaacgcagctggaagaaaagatgatataacagttaacaggatgcagacatggcagaggtttcctaaaaatctcattatctataaccatttctatatttacatttgaaaatctcctttggagacttagaacctctaaattattgacttattttttatataaggtcactccgatgaaaggtgattacaaaatcatctacattgctgtctacaaaacagataatatggatgtttgatcgcatctcattgttaactctttactgatatgtttgtaaatacagaagtgaaatgtggacataaaatagttacgctatttggttaatggtactagacaacatgtaattaatgacattcaaaaatttatggctagtgatatatataaagtaaaattttctttgcagtaaaatatgccctttattatagaagggaggatataaggaaccaacagtttgtatgaaaatagctcaaataatatcttttattttgattttaatatttcttattttggtttattagtgtcttagaacaaaatggccttatataatgaagcctagttatgctggactgttttgatctcttttaattgttctgacagatagttggggatgagagccgaataaggtttgcctgaaataactgacactatataatttctgctttggcaaatactaagttctaacttgtcattcctggtagaacaagctttatttttcgagcctagcaatgatctagaagcagatgttatctcagtgccttttgc

SEQ ID NO: 4766 - DNA, 814 bp, Homo sapiens
cacaaactgggaggaaaactgagacctcctggtcacccgccgccggccttttagaaactcccacaagctctgccttccctccctggtcctcttcagaccccctcttagttcttcgcggctaacggctcgcgctcggggccgggtgtggagctggaacagagggctggcaaggcgcgcatcacctgagggtggagccgctgagcacagaaccggaaacttagagacaaagttcggagccccgcccccgccgcgcgccgctgagttgtctggccccgccgacccacggctcacgacccaccgacccacgaatcggcccggccgtcgcgtgcaccatgtctggctcctccagcgtcgccgctatgaagaaagtggttcaacagctccggctggaggccggactcaaccgcgtaaaagtttcccaggcagctgcagacttgaaacagttctgtctgcagaatgctcaacatgaccctctgctgactggagtatcttcaagtacaaatcccttcagaccccagaaagtctgttcctttttgtagtaaaatgaatctttcaaaggtttcccaaaccactccttatgatccagtgaatattcaagagagctacatttgaagcctgtacaaaagcttatccctgtaacacatgtgccataatatacaaacttctactttcgtcagtccttaacatctacctctctgaattttcatgaatttctatttcacaagggtaattgttttatatacactggcagcagcatacaataaaacttagtatgaaactttaaaaaaaaaaaaaaaaaaaaaattggcggccg

SEQ ID NO: 4767 - DNA, 1858 bp, Homo sapiens
ggacgccggacgtgcggcagttgcaggcgagcaggcgaggaatcgccgtggcgtcttggtgttctccacgctggttcgcaggtgaagagatggcgtttgtgaagagtggctggttgctgcgacagagtactattttgaagcgctggaagaagaactggtttgatcctgtggtcggatggtcacctgatctattatgatgaccagactcggcagaatatcgaggataaggtccacatgccaatggactgcatcaacatcccgcacggggcaggaatgtcgggatactcagcccccggatggaaagtcaaaagactgcatgctccagattgtttgtcgagatgggaaaacaattagtctttgtgcagaaagcacagatgattgcttggcctggaaatttacactccaagattctaggacaaacacagcgtatgtgggctctgcagtcatgacccgatgagacatccgtggtttcctcacctccaccatacacggcctatgctgcaccggcccctgagcaggcttatggctatgggccatacggtggtgcgtacccgccaggaactcaagttgtctacgctgcgaatgggcaggcgtatgccgtgcccctaccagtacccatatgcaggactttatggacagcagcctgctaaccaagtcatcattcgagagcgctatcgagacaacgacagcgacctggcactgggcatgctggcaggagcagccacgggcatggccttagggtctctattttgggtcttctaggggcctcaaggtcttgatgtgcatagcttctgataaccctgtgtgcaataatatgatttgcagggcatttctgtttgtgacaaaagtttttaataatagttttaatcattcctttgaaagtagtgatgtcataattgtactaatccacataagtaccacagagaagggtttgaactgtgctattttgttcaaatgttgactctccgggggcactggctcattccaagactgttcttgtgcaactctcagaataccttatttgagcatacctgttttgaaaggcattttctttttagagttaggtgtagtgcttaagggttaatttattttcatgttatgccagtaatatagtgttgtatgcctattgagtgattgtggcaagaaaagctacagcttctttgcgtttaactttttcaaaccacagaccagaactggttgcatgttactttaggagttgtgggttggtaagctcccagggtacttcccgaggctatggtgtgagagcccccgtcctgcccctctgggctccacaggcccctggcaaggccgatggctcaggatgatggggcacagcccgcctttgaacaatcatgcttcagaaatctgcctgaccctagctgctgctgctgctcactttattcttgtatggctttggtaggcatacttggagaacatatcccacattaggaattgatttaagcctgagagtttgagggctttaatcctttaaaacttgagccaccgcgcccggccggtcattcattcttgcaacaagcatttactgagcacctactgtgtgctcacaggtaaagaaacatgatcttatcccagtagaggtagatattctgaaaaagaataattcttaaactgcttaaaacaggggtccccacccccaggccacagaccagtaccagtccgtggcactggttaggaaccaggccacacagcagggggtgaagcggtgggtgagtgagcacagttcatctgtatttacagctgctccccagagctttgcattactgcctgagctctacctcccggtcaggtcagcagcagcattagaggtctcatgggagtgcgaaccctgttgtgaact

SEQ ID NO: 4768 - DNA, 2024 bp, Homo sapiens
atgcgcggaggaggctttggggaccgggaccgggatcgtgaccgtggaggatttggagcaagaggtggtggtggccttcccccgaagaaatttggtaatcctggggagcgtttgcgtaaaaaaaagtgggatttgagtgagctccccaagtttgagaaaaatttttatgtggaacatccggaagtagcaagggttgacaccatatgaggttgatgaggttacggccgaaaggaaggagattacagtgagggggggagatgtttgtcctaaacccgtgtttgccttccatcatgctaacttcccacaatatgtaatggatgtgttgatggatcagcactttacagaaccaactccaattcagtgccagggatttccgttggctcttagtggccgggatatggtgggcattgctcagactggctctgggaagacgttggcgtatctcctgcctgcaattgttcatattaaccaccagccatacttggaaaggggagatggcccaatctgtctagttctggctcctaccagagagcttgcccagcaagtacagcaggtggccgatgactatggcaaatgttctagattgaagagtacttgtatttatggaggtgctcctaaaggtccccagattcgagacttggaaagaggtgttgagatctgcatagccactcctggacgtctgatagatttcctggagtcaggaaagacaaatcttcgccgatgtacttaccttgtattggacgaagctgacagaatgcttgatatggggtttgaacccccagatccgtaaaattgttgaccaaatcaggcctgataggcagacactgatgtggagtgcaacctggccaaaagaagtaagacagcttgcagaggatttccttcgtgattacacccagatcaacgtaggcaatctggagttgagtgccaaccacaacatcctccagatagtggatgtctgcatggaaagtgaaaaagaccacaagttgatccaactaatggaagaaataatggctgaaaaggaaaacaaaacaataatatttgtggagacaaagagacgctgtgatgatctgactcgaaggatgcgcagagatggttggccagctatgtgtatccatggagacaagagtcaaccagaaagagattgggtacttaatgagttccgttctggaaaggcacccatccttattgctacagatgtagcctcccgtgggctagatgtggaagatgtcaagtttgtgatcaactatgactatccaaacagctcagaggattatgtgcaccgtattggccgaacagcccgtagcaccaacaagggtaccgcctataccttcttcaccccagggaacctaaaacaggccagagagcttatcaaagtgctggaagaggccaatcaggctatcaatccaaaactgatgcagcttgtggaccacagaggaggcggcggaggcgggggtggtcgttctcgttaccggaccacttcttcagccaacaatcccaatctgatgtatcaggatgagtgtgaccgaaggcttcgaggagtcaaggatggtggccggagagactctgcaagctatcgggatcgtagtgaaaccgatagagctggttatgctaatggcagtggctatggaagtccaaattctgcctttggagcacaagcaggccaatacacctatggtcaaggcacctatgggggcagctgcttatggcaccagtagctatacagctcaagaatatggtgctggcacttatggagctagtagcaccacctcaactgggagaagttcacagagctctagcccagcagtttagtgggataggccggtctggggcagcagcccacagcccactgatgtcacaacagtttgcacaggcctccaggagctaccaatatgataggttacatgggggcagactgccctaccaataccctcctcctcctcccctttctcctccttcacgtaaatgaaacccactcaagtggtagtgactccagcagacttaattacattttaaggaacactgtc

SEQ ID NO: 4769 - DNA, 571 bp, Homo sapiens
cgtgaggaaaaggtccctcgggctggaggacccgtcccggctgcggagtcgctacctgggaagaagagaatttatccaaagattaaaacttgaagcaacccttaatgtgcatgatggttgtgttaatacaatctgttggaatgacactggagaatatattttatctggctcagatgacaccaaattagtaattagtaatccttacagcagaaaggttttgacaacaattcgttcagggcaccgagcaaacatatttagtgcaaagttcttaccttgtacaaatgataaacagattgtatcctgctctggagatggagtaatattttataccaacgttgagcaagatgcagaaaccaacagacaatgccaatttacgtgtcattatggaactacttatgagattatgactgtacccaatgacccttacacttttctctcttgtggtgaagatggaactgttaggtggtttgatacacgcatcaaaactagctgcacaaaagaagattgtaaagatgatattttaattaactgtcgacgtgctgccacgtctgttgctatttgcccacttata

SEQ ID NO: 4770 - DNA, 445 bp, Homo sapiens
  misc_feature (1)...(445): n = a,t,c or g
aactttctttactgtgtttcatttaatgctgaaatcagacaatgattagaacatgaaactttgtttgaaaaagtatattcaataaattttgtatttaaaacagagctcttgacctataaagtataaaaagtaattacaatgaaatattcttcagtaaatctgacactttgggattccaggcaaaaggatcgcttgggtnnnnnnnnnnnnnnnnnnnnnnnnnnnnnnnnnnnnnnnnnnnnnnnctagtccaatgtgaataacaaaatgaagaatatcaggatgattcgagaccaggaatactacagatgtccaacacttccacctggaatccccaaagaggcccgcttttagcctccacactggttggtgacctgcctctgcagttcactctgctgcttcagatgaaaattttcaggtctgtctgccactgtagtgaagcact

SEQ ID NO: 4771 - DNA, 764 bp, Homo sapiens
tcggtgagctacccctctctttggccgcttgcaccaagcagtgggatgtggtaagctacctcctggagaacccacaccagcccgccagcctgcaggccactgactcccagggcaacacagtcctgcatgccctagtgatgatctcggacaactcagctgagaacattgcactggtgaccagcatgtatgatgggctcctccaagctggggcccgccctctgccctaccgtgcagcttgaggacatccgcaacctgcaggatctcacgcctctgaagctggccgccaaggagggcaagatcgagattttcaggcacatcctgcagcgggagttttcaggactgagccacctttcccgaaagttcaccgagtggtgctatgggcctgtccgggtgtcgctgtatgacctggcttctgtggacagctgtgaggagaactcagtgctggagatcattgcctttcattgcaagagcccgcaccgacaccgaatggtcgttttggagcccctgaacaaactgctgcaggcgaaatgggatctgctcatccccaagttcttcttaaacttcctgtgtaatctgatctacatgttcatcttcaccgctgttgcctaccatcagcctaccctgaagaagcaggccgcccctcacctgaaagcggaggttggaaactccatgctgctgacgggccacatccttatcctgctaggggggatctacctcctcgtgggccagctgtggtacttctggcggcgccacgtgttcatctg

SEQ ID NO: 4772 - DNA, 363 bp, Homo sapiens
  misc_feature (1)...(363): n = a,t,c or g
gggtgacaacagacccctaaggctcagatcataagttctggcatttcaggattcaagatgcacttgggggccacccagagccccataatgtctgaagttcctctgttattttttttttattgttgaactcctcctcctgcctctctgaggaagcacttgcaggagcatccgggaccccagggctggtagagagtgccctggccgatgcccccagcctgggattgtgtctagtgtgcagagaagaaaccagaagccagtggcccagaggctgagcccttgcccagagctccacacggagccagtnggagccacttgattcggggcatcctcgggcagggcccttgagggttgggagggagttcc

SEQ ID NO: 4773 - DNA, 448 bp, Homo sapiens
actgctcttgctgggcagtggtgtgggaacagtgcgtctctatgacacggaagccaagaagaatctctgtgaaatcaatatcaacgacaacatgcccagaatcctgtctcttgcgtgcagccccaacggggcctctttcgtctgttcggcagcagctccgagcctcacttcccaggtggacttctcagcaccagacatcggcagcaagggcatgaaccaggttcctgggcaggctgctgctgtgggacacgaaaaccatgaagcagcagctccagttctccctgggatccagaacccattgctatcaactgtacagccttcaattcacaacgggaacctggctggtcacagggggcagctgatggcgtcatccggctgtttgacatgcagcagcatgattgcgcgatgagctggagggcccactacggggaggtctactctgtggagg

SEQ ID NO: 4774 - DNA, 1181 bp, Homo sapiens
  misc_feature (1)...(1181): n = a,t,c or g
ttttttttttttgtttcatgtacaaaattatttaaaatactgtatagagttaccttcaggctacatgtataaggtatatataaaacatgaatgaatttcatgtttagacatgagacctaccaagatacctcattatgtatatatgcaaatattccaaagtctgaaaaaatccaaaatctgtaacactcctgtcccaagcatttcagataagaaacgcttagcccgtcttgggaaacagcagccactggatggaaaggggcagccagtagcagaggcctcagcccctgccttcatcctgagaatcttctgtaacaaaagctgcccagctttcaggggaaggaaaaaggaattctgtgggccttgacttaaggcccagaggaaacagggaactggccaaaccttgttacccagcagaacagacagagagctgacctggctccatgggcaaagcaacaggagagcctgggagaggttcagttcggggcccagcagagccaggctgggtgggagggctgtcactgaagcaaagtgacacacatcctagaaagagacatcaggggaccacaagagtattctctttttttaaaaaagaaaaagataaatgggcacatatatacaaaatactgtcaatttctactgggccaacacagtagccactgcaatgtttctccttcttccggagctttcctcccatagtctcacatgtactcctggcacagccacaataccagtctctgggaagcatatgtcacctactccacgtgggtcccattccagtcaccacagatggaagcacctgagcctccttgccagtctttccctgcagagtcactgcactggcaggggagctggagtggagcacgtggttttcctgtcctatatctcctccccccaccgcaggataatactgcttcctcggggtggcccttgggggaaaggtcatcaggctttatggggccaggagggtggtcagctttgatcctttgccatccatggagggcggtgaggcagggtcccacagtccatgggcagtgctccagtccacggtgaccacaggggctcggtggccacctaggctcaagcagctctccagaaccttctcatcgcctcgtgccnnnnnnnnnnnnnnnnnnnnnnnnnnnnnnnnnnnnnnnnnnnnnnnnnnnnnnnnnnaannggaa

SEQ ID NO: 4775 - DNA, 625 bp, Homo sapiens
ggtttcttaaactgttagggaaagttgagactgctaagaattccctggtcggccctgcatggcagacgggcctgcatcacttggcaggacccgtttatatttttgccatcacacacagcttggagcaaccatggaccactccgagatctcgggaagttgctagggaggtgctcacctcactgcttcaagttactgaatgcggttctgtggcaggattcctacatggagaaaatgaagatgagaaagggagactttcggtgatactagggcttctcaaacccgacttgtataaggaatcctggaagaataaccctgccatcaaacatgttttctcatggactctgcaacaggtcactcggccctggctgagccagcatctggaaagggtacttcccgcatcattggtcatttcagatgactatcagactgagaacaaaatcctgggtgtacactgtctccatcacattgtgcttaatgtgccagctgctgatttgctccagtataacagagcccaggtcctataccatgccatttccaaccacctgtacacaccagagcaccacctcattcaggctgtgctcctgtgtctggctggatttattccccatcctgggagaaaaccctg

SEQ ID NO: 4776 - DNA, 906 bp, Homo sapiens
  misc_feature (1)...(906): n = a,t,c or g
tttttttttttagtgttctgtgtgcacatttatttctttcaaagattgtttgtgttccagccacatcttctccaaaggaacccacccaagcccgtgtgcaggcttgctgcagggctgtcttcggcgtttaaagtgctactgaggaatacaatcattgtcacgtaagttcatcaccgcactccagcgtcaggccaaacctttccgtggacctggaaaacctgccattttcttctctttttacaatgcagtttcgacataacattggtagagtaaacaacaaaccacaagcctaaatgatgaatggtgcgctgctgcccagctgctaactgagagaacgaggcagtgtattgtgtttcgaatgcaaacggtcatggacccaaggtaacctgagtttgctctgcaggattctgcgggggccttgccctgtgcaggctgctttggtcttcgtgtctaggccggtttggggcagtggggagagggcctggcagcagggtttacgccagccccgaggtctgttttccgtcagacagagatacgtgtcctgccttccaccatccaccaatttgtactctgaagtttccagatcaagagccgtgagattactacccaggaaacaccctgccttcggtggccagcagtgtaaattaatctttccctctctgctcaaagcaactttgcaactctcgtctatagaggtggccagtaaaacccaagcaaaaatctaaacgggcaccanggttgnactgagtggcgactggtcgagtagcagttggtcataagggatcagggctggttttgaactcagacttgaaacttgacgaaaataaagtgctctgtcaaaactctcacagcaggttttcagctggaacaaggagatggctactttttgttattgctacaataaca

SEQ ID NO: 4777 - DNA, 1630 bp, Homo sapiens
ctcgagttttttttttttttttttagatgtaaaatattttatttgtaaatggtgatcttctaaatctgtgtccacaaattccaaaacccataacactctgtatacttcaaaaaattcaatttttgccaacattagatactattatacagaacagaaaacaacaaaaacccggtaggacaaatactggtaggatgtcaggatattgtacaagagaagaaaaatattcaggaaacaaatttcatacagctatttatcaagagaaaaatatatacaattgatttattctgtaagataaaaatacatcatgccatatacaagttcagaactgcatcactgaatataccaacagtttacagtccacttgaattgtgcacacaaaacttcattttatacttagcctgtgaagtgtcagtaccagaattttaagtacaaaataaaaagctaacctggttcaaaatgctgattaagtttctacaagcaaacacaaaacagtgttttttttattaaagaaatgtaaacaaacagttcatacaaacacattttaaaattacatcttccaaaaaccctattgccagagtcctgcagctgtaagcataatcacatctcctttttttttttaactttttcaaatttttgtgttaaatagaaggctaaagggttagatttaagtttctgctacatgatcctattacgtttacatgattctctgtggctgaaacaaagttctaatcaaaactacttttgctgaagaaaaaattcagcctccatttgggtgtatttttaagcagttattcacagttatcacaaattgtaagcacaaaaaaacctgactgaagaagtagggatgcaacaatataatatgaaaaaattagtttaaattaccaaaacagctataaaagttgtagtcgtagcatacgccccgctctgtcagaagtaaggtgtataaaaccattgagtactaatagactgcggtttccaaaaaacccccaacactctaggttgaaattttggttattacataattataatggcatattttataacacaaaattatattgtaacatccctatgaacattttataagcccccgagctggctgcagagcctggtagcatttggtcaataactatttttatactgtattttttctcaaaatatttacatatctgtacaaagtaacagggtttgttagttctgcaggtaacagcagcagcttggctttcttctaactttatttaaaaatagcttcattcacttattcaataataaatacaaaagtttctcttattttacagaaatcaaaaactacaataaactgactcatggaatcaagtatttaaatgtatttagtgcaagttattatcccttagctctatccctaaggaagtcatttcagtacattccttgttcagtggtgtctactttatttaaaaacattttgaagttagagggcctgcccctttttaataaggccgtggccagcactctctgtccccctcgctggtgatttcagtcttacattcataggaaggccctgcccggggcagggcagccatcggctctttgccccagtaaaagtttctccttagtgagactagaaaaccaaaacaatgaaacccacccacaaggg

SEQ ID NO: 4778 - DNA, 1680 bp, Homo sapiens
attgtcttcataacagatcaaggaatcgaattttaccaggtattaccagagaaacggagtctgaaactcttgaagagccacaatctcaatgtgaattggtacatgtactgccccgagagcgccgtgatcttgctgtctaccacggtcctggagaatgtcctgcagccttttcactttagggctggcactatgtcgaagctgcccaaatttgagattgaattaccagctgcgcctaagtcaactaaacccagcctttccgaaagagacatcgcaatggctaccatatacgggcagctgtatgttctcttcttgaggcatcattctcggacctccaacagcacaggagcggaggtggtcctctatcatctaccacgagaaggtgcctgtaaaaagatgcacatattgaagttaaataggacgggaaagtttgccctgaacgtggtggacaacctggtagtcgtgcatcatcaggatacagagacatcggtaatattcgatatcaagttacggggagagtttgacggctccgttaccttccaccaccccgtgcttcccgctcgatcgatccagccctatcagatccccatcacaggtcctgctgccgtgaccagccagtctcctgttccatgtaaactctattcttcatcttggattgtctttcaacctgacatcattatcagcgcaacgcaaggttacctctggaacctccaagtgaaacttgagcccatagtaaatctcttaccagacaaaggaagactcatggactttctcctccagagaaaggaatgcaagatggtcatcctgtctgtctgttcacagatgttaagtgagtcagacagagcatcgctgcccgtgatagccactgtttttgataaactcaaccatgagtataaaaagtacctggatgccgagcagagttatgcgatggcggtggaagcagggcagagccgaaggcagcccgctcctcaagaggccggtgcggacccaggcggtgctggaccagtcagatgtgtacacccatgtcctgtcagccttcgtggaaaagaaggagatgcctcataaatttgtgatagccgtgctgatggaatacattcgttctcttaaccagtttcagattgcagtacagcattacctacatgaacttgttatcaaaacccttgtccagcacaacctcttttatatgctgcatcagttcctgcagtaccacgtcctcagcgactccaaacctttggcttgtctgctgttatccctagagagtttctatcctcctgctcatcagctatctctggacatgctgaagcgactttcaacagcaaatgatgaaatagtagaagttctcctttccaaacaccaagtgttagctgccttaaggtttatcccggggcattggtggccatgacaacatttctgcacgaaaatttttagatgctgcaaagcagactgaagacaacatgcttttctatacaatattccgcttttttgaacagcgaaaccagcgtttgccgagggagccccaatttcacaccaggggaacactgtgaagaacatgttgcttttttcaaacagatttttggagaccaagctctaatgaggcctacaacattctgaaatcacttgctgtttttttatataaaaatgtgtacaaagttaatttattgcattaataaagctctttaaact

SEQ ID NO: 4779 - DNA, 458 bp, Homo sapiens
gggattcggcccgggtgctcttgtgagctgctgctcctgcggttggtgagattacctgggtctagagtgcggagctgctccgtggccacgaggacgtcaccatgcccaaagcaccaaagggaaaaagtgcaggacgggaaaaaaaagtcatccatccatatagtagaaaagcagctcaaattacgagagaggcccacaaacaagaaaaaaaggaaaaattgaagaatgaaaaggccttgcgtctcaaccttgttggtgaaaaactgcaatggtttcaaaatcatcttgatcccccaaaaaagagatattcaaagaaagatgcttgtgaactaattgaaaggtacttaaatcgattcagcagtgagctggagcagattgagttacataacagtatcagggacaggcaggggaggcggcacttgttcccgggagacccgtcatcaagcagacgatggagc

SEQ ID NO: 4780 - DNA, 382 bp, Homo sapiens
gccatgactctttttttggaaagtgttatcacccagatgtttcgaacactaaatagagaagaaattcctgttaatgatggaatagagctattgcagatggttctgaactttgataccaaggatcccctcatcctgtcctgcgtccttactaatgtctctgcactctttccatttggtcacctacagaccagagttcctgccccaggtcttctctaagctattttcatctgtcacttttgaaactgttgaagaaagtaaggcccccagaacccgggcagtgaggaatgtgaggaggcatgcttgttcctccatcatcaagatgtgtcgtgactacccccagcttgtgctgccaatttttgacatgctttatacccttgtgaac

SEQ ID NO: 4781 - DNA, 1178 bp, Homo sapiens
  misc_feature (1)...(1178): n = a,t,c or g
ttttttttttgaatcaaaagcagggtttatttttctatcaaatccccaatccatgttccagccaatggatgaagggtgaatcaagccccacatagactcttggtaaaaacaattctaactttctaaaaaaaaaaaaagccaacacacttttttctttcttttcaaaaagctcccaggcctttgggaacagctgaaacaaattcatatcctgactaggtctgttttctcttaggtatttgggatggtccctctctgctgcgacttctgcacagatgaggcactgataatggcctgcaggtcactcacaatcctagctccacatcactccatggtttgataacctagaaccacgttatgatttccatttataatgccctaagaacagctgaaaagatctgtattaaattctgcaaatctttattgagtgccaactatttgctggggcacaggctagggcactgattctgctggttctgagaaacataaatggtaccatagggaggtgtttcctcctaagtggcaggaggatgtttgctgggagttaagtgaaccaattcctcctctgcttacaccacgtgggggtaggtccagaactcaggccttgggaacatatgctgtgctctcttctacaggcgctgtgtggaagaaccaatagcagttgttaaatagctgtggaatttcctccacaatccacatagtgatgtgtctccaaggagctctgggtcatgaggccaatgtatgaaatcttcactgaagttcgcatgaagatcactatgttgtgcaccaggatctcaggtaccgtgcagaagaagtacacataggaaaacggtcctcccatctcggccttcccggtaaaattcaccagttgctcactccgaggtggaataagggagacgttagtagtcacatatgtactgaccactgtgttcatgtactgaatctggctggacaggctggtcactgccaccgtgtagaagttggagttcctgattttcagggtggccatgatggtgagaattacaagggagtcttgcttattaaatgtgactttcaccactttgatgccgtcatcatccacaaggactgaatgcggaaacaggaagaaaaccaccaaaccagatgccaggagacaaagcanggatggacaggaggacatattgcttagttcgctgagggcg

SEQ ID NO: 4782 - DNA, 403 bp, Homo sapiens
gaagaaacttccaaccctgatatgtgggtgtgtgtgtgtgtaaaatctgtgtaagattatgtgggtaaagagaagaatatggaagaaaccacactagatggtttttgtagatttcctgagtcagtagcagggcaggaggaagtttagataccgagttgggaagaagtagagtgcagaaaagagatattcttaagtaaaaccacacatatgagatctcatttgtgtaaaatgatatttttgtgtattcataaaaaaattaatggaaataccacctgcaggccttttccaggtgaacaaaataaaaaatcctactcatttcagtcctttttttttttagagaaggatgtgggggatttgtccctatgtctctgatgttagaaacaggatttgggggcgctgggcg

SEQ ID NO: 4783 - DNA, 657 bp, Homo sapiens
agagagagaactagtctcgagttttttttttttttttttttagtatccttttattttttttaaagcacaaatgcccacacaactttgacttacaaggtagttctatatagaataaattaaaatgttagtaaaatctgtattaaaaactatgtacaattaaatgtggtttacagggtacataattatgcttctcacatcaattatagttgaggacaattatagttgaggttatctaaaagaaagtgtaatacggacatgaccattcataagtaaaaggctggaagtctccctggagtttatgcagatgatttttacttgttattgcacagtgtgaattggtaggggaaaaaataatacactaacccttgggtcccatacaggcaaattaagattgcattcttcaggctgtttcaatagcactggatttggccattccctgtttaaaaagattgtagcacttgataagactattggatattaccatctaaacgtattttgttaaacatacagcatttgtgaacgtgatccttcttcattctgccttcttggtacatacaacgttttaatcctttctgacgacattagactactcaaaatctttttctcctaactatgaaatgaacttaaaccatttggtagccttctcagactgaaacc

SEQ ID NO: 4784 - DNA, 1523 bp, Homo sapiens
aaatctttgccccctgactttggaaatctcgtttaaccttcaaactggcgatgtcaagggttccaagtcctccacctccggcagaaatgtcgagtggccccgtagctgagagttggtgctacacacagatcaaggtagtgaaattctcctacatgtggaccatcaataactttagcttttgccgggaggaaatgggtgaagtcattaaaagttctacattttcatcaggagcaaatgataaactgaaatggtgtttgcgagtaaaccccaaaggttagatgaagaaagcaaagattacctgtcactttacctgttactggtcagctgtccaaagagtgaagttcgggcaaaattcaaattctccatcctgaatgccaagggagaagaaaccaaagctatggagagtcaacgggcatataggtttgtgcaaggcaaagactggggattcaagaaattcatccgtagagatttcttttggatgaggcaacgggttctcctgatgacaacttaccctcttctgcgaggtgagtgttgtgcaagattctgtcaacatttctggccagaataccatgaacatggtaaaggttcctgagtgccggctggcagatgagttaggaggactgtcggagaattcccggttcacagactgctgcttgtgtgttgccggccaggaattccaggctcacaaggctatcttagcagctcgttctccggtttttagtgccatgtttgaacatgaaatggaggagagcaaaaagaatcgagttgaaatcaatgatgtggagcctgaagtttttaaggaaatgatgtgcttcatttacacggggaaggctccaaacctcgacaaaatggctgatgatttgctggcagctgctgacaagtatgccctggagcacataaaggtcatgtgtgaggatgccctctgcagtaacctgtccgtggagaacgctgcagaaattctcatcctggccgacctccacagtgcagatcagttgaaaactcaggcagtggatttcatcaactatcatgcttcggatgtcttggagacctctgggtggaagtcaatggtggtgtcacatccccacttggtggctgaggcataccgctctctggcttcagcacagtgcccttttctgggacccccacgcaaacgcctgaagcaatcctaagatcctgcttgttgtaagactccgtttaatttccagaagcagcagccactgttgctgccactgaccaccaggtagacagcgcaatctgtggagcttttactctgttgtgaggggaagagactgcattgtggccccagacttttaaaacagcactaaataacttgggggaaacggggggagggaaaatgaaatgaaaaccctgttgctgcgtcactgtgttccctttggcctggctgagtttgatactgtggggattcagtttaggcgctggcccgaggatatcccagcggtggtacttcggagacacctgtctgcatctgactgagcagaacaaatcgtcaggtgcctggagca

SEQ ID NO: 4785 - DNA, 965 bp, Homo sapiens
atcatcacagaggagaaggtgtgcatggtgtgtaagaagaagattgggaacagtgcatttgcaagataccccaatggagtggtcgtccattacttctgttccaaagaggtaaacccagctgacacttgagcccagcatcctggggatccagcggatggacagcttggctctcccagagaggtgaaggagcacctggccttaggaatcctggctgccaccaccacaaggctccccatttggacattactggctatcttgtgccctggaacaactctgaattaattagactcatggtctggcattgccagctttttaatgggaaaagagattagttataccttataccattatgttgtgggcaattccagagaattcagtacctgcttggtcaggaggatgtgcaccatcttgcctttgcacaccagtcacctgaacaaggaaacttgtcacaagtgtttgtaaccatggggttgttcatcaagggcttttctattaagtacatgacttcacaaggaccgctcagcatggctcactggagagttccatgagagaacagcactcaagcttctggccgcatggacccgatggctcgcattctgtgtagtgttttacgtctccatggtaactgtgccctgcacccctcggtagccgccctgttagttttcagtctccttttctttctcaccatttatcacttccctcactgccctacccaggctttctctcccacttccctgactctgggaataactaatatttaagcaaggtaagatgagaagcaaggggtctcagttctaggaatacagtgctagttgattgtcaggtatgttgtaaatagaccctctttggccatacactccatgcctaggatgcctcggagagcatcattctctgcctaggcaaggccctgcatcccttgcctcaggccgggctgagtgtgactgcagctcctggaggatgggcct

SEQ ID NO: 4786 - DNA, 337 bp, Homo sapiens
ggcacgaaaagtgaaacacgtgaccaaggtagaatggatattttcaggacggcgcgcaaaggaggagattgtatttcgttactaccacaaactcaggatgtctgcggagtactcccagagctggggccacttccagaatcgtgtgaacctggtgggggacattttccgcaatgacggttccatcatgcttcaaggagtgagggagtcagatggaggaaactacacctgcagtatccacctagggaacctggtgttcaagaaaaccattgtgctgcatgtcagcccggaagagcctcgaacactggtgaccccggcagccctgaggccttctggtctt

SEQ ID NO: 4787 - DNA, 775 bp, Homo sapiens
aagcaaaggggtaagacatcagactcttccctaaacgtgctctctgggcacccctgaacttgctcatccgggttccccctcccacagcactttctgcagctagagctgattaatgggcgcttgagtgcctccttgctgcactcccatgacacagagacacgggccaccatgaacttggcactggctggtgacatccttgctgcagggcaggatgcccactgtcagctcctgcgcttccaggcacatcaacagcagggcaacaaggcagagaaggccggttccaaggagcaggggcctcgacaaaggaagggagcagccccagcagagaagaaatgtggagcggaaacccagcacgaggggctagaactcagggtagagaatttgcaggcggtgcagacagactttagctccgatccactgcagaaagttgagtgcttcaaccacgataataccctgcttgccactggaggaacagatggctacgtccgtgtctggaaggtgcccagcctggagaaggttctggagttcaaagcccacgaaggggagattgaagacctggctttagggcctgatggcaagttggtaaccgtgggccgggaccttaaggcctctgtgtggcagaaggatcagctggagacacagctgcactggcaagaaaatggacccacctttctgcagtggatcggagctaaagtctgtctgcaccgcctgcaaattctctaccctgagttctagcccctcgtgctgggtttccgctccacatttcttcgtcgac

SEQ ID NO: 4788 - DNA, 1381 bp, Homo sapiens
  misc_feature (1)...(1381): n = a,t,c or g
ggaggatttacagctaagctgtagttgcagagtacatgtacagtaatgaagttcactgtgtttataaattgaaaaggtaccaggtcttacagcattttatatatcacatctttacagaataacatgatggcaatatacaagtggtattgttaggtggtttaacttagaataaaatgagaattcttcagttatattttgtactatggtttagggctatgactaatatttcaggccatttccggtgaaagaaacttagttttacaagaaaaaccatttgctactgaatgcttaaactaattttagtgtttaatgttacatgcttaaatttttttcagttttaacagtggcatatttaggcatggaaatattattatgaaatttattttcaggatctgctataaggttgaaatttagcccagctctaggcattttacaaattatttttcaagcagtccattcttgattgtttgacttttttttttaaattaaagattggggaatgtatgtgagagtatgcatatgtatgggtgtgtgtgtgtgcgcgcaatcaaactgtgggtgtaaataggattctcagtgaattctggtattcagactctattccactagtgaaagaaccattttttaaacttcccttgccttttttatttatttaattttcttggtttggagatgtcagtcccaaacaccagagtctggtacttttctataacacagctcagattaaggtagggcatatgccaaggaggttctcacctcccctaaagaagggacttgaattttagggactttaattcacccctccttcaatacaactttcccccttcttgtttgcacatgccaagataactgcttttatgcaggctgtacccccttgaaaaatcctttctacagtgctgctcacaaaagagcccaagttcgcctcctacctgcattgctgacttgaattcacagtcgccgagtctacctagctttcttggaagcagtctagcaaaatttctatttgtacgttcactaattatctacaaggacaaaatcagttgtatttacaaaactctacttcagtgtttgttttagtttttttttttactgaaacttgtttttgtgaatactctgtgcttagaattaaatatcactttcttatgaacaacataacttcttcagattgtgtatatgaaaacattagcaagtcttgttttttcctatgaagcaaacacaattggtgacaaaggttgtcaatcatttcttcaaaattataatgcagttctaatggtcagcatattttgatattaaatttaaagatcacctctctgcatttgtttttaaattatgctaatacaccacacattatgttggtatgttttgannatgtactttcttt

SEQ ID NO: 4789 - DNA, 683 bp, Homo sapiens
gcaaggcaatgccctctgccctccccaggagtttcgcgagggtcccgcggcttctttccttgaaagtcagtgagaccaagaaccccaccagttccggacacactatgctcccacttcggggctcccctgccctgcgtcaactgcactctggcctgggtggcagagagagagaccctgatctagcatttgctcctgatgactcagtgcagacaagctctgtaactcagtttccccagctgtaaaatggggaatggcgcctttactgggctgtgctccatcgccagaattccgttgtctcaggaatgttcaatagatggaatcctgtgtggcctgagatgagtgtctttcatgccacgtgacacccttgaggtccgtgcaagctgttggcatgtcaacagttagctgcttctcattgctgagtggcgattggtcctgtcatggtttattcagccatgtggtggatggctacttgtcttctaagccacttgccttctgattgctggactgactctctcgccctctcttggtgcagccctcgggaggctcagtcacactctccgagagcacagccatcatctcccacgacatcacaggcctggtcacatgagatgctgccctctacctggcagaatgggccatcgagaacccggcagccttctctcataggtgcctcgttccgaatt

SEQ ID NO: 4790 - DNA, 100 bp, Homo sapiens
aattaccctctgatgtgaatgaagggaaaactgtttttatcagaaatctgtcctttgactccagaagaagaagaacttggggagcttctccaacagtttg

SEQ ID NO: 4791 - DNA, 418 bp, Homo sapiens
atttataaagagcattagaaaatgtatttatagacctggatgttatatgtttaatattaatttaagcctttaataatgttataggtttgtaactattcttcagaaattataaagaactcagtgtagactgaattaatctatttagtatctgtaattttgcagacatattttcttacagtattttctatgtaaccacacatgtagaattataactaattagagcacaagaagtttcttcagcaatttagagctaccaattgtttcttgactatatagtcacatttgacaaatttaagaacccagtctttagtgatgcaataaacaaaatgaaccattaagaacaaggaattgcttaaatcccttagctggtgaggatatacatctaaataattcatctttctaactcaaggaatggtgc

SEQ ID NO: 4792 - DNA, 577 bp, Homo sapiens
ttttttttttttttaaattgaaatccacatttattgatgagagatatatacacaaaagttaaaacacttagtgaaatattggattcacaggttatttccagtatataaagaatatccagttattttacacgtgaaatgttacagtaatcagtccacattgtaagaaagcttagaaagctaaaggcgaaaacaaaagacctcaactacccaaaatgtgcttcatcaacaaggcattttctagtagcatatatgagaaacaattcaaaaattagttgaagattttatctttttgcattcattagtctttaaacactatgtgctatagatgctctgtgctacgtgacttcagaccaatggggattgtgaatgtgaggaatacaattagttttatcttttgttctggacatacaagaattttcaaagagaatcctgcataaagcccagttttatttcaggaagtattccatcctaaatttgaaaggagttgaagaagccacattttcaaggaaaaattagcctgtccagccatacctcctcatatgaagcagccactgcaaattaatgtgcttcatgcccc

SEQ ID NO: 4793 - DNA, 1184 bp, Homo sapiens
ggagaatgtggcttagatcagtcccttgtttctttagagatgtccgagatccttccagatgaatcaaaattcaatatgtaccggctctactttggaagctcttatgaatcagaacttggaaatggaacctcttctgatttgagctcacaatgtctctctgcaccaagctccatgactcaggatttgcctggagttcctgggaaagaccagttgttttcacagcctccagtgttaaggacagcttcacaagagggttgccaagaacttacacaagaacaaagagatcaactgagggcagatatcagtattatcaaaggcagataccggagccaaagtggagtatggctttttccccctcattataattgttaaaacttcttaaaaattgtttcacccttttgatatatatttctttgacttataaacgagctatatttataaacaagggaccagaacacattaactcagtcatggttatgtgcttccttgctttcaatgtttcattatcttataaggaagagaacgtatggtctcttgaaaaaactgacaataagaagtaacaactggactaccacatttttttttacatccttaatttaactcttcgtcaatttctttttttacttaaggaggacgaatccatgaaccaaccaggaccaatcaaaaccagactggctattagtcagtcacatttaatgactgcacttggtcacacaagaccatccattagtgaagatgactggaagaattttgctgagctatatgaaagctttcaaaatccaaagaggagaaaaaatcaaagtggaacaatgtttcgacctggacagaaagtaactttagcataaaatatacttctttttgatttggttctgttaagttttttgatggcttttccatatgttgtaacaggaaaaaaatggtgtctatgaatttcttcttaatttaacaaatttggttaatttataaaatcacagattggtaaatgctataattatgtaatgatcaggattgagattaatactgtagtataaattgggacattataacagattccatattttatttcctaaaatctaaattcagtctttaatgaaataatattagccaaatggtggaactaatttatttcttttgaggaaaagataataaagaatgtaattaaatttaaaaaaaaaaaaaaaaaa

SEQ ID NO: 4794 - DNA, 538 bp, Homo sapiens
cttctgcaggggaaaagagctaggaaagagctgcaaagcagtgtgggctttttcccttttttgctccttttcattacccctcctccgttttcacccttctccggacttcgcgtagaacctgcgaatttcgaagaggaggtggcaaagtgggagaaaagaggtgttagggtttggggtttttttgtttttgtttttgttttttaatttcttgatttcaacattttctcccaccctctcggctgcagccaacgcctcttacctgttctgcgggcggccgcgcaccgctggcagctgagggttagaaagcggggtgtattttagattttaagcaaaaattttaaagataaatccatttttctctcccacccccaacgccatctccactgcatccgatctcattatttcggtggttgcttgggggtgaacaattttgtggctttttttcccctataattctgacccgctcaggcttgagggtttctccggcctccgctgcactgcgtgcacctggcgctgccctgcttcccccaacctgttg

SEQ ID NO: 4795 - DNA, 849 bp, Homo sapiens
cgcggacctcgccaagacaatgcaaactccagtgaacattcccgtgcctgtgctccggctgccccggggccctgatggcttcagccgtggctttgcccctgatggacgcagagcccccttgaggccagaggttcctgaaatccaggagtgtcccatagctcaagaatccctggaatcccaggagcagcgggcacgagccgcccttcgggagcgttacctccgcagcctgctggccatggtgggtcatcaggtgagcttcacgttgcacgagggtgtgcgtgtggccgcccactttgggagccaccgacctggatgtggccaacttctacgtgtcacagctgcagactcccataggtgtgcaagcagaggcgctgctccgatgtagtgacattatttcatataccttcaagccataaagatattgtgttcacttttctgcttgaggctaaggcactgtatcccaggcctcccaatgttcccgaagccaggaactctgggccccatggagttatgagctcccttggaattttggagccaagctttaagcaagttctgggactcctgagaccttcctgggtcttagttcagttaaaatttctggcaactctaggaattctaagatcccattggaaggaatgctctacctcacagaactctgaaccctacagaaatatggcctgctgccatttcctgaagaccggggcatcggggtggggtgataaaggatacaacctgcacagggggaagttattaaagaggctgcaaagtccagccaccctgaagatactccccagtgctcccctcctgctaaagaaccagttaccccaggaaaaaaaaaaaaaaaaaaaa

SEQ ID NO: 4796 - DNA, 4977 bp, Homo sapiens
  misc_feature (1)...(4977): n = a,t,c or g
caaaggtcagacaaggggtggtcaggaagggatgtattttagtagccacttgtatctttttccaaaaacacctacccatgtttggggaatgttaaacaaaatcaaaaaacaaccttttgtagccgttggaagcttcatgtcctttcttctaacttgtcttctccagcggaagtgaccgtggtggcttcaataaatttggtggtaagtgaacagagtttccaaaattcccaactcccagcaatgctttgtctgattgttcatttgcagatgtcttagcgtgttaatttaaatgtcaaaggttttgaggtgtccagaaccacctccagaaaggggtagggtagaatgccacctgttgcctggtgtgtgctaacctggagcaggtaggggtaagactcaatagtcatcttttaccaaatgggtttgccccaggttaataagaggggtctagtaggccttggactgggccgttgccacacctggcacttagtgaccatcatcatgagaaactggagagtgcgtgctggaacacgtggtgccatcttggctttaggatccttttgatcgttgtgtccaaggcttgtgtgtgtgtgagtgtgtgggagacaactccgaatgtttaattctggaagagggatgtaacattgccctgaggatggtgaagttggtatacatttataaagtacggaatggtgtcaatgaatgcaattctatgtatatggacttaactgagatgggcaaatagaaactagctctgggaaggaacatgtgcactacttcaagaaagattggaagcatgtgtggctcatgggaaataaccaggtcttaaacagcacaaactgaattcgtggaccaggaaggtcttaaacagcacaaactgaattcatggaaaaatgacaaatttgagaagtctcccagtaagctggaacttttctggtttggttaacaaaaggtttcttgatttgtttcaagatttaaagccaaaggtgtgggttcatgacttaggtgtcattgcgtgtgggtacaatatttatatatggcgaattcagataaacattggtcaaagatggtctctggaaaaacaaaatagaggctgcattacggaaataagatttctggtctgttccctgggacatgcttaaaaaatacaatagctattatgtatggtttttattttcatgtggtttcggggaaacaacacggttttaaggatggtttctaaagatgaaattaaaaattgttccacaagggttaagtgtctggtggtaaagttgggagaaactggatggatgcacatcgcatggctggtggcgagcccatctctcttctctcgggtgagagaaccgggccaagctgagttggtttgttcactttaatgggtctccgtttcccctgccacctgtgctgaggacatttcccagcctgagctgggggaggcagcattttctgaagtgtggagttgtctctgtggagactcaagttacagatcttaaggggcctgcctagaattttctcctctgggcaggcgacccaggaaagggtttggagtgaggctgtgagcacttacttgatattttacaagttttggatttggtgttaatttttttccttgtccgttttttcctgttgactaacggctcatcttttccttgtttttgttttttttttgttctttttttccatgtcactaaaggccctcgggaccaaggatcacgtcatgactccggtgagttcacacgtggtggcatgaaaagagtggctaaagtggtatcaagactgcctggatgttctttgaaactattataaaaaggaaactgaaaaaaatggggatagagaaggaagggagttaggtgtgtccttagttagcagtgagaagtatttgttacgaagtatttctcagaaatacctggcttgtgggttccacccccagtgatttaggtctgagaggaccctgaaaatctacctttctaacaagtccccagtgatgctgatgcgtctggaccacactcagatggtttacagcagtggttctttcaaaatgtggatcatgtccaagttggtgaacaaaactagtgaaagacctgaccacatgaagtaaagcattgaactcctgtttaggttgtattgatgtttgtgtactagatttgaatgtaaaatgggtttcttatttaattcggggaccttcaactgaaagttgataaatactgatggacttttctgtgtggtcttgttgggcatttcactcctgagccctggtttccatactgtatactgggtgttaacatgtttcaaaggataattgtcaaactgaatctgaaatttatcagcatggctggcatatagggactcaaaagggatgtggatttctttttagttgtcttccataaaccaaatgataccagttgcttgatggatactaggtgctttaggttttttcctgtgttttttattttaccttttcacatttgcattttctctgttcaacaagcagaacaggataattcagacaacaacaccatctttgtgcaaggcctgggtgagaatgttacaattgagtctgtggctgattacttcaagcagattggtattattaaggtacttgtggagaggagtgggagctttctgtcagtgttgtaggcttgtggatttcacacattagtaaaagcaagtctttaatggttgccagcagtaaaaacaagtcttagtggttgttgccagcttaatttgttgaggaaagagccttagttactgttttctaaaagagaagttctatcttaacacaaaaagtataacttatcagagtaccctaaactcttgagatttgtactctatagtaacttttagttttatctttcaatattggagtgagagacagttttctttaatggaggtttacatgtgaggtaggaagaagtaactgggaagaggggagctgaagtttgggaattataaacctcatgttctagaggaagaagatggaaagggagtactgtagcctttaaaattgatgttacctcattttgctttcttcagacaaacaagaaaacgggacagcccatgattaatttgtacacagacagggaaactggcaagctgaagggagaggcaacggtctcttttgatgacccaccttcagctaaagcagctattgactggtttgatggtatgtatgagaaggctggcagaggtggggctggggatatagggcagcaagccttaggaaacaagccatagtttgagggttcttttgagtcttccaacacttactttagctgcggtttcaggtagtctcatttttgcttatgtgtcagcagattataaaccatttgagaaaggcacgcttctcttgtattttcggattaatgtgtcttgcatttaaagtctgttgatgattttttgtttctctaggtaaagaattctccggaaatcctatcaaggtctcatttgctactcgccgggcagactttaatcggggtggtggcaatggtcgtggaggccgagggcgaggaggtgaggagctacctgctagtggtgcagaggggtaatggggagagtgcagaagatggtaaaggcttgcatggaatgggttagatttaccaaacttggagagggagcagacccatacttggtctatctgcattaggacccatgggccgtggaggctatggaggtggtggcagtggtggtggtggccgaggaggatttcccagtggaggtggtggcggtggaggacagcagcgagctggtgactggaagtgtcctaatccgtgagtgaaacttaatttttttcttagttctcttgcatgcgtgctctttgatatattggtactgaggtatgtgcgtgttttccaaagaagtaaatgtcaaggccacactgttggggtcagatttagccaaaagcttacctaggtaaggttgatgtaatgggaaaggtaatggattgggttcagtaatactgatttttgttcctgactctgagaagcaagccgttttgtctttctgaagcttcagtttcctcactgtatctctaaagtcaccgtagtttcttcctagttctaggtcttgcctattccccatcgctccagactgattgtcttcctttctccttagcacctgtgagaatatgaacttctcttggaggaatgaatgcaaccagtgtaaggcccctaaaccagatggcccaggagggggaccaggtggctctcacatgggtaagaaaggcagacctggtgctagggagctgggaccaaagaatccttaatttttcagcggggaggctcggggaacataggggaatgggaatatgatagatcttgtttcttttgtcctagggggtaactacggggatgatcgtcgtggtggnagaggaggctatgatcgaggcggctaccggggccgcggcggggaccgtggaggcttccgagggggccggggtggtggggacagaggtggctttggccctggcaagatggattccaggtaagactttaaatcagaataaaaaagtagagcagttgaacagaggccataggataacagggttttgttgagaaagtggtttcattttgagggctaggtggaaagacctgaggttgtaaccagtagtggagagggaaggaaaattaactcagggggagtgaatctgtagacccacttgagataagatactcgctgggttaggtaggaggggcagataggatatctaggcttggagaggctggtaactcaaatataatggatacttaatttttttttttttttttgcaggggtgagcacagacaggatcgcagggagaggccgtattaattagcctggctccccaggttctggaacagctttttgtcctgtacccagtgttaccctcgttattttgtaaccttccaattcctgatcacccaagggtttttttgtgtcggactatgtaattgtaactatacctctggttcccattaaaagtgaccattttagttaaaaaaaaa

SEQ ID NO: 4797 - DNA, 473 bp, Homo sapiens
ttcccagatagctggccttagcatgtgatcacggttgttgtatttttaatttttgtcttttacagtatgagaggtgtaggttaatttgtttatttcctataaatttgtatttatgtgtatataaaatgtacaatgaatgtaaatatgactttctggaaagtttagactacatttagaatctctattcaaaatcaaaatgctgctcaaatgaatttaaccaacatctaggtgcttaatttctcattttatcccacttatgagattgggaaaaagatcaatatgagaaataccatacagataccttaaatgtatgcatttgtgcaacaatttttgagaaggtgagtggcaatttataatttagttggcaatttataatagaacttatagcttttaaaagaccttttaaagacattaaatgtaaacttaaaaatgtttagatcttgtttcaaactttacaatagcattcttcaaaa

SEQ ID NO: 4798 - DNA, 1957 bp, Homo sapiens
gccacgaaggccacagacgccttcccccttggactctcattcccttttccacggagccccgcgctttcgtgagccccctcgaggaacctggtctccgcatccagttaccacctcctgcctcagaggccatctgagcccttcgcacctcgcccctcagtccccccttgcccccccgcggagatcgcctcgctccctcccgcccccccatcatcccttccctcgcagttcccctgtcctgaggggagccccgccacggcagcgacagcgggcaggagggagaaagtgaaggttgggcgacacttggcctcactcccggctaggcgcacccacggggaggagaggaggagccgagaggagctgagcagcgcggaagtagctgctgctggtggtgacaatgtcaaataacggcctagacattcaagacaaacccccagcccctccgatgagaaataccagcactatgattggagtcggcagcaaagatgctggaaccctaaaccatggttctaaacctctgcctccaaacccagaggagaagaaaaagaaggaccgattttaccgatccattttacctggagataaaacaaataaaaagaaagagaaagagcggccagagatttctctcccttcagattttgaacacacaattcatgtcggttttgatgctgtcacaggggagtttacgggaatgccagagcagtgggcccgcttgcttcagacatcaaatatcactaagtcggagcagaagaaaaacccgcaggctgttctggatgtgttggagttttacaactcgaagaagacatccaacagccagaaatacatgagctttacagataagtcagctgaggattacaattcttctaatgccttgaatgtgaaggctgtgtctgagactcctgcagtgccaccagtttcagaagatgaggatgatgatgatgatgatgctaccccaccaccagtgattgctccacgcccagagcacacaaaatctgtatacacacggtctgtgattgaaccacttcctgtcactccaactcgggacgtggctacatctcccatttcacctactgaaaataacaccactccaccagatgctttgacccggaatactgagaagcagaagaagaagcctaaaatgtctgatgaggagatcttggagaaattacgaagcatagtgagtgtgggcgatcctaagaagaaatatacacggtttgagaagattggacaaggtgcttcaggcaccgtgtacacagcaatggatgtggccacaggacaggaggtggccattaagcagatgaatcttcagcagcagcccaagaaagagctgattattaatgagatcctggtcatgagggaaaacaagaacccaaacattgtgaattacttggacagttacctcgtgggagatgagctgtgggttgttatggaatacttggctggaggctccttgacagatgtggtgacagaaacttgcatggatgaaggccaaattgcagctgtgtgccgtgagtgtctgcaggctctggagttcttgcattcgaaccaggtcattcacagagacatcaagagtgacaatattctgttgggaatggatggctctgtcaagctaactgactttggattctgtgcacagataaccccagagcagagcaaacggagcaccatggtaggaaccccatactggatggcaccagaggttgtgacacgaaaagcttatgggcccgaaagttgacatctggtccctgggcatcatggccatcgaaatgattgaaggggagcctccatacctcaatgaaaaccctctgagagccttgtatctgatagccactaatggaactccagagctccagaatcctgagagactgtcagctgtattccgtgactttttaaatcgctgtcttgagatggatgtggataggcgaggatctgccaaggagcttttgcagcatccattttt

SEQ ID NO: 4799 - DNA, 705 bp, Homo sapiens
ggtctgtgcccgggaaagatgccatatattcactgggtggcaagacactgcaagataccctctccaacgcagtcatttattatcgcgtaggtgataatgtgtggacagagacaactcagctagaggtggctgtgtcaggggctgctggtgccaacctcaacgggatcatctacttactagggggggaggagaatgatctggacttctttaccaaaccttcccgactcatccagtgctttgacacagagacagacaaatgccatgtgaagccctatgtgctgccctttgcaggccgcatgcacgcagctgtgcataaagatctggtgttcatcgtggctgaaggggactccctggtgtgctacaatcccttgctagacagcttcacccggctttgccttcctgaggcctggagctctgccccatccctctggaagattgccagctgtaacgggagcatctatgtcttccgggaccgatataaaaagggggatgccaacacctacaagcttgaccctgccacttcagccgtaactgtcacaagaggtattaaggtgctgcttaccaatttgcagtttgtgttggcctaaggctgtggggaggggaggagaactgctcactccttttccctccccatacaaactcaaagtcccctggggccccaattcagagttatgttttttttggcacatactagaaaaggcagtg

SEQ ID NO: 4800 - DNA, 820 bp, Homo sapiens
  misc_feature (1)...(820): n = a,t,c or g
tactgaataaagctaagcttcctttaggattgttgttacatcccttcagagacctaacgcaattaccagtgataacatcaaataccattgtgaggtgccgatcctgtcgaacgtatattaaccccgtttgtatccttcattgatcaacgtagatggaaatgcaatttgtgctatagagtaaacgatgttcctgaagaatttatgtataacccccttacccgatcttatggagagcctcataaacgaccagaagttcagaattcaactgtggagttcattgcttcttcagattacatgctgcgtcctcctcttcctcttcccttttgtttttttttgtttttttttaaaataaagatgggtgtgnnnnnnnnnnnnnnnnnnnnnnnnnnnnnnnnnnnnnnnnnnnnnnnnnnnnnnnncaatgtctaaatagctgagattacaggtgtgaaccattacaccagctcccaaaagacactcttaagagaatgaaaagacaatccagagactgggagaaaacctttgcaaggataatggactgatagtgaagttacacccagaatatatttttaaaaactatcagtgctcaacaataaaaaaacccaaataacccaactgataatgggcaaaagatttaaacagacatttcatcaaagattcctcaataaaagatgatcaatattattaatcattagggcagtgtaaattaatatcacaatataacttcacatgtactaggatagctataataaaaaagactaataataataagagttggtaaggatgtggagaaccggaaacctcatacattgatagaatg

SEQ ID NO: 4801 - DNA, 1471 bp, Homo sapiens
tcgcggcttccctagattaggcttgggaggcaaggggaggcctcctgacttttctcactgccttcgttaatataaagatgaaggcacactccacaacttccttctggccaggcccagacatgtctgtccttgtgagataaaagcttccatgggagccttccttcctaatcaagatgcaaatagtacggtattccgaacagacactaaaaatagctgtcatctcaaagaatccagtgcttgtgtcacagtatgagaaagtagatgctggggaacagcgtttaatgaatgaagcattccagccagccagtgatctctttggacccattaccttgcattctccatcagattggatcacctcccaccctgaggctccccaagactttgaacagttcttcagtgatccttacagaaagacaccctctccaaacaaacgcagcatttatatacagtccattggtaaatactggctctctatgaagcaccagaattatcagtgaagaatatattaaatggctcacgggctactgtaaagcatatttctatcgcttgagagtaaaactcctagaaccagttcctgtttctgtaacaagatgttcctttagagtcaatgagaacacacacaacctacaaattcatgcaggggacatcctgaagttcttgaaaaagaagaaacctgaagatgccttctgtgttgtgggaataacaatgattgatctttacccaagagactcgtggaattttgtctttggacaggcctctttgacagatggtgtggggatattcagctttgccaggtatggcagtgatttttatagcatgcactataaaggcaaagtgaagaagctcaagaaaacatcttcaagtgactattcaattttcgacaactattatattccagaaataactagtgttttactacttcgatcctgtaagactttaacccatgagatcggacacatatttggactgcgacactgccagtggcttgcatgcctcatgcaaggctccaaccacttggaagaagctgaccggcgccctctaaacctttgccctatctgtttgcacaagttgcagtgtgctgttggcttcagcattgtagaaagatacaaagcactggtgaggtggattgatgatgaatcttctgacacacctggagcaactccagaacacagtcacgaggataatgggaatttaccgaaacccgtggaagcctttaaggaatggaaagagtggataataaaatgcctggctgttctccaaaaatgaggaccttcaaataggagtgattgaaataaataactacttgcatgttatgctttcatttgggtggaatacttcattggaataaactactgatcttgtgctgtgtcaaagtaacagactagaaccttctttcaagtacctgaattgaaatgaaactcattttgaataataaaaactctagaaactcttaaaaaaaaaaaaaaaaaaa

SEQ ID NO: 4802 - DNA, 643 bp, Homo sapiens
tttttttttgttctgatatgaaatttaatgtcttaggctgaaaaacactaaatttccatttttttgtaggtcagaagtggttgcaaactggatttttagactcttcctgttgggggtctcggacatttgctcttttccacagcggccaattcttcagagccacaaagaactgggcgacgcaggccagaggtgtgggagtccagcccttggttcgaatcccgctctccactgtccatggggttctcagcaagccctctggcctctccaagcacacgcagggttcctcaagcaattccaaactccagagaagacatcccaggtaaaatcggatggcagggacctgggacaccgctgtgacgggcagcccctgggctcgagtccacaactcccacgggagggcagggccccatcctgctcacaccggggtccccagccctcgatcctcacgagtcctcgtccaagaacaaactgtgcacacacgggcggtcagtcctggattcaaggtggcccatcggagctcgaactcaacggcctgacctagggacgcctccagtcccacccctaccttttggaggtgggagaatcaccgtgcaggtcactgacccactgaccacagatcaccactctctcccgcccccgtttc

SEQ ID NO: 4803 - DNA, 988 bp, Homo sapiens
  misc_feature (1)...(988): n = a,t,c or g
gctaaacattcagatccgggaagtttttgcaaatcgtttcactcagatgtttgcagattatgaggtgtttgtcatccaacccagccaggataaggaatcctggtttaccaacagggagcaaatgcaaaactttgataaagcatcttttctgtcagatcagcctgagccctacctgcccttcctctcaagattcctggagacccagatgtttgcatctttcattgacaacaaaataatgtgtcatgatgatgatgataaagaccctgtactccgggtatttgattcccgagttgacaagatcaggctgttgaatgttcggacacctactctccgtacatccatgtaccagaagtgtaccactgtggatgaagcagagaaagcaattgagctgcgtctggcaaaaattgaccatactgcaattcacccacatttacttgacatgaagattggacaagggaaatatgagccgggcttcttccctaagctgcagtctgatgtactttccactgggccagccagcaacaagtggacgaaaaggaatgcccctgcccagtggaggcggaaagatcggcagaagcagcacacagaacacctgcgtttagataatgaccagagggagaagtacatccagggaagccaggactatggggcagcattatccgccagcccaaactgtccaacctctctccatcagtgattgcccagaccaattggaagtttgtagagggcctgctgaaggaatgccgcaataagaccaagaggatgctggtggaaaagatgggccgagaagctgtggagctagggcatgggggaggtgaacatcacaggggtgggaagagaacaccctgattgccagcctttgtgatctcctggaaaggatctggagtcatggactacaagtgaaacaggggaaatcagccttatggtcccacctgttacattatcaggacaacggcagagaaaatcacatcaggaanctcagtactca

SEQ ID NO: 4804 - DNA, 63 bp, Homo sapiens
ctgtcccccccacccccccaaaaaaatgggaaggagagacagccttcagctagagccctttct

SEQ ID NO: 4805 - DNA, 740 bp, Homo sapiens
gggagggccaggctctacggggggatgcagctgtggctctgaacaaggggcccgcgaggcaggccaaatgctgcgcccactaggtgcagccactcctgggggctgtggggaagacaccccctgcctgggccatggccagcctctaggtggattctgattcactgtcaatgctgggttgctcccgagccctagatgttcctggaagttggccccctttatgaaaaccacttcccacagccagtgggaactgccagaggaagatctggcgtctcatggctcccaggaaagtgctgtgccctatccccactgataccatctgattccccgatgcctgtgcctgttccacctggacggtggccccctcagcctggcagcctctggacagagaggaaggaaggattggaaaagtccccggagcacagcgacgtgtggaagatgccttacgtctgatcttgatgggggcactggcctggagcctgggcccacctgcttctggggggttggggagcaggccagatggaggtggtggtgccaggaagaaatggagcgatgactgactgtggggtgggcccaggatttccgcatcttggtgaagttgcccctgggaagggcagctgggggcagtggcgccagttcccttccatggtctcccggctggcaatgtggtgaagctgagtttctgtccaatgagcaggaagattctgagacatttcgcctgagatataagttgtactgcgtat

SEQ ID NO: 4806 - DNA, 1509 bp, Homo sapiens
gcgtcgacctttttttttttttttttttgctagttgtatataaaatttaatctcaccgaatgtacagttttcaaatttcacgtgtatattaaggaactgatgcatctgagcattgtcaaacaaacgggaagaagaagttaaagggcagcctggcattgatggctggtggagctctgaagcctgcctctgcaggtgcagacacatccacaaaagtaaccgcagtggaaataagaatcgtcctttcatttcctgagttggcctcaggaaaggaggatgaaattagatttgcagttacattgactattttggcctgtggattcagcagggatccgtatttagtccacttcacttctataaccaaagcccctgggagctggcaggaatccttcctgttgaatgactgggtgatgaagtggatgggcacccagtccagcatgtcctgggcctgggaatttccaaaaggggccacgtaatctgggaagccctggccccacagcaggctcttcaccttctgtgctacgagctgacacgggagagctccacccttatgaggctggaatccagcagctaatgggagccccacgacataaccagggtttccactgagagggactggctgggtattttcctgaagaaaatgaatttcaaacttttgctgcagtgggaaccactacgctgctaactgtccccagaacgaatgagagatcagctttggtgacttcacctgcatctgtgtatgtgaggctgtactttacctcaagaacaacattcacgcaaaggctaaagtgtccagcgttgacgagagtcggctgcagcacatcagtgtcctcccgtcgggtgagcgttttatttagagactgaatgacgatggactgaacagtgatagggaccttttttcttgaatcaggtaccctcagaatttccgggctgctgtaaaaagccatgctgagggcttcaatttcttcacactgttctaaatttatttttctggtgcacttaacagcctggttcaccagaaacgctgcagggttattatcagtgcacagagatgatgtcagggacgaaggaaatctcagaaacgaatctgaagtctgcagaggaaccccatactcatatttagcagcagtaggaatatccagtttggttgtgaaggaaacatatgattcagcattcaatgtaaaaccatcagatgttttcatcaatgtatcaaaattgttttcatcaggtacttctggattaataaaggataatgcaggtttatagtttgtaatatgaatgcagaaaatagatggattaatctggtcaacaagttcaaatactctttgaggtgggtttgctgtaaaattcaatgaatagatgactgctttttgacttacaaagactgtgtcgcccgtgacaactggaactgagcaggcagaaaagacactgaaatccacggagctgcagtcgggatcacagcagcagttgatgtcacactgtgctggggataagtcacagacacagagaaca

SEQ ID NO: 4807 - DNA, 1450 bp, Homo sapiens
  misc_feature (1)...(1450): n = a,t,c or g
tttctacaaaaacatactttttcaaaggggctatgagagtatcaattgacaaaagcagaacaagtagcatgattagacagagaagtcttaattgcttaacacaggataaactcagcagttttaaagtgtctgtatccattttaaatgattagtccaggggtagaaaagatgaggatggtttcatcatactttgaaaaggaaactcccactggagctaaaacaaacttacagtccaggttataagaatccnaagttacatagtaaattattaactattattttcataccaagttcatgcttaggcaataagaaaatcctgtttgcagcattaattacatgtaattcagtttccaggcacatagttagaggtcacacacaggcagagaaagaacaaatgccagcccagtcatctcactgcctcagtccagcagccagtggcccaggacttcatctacactgtctatctgcttcccagccacttaagccccacgagggaaggcaaggcagctagccctggaggtgagaagacaccgttgatccaccagcgcaggtgcagggccctctgcagatttgttccaccagtgtatctcccatagaaaatgggatttgaaatcacaacttaaaccaagtgggtaatatcctgaccgggggccctaagaaactggcattcttgcattggaaatgaattgcactattcagatgcacagcactccttttgcacaaagttgtgttctgaggtgccaggacatccaagcacttgcagtgtcaatgtcgtgtttaagatgtaccaggggagttcaaacatttaaaaaggaattctactaggaagatttcagtaatttgaagtagataccactccccaccccaatctgtaaattataatactgaatttttattgaaataaagcacactaaatcaaaccaattacaaagatacatgtgtcacaccaagaaaacattttcagttatgctgacagccccaaatgttttccatttttcaaagacagtttgtaatgtcatgggaaaattgctcacgacgttaaaatgaaaaaagcaagatacagtaatcatatatgcagtatgatctcaactatgaaataactttaatatttatacattgaaaaaaagactagaagaaaatgcaccaaacattgaactgaagttaatctctatatactgggataacaagatattaattttttacttcttgaaaactttcaaattttccaagaaattaatcataaaatcagtgagaaaattgaacttgaatgaatatcaaaactgcttaaacaaggactaggctgagtaacctggctttgaggcatgctacatggcccttttcactgcaatgaaaaaaaagtccaacaaaattttatcgcaggttcaagacaattttgcattactgatgttggaagctttatgtccgacctccacaaacttcagcagctaac

SEQ ID NO: 4808 - DNA, 403 bp, Homo sapiens
attcaacaggtcactgaccaagcttttctaaatttttaagaacagaccttattgattttcatatctttccataaagtgtcatgattctatcatagaccctgacttaacattgtaaggactatgagtcctccattttttaattaatttttttttagcaaattaggacttcggcaggttttcctctcctaaactcattctttcctccacaggattgctttgtccatctcctgctttcatttcaagtgcataaacaaaacctcaaagggcctgggaaggtgaggcaggccagagtctgtgttctgtgttgagtgtcaagctatttgttaagaaggtctgcaacaggcctttggtgtgggctctgccagagactgttctgaacactttgcttgagatccgtgccctg

SEQ ID NO: 4809 - DNA, 1826 bp, Homo sapiens
tttcctgtaggatgttcctgcactataacaagattatgttttcttccttctgcagcagctttctgcttcttgggtactactagctattgttcaattcaggtgaggcctgtgatgacatatatgtagcatgtgctctgcgctccctgcaagctgagcagatacaaccaatgcatcactgtatactcttgctgagaatgtggatgcagcctcacagatctttgcaacactccaaccagccaggaccagttgatcagaactgatcttattggtctgataaccaatcttatttgtgaactgattcatatctgtctttccactcttggttctcttgccgtaggaacaaaaacagtttaggaagcataattacgaacatttaggaaccaatatgtataagtaattcggagactccaattcacctgcccctcccccatcccaggttgtggaggctcgaggaagctgacttcttaggctaaaggacaaaaaaatctctttacctccttggccattttcatgttctctgccaattactataggcagtcttcattttgcagaggtgaggtaagacttcatcttattcttcatgtaatcccaccttctaacaaaaaataaataaatatttaaattccaaggagaagtgttctttgtgtatttctagcagaaaacagatgcttaagcctaagaaggaagatccgtccatgacaaaggaaagtggaaaactgaaccagttatctgaatacttcatgccaggacagttgctattagcaactgtttttgcaccttcagggctttaaaatggggctctgcagacagcatttgcatatgcaagactcagtagccaagcctccactgccaattgttgaaggcagtttcagatcgccaccttttgaggtacatttctttaagcacaagagaagtagaaatgggcctttgccttgtctccagtggtttgtccctctggtgcctcagcagataccagagcttattcttatgaccatttggaagtagtcctcaaagtaaagatcaagaaaaaattggattctttttccattttctcataatagtagcctagtcaacacaagactcccataaaatatgactcactattggggagccatactattttataagcttacttcctgctggacaaaactagctttcctcaaggaaatataaaggaggggaaagtcacatagtgttaggaaaacattcctgtgttttgaatacgatgaatccataggatagagaaaaatctgcttgttctattctgagagttctctgagatatcccttcactctgcttggcatttggccattgatattcaacaggtcactgaccaagcttttctaaatttttcagagagagttacttaccaataaggtctgttcttaaacctacctagttgattttcatatctttccataaagtgtcatgattctatcatagaccctgacttaacattgtaaggactatgagtcctccattttttaattaatttttttttagcaaattaggacttcggcaggttttcctctcctaaactcattctttcctccacaggattgctttgtccatctcctgctttcatttcaagtgcataaacaaaacctcaaagggcctgggaaggtgaggcaggccagagtctgtgttctgtgttgagtgtcaagctatttgttaagaaggtctgcaacaggcctttggtgtgggctctgccagagactgttctgaacactttgcttgagatccgtgccctgtaaaatggatatgatgttttactgatgtctgtaatacatttgtaaacttccaataaaatttgaataaaagaaatg

SEQ ID NO: 4810 - DNA, 374 bp, Homo sapiens
cagcctatggagcagccctgatctgcaaggagcggcatctctggcgctgctgtgcacagctgcttccatgaaagctgctgcctaacaccaccagctcacccttgaatctttgggcaaatccaagaactctcccaggctaagccccagtcttggggcttgcctgtcctgcatcatctggcaaccagcaaagggacaaggacagcggagatggtggcaattggcagagaggcaagacagcagagacagagaggcagcaattggtgagagacaagagacagcagttggcaagacagcaagagacggtgaagcagtctgtgattgaggatgtaagatctgtaacactgaggaagtaccaataaagagctgctaacact

SEQ ID NO: 4811 - DNA, 174 bp, Homo sapiens
  misc_feature (1)...(174): n = a,t,c or g
gtggggaccctttgctcttagagctgtcacagatgacataagcctgggcaggctgtggggaggccgctgccttctcagcctcacggtcagctttctcaagccaggtgtggcctgcacagctgttcagggtcagggctngccattcctgcccagggccttnaagggcaagtntct

SEQ ID NO: 4812 - DNA, 1087 bp, Homo sapiens
ttttttttttttttttacagataaacattttaattgtttaaatatattactttcatgatctttttgaaatcgcacttgtactgtactaatcaacagccaaagcatataagaaagtttaaaaccaaaaatattctgacatgaacacatgacaggaaccgctgctatgtaaagtaacatacactgctcccaagaacaatgatatttttaggagataattcatcttaacatgtgcaaggacaaatttgtaatcaaaggctggaagaaatatatattagtgcctgctttttaaaagtttattttacattttaaatacagtatttttctcataaaaaaaaaatccaggaagtgcctaactccatggtttctataccatatgtacatgaaagctgacagagagcctgacaaatgttctggatgtaacagtatgaacacctatgagctgggactacttctgaatcaaaattaaaaaacacaaattaagcactgcttaagaaaaaaaaaatccagtttctgaacaaccaaaagagaacagagttagatatgtacaaaaccaggtattaaaaaacagaaagaaatacagcacacaaaaaactcaaacaacccatatgtagtgaactgtatatactgcagttaatgaaaaccctcctacaagaagtgatttaggatttgaaattttaaaaatctaagtacttcagtaacaacatacaataacaacattaagtgtatattgccatctttgtcattttctatctataccactctcccttctgaaaacaagaatcactagccaatcacttatacaaatttgaggcaattaatccatatttgttttcagtaaggaaaaaaagatgtacctcttcccgtcaataaagaaataacacaaattaaagctataaaatttaagcatgggcatatgtatttccaattctccttaataagtaattccaaactggaataatgtggggtttgtgactaagtagtaacaaattaaaagaaaatagactgtctctggcagtgatttccatactagtgcaatgttacttcccatatgctgaattatatttaaatgattttatgtattttaatt

SEQ ID NO: 4813 - DNA, 800 bp, Homo sapiens
  misc_feature (1)...(800): n = a,t,c or g
gcccctcccagctcccaatgacaaggatgggaaaggtgctgggcccgggtccagcctgggtacagaggaatgaggatcaggattccggtgcaagtcccgggaagagggcttctaccatctcngttttactttgtggggactgagcccagggtgggccacggagagaggctgctggacgtcagagtcttaggaaaacctggttggtgttggcctggcctctctgggtcagttcgcttacctgagagttcttgccgtctttcggcggtgtggccgcctggtggctctgggccgagtacatgtcttcagccgcagggtcgagttggcactgcccatcacctggctgttggcggtggcccgtgggaggatgatgtcgtaaagctccttcggacggaactttgtgcatcagggccatctcagtgggctggtacacactggtcagcagctgccccattgtacccgctgtatggtgacaccggcctcttagctgggtccccagcaggctccgtttcttggtgtcctgcacaaaggggaggctggccaccaggatgatggtgagcacaaacgtggtgacaatgcccgccccagccacggcctccaggacgatgccccacgccccagagcggtcacacaggttgtagtacagggggttgaggccttgctgcagccgggtgggacaatgccctgcccaggcccctgggaacaggaagagaggcagtcccaggcacatcaccaaggctttgtggaatgncattctggctcccaggccaggctctggttgggtccctcccaggctgagccga

SEQ ID NO: 4814 - DNA, 846 bp, Homo sapiens
cctgtggattggaactctgtgggaatcgctccttattctgatggttcactcattcagatgtccttgatatttggggatatttctaaaacagctggggagaaaaatggactgcgaggctccggtgttggacgtgaaattggcagtgagacatccgcctctaagcccagggaaaagcttaaattgtggttctctgtctctagcaccgtgatctttgaaatgcgttattgattttcttctttcttctgggaaatgcaatgcaggtgaacttgtaagtgttgaatcctccctctcctcactgttcaatcagactgaggcctacttcctttctgataagaaatatggaactgccattgctcagtaggaaaatgtcctttctacaagcattcatatttcaataaaaatctgcactttgtgagttgagccccctcaaagagacctacagaccctgccatgagcatctccatccacactcatcatttcccattttcaccacttctgctcctgtgcaaaccagtactatccttttctgggggatcctaggcagaagcgatggcaggacaaaggcagagaaggcactgcccaggtcctgcatgccagtaaaactactcatgtcagctgttctgcaggatcccatgagaaggtgagtcaccagaaaatgcagtttccacatcctgatgatttcatctccctaccccaactgatcaatttctccaattttccagcctctcaccctccacaatccccttaaaaactgtagcccagaactctctggaatgatgaatttgaaggtttgctcctgtctcctcactcagaagcctgtaatcattaaactctttctctgatcaa

SEQ ID NO: 4815 - DNA, 636 bp, Homo sapiens
  misc_feature (1)...(636): n = a,t,c or g
tcttcattatttatattttacaaaaagccaaaatatttcagcatattccagtgataactttaaaaattagatacattttcttaacatttttttcttttttaatgttatgataatgtacttcaaaatgatggaaatctcaacagtatgagtatggcttggttaacgagcggtatgttcacagcctactttatctctccttgcttttctcacctctcacttacccccattccctattaccctattcttacctagcctcccccgacttcctcaaaacaaacaagagatgggcaaagcaggcagttctaccaagcccattgggaattatcctttaattttacagataccacttgctgtaggctacgggaccaaggatgtccaaaattattcttgaggcactggattaaaaattacgggtcttctttgagggtcaaaattcagccatgcatgggtaggggcagtgcttgaatgagaaaaggctcctgggtgcatctttcaaaatgagtcctaaagaacatactgagtacttagaagtagaaggaacataagatgtatttctggacttaaaacaaatgggctcttttcacatgtggctttattagactctgggagagaaaattaaccaagtgcttcanaaca

SEQ ID NO: 4816 - DNA, 1108 bp, Homo sapiens
tggcccagagcgctcgggctgtcggtctagcaggggggactccctgaggggccgctgcgggtcgccgtcttcggaggcaccggcgagggcagagccaacagcctcttcacggtctgtaaggtcattgtttgccagtcgtgggcagcgcggcaaacctgctgggaaaaggttttctggttggaataggatgagtaccgcaccagctttgccttccagctgagatgtaaatttcaggcctccatcctgtggaacgtgggaaaactatcttgagtgttggcatgttctaagtatgacataatagtttaatgtatgataaatcatgggtgtttagacgaaagatttacacatataaattggaggctttagcggtcttagtgtaactaacttttcgtccccttaacccttgatgcctgttctatgggtctctagagcggaaggagcattatactccggaaacatttgctggaaggggttatgagaaattcctctctgtatgctaactccgtaatacaagcgtttgtgtattttaaaatcacagctgttccaaatataatctagcctcgttttccccctccgtcggatgataggtgttcttcaggacagttttattttaagcaattcttagtctcaagtaaacaccatcattaaaagaactgagaactattatcaattcttcctttggagtccatcttcaatggaaaggagaagggaaaaccttttttaaaaagaagaaagaaaactgaagtttttgatttgactagagaaatattcagaagactccttattttcacctagtctaatcacaaaattgagaaacaaacattatcccttgaccatgtaaattttacaccacattatgtcaacagcatgtaccttccacattgagtattcagaaagaagtgatctgaactctgaccattctttatggatacattaagtcaaatataagagtctgactacttgacacactgggctcggtgagttctgctttttctttttaatataaatttattatgttgggtaaatttagcttttgggcttttcactttggctctccatggatataaggaaaatgtaggttttcctctttcagtttggaattttcccc

SEQ ID NO: 4817 - DNA, 1323 bp, Homo sapiens
  misc_feature (1)...(1323): n = a,t,c or g
ttttttcttttaaaatggcttttattgagacacttgtagggattctgcaacatttccagttgggaatctttatttccaactcttagggtggctaaacccttttctgaatgccaaaaggcacactctcaccaccttaatgaggaaacacacttatctgtgtctggtaccnggatatccaaactgggcacctggaccccaaagcccccgtgggtgtcttggtacaaagtctcaattaagtccctcccacgtacaactcagaagcctgttaatcagggagggtaatttcccaaataaatgtgagctggcctaaatccagctggttatttctgatttggtaatctgtagtatcttaatttggggacatcctgtcctaagttttggctggtgcatgtagaacttataatctacctgtataacaacagatgcaacatagctccgttccagccccaaattccttaaaggttctagtctactcttgcacttcttcctgtactgttgttgagaagcttacattttagggagaggctggtcaaatctctactctctggtaacagcattaacaagagtctttcttttggaaacagactcagaagttatggacatcagccacttcagacttctttaggccagtatccttgaggtgactgaccagcctcctcatggattggagtttcccatcattgttttaattgctggaaatgttggcctaattctgcttccttgtaactttctgctttttagtacaagttctcttgggaatctacgcatggtaaaaataccagctccttccatctttacagccctgtcagtgctgtgctcttcaaagcctttcccttaatagcaagagggccaagagtggcaaatagaggcagagccgcctgcactacagttgttcccatcgtaaggtgaaaacgaacgtttaacttcatctagaagaaaaaacaaacaaaaaacccatcaggctattaagattctgcttgcaaattaatgccaatccatgtttacatttttttcttctagatgaagttaaacgttcgttttcaccttacgatgggaacaactgtagtgcaggcggctctgcctctatttgccactcttggccctcttgctattaagggaaaggctttgaagagcacagcactgacagggctgtaaagatggaaggagctggtatttttaccatgcgtagattcccaagagaacttgtactaaaaagcagaaagttacaaggaagcagaattaggccaacatttccagcaattaaaacaatgatgggaaactccaatccatgaggaggctggtcagtcacctcaaggatactgg

SEQ ID NO: 4818 - DNA, 661 bp, Homo sapiens
atttaacacagcaaggtagatacactggtttccagcattacaggcaacactagatgtactttttttaatgaataatgtaaacttgagttttaaggcagcgggtactaatgctgcacacagacttaggctcggtgcccatttcagaaacgggtcagtcaggcactcgaaacaagaaactgtgagggggagaaaaggggagccaccagtgtcatctgacaaaaacgatccgtcaaagtgttttcccctttcacacgcacaaaatgaaaatatttgaacatttagaaaaacaaagcacccatcccaccaacttcggcctgctccttaacgaagatctcaaagtactggtagatgattgtgactgcgagcaggatcccggttccagacccaatggcgcctaggaagtcagccaggaccgagagggccccgatgcacagcccaccaaaggccgcggctgtggggatgtaccggttgagttcatggaccatggaggtctctcggtggcctctcatcaccatctgctgctccttcagctgctttgcaacatctttggcagaggaacctgagacctcaatccacgttttggagaagaatgcacaggagcccagcatgaacactatgtatacaactgcatggaccgggtcttctaaccggccgcgtcgac

SEQ ID NO: 4819 - DNA, 874 bp, Homo sapiens
  misc_feature (1)...(874): n = a,t,c or g
gaccggcgtatcacacacatctccgcggagcaggaagcggcgcttcaacatcaagctggggtttgacacccttcatgggctcgtgagcacactcagtgcccagcccagcctcaaggtgagcaaagctaccacgctgcagaagacagctgagtacatccttatgctacagcaggagcgtgcgggcttgcaggaggaggcccagcagctgcggggatgagattgaggagctcaatgccgccattaacctgtgccagcagcagctgcccgccacaggggtacccatcacacaccagcgttttgaccagatgcgagacatgtttgatgactacgtccgaacccgtacgctgcacaactggaagttctgggtgttcagcatcctcatccggcctctgtttgagtccttcaacgggatggtgtccacggcaagtgtgcacaccctccgccagacctcactggcctggctggaccagtactgctctctgcccgctctccggccaactgtcctgaactccctacgccagctgggcacatctaccagtatcctgaccgacccgggccgcatccctgagcaagccacacgggcagtcacagagggcacccttggcaaacctttatagtcctgggccagaccctggctgctcactcagctgccctgggtgctgctttccctggggcacgggctccagggatcatctctgggcactcccttcctgccccaggccctggctctgccctttccctgggggggttggaagcagggtccaggtttcacacttgccacctcctggaggtcaagaagagcaaaatccccgtccctgctctgcactgtgctccancaacgtnaccnttggtgactcctccgcntctttgaccc

SEQ ID NO: 4820 - DNA, 735 bp, Homo sapiens
  misc_feature (1)...(735): n = a,t,c or g
tgaatgttgatactctttatcatccatattcgttttgttgtcccagtatccttggtagcttgttttagatccccccctctagagtacaggatcattgaatttagttgttctcagttgtctttaatgtggaacagttccttagcctttatgtgttccatgacctctatgttttttggagtacagggcaatttttcttgtaaattgttactcattttgcatttgaattgtttattcatgcttaacgcccttctcaagtatactctccatctgctcttcattgatgttacttttgagcgcctggtcaaggtgtcctggttttgccctatgtgtggtacttactactagcaatctctgggaagcaatgtgcaaataccctgttcctttatcaggagctcccttggcgattctttccagactaaaacccaaaccagtctttaactatgatggttacgaaatagtgattttccaaatctaatgctttgtccatttacagcatttggtgtaagagagtgttctatctctggcatttattatctacctaaacactatggcctcataatttttccctccaaatcaaaatttgcatgcctttattatttcgagcatctcctttcatgcataagatactgtaacctttctgtcccagcctcaagccctggagtcagctgtttctccaaggagcccagcttccttttagngggaaatactagaagtaaacatctgggactcctgtat

SEQ ID NO: 4821 - DNA, 627 bp, Homo sapiens
cgggcattgggggaacccgagccggctgcgccgggggaatccgtgcgggcgccttccgtcccggtcccatcctcgccgcgctccagcacctctgaagttttgcagcgcccagaaaggaggcgaggaaggagggagtgtgtgagaggagggagcaaaaagctcaccctaaaacatttatttcaaggagaaaagaaaaagggggggcgcaaaaatggctggggcaattatagaaaacatgagcaccaagaagctgtgcattgttggtgggattctgctcgtgttccaaatcatcgcctttctggtgggaggcttgattgctccagggcccacaacggcagtgtcctacatgtcggtgaaatgtgtggatgcccgtaagaaccatcacaagacaaaatggttcgtgccttggggacccaatcattgtgacaagatccgagacattgaagaggcaattccaagggaaattgaagccaatgacatcgtgttttctgttcacattcccctcccccacatgggagatgagtccttggttccaattcatgatgtttatcctggcagctgggacattgcctttcaagctaaacaaccaaatcaggggaaaatgcaggaagtctccatgggacgttt

SEQ ID NO: 4822 - DNA, 404 bp, Homo sapiens
ggcaagtcactaaaggcgctgagtgtcaggttgaagagttgggcctttatcctgtaagtaaagaaaggcaaatctcatttctagaactcttatgaacagttcatagtggctacttaaagtacatgtattgaaaaggataccctagatgttatctgggcccagtggagaagactgttgtgcttgattaatggtgtgtgccaggggctcagtgggtgtgttagcaaccatgccacattatctatggataaaatatatataggagtagagaccgtataacccagggattaacatggtctgtggagctgggctgcttaaatcctggataagaagtgactgctgtggtctggctgcatggtcctgaggacctgaaccagggtcaggggcatgggagggaagagcctaca

SEQ ID NO: 4823 - DNA, 467 bp, Homo sapiens
gaaggatggttggatgttgtccagtctttaattagagttattccactggaagatccactgggaccagctgttataacattgttactagatgaatgtccattgcccactaaagatgcactccagaaattgactgaaattctcaatttaaatggagaagtagcttgccaggactcaagccatcctgccaaacacaggaacacatctgcagtcctaggctgcttggccgagaaactagcaggtcctgcaagtataggtttacttagcccaggaatactggaatacttgctacagtgtctgaagttacagtcccaccccacagtcatgctttttgcacttatcgcactggaaaagtttgcacagacaagtgaaaataaattgactatttctgaatccagtattagtgaccggcttggtcacattggagtcctggggctaatgatcctgattatctgaaacgtcaagttggt

SEQ ID NO: 4824 - DNA, 1829 bp, Homo sapiens
gtggaaaccagtaagggcaaagatgacgtttatgatcgtatgctgctagactacttcttttcttatcatcagttcatccatctattatgccgagttgcaatcaactgtgaaaaatttactgaaacattagttaagctgagtgtcctagttgcctatgaaggtttgccacttcatcttgcactgttccccaaactttggactgagctatgccagactcagtctgctatgtcaaaaaactgcatcaagcttttgtgtgaagatcctgttttcgcagaatatattaaatgtatcctaatggatgaaagaacttttttaaacaacaacattgtctacacgttcatgacacatttccttctaaaggttcaaagtcaagtgttttctgaagcaaactgtgccaatttgatcagcactcttattacaaacttgataagccagtatcagaacctacagtctgatttctccaaccgagttgaaatttccaaagcaagtgcttctttaaatggggacctgagggcactcgctttgctcctgtcagtacacactcccaaacagttaaacccagctctaattccaactctgcaagagcttttaagcaaatgcaggacttgtctgcaacagagaaactcactccaagagcaagaagccaaagaaagaaaaactaaagatgatgaaggagcaactcccattaaaaggcggcgtgttagcagtgatgaggagcacactgtagacagctgcatcagtgacatgaaaacagaaaccaggggaggtcctgaccccaacgagcacttctgacaatgagaccagagactcctcaattattgatccaggaactgagcaagatcttccttcccctgaaaatagttctgttaaagaataccgaatggaagttccatcttcgttttcagaagacatgtcaaatatcaggtcacagcatgcagaagaacagtccaacaatggtagatatgacgattgtaaagaatttaaagacctccactgttccaaggattctaccctagccgaggaagaatctgagttcccttctacttctatctctgcagttctgtctgacttagctgacttgagaagctgtgatggccaagctttgccctcccaggaccctgaggttgctttatctctcagttgtggccattccagaggactctttagtcatatgcagcaacatgacattttagataccctgtgtaggaccattgaatctacaatccatgtcgtcacaagggatatctgggcaaagggaaaccaagctgcttcttgacattaggtgtagcatgtctacttttaagtccctcacccccaacccccatgctgtttgtataagttttgcttatttgtttttgtgcttcagtttgtccagtgctctctgcttgaatggcaagatagatttataggcttaattcttggtcaggcagaactccagatgaaaaaaacttgcatcttcagtatacttcctaaagggcaatcagataatggatatgttttatgtaattaagagttcactttagtggctttcatttaatatggctgtctgggaagaacagggttgcctagccctgtacaatgtaatttaaacttacagcatttttactgtgtatgatatggtgtcctctgtgccagttttgtaccttatagaggcagattgccctcccgatcgctgtggttcttattatcaaaattaagtttacttgtatacggaacaaccacaagaaatttgattctgtaaagaatcctctttagctgtggcctggcagtatataaatggtgctttatttaacagaatacctgtggaggaaataaagcacacttgatgt

SEQ ID NO: 4825 - DNA, 610 bp, Homo sapiens
attcggcacgtggaaaaaaaaaaaaaaaaccctcagagatagtctttgtgaagagcttctgacagaatcactgagtaccttccttcccccagatgtggaagacatgggggtctcagtgtctgtgctgtctcctcttctcttccccaaccaaggactgtgccattactgcccgtctcaactgtccatgcaggaggacagagttgcctggtactcttacccttgtccctctcctaaagggagcacaaggaaactgaagagactgaaaaagaagagagtttgtagctgaaaaagaatagggatagcaaggaaacccagaactgcattcccctaagtggggccatcccatgtgattgaattgtccatagcttgcctatggtgagaaatgtgcatgctccgtgagctggtctcttgaaacaggacttatgcttcctctatattctggttaaattttccaaacacataagttcactgagcacagatttcttatccagagacaagtagaatctaaccgcagactgttggcagagttccaggcacttagccatgttcccttcctgactcaaatccccaaaggccttcactctcactgagaatcacactactgtcccat

SEQ ID NO: 4826 - DNA, 519 bp, Homo sapiens
aataaagacaagtgttcagatttatttggaaattcacagtttctaatggcactacagctccgtagttacatattgaaaattctcttcccacaacacacagatcacataatttctcactgtatctctgctctcatctggacctcttttcaaggggcttctataaaatcaggccctcttgctctgaatagctaattgtgcagacaggaaagaaatttaaatcttctaaaacacgctgttaacctaaagcagcaacttaaacaaacaaaaaaggcgttaaataagtcacattacaaacaatacccaagaaaggtattaggcaagtttaaaaacagttatcactactaaaagtgctcaataagttataacttaaacatcacaacaataaatggtcaattctctccctttcaaaaagaaacatgttccactttcattcattactgtacaatcatactaagaaatcattttattcaaatacagttgctgccaattattttttaaagacaaaaaaaacggcacgag

SEQ ID NO: 4827 - DNA, 576 bp, Homo sapiens
gtccatggatggagaatggctctgcctgcgagagctggatgacatctcacttacacctgacccagagcctacccatgaagatcctaattatctcatggctaatgaacgcatgaacctcatgaacatggccaagctgagtatcaagggcttgattgaatcagctctgaacctggggaggactcttgactctgactatgcacctctccagcaattctttgtggcgatggagcactgtctgaaacatggcttgaaagctaaaaaaacttttctcggacaaaataaatccttctgggggcctctagaactggtagaaaagcttgttccagaagccgcagagataacagcaagtgttaaagatcttccaggacttaagacaccagtaggtagaggaagagcctggcttcgtttggcattaatgcaaaagaaactttcagaatatatgaaagctttgatcaataagaaagaacttctcagtgaattctacgaacccaatgccctcatgatggaagaagaaggagccataattgctggtctgttggtgggtctgaatgtcattgatgccaatttctgtatgaa

SEQ ID NO: 4828 - DNA, 570 bp, Homo sapiens
tttttttttatcagcaatgggtttttcaaaaaaccaagctttattattaattttttttggcaccttaattaacaattcatagaatgggtcacttcaggccactcaagagtaccagtgaacactcccccacaaacacaccctgccacaagacatttagcacagaggaacagatccatggccactgcctctgcagtatcaaagagaattagtctttccacaaaacaaattttaacagccaatctctggatttctgtagtggctttagtcaggcatatttatcatcatattagcagtgttcagttcctgcccaacatctttatttaatcccaattcaatgcttatggatgctcagctcatgtttaatgttgcaagccccatcttagcccatcttaattcaaacagaaaagaaacaaaacaaaacaaaaacaaaaaaggtacctgcctggttcatggatccctagccatccagggaccaaattccaaattaggatgacaaagagtttcccttagttcaaaatgacatgtgtttccagtcctaatcccagatggttaaatctagccatagtgtcc

SEQ ID NO: 4829 - DNA, 646 bp, Homo sapiens
gacaagcacacagaagcacaacacacctggcagtgtcctttgggcgatctgtgcccgaggcaccagttgggcggtcaactctgcaggaagtggtgggaatccggtcagacttggccgtggaaggctggagctccctatgctgagcgattggctgcaggggagcttcgtctgggcaaggaagggaccgatcggtaccgcatggtagtagggggtgcccaggcaggggacgcaggcacctaccactgcactgccgctgagtggattcaggatcctgatggcagctgggcccagattgcagagaaaagggccgtcctggcccacgtggatgtgcagacgctgtccagccagctggcagtgacagtggggcagcctgggccctggctatgagggccgacacattgccatggagaaggtggcatccagaacataccggctacggctagaggctgccaggcctggtgatgcgggcacctaccgctgcctcgccaaagcctatgttcgagggtctgggacccggcttcgtgaagcagccagtgcccgttcccggcctctccctgttacacgtgcgggaggaaggtgagagggggctgggcctgggacggggttcgaggattgtcaaccctttttcttctgttttcatgaacct

SEQ ID NO: 4830 - DNA, 832 bp, Homo sapiens
  misc_feature (1)...(832): n = a,t,c or g
tttttttccattaaaaagttgtttatttaaaaataccttctcccaattctgattccatatcaaattaaatcaagaagtgatgttacagcaataactcatcaaagtcatgagtagggaggatggcaatgaccccattagctcattagtataatctagtaagtgaaatacaaattcaactcatttacttcttcacaaaaggcaaacataattgatatacttcatatcaaaaaactagtttataaagcttgtcttcatatttcagtttaaggttcaactgatataaaatgccttaaaagaacatccaagcaatgctttggattttctttctttgcaaaattcaaggaaaacatgattggttgaagtttcttcactgctggcgaattagttaagagctacctgagattccttcgcacttccactcttccactctttgagtttccagtgattaaaatatgccagagacataatttagagagcgctagaaatgccacacagatctcatcgcttaaaaaagagtttctggcccgggccacgggtgnnnnnnnnnnnnnnnnnnnnnnnnnnnnnnnnnnnnnnnnnnnnnnnnnnnnnnnnnnnnnnnnnnnnnnnnnnnnnnnnggttttgaagtttttacagaatgtacagaatgtaatcattaaaaaaatgactttcngaaacatatacattcaaagaaaaccctttagtattccaagcattgaatacttgggggaagaangggttcttttggatggttaggagtccgtcttttctcaacggttcctggataagccataaatcctcgcaaattcattttcccttggtcaggacaca

SEQ ID NO: 4831 - DNA, 1157 bp, Homo sapiens
taaagtggagcaaattataaataggaatataggtaggagttcattcattcagtaaatatttattgaatgcttattgtgtccaggcctgttctcagctcttagaatacatccatgaacaaaccagataaaaacttctgcccttgcgcagcttatactctagatcgtaagggatgggattagcaataaatttacataaattcaaccatacctactggaaaaagacacatgcatggaaattattaatgctataagaatctcttgatatgcagtttgtatttttgtacttaatataagcataatatattcatacctacatatcactccacagggatttaaactttaagactacaaagagaaatttattggtaatttaggagattttcaaggaccattctgagcatgctcaattttgtccttaggcacggtctttaaaacctaaccaccttacaagttgtgactccactgtaccaaaatgaagactctgagacttttgggcaaaagaaccattttaagtatttgagtatgagaaagatgacaggatgaatccacattctctcagattaatctggtaacaaggaacaagaaagagtacattcatctgaatatacatggtcaggtaacagtggaattcacatcaagaattttttaaaaaacgcaaccagttcatgacatgtcccattgttttaagacaactaaaacagtaagagctcaatgtcataagtatttataagcaactcttaattataaaatccaaaggaaaaattcttaacataactggctttagtatgattaaaggtttctcatttgcatatatgtttcagagtatttaaaaagaatgccaagaaaaatcatttttaaattttgcaataattttactctatatacattgataccaatcatttaaccctgaaaacacagtcttcactaacacaatgtaaaaaaattttttgacagtaaatgaccagaaatattgcattaccataaagctacaaagaggctcatgctcctaagagcaaagttaggaaaacaaaaaaataataattataccagtgataagcaccaagacagaacttttttgcacttagggcctgattggttgtatttaaacataacttctacattagagggccaaaataacaccttataataatggcctg

SEQ ID NO: 4832 - DNA, 434 bp, Homo sapiens
attcgacagtcacatgttaccagtgatgacacgggaatgtgtgagatggttctcattgatcatgatgttgacctagagaagattcatcctccttcaatgcctggagacagtgggtcagaaattcagggaagcaatggtgagactcagggctatgtatatgcccagtcagtcgatattacctcaagttgggactttggtattagaagacgctcaaacacagctcaaagattagaacgactccgaaaagagagacaaaaccagatcaaatgcaaaaatattcagtggaaagaaagaaattctaagcaatcagcccaggagttaaagtcactgtttgaaaaaaaatctctcaaaagagaagcctccaatttctgggaagcagtcgatattatctgtacgcctagaacagtgccctctgcagctgaataacccctttt

SEQ ID NO: 4833 - DNA, 835 bp, Homo sapiens
  misc_feature (1)...(835): n = a,t,c or g
agtatgaatagcttgtttaaattctttgagtaatttaaaagggaaaggctcaaatgtagctataatatttccctgttgatctggggggtgtattctaacagggaactgccaagcctctaaatcaccctcttgtctagcttgctcgaattcctgcctgaatagaactaagagctgtcacatgaggcgctgctcgaacagtcactggggcaattactttttgcccagtgtcctccaggaaaggaaagattttggggggtcatcttcatcaaaattaataagggagggggtgcaagaagggtagggatgaatctcttccttcctttgctgcttttagctttagctggcaaaataaacatgctctgtaacctcttctgttacttcgctatactcttgttcctcctcaattacccagtgtgaaaaagttccaaggtgaaatgaaccagacccccatacctgtcccattgttaccctgacacttccgagctccccttcttacgcacgacagggattgctttaagagtactcgggtgtcctccagctagtttcccattccaaccattgctctggtgacccttcaactggggttcaagccccacgttgggcgccacttgccgagaccagctcggtcatggagaccctaacccagtggctctagaggaattaagacaaagacacagaaatatagagatgtggagtgggaaatcaggggtctcacggccttcagagctgagagccttgaacagagatttacccacatatttatttgacagcaagcccagtgggtaagatttactaaaaggtattccctnatggggaaaccaaggggacggggctc

SEQ ID NO: 4834 - DNA, 763 bp, Homo sapiens
ttttttttttttttttgcctgcataaaatactgtttattttgtcctttaggaagactaaagtagtccagctcccctacagcccagtcttgcccccaccctgcactctgtcgccttagttcctggggaccaagcatctggcatttctcaagcagaccctctccttgttgctccttttcagtccctggagtctggcttcccaaagccaaagctggaggagagctcattgctgaggaagcagggttggagcctgaggagatgcagagggcctggacccctcgctggatcccagaggcccaggggcagagatgctgggacagggctctaggggaccactgggtgactcttgaggggctagaagcagggctgggtgacttttgctacggtgggctgcaacactgtctggcttctcaaagcgcttgccgcagaattcacaggggaagcgcaaggcagccaccgtctctgcatgcttgcgctggtgccagttcagggaagccttctggcggcaggtaaacccgcatatctcacactgcaggggtttttctccagtgtggatacgtctgtggatgacaaggttgctgctagtgcggaaagaccgggcgcagaactcacagatgtagtcccgggtgtcactgtgcagcttcatgtgctccttcaggtgtttcttaaagttgaaagacttcccacaggctggctctgggcaggagaaagacttctggtggatgtgctggtactttttgtggtgctagagaaggaagtgggtgc

SEQ ID NO: 4835 - DNA, 535 bp, Homo sapiens
  misc_feature (1)...(535): n = a,t,c or g
agaggggagcgcgctgcgcgtcgcaggagtaacctacttggtctcctgctttcgcgacatggccttcaattttggggctccctcgggcacctccggtaccgctgcagccaccgcggcccccgcggnaacacattcttgttgtttggaggtgggtttggaggatttgggacaacatctacaactgcaggttctgcattcagcttttctgccccaactaacacaggcactactggactctttggtggtactcagaacaaaggttttggatttggtactggttttggcacaacaacgggaactagtactggtttaggtactggtttgggaactggactgggatttggaggatttaatacacagcagcagcagcagcagcaaactacattaggtggtctcttcagtcagcctacacaagctcctacccagtccaaccagctgataaatactgcgagtgctctttctgctccaacgctgttgggagatgagagagatgctattttggcaaaatggaatcaactgcaaggccttttgggga

SEQ ID NO: 4836 - DNA, 126 bp, Homo sapiens
agtagagatggggttccagccactgtgcccagcccccaacttctttttttctgactttgtctttttgttctgataaatattagtcaataatttataggccgggcgtggtggctcatgccggaatcc

SEQ ID NO: 4837 - DNA, 327 bp, Homo sapiens
gcaaaactcctggagtcctgagccaggggaactcgttaagtgacagaaaagcgactttaccctgaagaagattgtaggcacttctttgccaccatgatagaagcagaagctttagctcagagccttgacgataagctggtgtttacagaatagttggaaatcactgttgttttccctgtttgcctctcccttgacaatgccacacacctccttcctgggaaccactcataaaggctgacgctggaggttgacactcgtctgactgcacttccctgagtcagtccaaggtggaaatgtatatataaaatgtgtttttcacttcttttt

SEQ ID NO: 4838 - DNA, 639 bp, Homo sapiens
ttttttttttttttttcacattagaacaacgtgagtttttattttttctccatttctgggactaaactaaagcccaccacaccccatggtgaagctcgagggtggtgcggggctgctctggcgtctgtgaaggcttatggtgttgggggcgccagctacgtcgggacgcagatccaggccagttgggtctccaggcctcagggcggcagcggagccccggacagcaggccgctctttctttttgtgttggagtcccagggcccgggccaccagccgccgggccacagtcgcatttgtctgtggcctctccttcaccagacgcaggagttttggcctctgcaaggctttgagctttgactgcttggttccctgcgtgaggggccggatcttgagcaccgagaactcccgggtcagggcttccgcagctgaggccaggcagggaaagatgccgagtgcgtgagtatcatccacccactgaatcctgaaccccttctcttggaactcagaaaacgttgccagcaggtcctccgtcttgagcgctggttcaaagtcatagatctctaccacgtgggcaaggtccttctctccaggcagctcctccacgaaggaggatgtgtccaaatggatcttctctatctg

SEQ ID NO: 4839 - DNA, 776 bp, Homo sapiens
  misc_feature (1)...(776): n = a,t,c or g
gcacatacctcacgatcacgggaaacacacatgcagagaaggcgggaaagcgtggcaaagacatggtgaaccagtattttggcatcttcttcctcatattccagtcatccggtgtgtggggcaacttgatctcatcgctggtatttggccagactcccagccaagggagtggtgtcctggctgtcctgatgatagctgcgttcctccaacccatacgagatgttcagcgggaaagtgaaggagagaagaaatcagtacctttctggtccactttactgtcgactttcaagctatatagagataaacgtctgtgcctcttaattctgctgccgctgtacagtggattgcagcaaggattcctctccagcgaatacacaaggtcctatgtcacctgcaccctgggcatccagttcgtcggctacgtgatgatctgcttctcggccactgacgcgctgtgctccgtgttgtactggaaaggtctcgcagtacacgggcagggctgtgctgtacgtgctngggcgcggtgacccacgtgtcctgcatgatttgccctactgctgtggagacctcgtgcttgaccatctggcagtgttcttcgtattctctggcctgttggggcggtggcanatgccgtctggaagacacaaaacaatgctctctacggcgttctgtttgaagaagaagcaaggaagcttgccttcggccaattaccgcctgttgggagggccctggggtttcggtcattgcctttggggtaanagaagttttttggtggt

SEQ ID NO: 4840 - DNA, 1368 bp, Homo sapiens
  misc_feature (1)...(1368): n = a,t,c or g
atccggtcagtggaaacaggacatttggatggagtatttatgcataagcgagttcaaaggttaaagtttctatgtgaaagaaatgataaggtattttttgcatccgtgcgatctggaggaagtagccaagtgtttttcatgaccctcaacagaaattccatgatgaactggtaacagaagagcacttggcacttatcttcatggcgttatttctaatttaaaagaacataactcatgtgggacttatgccagtctagaggcagaatcagaaggcttggttgaacatatcgctttccctttttcctctccctccgcccctcccagtacagtccatctttcaatgttgcagcctggttgagaaggagagaaaaaggtggcaggaatttcccaggagatccccaagaatgctgccttgtctgtggacaaagatggaccatgtgccttcggaattagggatagaaacaaatattgtgtgctcttaacgattaagctgtgttatggtgggttttcaggtttttaccttttttctttacccctttactctgcaagaatggggaaagaatgcatactgcgaaaatgagtcttttaaattctgtctgcctactagttttaagtatatggtatgttgtaaaatttccaatgatgagagacagcacaataaatgtaccttatctccttaggctgaaggccataactacatagtggagtaatttaagaactctcttgccttcaccaacccaaaaggttgctttttgatagcaactggctaatgaatttttaaaaagagaagaaaaatactagttttcccctcttttgggaaatagattttaaatggctaaactactagccttaaaactactagtctaataaaatcaactaccacttttgtgaatctgacaggccacatttttatatggccctttacagaatggagtgtgttgaacaggatactaacgccattgagttgagctggcctagcgatggagggacactctaacacaactttccctcagctattatgcaacagatcagggaaaaagatgggatgacagatggggtcagacagaaagagcttctgggaaacaagcttacatagtcttttttaaaatgcacaaagcctcccagctaagaggtcacttggtttgggcttcattaggactgagactttgttgagttctttctgggacttggagagtggatgatattcaggctctgaacattcccagcgctctcccgagggtgccactttctcaagatgaaaactgtgactgaaaaaattaataataaatgtttctgagctgcctgtgttctcccctgtgtgggtgagagaagggactagactccctaaagcctgcctgccanatacca

SEQ ID NO: 4841 - DNA, 4054 bp, Homo sapiens
  misc_feature (1)...(4054): n = a,t,c or g
gctctctgcagcctggctggtgacgccgagccctcagcccggccttacgcggcggcgctctgcctcgctttcctgcccacgtgtcagcccctgcagcccggccgctgaggccgccagaggacaggccagggtgggccgcccgtccgagggcgcgcgggcgcaaaggaggggcgcccgtgactcacatgacccggtccccgaccagaccgccaagcctcacccacgcggcgctcggggggactcggcctctgagcgccctacagaggccagcccccgaccccgacctccctgggctacccccaacccccctgagggacccccgcggcgcacatacctgagagcccccgggtgcggcctccgggcaaatccggccgcccgtgggcccgccccgacccgccccgacccgccccgaccttcccctccctgcccctcccgtccgttcccctccactctcctccccgcccttcctctcccctcccctcccttccccactggcgcgcgagcgtcgcgccgagcccgcccgcgcctgcgcgcccccgacgccccgccggcgcgcgctgccgccagcgaggcccggggaggccgcggcggaggcggaggcccggcgccctgggcggcgccctgtccccgaagtccgtcctccccgttaggtggcgagcgcccgaggggaggggacagccgggcaagcaggaagctgcggcttaaaagggcaacccgcgcgggacccttcctccctagtcgcggggagtctgagaaagcgcgcctgtttcgcgaccatcacgcacctcccctccgcttgtggccatgtaccgctacctgggcgaagcgctgttgctgtcccgggccgggcccgctgccctgggctcggcgtccgccgactcggccgcgttgctgggctgggcccggggacagcccgccgccgccccgcagccggggctggcattggccgcccggcgccactacagcgaggcggtggccgaccgcgaggacgaccccaacttcttcaagatggtggagggcttcttcgatcgcggcgccagcatcgtggaggacaagctggtggaggacctgaggacccgggagagcgaggagcagaagcgaaaccgggtgcgcggcatcctgcggatcatcaagccctgcaaccatgtgctgagtctctccttccccatccggcgcgacgacggctcctgggaggtcatcgaaggctaccgggcccagcacagccagcaccgcacgccctgcaagggaggtatccgttacagcactgatgtgagtgtagatgaagtaaaagctttggcttctctgatgacatacaagtgtgcagtggttgatgtgccgtttgggggtgctaaagctggtgttaagatcaatcccaagaactatactgataatgaattggaaaagatcacaaggaggttcaccatggagctagcaaaaaagggctttattggtcctggcattgatgtgcctgctccagacatgagcacaggtgagcgggagatgtcctggatcgctgatacctatgccagcaccatagggcactatgatattaatgcacacgcctgtgttactggtaaacccatcagccaagggggaatccatggacgcatctctgctactggccgtggtgtcttccatgggattgaaaatttcatcaatgaagcttcttacatgagcattttaggaatgacaccagggtttgggagataaaacatttggtggtccagggatttggtaatgtgggcctacactctatgagatatttacatcgttttggtgctaaatgtattgctgttggtgagtctgatgggagtatatggaatccagatggtattgacccaaaggaactggaagacttcaaattgcaacatgggtcccattctgggcttccccaaggcaaagcccctatgaaggaagcatcttggaggccgactgtgacatactgatcccagctgccagtgagaagcagttgaccaaatccaacgcacccagagtcaaagccaagatcattgctcaaggtgccaatgggccaacaactccagaagctgacaagatcttcctggagagaaacattatggttattccagatctctacttaaatgctggaggagtgacagtatcttactttgagtggctgaagaatctaaatcatgtcagctatggccgtttgaccttcaaatatgaaagggattctaactaccacttgctcatgtctgttcaagagagtttagaaagaaaatttggaaagcatggtgggaactattcccattgtacccacgggcagagttccaagacaggatatcgggtgcatctgagaaagacatcgtgcncctctgggcttgggcatacacaatggagcgttctgcccagggcaaattatgcggcacagcccatgaagtataacctgggattggacctgagaacaggctgcctatgttaatgccattgagaaagtcttcaaagtgtacaatgaagctggtgtgaccttcacatagatggatcatggctgacttcctcactatcctcctcacatgtaacttctgcagacctatcacaagtttacatgtaaccacagaaatccctttctctcctgactcattaataatggataccattctcaacaagtcaatccaagtcagcccgttaaggagaaagaaattaaggttagcggatcatgtacaagctgagtgtgaaagtagaaatcacctacaccagagagccattttggtattttgcctttaaataaaaagcctcctttatctggcctgtgccagcccttgcctctgtggcttttcccaacacaatcagtgctagtgcctggggaggaacagtcaagagcagtcagttgccttgcttattttttctggatgagtctgggacacccctgtaactttaacacatttaagaagtaggtgtgtggccttttcagaaggtggcatggtcctcaagtgagttcttagtattttatatcagcaaaataattcaattttgcaggttgcaaacaaatataaaacctgtttctgtttatgaatattattcttttagaatagaataagtacatgctgctgtaataaaattgcctttaatcacttaacaagcctaaccttgactcaaacagtgaatgcctatagaaataataaatgaaaaaaactagtatttttatatcataaaacaatgtcatttatagcttatcattcatgtattgtccagcagacattaaaagccctgtggataattaagttatcttcatacctgcaaaatggtggaggctattttcattaaaactgtcagaatttgcttactataattatgatacagtccaaagaatgcagtcactttttatcatgttaactaattgttctcttttgaagatctatggttgactaattaaacaataattcaagtagagtgtcccagaaaaaaaccacttgggctccctgtttggagtctggctggctctgagcattgccaatggcccctactcacctgactttgtatcctctccttttagaggctttgcattctgcacccagcttcactaacagtgggctgaaaacatccttgggttgagtgtttcatttgggagttatttggccagggccttttgaacagtagtgtccccatgaagtgctagataatatatgtgtaagagtcagctttttttttttttttttaactctaacacccttcagaaatttctaactactttgtaactgcatggcttaacctggtgataaaagcagttattaaaagtctacgttttccaaaacttacgtttcttttctgtgtttttacatgtggtagtttctcttttcataagttataatactgcaattggatttctgaaatgtttatagcgaccacctgtataacatttccttccactttattgtgagctgcccagattttattcttgaattgttttttttttttttgttcggtgctttacacgttcagagaaacttcccgagtaacgaactatagaaatgatccctgaaagcatagtctttattctcgaattattttgtattttattaaataatatgaacagcta

SEQ ID NO: 4842 - DNA, 763 bp, Homo sapiens
  misc_feature (1)...(763): n = a,t,c or g
gcacagagggttaagactgcgcgaggagctagagagagcggagacgcggacgcgggccgcacccgccgagccgtgaaaaaagtacatctcctggaagggatgctttttagctgagctctggtggatgagaggagctagccttgaaaaacttgatactgatggacattgtgtgggccagacagggatggttggctatgaccccaaaccagatggcaggaataacaccaagttccaggtggcagtggctgggtctgtgtctggacttgttactcgggcgctgatcagtcccttcgacgtcatcaagatccgtttccagcttcagcatgagccgcctgtctcgcagtgaccccagcgcaaagtaccatggcatcctccaggcctctaggcagattctgcaggaggagggtccgacagctttctggaaagggacacgtcccagctcagattctctccataggctatggagctgtccaattcttgtcatttgaaatgctgacggagctggtccacagaggcagcgtgtacgacgcccgggaattctcagtgcactttgtatgtggtggcctgggctgcctgtatggccaccctcactgtgcaccccgtgggatgtttttgcgcacccgttttgcagctcaggggtgagcccaaggtttattaatacggttgcggcacgccttggggggaccatgttataagggagcgaagggccccagggttttttttaacaaaaggttttggtttcccaactttgattcgncatttt

SEQ ID NO: 4843 - DNA, 655 bp, Homo sapiens
ttttttttttaagataaggaatgtgtgtttagctttaatgtctattaaataggttggaaaaacaggccaagtgtagggacctgactcctgcaaagggcctaccgcagccctctgcactcaagcagcagccccatccagaccaggagtgtgttctgttctcctggcaggcagggctgataggtgtaggatggcgtctgtttcctttgcagtgtgggctggtcagaggagaaacagcaacttcctgctccttctcactgtgtcgttggctcaccatagaccacgtcctgcattccctctgattctctcatggggagagccctggaccttctggtggtgtcccagctgggtgggttcaaggctgctaccccgcttggggcagctggcctgcagggaagggccagacggcacctctcagtggagactgaatcttccttccttcaggaggctgcctccagggaagacctggggtccttcctgcgctcagcgctggctggctgtcctgttcatgcagtggaagacattacagaagaattcatacgagaagaacatgaagcctgtggagagggcagccttcagcaagctgggggacaggcccttgaagaagcccagggcgccttccttttgtagcacctgcttggcacagtccatgaggccc

SEQ ID NO: 4844 - DNA, 726 bp, Homo sapiens
ttttttttttttttttttgaaatcactttttgtacaacttttaatttctaagacatttaaaaagtcacactaaaagtatctcatagaaacaaagactaacaatttgtaaacaaaacaatctgtaaacaaaaatcaattactagtgtgtccaaatgttatttttaaaagttaacattataccagttttttcaagtttaaaaagtcggtgctgcatctatgttcacattaaaaaaaaaaacttgtaagaattctgcctttatgcattaaataacgtgctaccaacaaaactagcacataagagcctgtaaatgatgaaaacctgtgtccctggcagacgaggtcatcactgaggctgcagggagggccatgggcacccagcagatggggaggccgcactgccgctgagagcaggtacacgtgcgcctttaacacatctgagagcaaaacgcgagaggctccgtccatctctactaaccagcaccttagtgcagcaatttaaggagctaacattagtgtgtatgtgtgtacaaatttcatgtaaagcctcatatttagaggtctatttttacagagaatgtacataaagctacgtaaatagtaaatctaagaagtatcttggaaaatcagtaaaaattaatacaaatgttataatctgaaaacttataattgtaaaataatttatttaagtattgcagaaccaattaataagaatctgcaagttttccc

SEQ ID NO: 4845 - DNA, 1049 bp, Homo sapiens
  misc_feature (1)...(1049): n = a,t,c or g
ggtggctcacagaactcagggaaacacttacctttagcagttgtgtagtgaaggatatgatagaggatacagatgatgccccagatgaagaggtgcacggggcaaagtttagaggcgttttgaacacaggagcgtctgtccccatgaagttggggtgcaccatcctcccggcacatggatgtgttcgccaacccagcagctctccatgtcctgtctttcaaggatttttctggaggctttgtcacgcaggcatgatcgagctccagctctgctccccaccccagaggatggggaatggggctgaaagcactaagcttccaaccatagttaggtatttttggtgaccagtccccaaataaggagcccaccaagagtcacctcatgagaacaaaggatgctcctatcatgcagaaaattccaagggatttaggaatccttgtgtcaggaaccaaggtgaaggaccaaacgttagaacaaaagatgtgcaatnnnnnnnnnnnnnnnnnnnnnnnnnnnnnnnnnnnnnnnnnnnnnnnnnnnnnnnnnnnnnnnnnnnnnnnacagctgatttccagaggatggaagaagtcaggaaacttgggacaccgctgctgaggtccttgcagccccacggtccccaggctggtgactggtgggggagtatggagtccagctgaccaccagagcctgcacgcctgctgctacaggggaggaaaggatgacttctacctcctttccacattccaaattccacgtgactaccttttattggcagcaccctgctggcaagggagccttgatgtgtgcttcctgggcttccagcacctcttcatcttcctcatccaggtattttattttaatactattcagatcaaatgaaacttttaccgaaactggagacctccattagggcggaaagagtgggggattgggacctcttcttacgactgctttggacaataggtagcgattctgaccttcgtacagcaattactgtgatgcaataagccgcaactggaagagtagaggctagagggcaggcactttat

SEQ ID NO: 4846 - DNA, 574 bp, Homo sapiens
aactggcttgtttttatagagaagccaaaattgaagtagtccacatgtccttgaaatatctttttaaggacagaattttggtattgggcttcatatcatgaatgtttcggctttcttcttcagatacatgggaacaacacaagtcccacttacaacaattaagaacattctcaggatgactgttgaattggaaaaactgtaagttattttttcttaggatttatttttacttagttggttttttaggtttgttttattattttcttaagtcaggtttattgaggatttaattttccatataacattcaccctttataagtgtatagtttggatggagttttggacaaatgtatagttacataaccaccaccacattcccaatataaagcatttctgatgcctcaaaaaggcccctactgtccctttgtaggcaatcccatcctcccaccatcagcccctgttagctactaatctgatttctgttcctatacttttgccttttccagaatgtcttataaatgaaatcatatagcacatagcctcttgtgtttggctcctttcacaaagcctaatt

SEQ ID NO: 4847 - DNA, 681 bp, Homo sapiens
cattttgaggaacacaaccacaaagtaaagaaagttttcattgatttaagtaaaaaaccaatatttaataacaattttaaaaacatagctccaggccatccacatgctttaactcatgctcaggctcctgatattgatgggttgtctttgtatttttctgatgcccttttatgtgaattcacccgttttggaagaaaacacaattaaggttatctatcacaacaaccactatctccaatgtgtattcattccttttattcattttaagtctcatctacccgatgagataacttttttgaagacaggaattgtatgctgtttaacagtgctttgattcttccacagttcagtcatccttgctaccttgcagacgactggttctaggatatcgcctccacaccataccagaatctgtggatgctcaatcccttacgtataatggtgcagtgtttgcatataaccaacacacatcccccccatatactttatttatttacttacttaggagacagggatcaccctctgccactcaggctgggagagcaggtgtcacaatcacaggctcacaggcaggccgcaacctcctgggggctccaggtggatctggcccacctcaggcctcttgaggtaggctgggggacttacaggggtggcattacccacccacacttgggctaaatt

SEQ ID NO: 4848 - DNA, 1003 bp, Homo sapiens
tcggcggacaagatggcggacatctccctggacgaactcatcaggaagcgcggggcgcggcgaaaggacggcttaatgccagaccgggagttggaggtgtccgatctcgagttgggatccagcaaggccttctcagccagtcaacacgcacagccaccttccagcagagatttgatgcccggcagaagattggcctctcagatgcccggctcaaactgggagtcaaggatgcccgggagaagcttttgcagaaagatgcccgatttcgaatcaaagggaaagtgcaggatgccagagagatgttgaactctcgcaagcagcagaccacgggtgccccagaagccccgccaggttgctgatgcccgggagaagatcagcttgaagaggagttcccctgctgccttcataaacccacccattgggacagtgacccctgctctgaagctcaccaaaaccatccaggttccacagcagaaagccatggcaccacttcatccccatcctgccggaatgagaatcaatgttgtcaataaccaccaggccaaacagaatttatatgacctggatgaagatgatgatggtatagcttccgttcctactaaacagatgaagtttgcagcctcaggcggctttctccaccacatggctgggctaagcagttccaagctttccatgtccaaggccctccctctcaccaaagtggttcagaatgatgcatacacagctcctgctctcccttcctctattcgaacaaaagccttgaccaacatgtcccggacactggtgaacaaggaagaaccccccaaagagctgccagctgctgagcctgttctcagcccattggaaggcaccaagatgactgtggaataatctgcaccatccacttaccatgaatatatgtatacccatatgtgtaacatatgcagaaggaaaggaaggaacattaagagatgaagggtaaaaaagtattacttaaccattaaaaaataaacatttgatattc

SEQ ID NO: 4849 - DNA, 499 bp, Homo sapiens
atcattgaaacatcccagtgtttggccagacattaaggtgtcgtgagagtccctttcatgcctttcttacccaagcaagggtctttgatgggcacgtgtttacagcgctgctgcatagtcttgtaatatattaacagtcacatcaactgaaggtcaatactaagagccacaggttgtacctgtgatggggcgtgtggtttcctgttgtctcacctttaattgtcaacctccagtgttgactctagaaatatgaggaaagcttttcagtttttaaaattgccatttaaatttagtctattaaaaacaaacctagaggtcttggtgcagttgatttcagagtttattaatttagtggtcccaaaagtattacatcttttatattctggaagaaaagaactgtgaacaaattaggaaccccggaacactctggacgttccatggacgcatttccagaaaagtgggcaagagatgagtctttcctcctccgggaagcattttt

SEQ ID NO: 4850 - DNA, 1085 bp, Homo sapiens
cggactctgggtgttttgctaccgtgaccgtttagaaactgttcatacttggtgcgctgtggactcttgtgataattaaccaagagtagctctatttgtccaacctcacacctaaagaagaaagaaaatggcttgtgctgagttttcttttcatgtaccaagtcttgaagagcttgctggagttatgcagaaggggttaaaagataactttgctgatgtccaggtctctgtagttgattgccctgatttgactaaggaaccctttacctttcctgtaaaaggcatctgtgggaaaactagaattgcagaagttggaggtgtgccttacttattgcctcttgtaaaccaaaaaaaagtttatgatctgaataaaattgcaaaagaaatcaagctgcctggagcctttattcttggagcaggagcaggtccatttcagactctcgggttcaattctgagtttatgccagttattcagacagaaagtgaacacaagcctcctgtaaatggaagttactttgcccatgtgaaccctgcagatggagggtgcctactggagaaatacagtgagaaatgtcatgattttcagtgtgcattactggctaatctttttgccagtgaaggccaacctggcaaggtaattgaggtgaaagccaaaagaagaactggaccacttaactttgtgacttgtatgagagagaccctggaaaaacattatggaaataagcctataggaatgggaggtactttcataattcagaagggaaaagtgaagtctcacattatgcctgcagaattttcttcctgccccttgaactctgatgaagaagtgaataaatggttgcatttttatgaaatgaaagctcctttggtttgtctaccagtttttgtctccagagacccagggtttgatttgcgactggagcacactcatttttttagtcgtcatggagaaggtggacactaccatttatgacactactccagatatagtggaatatcttggatacttccttacctgcagagttccctaatcgcattgatcacccaaagagacgcattccattgggcgagattaatcagctgat

SEQ ID NO: 4851 - DNA, 351 bp, Homo sapiens
gccggaggacaagagtgagatggcctcaatcttgcgaagccctcaggctctccagctcactctagccctgatcaagcctgacgcagtcgcccatccactgattctggaggctgttcatcagcagattctaagcaacaagttcctgattgtacgaatgagagaactactgtggagaaaggaagattgccagaggttttaccgagagcatgaagggcgttttttctatcagaggctggtggagttcatggccagcgggccaatccgagcctacatccttgcccacaaggatgccatccagctctggaggacgctcatgggacccaccagagtgttccgagcacgccatgtggc

SEQ ID NO: 4852 - DNA, 550 bp, Homo sapiens
ttattttagattctctgccatgccagcaggtgttagagagagcctgaagtgttacatatggcagaaaataaatgtctctgattactttgctacctttaaaaaaatctatatgtgtttgcaaaacagcctagggggatctaccacctacacagcatgaattattcataagtcataggtgcacatgtatgagcaagttatttttgagaaagaaactgcctataatataataaacctgtcaggtctttgggtattgtttaatttgtgtgttgttgctgttttatctggactgcatcttggggggtactgggctctgcttctggtttttagtttgcctttgaatttactgagctactagaaagacaaaaaaaagctatttttatggtaatagaatacagaatgacttaggtgtaaaagtacacgtgaagaccatcgtagaatatacagctttggagttttcttaagacacagtccttcctactgaaaaggcttgctcacctttggagaggattgtttatattttcagcctgggttcctttatgcagtcccaact

SEQ ID NO: 4853 - DNA, 918 bp, Homo sapiens
ttttttttttttagattatgtatatgaaaactaatttattaaacctctgtacacaaagatgaacatacctgtatagcaagcatatatgaaggatgaagttacaaaaaagtaaaagtattactaaaattgacacatgtaaatcacttacaaaaataccccaaatgggataaagctgctcatccctgatttttctcatttggttgtaggagttgaaacatgaatttaaaatggtagaattttttcttttaaaaagtgatatattaaacttatatacaggataattagcaaaatgtagaaagggaaaacaatgtacaaaagacagataaaaaccatcactctcgacggatagtcacaatccaaaaatagtataaaccttaacaaaccctctctaaaccaggtcatattcacatctccccccaagttttgtcagtgagaataaaatatactgaactagtgagctcagtctttctttaaaataggcttgactttggaacatgaaccttggatagatttttaaacatgggagggacaaacaggaaaaccattctatctatccacttaattagtactaattaacggaacaaagttattaaatagctctcagtgctaagtcaagccattattcagaggcctttttgtttttctgctggtttcggggtgagttctttaacaagcttcttatcctgaggtacattccagtagattctgccatattctcaaattcaaatggcgtgattccagttgcaaatttgctcatgtcaggtatagggctatgaattttagtggccgttgaaggactggtgtctgcaggaaagagcttctggctgcccccattgctgatgtcacagtttggtacgacactgccattatcaagaagggcaccttcagtgtttaccggagccaactctgctttttccc

SEQ ID NO: 4854 - DNA, 701 bp, Homo sapiens
  misc_feature (1)...(701): n = a,t,c or g
tgaaaacaaagagcgggcctgtcatggggggtgggctgccccctccacccataaagcataacatggacattggcacctggggaacaacatctatcagcacaggttcaattttttccctgaaaaccctgcgttctcagcatgggggacaagtgggtctcaaggtcagcagacccagagctccgcgtatgggagcagctacacctaccccccgagctccctgggtggcacggtggttgatgggcagccaggctttcacagcgacaccctcagcaaggcccccgggatgaacagcctggagcagggcatggttggcctgaagattggggacgtcagctcctccgccgtcaagacggtgggctctgtcgtcagcagcgtggcactgactggtgtcctttctggcaacggtgggacaaatgtgaacatgccagtttcaaagccgacctcgtgggctgccattgccagcaagcctgcaaaaccacagcctaaaatgaaaacaaagagcgggcctgtcatggggggtgggctgccccctccacccataaagcataacatggacattggcacctgggataacaaggggcctgtgcccgaaggccccagtcccccagcaggcaccctctccacaggtgccccacagccccagcaggtggctcagctctnccagcacagcccccagctttggctcaaccgcagtatcagag

SEQ ID NO: 4855 - DNA, 522 bp, Homo sapiens
catgtagacaattacttacttctacagccattttgcacaaaagctcagtttttaaatggaaaagcaaaacaggacatgacggaaaagcttgctgatattgttacggaactttatcaaaggaagccgcatgccacagagcagaaagtgttggttgttttatggcatctcttaggaaatatgacaaatagtggctctctgcctggagctggaggaaatatacgaacagccacagctaaattatcaaaagcactctttgcacagatgggtcagaatctgttaaatcaggctgcatctcaaccaccacatatcaaaaagagtttggaggaattactcgatatgacaattttaaatgaattatgaatcttcgataaaatactgtatgatgaacaaaagtgtttacatgatgacaaatggaactttctaaaagttatgttatcagtgcctgcacttcacatccagcaaattaagtcaatggctatttttatttgcagcctatgagtacacatctgtcctatatcaacc

SEQ ID NO: 4856 - DNA, 659 bp, Homo sapiens
cagcttgttgaatactgagaagaggagtgcaaggagaaggtctgtactaacaaagccaaattcctcaagctcttactggactcagttcagagtggtgggccattaaccccaacatggaatttttccatataaatctcaatgaattccctttcatttgaataggcaaacccaaatccatgcaagtgttttaaagcactgtcctgtcttaatcttacatgctgaaagtcttcatggtgatatgcactatattcagtatacgtatgttttcctacttctcttgtaaaactgttgcatgatccaacttcagcaatgaattgtgcctagtggagaacctctatagatcttaaaaaatgaattattctttagcagtgtattactcacatgggtgcaatctttagccccagggaggtcaataatgtcttttaaagccagaagtcacattttaccaatatgcatttatcataattggtgcttaggctgtatattcaagcctgttgtcttaacattttgtataaaaaaggaacaacaggaaattatctgtcatttgagaagtggcttgacaatcatttgagctttgaaagcagtcactgtggtgtaatatgaatgctgtcctagtggtctagtaccaagggcacgtgtctccccttggtataactgat

SEQ ID NO: 4857 - DNA, 920 bp, Homo sapiens
gctgaccaccccgtcatgatcaacagtgttctgcccttggtactgcatgccctaggaattcctgagctgtctgtctcttctgtgtccaccctcaagaagatctgccgagagtgcaagtatgacctgcctccctatgctgccaacattgtggctgtgtcccaggatgtgctgatgaaacagatccacaagacaagccagtgcatgtggcttgatgcaggcgctggccttcctgctgtcagctcttcaagtggaggagatccttaagaacctgcactcgcttatctcaccctatatccagcaactggagaagctggcagaggagatacccaatccctccaacaagctggccattgttcacatcttggggcttctctccaacctcttcaccacactggacatcagtcatcatgaggatgatcatgaaggccctgagcttcggaagctgccagtgccacagggacccaaccccgtggtggtggtgctgcagcaggtcttccagcttatccagaaggtgctgagcaaatggttgaatgatgcccaggttgtggaggcggtgtgcgctatctttgagaagtctgttaagacgctgctggatgactttgcccccatggtgccacagctgtgtgagatgctgggtcggatgtacagcaccatcccccaggcctctggctcttgacctcactcgacagctggtccacatctttgctcatgagcctgcccactttcccccaattgaggccctcttcctgctcgtcacctccgtcacactcactctcttccagcaagggcccagggatcatcctgatattgttgattcatttatggcaactcctgggcacaagcttctgaaagcggaagcagatttgtttcctgtgtgaacgattggatgtcaaagctgtgtttccagtgtgctgtgctgg

SEQ ID NO: 4858 - DNA, 590 bp, Homo sapiens
ttttttttttttttttttcccagcattgactatatttgaaagagctacacttgagaaggtaccatatcttcacatccacactgcatcagagaaccccagaatggggtacctaaaaataaacacccctccccaaaaaacgcactcaggcatgcacacacatccacacgcatcctctcagttcatcagtgcactataactgagcttcaggggtgagagccagagctcagatgctggaagtaaacctttggcaaaaaaaaaaaaaaagaaaagaaaaccagagaccttccaactcctcttcccttccagagagaaggtgatgaagacaggagcagaggtgaggagacacagggccaccacactgcccaatcccagggaccccactcccactgaatagatgtgaatgatggcccttcaagttgtgcaatcacagctgcccacctgtaagctgcagccctgagaggggttcccaggagtagctcctaacagaaaaggaaattcgacttccatgctccaccagttgccctgactattgagggtgttgtggcacattacaacagggtctggcagaggagctggctttaaggtcgacc

SEQ ID NO: 4859 - DNA, 119 bp, Homo sapiens
ccggccccggcttcaacggattcttctcgctcgctgcccggaaagaaccatttgggagagcccatggtgactgcgtgagtggagcccagctgtgtggatgccccagcatggatgactac

SEQ ID NO: 4860 - DNA, 763 bp, Homo sapiens
  misc_feature (1)...(763): n = a,t,c or g
gctcgaccaagatgtgaatatttattcaaagtggaaattaaaaaccccgtaaataacttcaggtaaggtagaattttgccgccaagtgagttttatgaaaaaactttgtgtttgagccaggcatggtggcacgttcctgcagtcccagnnnnnnnnnnnnnnnnnnnnnnnnnnnnnnnnnnnnnnnnnnnnnnnnnnnnnnnnnnnnnnnnnnnnnnnnnnnnnnnnnnnnnnnnnnnnnnnnactatagctcaggaggtacaatccccagtggtcagaatggtaaggctggctcctctcagctcctcctctgcctcatccatggacagttcctttgcttgtgctcctcttggttggctagagtaggcatcacactggggagcgtgggcagctgagaccttggggctccctgccttccgcctctccacagtgtgacaagctggctgctgactgtgcccacgagctgcggcgccatggggtcagctgtgtgtctctgtggccggggattgtgcagacagaactgctgaaggagcatatggcaaaggaggaggtcctgcaggatcctgtgttgaagcaggttggcaaggggagggcgaaggaagcagagaacaggggagtcggcctctgcatcctcaataacaagatcagatactcccactcaccaggtgcttactgtggcaggtgcagggctgagcatgggacacacattatttcctttaatcctgtaaggggagataccagctccattctacagatggcaac

SEQ ID NO: 4861 - DNA, 1397 bp, Homo sapiens
ttttttttttgaaagagaaatgagacttttattagctccaagagcatttttcaatactaaggcaaaaagtaaaaagaaggacaaggaaaaccaaggcacaaagaagggacctaggcgcaccccagaactcaccacggacacacagcagagggcttctcttcatatcaagggtatgggtaaacaagaaaggctgctgtttcactgagacaggacgaaccaccaagtccaaatgagaagacaagcagagacgtagtgtcagaccaggagggttagaacttgctagtgtagagggcaataatccacttgggcacacggaggaaggagggcaggtaggaggccagccagcccaggccggacacgtgtgagagaacagagctcaaagacaaatagtcttggacggggcggccgtccacatcccgaaggccatagcgtcgagcaaggtcacaggatggcagcaccttaccactcaggctcaggatattgggatctgttgccaaagccaccacacatttgccactcaattctgtggtttccgcagatgagaaggctgatttgaactgcttcaacacaggatcctgcaggacctcctcctttgccatatgctccttcagcagttctgtctgcacaatccccggccacagagacacacagctgaccccatggcgccgcagctcgtgggcacagtcagcagccagcttgtcacacgcagctttgcccacaccataggggacattgaacatatactgcaggcttcctggggaggagatgaccacgatgagcccctggccagctggtaccatcagccgtgccccatacactgagcaaaagtagtggcctctgagtccgacgttgttgatatcatcccacatggaggcagtgtttcccagaatgccttattcctggtgttcaggatcgtctggaccccctgcataagcattgttgaccagcacatctagacgcccttgctgttcccgatccacttgctcaaaccaagcttcgcacttcactctcctggcttgaatcgcacaccacaggcacacattggcccccgagggattgtgcctcctgagcaacaacgcgaagggtgtccagatggcggccagtgatgtaaactgtggcgcctgctttgcagagctgcaaggcaatgccacggccaatacccctggaggcaccagtcaccacacacacttggccattcatgggagctgccatgactcacaggcaaaggaggcaggtctgccacctgcgctgccgctgaggtctgcagattgcggggctgcggtggaagtctgggttctcgcccagattgagccggcgacgtggaggcagtgttcaaggattgattctgtagtaggacccggggcgattctgtgctgaggtagaggggcagagtcccc

SEQ ID NO: 4862 - DNA, 1256 bp, Homo sapiens
  misc_feature (1)...(1256): n = a,t,c or g
cacgaggtagaattaggggccttgaaaatatgacaaactctgagggaaacaaagacaatgtggaaagaataacttaattttaattccatctccagagagatttgaggtgtatttaagatgaaaaacaggatactacaaagaaacggaannnnnnnnnnnnnnnnnnnnnnnnnnnnnnnnnnnnnnnnnnnnnnnnnnnnnnnnnnnnnnnnnnnnnnnnnnnnnnnnnnnnnnnnnnnnnnnnnnnnnnnnnnnnnnnnnnnnnnnnnnnnnnnnnnnnnnnnnnnnnnnnnngagttcaaggcttcagtgagcccatgaatggtgccactgcactcccagccccgggggacagagtgagacccctgtctcttaaaaagcaagaaaagaaagagaagactgagaataagaagatctctttgaaaataaaataagactgctaaaagtatttggtatacagtctggaaaataaagttgagggaatctctccagataaagagcaaaaagaaatagatagaaaaatataaagaaagaaaaaagacatagacaatcaatatgtaatgttaggagttcctggaagagagaacagagacagtgtaggtgaagaaataaaaagaaaaagaattgaagaacagagcaagctaagtctccagattgagagggcccaatacaatctacatctagacacaatattgtaaaattttggaatattaaggatagaaggaagatattaaagtggccagggagaaaacaaatgaggtcatcacgattagctcaacacaaaaatggatgagaaatagactgctaacagatttgtcatcagcaacactgaatgccagaagtcaatgggatcaacatcttcagagcttaaggaaaatttttgtacctagaatttcatagtaaggcagactgtcaagaagaacatcaaagtgaagacattttctgtcaggcaaattttcagaaagtctcctttgcacccttactgaggaagtatcttgaggaaattctccagcaaaatgaggatgaaaaccaggaaagaagaagaaataggatccataaaacagtggaccttacttaggatgtctcattctagagtgacagccaaaagggtatctcaccctagagtgacagctatccagcagactaatttcagatgagagcatactgtctcgggctttctgggaagaatgtgcattcagtgccatagatagtatcattgaagagctgggatgcttgagaagattatttagtcaaga

SEQ ID NO: 4863 - DNA, 2284 bp, Homo sapiens
  misc_feature (1)...(2284): n = a,t,c or g
cgagactgaggctgcccgtgccttattcgcacacaaaaacaatgtcacatcaggacttaatccaacccagcagaaaggctttttaaaaatttacttattacttgttcttagcaaattaagacaattacaataaaacatcagctaactgggttcttgtgagaaaactgaggtcagcttggaaaggagttccccgagtggagttcccagcggcccgcggctgacggccagatctgtcctgaggggtcgtgggagcccagcgcctgccttgagggaaatgaacactgaaaacaggatttgggagcagtattggattgacagcagagaagggactgtttgtaagggcagtttctcactgaagctgctaccattttcctttgtaaagaagtcatccacctcctcccagcggtgcccattttcaagacgctgcccgagcctcttaaaacagcttcttgaaagggtttttccacaacgggttctggaatgttctgcttcagctctggaggatgctctaaattagttcaccatgatgaagttagatttgcagtgagctataaactccgtcacagggtcatgctcgccttccgttttgatggtacctgcgatgctgtcattctccaggatggggaggaaaagtttgcacgaagtcagaggtataaggaggagcaatgacgtccagcacctcagtgacaaaatagcgaatgagtgaaatgtcagtgtccagcttctccagacactttcggatgtaactgacaacaggaagtacataacctcgactcagcaggtgaaccatcctgtccagcagtgtcttcttcaactcaagctgctccatcacgtccagctgggagtgctcagtctcaaaaaagcttaacaagcagctgcaggacctgggggtgccaggagctggtggcaggtgctgatctcatcccagcaacgcccaggtggacaggggtatggtcagtctgcagctgaaagtaccttggttctgatacagtccaatccacccacttcagcacacccattgctaccactggaaacctaatacactgataaagtgtgctcaattctgccactagttcagaggcccctttgttctcgttgcaacacaaattgtgaacggtttcgacagcttttgacgttgacttcagctcatctttattgatgctcactcgcttgttcttcttccaggtctcaaccacgcttgctgcgtacgcccaagatgtggatgtatttgtgcttgtggtcctggttgatccgagcccctggtttaaagagtgactgcatgaacaggtccaggaaggctggaacgcggataagttcaaccggaggagggtccatgcttgtgaacatcttgaacaggacggtgatgtcagcagggttcagggctcctttggacagcatggccccgagagcctggcaggccctggggtaggaggcagctgtgcccaaggctagtgtgatctgactggcgtcatgacctttctcctgggcaaagcgctgcacttcctgggcgatcctgcgcacagcggagcccccctgctcctcctgggccagcacggacatcatggcctgggcaaacaggtacgtgtgctccccgtggcacaccatcttggcaaactcagggagatttttttcaaggttttcttctcctccatctaaaattgtagctagagaggtccggagcactctcgagaacacttctagctgctggcatgctgtggacacactggtgatctccccctggtaccctgcgtcagaaataagcttaacggtgaagttcagcatcaaacagtctggatgggcttcagccagtttataaaaaaggtcccgccacgtggtatgtgcaatcatctgtttccagccacgctggggtctctccttcttcagtaaaaatagaatctgctttgcgggggtcaaaatgtttgatcagcaaactcttcaagtgattttccacagtttcctgaacctgcactggctcaacacctgtctgaatgagccactcggccagcaggttcacagtctgggccacagcggtgtagttttcagataagagctggataacattctctggagaccctcctgcctgaaaatacctcttcagagtgttgaagatggagggttccatgatataatcccgggtggaaaatttatgcaggcattcttgctgaacctccgcatcatcctctccttctccagaatcatcctcctgctggccgccgtcagcctcgtcgccccactcggccgcgctcccgtagtagtcctcgtccatgaanggcngncncncacg

SEQ ID NO: 4864 - DNA, 283 bp, Homo sapiens
  misc_feature (1)...(283): n = a,t,c or g
aatgcagacctgtgagggaaactcctgaaaagcataagaagcatcccagagagccatgggttttctagaccagagaatttagagggagattgtggaactgaggcttaggtggtcagatcgtttcccttatcactgtaatatttctgggggaaaaatgctttctgagttgtttaaacaagcatccttacattttttttttaatttaaacagcctgtcttaggcttggggattcccttaatacttacagtagccaggtattatngaatnatggattttggttgat

SEQ ID NO: 4865 - DNA, 746 bp, Homo sapiens
  misc_feature (1)...(746): n = a,t,c or g
aatgcttaaaaatacccccataagctgtctgaatcaaagatttttattgattctcctgccaaacacaactgatttccatctacaattactttttaaggtaagaaacagtaagtcaactgaacaaagagctgggctttgggccctggaacgtgattacacaccgactgagaaatgcaggacctcagggtggggtctagtcaggctggccgcagcagggcacgaacctgcctcagtgggccttctccaagaacgctctgcagcacctgacacactgctggtacaccgtctcaaagtcagagtcattcccataatagggatcttcaataataagttgtttttgtggatcatagctcccaagtagttcaattttagctttgcaggttttaactcgattactttttctattcaaatctctcagattgctttcatccatacatagtatataatcaaatgtggcaaaatcttctttggtaatctgtcttgctttatgggctgtgtgaatgccatgatttcttaggcagctcacagctcttgggtctggggaccggcccacgttccagtcagaaacagcaccgctgtcaatgacccaattctctgagatgttttgatcggttacaagtttcctgaaaactgcttctgcaatgggtgatcgacaaatgttacccagacacacaaacagcacggacttggtagcctgttccgccatcttnccgcgcgcagaggcgccgagacacccagggttccgc

SEQ ID NO: 4866 - DNA, 516 bp, Homo sapiens
ttttgttgttgaaagctttatttgtcctcacttagggtaaatgaaaaatttcaagatttggctacaacttcattctttgaaaagtaatattttacagaaagagagattaggggtactggctctgaagacaaagcttagattcaagctcagctcaccatttataccagtcccctgattttgccgtttccttatgatataaggcactcaggagcacaagccaagcacacagtaagtgttcaggaagtgctgacattatgaagttcaaacagcaccactggtaaacgaagttcagatttcagaggtggagactgtgtacgcagcctcacagctgagtggatgccgtggtgaaatgtttagatcataggcctttgagaaaaattatgagaatgttagaggaatgggcctcccttggcacccagaaataaacgttaaaggaggctatttcatcatataacaacttctggacttctagaaaagtgaaaagagaggactgggtaaggaagatgaaagccctcc

SEQ ID NO: 4867 - DNA, 406 bp, Homo sapiens
  misc_feature (1)...(406): n = a,t,c or g
tttaaattgaatccaaattttattaaggagttcaagttacatacttcaaatttctagaatggaatggaatcattttggaactggaaaaatggcaaaaacactgacatcccttaaaacttcaattttataaagaaaattcttctgcaaatcaactcagaatttcatatccagccaaannnnnnnnnnnnnnnnnnnnnnnnnnnnnnnnnnnnnnnnnnnnnnnnnnnnnnnnnnnnnnnnnnnnnnnnnnnnnnnnnnnnnnnnnnnnnnnnnnnnnnnnnnnnnnnnnnnnnnnnnnnnnntggtacaagccactgcaaaaactcaccaaaaaataaagaccattgacactatgaagaaactgcatcaactaatgtgcaaaataaccagctagcatcatgatgac

SEQ ID NO: 4868 - DNA, 274 bp, Homo sapiens
gagtctcagggtatatatcgccaggggactactctgatgaggctttctaataatactccaggactcacggaagacttgtctgagctatcaaaattctcacattactattactatcatcatcatcatcatcatcatcatcatcatcatcatcatcatctccttcatcatgaaaggaagaagctaccaatgttgctttattctgcaaaaaatacaatagatgcttgttgaaagtatggagtgaaatcttaaatatgtctgttaaaaagagtacaac

SEQ ID NO: 4869 - DNA, 1232 bp, Homo sapiens
  misc_feature (1)...(1232): n = a,t,c or g
cgggcatcagaccctctccctggcccttgttttcctctccaccatggagcctcattttgtaggccagttgtgtgcatgctctagacaccacctcgctggagaagctggaagggctgttgtcttcccaggtctttctcttctcatcaagctcctctcctcatcttttttgtgtgtgagggcaggtcttgactctaggtctcagctgggaaccccaccctttctcctcctccttcctctgagttgaccagcagcaggtctgccgaccaccagcaccatcctctcctcccagcagcctccagaaccatgcccaggtctcctgcctcacatcacaataatctgggacccaggcttgtgccctttcagtgtaaagctgactccatcacatgtgcatccacttcttttcatccattgagatcacactgcctcctttttatacagacacaaatatacatctataagaataatatatacataaggaacccctgaaagatggttttggaactggaatcagttagaggatgaaatcagataaaggaaaagcctattttggagcttcccctgttaggaaggatggctgcacctggccccctggcattcctgacgctctaggagggaagggggaggcagtgctggcctcccttgccctgtttttccctcttccagctgacctgtgacttatactggctcttaccgatgatacttttgggaaaaaatagagcgtgtatgcactgccccgtttgtcccatgggatatcccgggggtgttaagtccggatgggtaccacgggccctgttttatatttggggtctttatgttggtgctgccaggtctctgagctccagaggtggcctcttggacagatctactgctataggaataaaagacactctgtctcgcaaatggccgcttgtcaacaagcccaaagatgcttgtcggaggacggttatggaagcccttaattcttggttgtgggaaaaggtggaatgacaagttattgattgtttttctgtcgctatttctttcatttgtctagtgaatcagaaaggcttagcaaggccacatctgggaagagtggagaaatttgccacttgacgatcacggattagctagcacctttaagccctgcattctccaatgacaanttggttggggtnaatgccattcagtgttgctatgaagaggaatccncccaatgttaaaagatactgtagtttgccaggaattggcgtcat

SEQ ID NO: 4870 - DNA, 228 bp, Homo sapiens
gcccccaagttactgtatttgtctgggctttgtaggacttcactacgttgattgctaggtggcctagtttgtgtaaatataatgtattggtctttctccgtgttctttgggggttttgtttacaaacttctttttgtattgagagaaaaatagccaaagcatctttgacatcttttctgcgacaggcagaaagacctggaacaaagtggggatctttttttttttttt

SEQ ID NO: 4871 - DNA, 766 bp, Homo sapiens
agaacatcaagcagacggaactggtggctgacctccgggaagcatcctgcgcgtggcacgccacttccagtgcacagaccccaaaaactgcagcgtggagctgactccagactatagcatggagagccaccagcgggaccacgagaactacgtggcgtgctcacgcagccaccggcgccgagccaaggccctgctggactttgagcggcacgacgacgacgagctgggcttccgcaagaacgacatcatcacaatcgtgtctcagaaggacgagcactgctgggtgggggagctcaacggcctgcgaggctggtttccagcaaagtttcgtgggaagtcctggatgagcgcagcaaagagtactccatcgcgggggatgactcggtgacggagggggtcacagacctcgtgcgagggaccctctggcccggcccttaaggccctgttcgaacatggactgaagaagccatccctgcttgggggcgcctgccacccctggctgtttatcgaggaggtaagtcagtggctgggccatgacccccaccctgcaccagccctgctgtgccccctagtacccatcttaggtccttcctgccccacagagaggatgggaagagctggcagcgtggtgacaggtgcccagtcggccccaagggctttgaaccagcatcttcctgtccctgcactcacaccgtgtgctgtccccacaggctgcaggccgggaggtcgagagagactttgcctccgtgtattcccgtctggtgct

SEQ ID NO: 4872 - DNA, 1186 bp, Homo sapiens
aattcggcacgtggggactgggggctgtgagtgtgagtgtgtgcaagagattgctctgcatgtttgctgagggctggagctgggcttttcagagatcgggcatccctggtctctcagggccagttggaggttcccaggaggcatgttcttgatgcctgtggtgcctgaatccaattaactgaattctgaagagtgcatggggtaactgtctcagcctttctcctgtctctgcctctgtcctctgctccaaatcataaaatctcagagctagaagcactttcaagatcattccatccagcgcattcaatttgcaagtttaggcgttgagttccagagagggatggtagcttgctgaggtcccagtcaagcacacttgccattgcctcagctttcccctaaacacggtgtctgtggtcagggttggtgaggaggagctttcctgttttgcctctccttcttcccattggctacacccatctctggccctgctgataccgattcccctgacatttcaggctaagccagcaggaaagggctaggacgggtgcctgggagcccacatggagggagttgggcaagatttgattcggagcaggtgtcaagacgtgttggggaaactgaggcccagtggaatagaagccagtagaggaggaatctagaggcctcctagattaaggcctgcctggaatggattgggggtgggtctttggaaaaggaggggacccacctctagcccagtctctcaactgcccctcctttacagtgagtgagatcattggccgagacctgagtggcttccctgcacctcctggagaagagcctcctgcctgaaccacgtgaactgtcatcacctggcaaccccagccccagcctcagccctgccccctttccctccttcctggagtggtggctacagaagcttggggccaaccctggctcctctttccccagcttctgtctgtctcactgtcttccctcccctcccccagctgaggtgtggccctcaggccctggttggctgccttggagggctggggggaaaggagtgtgtggaggagggaggagggtgaagactgaggctaggtgccagaatggactggagtgaaggcgtgtctagagtgtgggctggctgttgtgctggaaagctggggacaggttgatggtaataaactgctcaatgaccagt

SEQ ID NO: 4873 - DNA, 920 bp, Homo sapiens
tgccatctgggctattctggggtagaaggaaggctgggagtggtgggaattttataaatatttattctcttttctttgtttcataggagtcttgtgttatacaaggttagtccttcatggtataatcttactgatgcactgggcctatctttttgttttccagccagttgaatagattagtttttctcagtaacttactatccagcagactggctttcctgagacttgaggttgtggcttatactggaatgagaccactgtacgtgtaggtggttcagatcctgcgtaatggcagcatgaggacttaaaaggtggttttcattttgaagatggctatgtagcttggtaaggtgtatcacagcagtacctctcatgggctttttgggttccagcagtgagggcattggtgagatcaatggtaaactgtgcaagctttctttttatcattaggaaatgtgaaacgttggacaaattttgagttttaacaaggacaaaaagttgaaagaaaaggcacagttaacaaaaaagggtggctagatttatcttgggtgatggaggaaatgagagaggaatgctcttgaaaggtggtctgtggatctgtctgaatagaaagagcacagtaagtatgcattgccggagaaaacgtccttgaagctgcttgtctcatgtgtatgatgtgctttttaaatcatgcccctccgttgcctgcctaatctgtgactccctaaaaactaactgggcccatgtagatggggctgcaaccagagctgaataacatgttaaggctcacacatgcatcagcactgcacactggaatcattgctcttcctggactttgtagaaatcagtctcaagtgcttcaagagtctggctcctgctacttttatctgtcaggtagcacataaggtttgcagggttta

SEQ ID NO: 4874 - DNA, 53 bp, Homo sapiens
atggaaatatataaatgaatagtaacatttgacatttcaagcactatcaaggg

SEQ ID NO: 4875 - DNA, 1354 bp, Homo sapiens
cggagggttcatcttcatccaagacataagtggtagggctagttactttgcagcttgattcaattaaatcattttcaaagtcaagcaggctggaaggcagattatactccaatggagaggtcagtcttttcaaactgtaaaagaccaacacaaaattttgctcccatctcttccagttctcgggtaccaatctgtaaacccttgtattttccctgatcacagccacataaagtactctccatggtataacttctttgtactcctatttccctccaaactacaacacgtgctgtggattctttagatttttccactacgaagctacagctgctcatgcaaaatgctggggcgatatggctcagtatcttaggcaatgtcctgtatcccgtatcctccacaacatcacatgaagttgcattatcattggtatgccacactgtctctttgatgctgcaaccatacataaatacattcttctttcgggaatggccatgataatcacaataaaccaagggtaaacgcttcactgcagccaagtattgcaacagccccttagcatggtaaattgtaggatgtaaatccggacttggactttgccactgcctattcaaatcctctccacttaaagaacagcgatgatttccattgatgacaccatctggatttaacatagggacaattttaaaaaataataaagattcctccgtaagctcctgaagccagtggggttaattgcctcatggagatattcccaacgttccctttcataaccccaacttgcattaagtttcccccaggatgtacccgagcagacaagaaaacgtaagggcgatttctgaaatggcagatatgttcataataattagactctggcattgctgttatagtcaccaaggggcagctgtttccagacagggtttcacataacacatctttccgaaaatagatttgctgaggattgtgtgctgattccaatttttgaagatgcatctgtaaagttgaatacgtatatggatagtgataagcaaagtagcaaacatcatctttatgtggaaaattgacagtaaatgtaattgtatagtaggattttcccttttgcccacctgcagcaactgaacttcttgagaaatgatttttatagtaacaaatgtcagtccccatacgaatccaccatggtctggcatttaatgcttcctgaaccgaatacatgagtggttgcataccataattaaactgactgttggacttttcacagttaatgatgttaaacctgtaagcaacacctggtcggcatttccctgacttcaaagtaaaaccactgatgataatgattgctgtttatgtctgagttcag

SEQ ID NO: 4876 - DNA, 741 bp, Homo sapiens
ttcagggatcgcgattgcaagtcctccgctgaggtgatttggatatccctagaacgttgagggcacgagtcgggtcctgagaccaggtcctcagccagcagagccacgttccttatgagcaccgtgggtttatttcattttcctacaccactgacccgaatatgcccggcgccatggggactccggctttgggagaagctgacgttgttatccccaggaatagctgtcactccggtccagatggcaggcaagaaggactaccctgcactgctttccttggatgagaatgaactcgaagagcagtttgtgaaaggacacggtccagggggccaggcaaccaacaaaaccagcaactgcgtggtgctgaagcacatcccctcaggcatcgttgtaaagtgccatcagacaagatcagttgatcagaacagaaagctagctcggaaaatcctacaagagaaagtagatgttttctacaatggtgaaaacagtcctgttcacaaagaaaaacgagaagcggcgaagaaaaaaacaagaaaggaaaaaaagagcaaaggaaaccctggaaaaaaagaagctacttaaagaactgtgggagtcaagtaaaaaggtccactgagaaaagaattagagattccaactgacagaatctgccagaagctcccagggaataatggtggcgagttccatcaccagcattattatagtgcttcaaaagaaatatttttgatgaacttaaaagac

SEQ ID NO: 4877 - DNA, 1019 bp, Homo sapiens
  misc_feature (1)...(1019): n = a,t,c or g
tttttttttggcttgttttttaaataaaccaaagtcaaaaacaaactgagagtgtgtcctccacagctcttcctactctcctaggcttgcccgngtgccctcccacccagcgcctctgctggaccacggtgcagttcgctccagaaggtgggccagggcgtgggaggtgcgcacacacccctggcatgctgggctgcctgctggagggtgctgctgctccgtggagggcagcaggccagtgaaggggtttcctctgctcgcctaagttacagcacaatactatgtggacgtttcattgaaaattttacttgaaaaaataaaattccagatactcaggtgagacacaaacccactgttcctgctttgagacctgtgaattcttgtgggacagttccactgacagcttgcgttcccgaggtaccagtcctcagtgacctcgggaaccccaaccacttaggtcccaaagccacaagggtgccctttgtcttgctgggaagctggctgagggcctgccagggctggaggaccagctctcccgcacagggttcagggcctctcccagaaaaaagaggttttgaagtgaaaaggcaacgaggggccagagggctccccaggatgggtcttttggaggtagatttgatgcccacaacgcatgcaaggctaagacccccaacttagccaacgaagcccatggcctcagaagggctgcagcttgctcaggccgtgggccaggatgcatgctggacggttctccaaataaaaaagccccaagggtttgtctacactgcttacctgctggggctgtgagtggggagacggcggcctgcctagggctcctggtgccaggctcaggaagagtcattcattgcaaagggccggcaagtgaaccagggccacctctgtccccagcctgtgagaggagcagctagccctgagaagggcaaggatgaatgaggctgaccacgtcacaggagtcctccaagagtgacggggattcagtcatcggccacaatggagac

SEQ ID NO: 4878 - DNA, 438 bp, Homo sapiens
  misc_feature (1)...(438): n = a,t,c or g
tttttttggttataatattatttatttaaaaatatttatcatttattaagtacttcttaggtgacaagaaccataagagctttccatacattgtttcattcaatacttacacaattctaatgttatctccatttttcagataggaaaatgaagttaatcagatgttgagcttagatttgaatcgaggactatttaatgccaaagcttaagattctttaagnnnnnnnnnnnnnnnnnnnnnnnnnnnnnnnnnnnnnacgtngtttaaattttgagtttccaaggaaaaagaaaacatgaactatagaaaagaaaaatgaaataaaacaaatatggaagaaaatgaagacactgagcagaagcggcctagaaatctgcaaagagaaagagaaagtcaaggcagggaggttttgtagggaaagttttaagtgtcttgat

SEQ ID NO: 4879 - DNA, 1523 bp, Homo sapiens
gctccgcaatcatggtgagtgttggtactgaggaggcctagcagggtgaaggccacggtcgcggccttcacgggttcctcggccgtcctgagtcccaaatcccaagctggagccgttcagctcccctccaccgcttagagatttggggggctctggccccgtcccttgcggaccattccgaggggagtccagaggtgtcagtaattaacactgtggatacctcccatgaggacatgattcacgacgcccagatggactactatgggcacccgcctgggcaacctgcttcatcagacaggtccgtcaaaatcttttgatgtgcgcaatgggagggcagatccttattcgccgaccttcaggggtcatggaggggtcctgtgtggcaagtggcctgggctcaccccattgttacgggcaacatcctggcatcgtgctcctatgaccggaaagtcattatctggagagaggaaaacggcacctgggagaagagccacgagcatgcggggacacgactcctcagtgaactcggtgtgctgggccccccatgactacggcctgatcctgggcctgtgggagctcggatggggccatctccctgctgacttacaccggggaaggccaatgggaagtaaagaagatcaacaacgctcacaccattggctgcaatgccgtcagctgggcccctgctgttgtacctggaagcctcatagaccaccccatcggggcagaaacccaattacatcaagaggtttgcatcaggtggctgtgacaacctcatcaagctgtggaaggaggaggaggacggccagtggaaggaggagcagaagctagaagcgcacagtgactgggttcgagatgtggcctgggccccctccatcggcctgcccaccagcaccatcgccagctgctcccaggatggtcgtgtgttcatttggacctgtgatgatgcctcaagcaatacgtggtcccctaaattgttgcacaagttcaacgatgtggtgtggcatgtgagctggtccatcacagccaacatcctggctgtctctggtggagacaataaggtgaccctgtggaaggagtcagttgatgggcagtgggtgtgcatcagtgatgtcaacaagggccagggctccgtatcagcatcagtgacagagggccagcagaacgagcagtgacaagacaggtggggcctggctccccaccccgccagctccaggactgccccttcctgggccaactaaccaaacaactgggaagagcccccaactccaacaggattattttcccaggaggagttacagatgcagccacagattgatcatctgccttaacgtgatcggagatgctttgtaatctactgtccagctgaaagcactcatgttacgaggaagaaactacaagtgatgttcaaatctattttgggtcatttttatgtacctttgggttcaggcattatttggggggttttgtttccaaaggaactaaataaagtcatattgcttataaaaaaaaaaaaaaaaaaa

SEQ ID NO: 4880 - DNA, 577 bp, Homo sapiens
cctggcgagagtttgtgcggcgacatgaaactgcttacccacaatctgctgagctcgcatgtgcggggggtggggtcccgtggcttccccctgcgcctccaggccaccgaggtccgtatctgccctgtggaattcaaccccaacttcgtggcgcgtatgatacctaaagtggagtggtcggcgttcctggaggcggccgataacttgcgtctgatccaggtgccgaaagggcccggttgagggatatgaggagaatgaggagtttctgaggaccatgcaccacctgctgctggaggtggaaagtgatagagggcaccctgcagtgcccggaatctggaccgtatgttccccatcagccgcgggatccccaacatgctgctgagtgaagaggaaactgagagttgattgtgccaggcgccagtttttcttgttatgactgtgtatttttgttgatctataccctgtttccgaattctgccgtgtgtatccccaacccttgacccaatgacaccaaacacagtgtttttgagctcggtattatatatttttttctcattaaaggtttaaaaccaaaaaa

SEQ ID NO: 4881 - DNA, 114 bp, Homo sapiens
gcggcacgaggggattacaggcctggcccagtttgatagtttgttatcatgttatacgtacacttagaataatgatccagccatctcattctaacagcaatgagaacttaggct

SEQ ID NO: 4882 - DNA, 2644 bp, Homo sapiens
cacgcgtccggcaagctcctgaggtttccaacttattgtacataatatccagagttgttttttttaagataaagcattgttcttggttttattatttgtataaaaatttcccatttattttatacctaaatagtagataaggttactacaggattaaagagtttgactctgaattaatggggcatacactttggggtaaggatttctttttattcttatgaaagttacagatcatacttcatactaaagttttgtatttcgtgtttcccacttttaaacctcttttgtttttaccactttaaaatattatacatgtacaaacatctttaatagaatgcggagctgctttcaccagcaaacttgaaggaatgtttaaagacatggaactttctaaagacatcatgattcagttcaaacagtatatgcagaatcagaatgttccgggaaatattgagttaactgtgaatatcctgacaatgggctattggccgacatatgtgcctatggaagttcatttaccaccagagatggtaaaacttcaggagattttcaagacattttacctaggcaaacatagtggcaggaaacttcagtggcagtcaaccctaggacactgtgtgttaaaagcagaatttaaagagggtaaaaaggaactccaggtctctctttttcaaacactggtgctgctaatgtttaatgagggagaggagttcagtttagaagagatcaagcaggcaactggaatagaggatggagagttaaggagaacattgcagtcattagcctgtggcaaagctagagttctggcgaaaaatccaaagggcaaagacattgaagatggtgacaagttcatttgtaatgatgatttcaaacataaacttttcaggataaagatcaatcaaatccagatgaaagaaacggttgaagaacaagcaagcactacagaaagagtatttcaagacagacagtatcaaattgatgctgcaattgttcgaattatgaagatgagaaagacacttagccacaatctccttgtttcagaagtgtacaaccagttgaaatttccagtaaagcctgctgatcttaagaagagaatagaatctttaattgaccgggactacatggaaagagataaagaaaatccaaaccagtacaactatattgcatagaatgttggccttgcagcatttggtgtcatatgcagtagccagtggataaactaacctgttgattcaatattatttgactccttttttactaccgatgaccaaatgaagcagtgtaattaatggaaatagttgagtggactttttctcagtggttaacatgcccattttaaagagtaatacttacctttaagaagaatgttggttggaactctttgcatgttatttagtatgatgtgcagaaaacacttaagaacgtacctggtcttcatgaattcctctttggaactgggaaagagatccctgtggctattaaaaaggggggagggttcttacacaccattaattatgaagcaaaaggtttatttgcttaaaatgtcatttaaagatacttaaactgcatgcaaactttatttactgtacagagttctggatgtatttatcaaatagaaaaaccacccttgacttggttgttcacccgttttgtgatttcccttgaaaagagaaatgaattgtcatagctattgatattttactaggtgatgttctgttacactgaaagggatgttttttaaaaaaaattatttggaaacaagttttcaagtagggggacagttgcttacataatatcttgtatattcacatcctaaaaattttcatttatgagtatgggatgtgtgtatatggcttagccccaagttaactgtgctgattaacaagtacttataaaaatagctaaagtagaaaattaatgatcagttgtactagaggaacatcatagaagagaaaaatccaactctttatattaaaaatgaatacaataagaaaattgcaaaagagaccaaaatgaacgtgttttgtaaattgttacaggagcaaaaactttgcaactagttttcaacatactttagactttaaatgttgtttggacagttttgtcttcaacttggaccaattgtagattgttacaggcttcctaggatttagcattcctattttctctaccaaagttttttttagaagcatcccaactcttctctttgttgataaataagcctttcctgtcatcttcattttaacttgctaaaaccctagatacaaaggtcctccctcatttttcccacagagcccctgtttgggaatttgagattctgtgtcatgctggttttcctttcagaattgcttgaaatcgagttctcttagccactggacacctagttttcaggagaatgtcccaagattgtttatatatacaaaatggcaaaagtactgtttttcgaattgataattcaagcaaaggcttctctttactgtcactgatttttttttgtttttattttgtttccttgtttctatttccttgaagctttgaagggaggagaagcagaaaattttgtttatgctcgttaaaaatcagaactacttaatgcttttctgcacagcatatttcctggctgtcggagcgttagaagattact

SEQ ID NO: 4883 - DNA, 471 bp, Homo sapiens
taaagttaataaatgtaaggcccactaacagccacagagtctaaaaatacttacgaaatccacaaaggattaacaggctgctctgatgcttttggtagagtgagagagaatttggtaatctgttagagattatattgctgagaagctactagggaagactatttgtaaaatagtaaggactatatatatgtctaagcccctatggtagacttaaaaaatactaatttaaatgagttttaggttggttgatttgttggttggttggttttgaagtaacctgtttttcttcctgtcgtgtctttttgcagaatccagactccaaaatgatgcaaatcaacctgactggatttttgaatggaaaaaatgctcgagaatttatgggagaactgtggcccctgctgctaagtgcacaagaaaacatcgcgggaatcccttctgctttcctagaactgaagaaagaagaaataaaac

SEQ ID NO: 4884 - DNA, 683 bp, Homo sapiens
tgaaattatgaaaactttaggccaaagaggtaaaataaaaacagctgttgggagtgaaaaatggctgtaggaatttagttacaagtacttcacaaaaacattttcatcacatttacataatatagcattacaatacaaagctggctgctgtcctgaccaagcaagttctcttatcatctaacaaaaataatttagatacatttctttgcatggaattgtcatatttttccatttttggtacaaaacatagaaaaaaacattggcacattatgtagtgataagtcattttttccccatgtacaagttccaagtattctgcattccaatttgtattggaaaaaagtaattactgattcaattaattcagtctcccgtttgtttataccttttaaaaatgcagcatgaagtacagagaaagaaaaatggaagtttgtttacggagtctaatatttataatacataggaaggatcagctggtaaaagagaaaggaaaatctcgagtctgactttatgtagatcacagggagttgtgaaaagagcagtataaaaatatgcacttgtgctttagaagcttttagcatacaattaatagcttaaaatagtatttactgcctccccatatgcctattttctgatatatttacaccacacaattttaacattgttaaagctaatggcatgat

SEQ ID NO: 4885 - DNA, 674 bp, Homo sapiens
ttttaggattagaccttttatttttatttcttttttttctttttttatttttagctccgactcagattttgaacggatgtttgcatgtataccacagtgctacattaaaaaccagtcatgtggatgtcgagaagggtgctgatcaggactccctgtttgctaacaaattctacagcagaaacaaagtattaaggtttgcagccaggaagcaagtgcatggggaataagcctgcagcttcttccaaatgagacagacgccaaatcttttttctgagtctgttttcttcaattcctaataaaacaaaggtcctttttaagcaatcgaatttcatccaaagccagagtgagctactttgtttgggggaacagtaacagttacctccaccactgactggctgccatctggattgatccggaaagatcccatctgaatggtcttcttggggtccacctgggcaatttcccattctagttcatccaccagagccctgcatgctccacagtggagatcctggctcctccgagcccaggcggttcccagcagggcccccagaagcagggccagccaaccccagcctttcatctttagcgtaatggggtcgctccacctctgctcccaggccgccgccgtggcccaagcgctggaagaccgctggactctcactttgccccag

SEQ ID NO: 4886 - DNA, 515 bp, Homo sapiens
ccgaggcttcagttctgtaccatttaatgcgtgcaaaggacattccatggtgtctgctgggttcagggcaactggctttcccaaggcatacaagaaaagttggcagaaagtcctcccctttaaaattcaagcctgaaggttttgtgtgggggcctactgccccctaatgtcttctggtgatactgcagcacagtccatcaaaatagtttgtggttttgccatctgttactccttatgcccacctggagaggggctagcatctttaggtgggaccacccctggcacaacatggtctctgaggtccagatactctgagggtaggggctggctctctctgcctccctatcccctacaagagggacagggagaggtagaacattgggatctttactcagaggctcagatggacccttgattctcccaggagtcatacattgaaggtaccagagcttccattttataaaagaaagcaagcctgccgtggacctgtcagccccacgatatctgtcggcatg

SEQ ID NO: 4887 - DNA, 1348 bp, Homo sapiens
ggtgtgtggacgccgctttgttgcctgagatgaagttggagcccttgtttttgacattggatcctatactgtgagagctggttatgctggtgaggactgccccaaggtggattttcctacagctattggtatggtggtagaaagagatgacggaagcacattaatggaaatagatggcgataaaggcaaacaaggcggtcccacctactacatagatactaatgctctgcgtgttccgagggagaatatggaggccatttcacctctaaaaaatgggatggttgaagactgggatagtttccaagctattttggatcatacctacaaaatgcatgtcaaatcagaagccagtctccatcctgttctcatgtcagaggcaccgtggaatactagagcaaagagagagaaactgacagagttaatgtttgaacactacaacatccctgccttcttcctttgcaaaactgcagttttgacagcatttgctaatggtcgttctactgggctgattttggacagtggagccactcataccactgcaattccagtccacgatggctatgtccttcaacaaggcattgtgaaatcccctcttgctggagactttattactatgcagtgcagagaactcttccaagaaatgaatattgaattggttcctccatatatgattgcatcaaaagaagctgttcgtgaaggatctccagcaaactggaaaaggaaaagagaagttgcctcaggttacgaggtcttggcacaattatatgtgtaattgtgttatccaggattttcaagcttcggtacttcaagtgtcagattcaacttatgatgaacaagtggctgcacagatgccaactgttcattatgaattccccaatggctacaattgtgattttggtgcagagcggctaaagattccagaaggattatttgacccttccaatgtaaaggggttatcaggaaacacaatgttaggagtcagtcatgttgtcaccacaagtgttgggatgtgtgatattgatatcagaccaggtctctatggcagtgtaatagtggcaggaggaaacacactaatacagagttttactgacaggttgaatagagagctgtctcagaaaactcctccaagtatgcggttgaaattgattgcaaataatacaacagtggaacggaggtttagctcatggattggcggctccattctagcctctttgggtacctttcaacagatgtgggatttccaagcaagaatatgacgaaggagggaagcagtgtgtagaaagaaaatgcccttgagaaagagttcccaagcttctaccttccttttgtcaccttacgtttcatagct

SEQ ID NO: 4888 - DNA, 2012 bp, Homo sapiens
tttttgtgaagctgaaagtatcactggttatttcacatttaaaaaaatcatcggcagaaactaggtagctgtgaaaatagaatagtccactggtagagtttcaattgtgcaaacagacgtttggtccatcatttttcttctctgaacatttcttcatctgcaaatgggggagtgccctgtgcaggtgacaacagggtggtgaagggccgcccttaaacctgctgcagcccttacctttcacatctgaacaggcagactcaaacttcattggggtggccacaagacttggaagctcaaaatttgaaacatcaaaattaaacacagacccaatttctttgcatttttagtcctgtattctatgtttgacaaaatcactgtaaaatgaagcagcagtaagaaaagaagcagattcagaggactaaaagcaggaacagattgggaaaaaaggctggaaatccattcgtttatttactgagcccggccccatgtccaaccggaactaggattaactaggttaagagttggccaaggacgggaaggcaagtaataaaaatttaaaagctgaaattggtacagtgttatgaagaagtgtttatttagtatttatagtaccagattacagtcacttgttgatttagatatgaattttcatatgttagaagactcagggaaatacacaggatcccaaggagtgagactgagattctgggtcttattagctgtactttgggtaatttacttaaccctctctcagcttcagtttcctcaaatctaaattagggcttaactaatcattatgtcctttgtaagactggaaatgtggattagcagttagacagtatgtatgtacccagttttgtagatatgctgggacatagtaggtgttcaataaattatacatatacctgaataaacaaactatacataaatattttataaatttatacatataatcgaacatcatttaggtaaactctttaatgaaagacatttattgtcagattataaaatcagtgttgatgataagccctcctacccacaaaacaaaaatcgtatgtatgaaattccctttcccgtaagttatgtgcctgtcagccatcccacttcagtccatctttggatgctgaggctctggttgccagtccttatctctacacctgtccctggtctagaggagaaacgaaggtgctctgaggcccctgtaacagagacccttgtcatccatatttgcaataaagacatcatggaggctgtgcaaaagtatccttctccccaacttctgcaggcaccatttccatctcactacccagaggtacatcagagagcaggagccaggcaggtgacaaagatgtggaaggcttctaagtggttggctttgccgtctcagaagtgcgaagaaatgaaaatccatcaaaacagaatgccattccatgtttcaggcttttacctcacctcaaatcaaatgtctgttctttatttattggtcccataagtagacacgcacttggacttctggttttagaacattctattgttatcctttctccttttaataaacacacactagtttcggaggaatctccctaataatcctggcctgacatgctgcagaacttcaatttcataattttactaacaacagaggaatttcatcttattattaccaactaccacattaaaggatctgaaacagtaattcatgcataattctatttaataatggttttcaaagtactttgctgtttgaaaatgcttcccagatgattctgatcggagagttgggaaccactgcccctagactgtaaccactcaattgaactttactcagtgctgcttccctgccccacttcaagtaaacaatgcttaactttttcgtttctaaaacaactgagattactttctcccccttagtttctacaatgattgttgaaaatttgtgggaaaagtttatccttacaaatgaaaacatgaaatctgaagtggataaactaacttttaagaaatacatatcc

SEQ ID NO: 4889 - DNA, 1309 bp, Homo sapiens
  misc_feature (1)...(1309): n = a,t,c or g
gggcagcggcagcggcggcgggacgcggaggctcccccgggattcggcctcagcagcgaggcggcggcggcggctgcggaggcgcaggcagcaactgaggcagcggcaggctcaggtgcagccgctgctcaaagaaaatgaacggcaccctggaccacccagaccaaccagatcttgatgctatcaagatgtttgtgggccaggttccaaggacctggtctgaaaaggacttgcgggaactcttcgaacagtatggtgctgtgtatgaaatcaacgtcctaagggataggagccaaaacccgcctcagagcaaagggtgctgttttgttacattttacacccgtaaagctgcattagaagctcagaatgctcttcacaacatgaaagtcctcccagggatgcatcaccctatacagatgaaacctgctgacagtgagaagaacaatgcagtggaagacaggaagctgtttattggtatgatttccaagaagtgcactgaaaatgacatccgagtcatgttctcttcgtttggacagattgaagaatgccggatattgcggggacctgatggcctgagccgaggttgtgcatttgtgacttttacaacaagagccatggcacagacggctatcaaggcaatgcaccaagcacagaccatggagggttgctcatcacccatggtggtaaaatttgctgatacacagaaggacaaagaacagaagagaatgggcccagcagctccagcagcagatgcagcaaatcagcgcagcatctgtgtggggaaaccttgctggtctaaatactcttggaccccagtatttagcactccttcagcagactgcctcctctgggaacctcaacaccctgagcagcctccacccaatgggagggttgaatgcaatgcagttacagaatttggctgcactagctgctgcagctagtgcagctcagaacacaccaagtggtaccaatgctctcactacatccagcagtcccctcagcgtgctcactagttcagggtcctcacctagctctagcagcagtaattctgtcaaccccatagcctcacttggagccctgcagacattagctggagcaacggctggcctcaatgttggctctttggcaggaatggctgctttaaatggtggcctggggcagcagtggcctttccaatgggcaccgggagcaccatgggaggcccttcactcaggcctaattcgggtattccaggcaatatgcttgcttgctggcggttcccccacttntgttacaaccaggatttttctggacacaggcaggagttttt

SEQ ID NO: 4890 - DNA, 764 bp, Homo sapiens
  misc_feature (1)...(764): n = a,t,c or g
tttttttttttgggaagaagccttggctttattcgctctgtggggacactgttccgttcagaggcccctcccagccatggggtgggggacagtggtgggcgtgggaatcccagcgagcatcctggagggtgcgtcgtctccatgtattttgctcttccccatcttttccatgggggtccccctgccagggtcaagcactaatatgtggtgaaggcagcaaacagcgtcggcgtcccctttaggggtggggagagggctgttaacaccaagaaccccctcccccgcccacgacatccctgaaaagggagactaaaataaaccccggggcccttttctacgtagggctccacttaaatatggaatggtggtaggcagagaggcggtggcccagcaatccttaagtccagattaccagcttgtggggaggcttccagggggccaggagcaggctgggcagttccagccacagacacgtgggtggaggacggaaatatctccaagggggcacagtatcagaggagcaggatggaaggggcttttctgcctgctacgggatcctttttaaagaaatgggtgtgaagccagggcacgntnnnnnnnnnnnnnnnnnnnnnnnnnnnnnnttacaggcatgagccactgcgccagctgagatatttctttatagcaatgcaagagcagcttaatgcagactgttaaacaaagagacagcaggttttgattgttttgaaaattctcagtctatacagaaagcaaatgatgcc

SEQ ID NO: 4891 - DNA, 349 bp, Homo sapiens
gacactactcccttaggcaggaggacagtgggtgtctggggaataaaagccaagagctccaaacagaggattttggatacaaagggcagccaccagggaaatagctttgtgagagggacagactatctgattcccatttgtacaaacatgtccaaagcaaaaggcacagcatttctaaagtggatgcagaaattagtatacaatggcagttctggccagtgcagcccagcatttttctgttgtgcatggaaagaacacagtgaaaaggcaggcagggcatccggtgcaaagtgcaacagacatagacacacaaatccagttttcctgatgagagagggagctatctctt

SEQ ID NO: 4892 - DNA, 1396 bp, Homo sapiens
cagcatgaaggcactcctggccctgccgctgctgctgcttctctccacgcccccgtgtgccccccaggtctccgggatccgaggagatgctctggagaggttttgccttcagcaacccctggactgtgacgacatctatgcccagggctaccagtcagacggcgtgtacctcatctacccctcgggccccagtgtgcctgtgcccgtcttctgtgacatgaccaccgagggcgggaagtggacggttttccagaagagattcaatggctcagtaagtttcttccgcggctggaatgactacaagctgggcttcggccgtgctgatggagagtactggctggggctgcagaacatgcacctcctgacactgaagcagaagtatgagctgcgagtggacttggaggactttgagaacaacacggcctatgccaagtacgctgacttctccatctccccgaacgcggtcagcgcagaggaggatggctacaccctctttgtggcaggctttgaggatggcggggcaggtgactccctgtcctaccacagtggccagaagttctctaccttcgaccgggaccaggacctctttgtgcagaactgcgcagctctctcctcaggagccttctggttccgcagctgccactttgccaacctcaatggcttctacctaggtggctcccacctctcttatgccaatggcatcaactgggcccagtggaagggcttctactactccctcaaacgcactgagatgaaaatccgccgggcctgaagggctggccccctcaggcacctttcctcccctgggacacccatggttctccatgagtgctccctctgctgcccctgatgcatgcttctgctgattcccgagcaccaactccttacaagggggccttgtggctctcagccatgccacatccctgtcacacacccagggcatccattcctaagccagacccggctcccctacacctgaagttacactgccagcagttccccaggcctcttccgagaaggcacatggttctagcctggacctggctgggctccatgagaatgagttgcctccaacctgtcccaacagctgacagccaggagccactctcccagctgcaggcctttgtggtccatcttgtcctgcttcctcactgtggacccctgtctgggccaccctagtgtgctaagctgagcagtgcagtgtgaacagggcccatggtgtattctaggccacagcccagcactcctctgggctgctctggactagagtagaaatgcaggggaaactgctgtggatttgagaggcaaagttggctcagctgtgtgcccagttcctcctgtgggcactttagcaggctccgagctttcctggcataggtcaatcaggtcccaggat

SEQ ID NO: 4893 - DNA, 3180 bp, Homo sapiens
  misc_feature (1)...(3180): n = a,t,c or g
gaattccgcttctacagctgctgctgcggcggctatggcggcggcacgggcggtggactgaggatagagagccacagcacgaggagctgccaggccctggacagccagtgcggccagatagaaaacggcgagagtgggcgagaacgtccactgcgggccggcgaaagctggttccttgtggagaagcactggtataagcagtgggaggcatactgcagggaggggaccaggactccagcaccttccctggctgcatcaacaatccacactctttcaagatgagataaactggccctcaaggagggactggtggaaggcgaggattatgtgctgctcccaacaggttgcttggcattacctggtcagctggtatggtctagagcatggccagccacccattgaacgcaaggtcatagagctgcccaacatccagaaggtcgaagtgtacccagtagaactgctgcttgtccggcacaatgatttgggcaaatctcacactgttcagttcagccataccgattctattggcctagtattgcgcacagctcgggagcggtttctggtggagccccaggaagacactcggctttgggccaagaactcagaaggctctttggataggttgtatgacacacacatcacggttctcgatgcggcccttgagactgggcagttgatcatcatggagacccgcaagaaagatggcacttgggcccagcgcacagctgcatgtcatgaacaacaacatgtcggaagaggatgaggacttcaagggtcagccagggcntctgtggcctcaccaatctgggcaacacgtgcttcatgaactcggccctgcagtgcctcagcaatgtgccacagctcaccgagtacttcctcaacaactgctacctggaggagctcaacttccgcaacccactgggcatgaagggtgagatcgcagaggccctatgccagacctggtgaagcaggcgtggtctggccaccaccgctccattgtgccacatgtgttcaagaacaaggttggccattttgcatcccaatttctgggctaccagcagcatgactctcaggagctgctgtcattcctcctggacgggctgcatgaggaccttaatcgggtgaagaagaaggagtatgtggagctgtgcgatgctgctgggcgaccggatcaggaggtggcacaggaggcatggcaaaaccacaaacggcggaacgattctgtgatcgtggacactttccacggcctcttcaagtccacgctggtgtgccccgattgtggcaatgtatctgtgaccttcgaccccttctgctacctcagtgttccactgcctatcagccacaagagggtcttggaggtcttctttatccccatggatccgcgccgcaagccagagcagcaccggctcgtggtccccaagaaaggcaagatctcggatctatgtgtggctctgtccaaacacacgggcatctcgccagagaggatgatggtggctgatgtcttcagtcaccgcttctataagctctatcagctaggaggagcctctgaggcagcatcttggaccgtgatgatatcttcgtctatgaggtgtcaggtcgcattgaggccattgagggctcaagagaggacatcgtggttcctgtctacctgcgggagcgcacccctgcccgtgactacaacaactcctactacggcctgatgctttttggacaccccctcctggtatcagtgccccgggaccgcttcacctgggagggcctgtataacgtcctgatgtaccggctctcacgctacgtgaccaaacccaactcagatgatgaggacgatggggatgagaaagaagatgacgaggaggataaagatgacgtccctgggccctcaactgggggcagcctccgagaccctgagcggggaccaggctgggcccagctctgggagtcacgaacaggtgcccgttcctcctggaanaattgccttggcacatctcagtggcccccaaggcgacgacgcaagcagctgttcaccctgcagacggtgaactccaatgggaccagcgaccgcacaacctcccctgaagaagtccatgcccagcccgtacattgctatcgactgggagccagagatgaagaagcgttactatgacgaggtagaggctgagggctacgtgaagcatgccttccgtcgggtacgtgatgaagaaggctcccgtgcggctgcaggagtgcattgagctcttcaccactgtggagaccctggagaaggaaaacccctggtactgcccttcctgcaagcagcaccagctggcaaccaagaagctggacctgtggatgcctgccggagattctcatcatccacctgaaacgcttttcctacaccaagttctcccgagagaagctggacaccctcgtggagtttcctatccgggacctggacttctctgagtttgtcatccagccacagaatgagtcgaatccggagctgtacaaatatgacctcatcgcggtttccaaccattatgggggcatgcgtgatggacactacacaacatttgccctgcaacaaggacagcggccagtggcactactttgatgacaacagcgtctcccctgtcaatgagaatcagatcgagtccaaggcagcctatgtccttcttctaccaacgccaggacgtggcgcgacgcctgctgtccccggccggctcatctggcgccccagcctcccctgcctgcagctccccacccagctctgagttcatggatgttaattgagagccctgggtcctgccacagaaaaaaaaaaaaaaaagccctctctgcaatctcgcttctcgtgtccgccccgcttctcttattcgtgttaggtgcccccgccaggcattgcaggcttagtcgtggctactgttctcctgtgccgctgcatcgctctctcccgggaaagaacaggtcgtgtctcctcctagcagtgcgcgccccgcctgtgtttgcccttccagcagtgaccctcccttctagtctttatttatggtcgtgcccttccctctcctcagcccagagtgttctgcgtgggtggtgatgggggttcacctgaacacagagtgtattttcttattgaggccctgtaccttctgctgtgtgtgtgtatatataaagcaccagtctgctccccaaaaaaaaaaaaaa

SEQ ID NO: 4894 - DNA, 568 bp, Homo sapiens
ctcggttgatgtttctgcagaagtttcccccttggtcggtggtggaggtggtaaccgtgatagtagcagctccggcggcacgaacattgactacgagggatggcggcggctgcagcaggaactgcagcatcccagaggtttttccagagcttctcggatgccctaatcgacgaggacccccaggcggcgttagaggagctgactaaggctttggaacagaaaccagatgatgcacagtattattgtcaaagagcttattgtcacattcttcttgggaattactgtgttgctgttgctgatgcaaagaagtctctagaactcaatccaaataattccactgctatgctgagaaaaggaatatgtgaataccatgaaaaaaactatgctgctgccctagaaacttttacagaaggacaaaaattagatagtgcagatgctaatttcagtgtctggattaaaaggtgtcaagaagctcagaatggctcagaatctgaggtgtggactcatcagtcaaaaatcaagtatgactggtatcaaacagaatctcaagtagtcattacacttatga

SEQ ID NO: 4895 - DNA, 501 bp, Homo sapiens
ttaccccatggtgcagcagtggcgggtccggagcaacctctaccgtgtgaagctcagcaccatcaccctcgcagcaggcttcactaatgttctcaagatcctgaccaaggagagcagtcgggaggagctgctgtccttcatccagcactatggctcccactacatcgcagaggccctctatggctcagagctcacctgcatcatccactttcccagcaagaaggtccagcagcagctgtggctccagtatcagaaagagaccacagagctgggcagcaagaaggagctcaagtccatgcccttcatcaccttacctcttcaggtttggttgacagcccagatgctgttcagatggaccagctcattttcaggtgtggagattcgctgtgaggagaaggggcgctgtccatctacctgtcacctttgccgccggccaggcaaggagcagctgagccccacaccagtgctgctggaaatcaaccgtgtggtgccactttatac

SEQ ID NO: 4896 - DNA, 1009 bp, Homo sapiens
ggtttagtcccgcccccctctcctcgctgcttaggctccgcggcctccaagctgtagctatgacggcgcgcgggactccgagccgcttcttggccagcgttctccacaacggactgggtcgctatgtgcagcagctgcagcgtctgagcttcagcgtcagccgcgacggcgcctcgtctcgcggcgccagggagttcgtggagcgggaggtgatcgacttcgcccgacggaatccaggggtcgtaatatatgtaaactcgcgtccgtgctgcgtgcccagagtagtggccgaataccttaacggggctgtgcgcgaggagagcatccactgcaagtcggtcgaggagatctcgacgctggtgcagaagctgggcccgaccagtcgggctttggacgtgatccgcatccgcaagcccttccacaccgacaaccctagcatccagggccagtggcaccccttcaccaacaagccgaccacgttccgcgggctacgcccccgagaggttcaggatcctgccccagcccaggtgcaagcacagtgaagagttgccccaccaactgcagccccaggctttggactgttactccggtaaaggtggttcttcccctttgggattccaagcccaggcaaatggaacccatcaatgggcaagttgacagaggttctgcttgggataatgaagagctgcctgtttctttccagtgcctgcttctgggggcagtgaccttgtgaaccactcatttttatgcaagtggcatccctaaaacctgagatgaggaagacttcaagggttttacaggacccttgttttttaaatccaaattgataataatgatctcaaaacacagtgagaggtctgaaggctggcttctgaagaatccctgatgtcttattggaacaaccactgagctacggagagctctgctgtgatgggctaggcactttatatctgtgtgaatacagatttataaaacaggttaataaacttatccaaggtcacatttcaaa

SEQ ID NO: 4897 - DNA, 574 bp, Homo sapiens
ctggcgcgcagtctccgcgtcacaggaacttcagcacccacagggcggacagcgctcccctctacctggagacttgactcccgcgcgccccaaccctgcttatcccttgaccgtcgagtgtcagagatcctgcagccgcccagtcccggcccctctcccgccccacacccaccctcctggctcttcctgtttttactcctccttttcattcataacaaaagctacagctccagggagcccagcgccgggctgtgacccaagccgagcgtggaagaatggggttcctcgggaccggcacttggattctggtgttagtgctcccgattcaagctttccccaaacctgggaggaagccaagacaaatctctacataatagagaattaagtgcagaaagacctttgaatgaacagattgctgaagcagaagaagacaagattaaaaaaacatatcctccagaaaacaagccaggtcagagcaactattcttttgttgataacttgaacctgctaaagggcatttaacaggaaaagggaaaaatttggaggaaagaaagacatttttttaggaggttcc

SEQ ID NO: 4898 - DNA, 720 bp, Homo sapiens
tttttttttttttaactaaaataattattttagtcaaagagtaacaacagaggttactgttgggtgtttaaagttaggaagagagtagttcagacacttagagaaacatttttgttaaaaaaaaaaaaaagagagtgcactcataaaaccatcacatggtcttagcctcataataattctctttttggagacccggaattcagtgtgggctctgccagaagctcagagatccagttaaaaggcagactaaatttagaactacttatataaataaagtcagtcttctaatataatcctatgatagatttctataattttatgtttgatttggcattcgtttttaatctcctcctactagtgagaggtgaaaccagctggacttcctgggtcgagtggggacctggagaacttttctgtcttacaagaggattgtaaaatggaccaatcagcactctgtagctaggactgtaaaacgcaccaatcagcgctctgtagctagcaaggggattgtaaaatgcaccaatcagcactctgtaaaaccacagcaatcagcgctctgtagctagcaagaggattgtaaaatgcaccaatcaccactctgtaaaacacaccaatcagcaggatcctaaaagtagccagtcgcagcgaggattgaaaaaagggcactctgataggacagaaactgaacatggaaggggacaaataagggaagataagctg

SEQ ID NO: 4899 - DNA, 1163 bp, Homo sapiens
tttttttttttttttgaacagtagcaaggtttattatgaagagcaaaaggacaaagcttccacagcggcaggcgacctgaacaggttgctgctgctggctggggtggccagattttattcccttatttgtcccctctcatgttccgtttttgccctatcagagtgccctttttttcaatcctccctgtgattgtctacttttagaatcctgctgattggtgcattttacagagtgctgattggtccattttacagagtgctgattggtgcattttacagagtgctgattggtgcattttacaaactttagcctagctacagagcgctgattgggtgcattttacaatcctcttgtaagacagaaaagttctccaagtccccactcgacccaggaagtccagctggcttcacctctcactaatacacaaattacatattatgttatttttacagtttgaaacaaatatatagaaaaatatgtatgtaattaatttacactgaatgatacattttcaaagcattctctggtttgggaacattaaccattaacatttcaagaggaccttgcgccactgtatgtttccagggctgtgtttgtggtgggggctgagttgcagggacctgaagttcattaaccttttcctccaggaaagctgctcgaccagctttggatcacaaggaaggaatgatttttatctctatttctaccttactgcctggccctttgctctctgttgagaaaacttggcttggatctaatctagtttagataactgagatgtggcatacatttttgccttgctttatgcagtgtttatgacctcatttgtcttcttagagagtacataaatatctctctttataagtaaactcaatgtctgaaaagtcactaataggaagtgttaagaacagggggaaattgttagtaaatccagcaaatcctatacccatttacctggatcctttttatgtcactgagcctaataaaaagcccagctaaaaagagcagccaaaaaagcagatggctcctccaaagctatgagactttgagaaaatgtgaatttatttcagctcccctaagggaactgctggtggaaatgacatcttgtaatagacacgctctgcaaggtgctttagtacttggcatgccttgaaaacagaac

SEQ ID NO: 4900 - DNA, 592 bp, Homo sapiens
ttttttttttttttgaatgagaaaaagtcttttatttgtcttgaacaccgcactggggcagagcagggtgagctggaggcagctgaggagggtgggggctctgtgagcacacttcccctcagtacgtgaggctgtcctgcacattgttctccaggccctcgatgacctcgatgccattgtggctaaggtacagctcccgcaggttcaccaggttctgcagaccctcgatcttggtcagccggttgctctgcatactgaggactgtcaggttggtgagcgcatccaggttctgaagtttagtaattttgtttttccccaaaaacaaactctccaggttggttaaggtgtcgatattttcgattgcccggatgcggttagatcccagctctagcatctgtagttgatgtaagttgcttaagttctcaattttactgattttattgttgaccaagaagagttttttcagtcgtgtcaacttgtcaaccccttcgatgtttctcagcagattaaaagaaatatctagaatctccagctctgttagcgcctccagattctcaatcttcttgatctggttgtcgtaaagatccagctc

SEQ ID NO: 4901 - DNA, 805 bp, Homo sapiens
tttttttttttttttttcaataaactcttttattctagtccacagatttttccattacaataataatgaaaatagcactagtaatttgtaacactgaggcccaaagggaaacccctcctcaaattataaggtaaatgacacaaagttgaacatagggtcagtgttgggcaaaaagcatttaaaatatagataacggggtcaagattttgtgtgtgtgcaaacactggggttttgtttttcaggatgacaccattttagaaagtgcatgattttgaaaactatatgtgtaattgtgacaaaactaaactgtagagaaaagacaaaatcaagcaaaaacaaaaaccaagaaaccaaaaggaagcaaatcaaatacaaggggcggatatgcaaacctccggtcctttggccctggaatggcaagtgagtgggcttcatagaaattctctgtagaaaggaatgtgtgggccagtgtggccatggccctggcctgacatcgctgagtctccaagtcttgtctcctcacagaggaaaagaagttgcttgtccgacacatctgctgggggtctgcccgagatggggccttcgttcccaatccctttgagaacagtctcaaatcctgaaaaggcaaggcatcctgcggcggcccagggcggcggcaggagatggggtcagtgtctgccccagctctgccggagctgtctgagtggttcaccgggagtgggtgggcctcggtgttgaacaccccagtcttccagggagagcaagtcatcttcagagaacagaagatagagatactttagtgtct

SEQ ID NO: 4902 - DNA, 1364 bp, Homo sapiens
  misc_feature (1)...(1364): n = a,t,c or g
aatttggccatctgtgtgtgtttctttatagatacatgggctaaacaatactatttcacagtttatgcttttttaaagtgcttttacatccatggtcccacttctaatagcctttttaaggacaggtagagtacatggagggttagtgaaaaggtcatttatccagaagttacctctctggcaaagcaaaaaaatcaggaattacgtcttaaaggcctttcagctgccagaggagatgtcacaaagtttcttgcaacttacttatgggagagatcttcaagaatatcactcttagactctgaactgaaatttgcatacgcttccaacatgttttattagctggctttgaagctcacaaaagaatgggcaaagaaagaggctgctagatttgaagggcagggcatactgaaagaagaaaaaggccaactgaaaactagatagtgagatgagaagaataaaacttcaagacatagcaaatctgggactgtctacttaccaaaggatactctagttgacccagaaaatgtgtgtacaacagtatggcccgtagactacttcctataatggtgaccctgagtttttttaaaagaagaaattaaatccagaacgctttataaaagggtaggaagaagacaatagatgttagaatttcatccaaaatgtttgagggagaggtgagtgacccaggttttaaccaacagcaaaagaaatgggcaattcataattttagattaagtgaaaagtttagaaaaaatttaagtatttttgttattctacaaatgcatttttaaagtatttttataatttctataatcaaatagctttggcatgcatgtcagcttacctaaatgaagatgtgtttaatgaaatgcctcttaccagctttctttatgcagagtaagtgtttgaacagtcctgtttcagtagctgtgctcttctgctttcagtgagttctgtttcattttgcatttctctgcactgggcactaagctttgtttttgaaaagagagtttgcggggaagaagatgagagtgtcttcatctggcacacagaaagagaactaatatctgttaagtgcttactacatgctgggcttttgatgtatgttatctcatgtaacctcgccttatcgcatatgaaagatcctctccagaaagcttatgaaagttaccccacgtcacagcaaggaagagtccaactctggtgggctgactcccagcaccactccttccttttccccacagcacacctgggcccacactgtgcctccttagggctctgaaatgctgggaacagagtggntgtgaggagggtngtcattctcaggccattttaagcaataactatttnaacagntctagttt

SEQ ID NO: 4903 - DNA, 572 bp, Homo sapiens
ttaaagctagctgcaagaggggaccagattagtggatatcctctttaagggtgaagtctttccaattgctgtcaactttggcaggagtcagagggactcttcttgggtcactaacaatagactgtctgcccagcaccagagagcactgatagtcccctgacggccattgtcccttgcccagctcacccactggcctcccaaggaagcactgttcattgtctgccagactacaatggtgactttctcctgagatagacctccttgaagggacatgatctggatgccagggttaataacactgaaaaattcaccatttctttggtattatagatataattgatatatagaaataaatatatattttagggcacaaaggcatgtaggatatctaacacatatattaaataatacatgtatatgtctaatacacataccacatatatgtgtgtacgtatatccatatgtgtgtatatatttatgtgtgtatatgtatacatttgtattatacattttttccctctctttcaagatcaccatggatagtgaggacagccacacatttttgagtaatt

SEQ ID NO: 4904 - DNA, 576 bp, Homo sapiens
ccaaaacttacagagaaaagatggattcttgtattgaagcctttggtaccaccaaacagaagcgagctctgaacaccaggagaatgaacagagttggcaatgaatctttgaatcgtgcagtggctaaagctgcagagactatcattgatacgaagggtgtgactgctctggtcagccgatgctatccacaatgacttgcaagatgactccctctaccttcctccctgctatgatgatgcagccaagcctgaagacgtgtataaatttgaagatcttctttcccctgcggagtatgaagctcttcagagcccatctgaagctttcaggaacgtcacgtcagaagaaatactgaagatgattgaggagaacagccattgcacctttgtcatagaagcgttgaagtctttgccatcagatgtggagaagccgagaccgccaggccccgatgcatatggtttctggataccctcatcaaatttcgagctcatagggtagttaagcggaaaagtgctctgggacctggagttccccacatcatcaacaccaaactgctgaagcactttacttgcttgccta

SEQ ID NO: 4905 - DNA, 671 bp, Homo sapiens
ggtggaagcaaagtaatgaaaggaagaatgggttcctcacttgttattgaaatctctgaagaagaggtaaacaaaatggaatcacagttgcaaaacgactctaaaaaagcaatgcaaatccaagaacagaaagtacaacttgaagaaagagtagttaagttacggcatagtgaacgagaaatgaggaacacactagaaaaatttactgcaagcatccagcgtttaatagagcaagaagaatatttgaatgtccaagttaaggaacttgaagctaatgtacttgctacagcccctgacaaaaaaaagcagaaattgctagaagaaaacgttagtgctttcaaaacagaatatgatgctgtggctgagaaagctggtaaagtagaagctgaggttaaacgcttacacaataccatcgtagaaatcaataatcataaactcaaggcccaacaagacaaactttgataaaataaataaagcaatttagatgaatgtgcttctgctattactaaagcccaagtagcaatcaagactgctgacagaaaccttcaaaaggcacaagactctgtcttgccgtacagagaaagaaataaaagatactggagaaagaggtggatgacctaacagcagagctgaaaagtctttgaggaccaaagcagcagagggtccgtaaa

SEQ ID NO: 4906 - DNA, 1126 bp, Homo sapiens
tttttagggtttgtggcacataatttgtttaatccagattggatacatcaggtacagcagtggcacatgactcaatactgtaaatgatatacatgttttaacatatgcactacagtttcaaaagaagacgacaggaaactcaagggtgtttttttttttcatagaaagttttcatgttttatcttcctgcagttttgtacagtatatttcttctttgccattgtgatgttgataagcaaagcccatttattatacgaaaatagaaaagaacacacttgatgtatctcacgatgacattaatggggggaagggtgtgacctctaaggaaaacattacattggaatgtctgattatcaaaaatataccatccctcccacctcccaggtttgtaaaatagtccattggtccaaggagccccccaggacttgggtcagtgccgtacactggttagagtgacatcatccagtgtagttgagtaacctgctaagataaatgtcattcccacacttgagaaaaaacacagaacattctgaatagaaaacaagacttaaaaggaacccctttaaagctgtttcattttctgatagccactttctcttagttttaatgatgctcttcatggtgctgtttgggctccgagggtcatgggtcataacaatgtttttccttcatctagtcattttaaagctttgcaaataatgagatttcattaggaaatcagaaagagaaaataaaagtttgtcatggttaccatgccaagtagtgtagaaaggaaatgaatattgccttaagttcacagcattgggatatttttgccttatagttacctggtaattgaagtgggagactggaaaactggaattctttagtaacctcgaaatctagtgttagctcaattttcaaccacttcctctgcaaaacttaaggaaaaactcttaagtacataatgtcccaatgtacattttccttgtctacaatctaataagtgatatcctgaactgtaggaatcatattttgaaaactggataaaatcatcagcatatccacaagttgacatttttgttaattatagatcggcattaactgtcaactttaagttctgttcaaattctgtgtgattgtaaac

SEQ ID NO: 4907 - DNA, 1175 bp, Homo sapiens
tttgggataaaatttttgaatttatgttcaacatgtttcctgcagatttagtggaggaaaaatccacacatacccccatcccaatcccccagattttcttcaacatgccgcttctgttcttggaagagttaactgcctcgattctgcataagagtcccaaacactgagaactagggtgtcttccccttcctttccttccaaaaaggccagcagcctcaagcaagccaaagtcctttcctcttgaatgcgtagtcttgtgaactccactgtcttcacaaactcagcagctggtggaagctctctgaagaactgagacaggaggtgggcactgctctgacaccatcctttgaaggtgacagagcatctcagggcttgggggacgcccacccggactttgagaggagacagaagaggtgccttgcagaggtatttcacaaagatcagggtctcggcccaaaagttgacttctgctttttcaaacaggtagtcttcttccacctgatgcatgctctccacacaggccacgaggtcatcactctctcccaacagccatcccagcaggatgggcagtccaggggccaactggtcccactgctggagccagatcacacaggacggccagggccagggccagagcgatggaggcatccacctggcagaaggcaaactctgttgactggcaggtattttcttgtgacatggcagttgtcacgggtttccgtggctgcatctctaacagcttgctcctcactctgcagaagggtaaggacacacttccagagagcaagtgtatcctgcaactcaagaataggatgggggttggtgaggaaaagtggtgtagtactggtgaggacttcaacgacggccagcctagactctgtaggaagatggtcttcacatgacaagatgaccagctgaacccactgcttcagctcagcagctatcaattccctgttctccacacatgtctgcatgtggtgggaaatgactttggaagcaagtctcagagctacactctgaatttcagatctttcattggaagcaatatccatcgtccagatcaagaactcctttggggtcagatggacacagtgctccgtctggggaagccactcaccagggtccatgcagtggagaattttcagtatcttgcagaagcattctgggtgattttc

SEQ ID NO: 4908 - DNA, 671 bp, Homo sapiens
tgttcagtttgacatgaaattggctgatgtgggaggagatcttaagcatgtcatgtctgatagctctttggatttaccaacagttagtggccagcatcctcctgctgcagatatagaggacttaaaatatgctgcttttggaagctacagtagcaattttgcagtgagcacacttacaagctatgactggtcagacagggatgatgcaactcagggcagaaaactctctccatttgtcctctcagcaggaagtggatccccctcagccacctcaattcttcaaaagaaagagacttcatttggcagttctgaaaacatcaccatgacatctctctccaaagtaacgacctttgtaagtgaagatgctcttccagagaccaccttcccagctcttgcccagttttaaagacacgattcctcagaccagtgagcaaaaggaatatgaaaacagagactataaagatttcacaaaacaggacctgcctacggtgaacggagccaggaggccaccgtgtcccagcccagccgtccagtggtgcctctcaaagaaaccccgaaccgaatgttcggaatgacttttggagagttttcaaaagtgaaaaagcccaaattcagcaaatttgacttctttagtaggccactttcacaaagccaaatgaaatccagttgaa

SEQ ID NO: 4909 - DNA, 391 bp, Homo sapiens
  misc_feature (1)...(391): n = a,t,c or g
cttgcttttgggagccagcggtatggcgtcgggctgcaagattggcccgtccatcctcaacagcgacctggccaatttaggggccgagtgcctccggatgctagactctggggccgattatctgcacctggacgtaatggacggacatgcacatgatggtgtccaagccagaacagtgggtaaagccaatggctgtagcaggagccaatcagtacacctttcatctcgaggctactgagaacccaggggctttgattaaagacattcgggagaatggnnnnnnnnnnnnnnnnnnnnnnnnnnnnnnnnnnnnnnnnnnnnnnnnnnnnnnnnnnnnngttggccttgccatcaaaccaggaacctcagttgagtatttggcaccatgggc

SEQ ID NO: 4910 - DNA, 583 bp, Homo sapiens
gtcatggcaagagcgagcagtggtgctgatgttgagagaagcccagggtaccactaattgagggagtgaggaagagagcagctcgcttctaactggactgcacgttggtgacagcgtcccaagctggtgacagacccactctgtaactttcagctagattcagccaccagatcccagaaacatgacccttgctgcctacaaagagaagatgaaggagctcccgctggtgtccttgttctgctcctgcttcctggccgatcccctgaataagtcgtcctacaaatatgaagcagacacggtggacctgaattggtgcgtcatttccgacatggaagtcatcgagctgaacaaatgcacctcgggccaatcctttgaagtcattcctgaagccaccctcctttgatgggggttcccgagttcaacgcctccctgccaaggcggcgagacccatccctgggaagagatccagaagaaactagaagcggctgaggagcgaaggaagtaccaggaagcggagttcctgaaacacctagcagagaaacgggaacatggagagagaggtgatccaaaaggccatttgagg

SEQ ID NO: 4911 - DNA, 556 bp, Homo sapiens
caaacgctgagtgactcggggccggacagttcataaataattgattcctttccccactaaagcagtcgaggagatttgtaatccactttttagtgcaacaagagctccatgttatgcttgtaataaattatttacacgggagctgggctggtgtgcagtggcaggtcccgtcagaagagatgaggctcctgggacaggtcagcgtcaggggcagcctgctgtctgctctggagggcggcgctcacctctgggtcgcagtccccacgatcagccagcagctgtgagagaggagcaggtcctcagcccatgccgcccactaggcctcagaccacaggggaggggctctggcagaaatagttcgagtttgtattgccagccaggcaggcacatggcccaggcagctgtcaattctcatgtcccccacgtggcccaaggtgggcatcttgactgttacctctgccacgtgtgagaagctctttttcgggcaccgaggtattaactgcagcagaaaaagacgagcttttgttatcagttccacggggttgccctagagaga

SEQ ID NO: 4912 - DNA, 136 bp, Homo sapiens
aatccagtcatctgcttcctgcttcccttcctggaggaaacttcagctactaatttcttatgttttttaagagatattctgttactgtgtaaagtatacatacatacagacacatgccccctttaaattttttaga

SEQ ID NO: 4913 - DNA, 516 bp, Homo sapiens
tttttttttttttttttaatgttaacccaatactttaatatgaacgttatgatcagtaggtagtatcttagatgatacatttaatcacagacaaaacaaaaacctatctgtatatgatattaagaggagcacagaattggataaagtagggtttatcttagtcggagaccaaatggttttgatatgtggttcctagaccagcagcatcagtagcaactggaaatgtgagatgaacattctgaaacacacatctggtcaagaaccactgttttaatagctttaaccacaaaacatccacattgttccctaaagttatgctaagagtaaaacgagtaactggttaactgcccatgatacatcaatttaatggaaaattatgcaactgtcaacaagaataagcatatctatatgtattgatataaaacaatctctaatatagtgttaagtgaaataagcaatatgcagaacttaaaaatactttttagccgggcacggtggaagaaatatttttcacta

SEQ ID NO: 4914 - DNA, 96 bp, Homo sapiens
atctaggggctcaactggggctggaagggtttaattccatgatggctcactagtttagctgctggatggagaccaacagctttttttgtcatagtc

SEQ ID NO: 4915 - DNA, 792 bp, Homo sapiens
aactgtataagctgagaattttaatttaaagaagaccaaaattggtagtgtccccatgtctgatggaaacaaacacaaattctcccatgaagaatttacatttagggccttgaataatttgcatatagttttaatgagcataaagtcacacacatacataaacatcatgaaaaatataggggaataaagcaccattagcaagagtcagcagaaacaatagaaatatttataaagattattagattactggaactatcagatacagaatataaagctgtttgatatgtttacataaataaatgaaaaaaattttaaacataattataattcataaccaccaaatgacaatgcatttttgaaaaacaacaaaatataataattaaaattgaaaacttaatggagcttttgctttttggacatagcaatagcaagccattactccaccataacttaggaagtaagcacattgtatatatttttttctttgaagacactggagaccgatgtaagcaatgacttagcttaactaaaattcttaagaaggaaaaacatttcctgagtgagctggccttattctctgaggtcatttctcaaacatgagagctgaggactgggccctgctaaaggtactggcatctctactagaggaaagagaatccaacagacattttgacagccattgggatggcatgacggattggaatctagaaaaacccccaaatgcatggccagtttgccctatggggcatttgctgagtactagggcagcatggaagggtggaaggtggggct

SEQ ID NO: 4916 - DNA, 1277 bp, Homo sapiens
ttttttttttttgtgtttttcataaagctatatatttattcaacttaaatgacaacctttattctgagattacattcttcctaattttaggggctaaaatatattttcttttacataatgatgctgatagcagatggctatttgtttttgtttgtttatttttgttttatgtccttagctgggcaaaattaaaagccagaaggctaaggcccccatttttttttcttttaatacaaatctactggtgctgaaaactcagagcttaggaaacacagcctaggtaaagaccaatcttcttgctgcatatttcacagtattgaattctttcttggtgagttctccatacaagttatgaagcaggataaaagtcagtcttatattaagtcattgtaaatacggccttaatttcaatcaccaaagaaatgtatttttgttgtataccatggttgcagcatgttttattaaaactaattatatcaatagctacctgtagagtatcaacttaaaaattataatgccatttctatgaagtcattacttttataggactagcctgtgtcatatgtgtgatcaatattggtttaatgcagaaacaaaggcagctgggtgtccaagcaagccacttttctgggtcagggtttcagtggtaccatagatggctgccagtctcaatgtacactttggcccatttatctttataaatcataccatatagcttcgatatttacatacatttaaactgagaagaaatatgcattataagaaagcatagtttagtgggcttcatgtgtcagaaataattccatatttcacaattattttcatgtcattagctacccttgataaagaacaattccatataaatgtacaaactggaagataattttataaaaccgtaaagagatctttgtaaattgcagtgtgtctgcttataaacaaatcaaatcgatctccatttcttcaagtgtcaaaaacaaaagagtagctggacattggtttttataatcagtttcagagaaaatacaggaataatgatcaatggcattttgaagcagataaaactgccaagttttatgcttgagtctatcattctgtgatttgctataatagtattcctttctattaggtgttcccgacaatattagttctatattcatttgatatgagcatttatattaaacttcaaaattacctcggatagtatccagaatatatgtcagaaacccctaaaagcaacttctattttcctcttaattaagataatatttagtcatgtt

SEQ ID NO: 4917 - DNA, 389 bp, Homo sapiens
aacccaaaacatcaaatctgtgtgggaatcgagcatatggaaaatctctgataccgccagtgccccggatctcagtgaaaacttcagcctctgcctcattggaggcgacacattgggcacagagaagggagctgttctgatgagaggatccagacatctcaagaagatgactgaagagtatccagcccttccccaaggagcagaagcctctctaccactgacaggcagtgcttcctgcggcgtccccggcatcctccggaaaatgtggacaaggcacaagaagaagtctgaatatgtgggagccaccaacagcgcctttgaggccgactaaaggtgaccctcttcaagtgccctgtgttggccaaggttccccggacaagaggaaaaac

SEQ ID NO: 4918 - DNA, 489 bp, Homo sapiens
  misc_feature (1)...(489): n = a,t,c or g
ggcacagttgtcctcaatcacacctattcaataatgtctccataaaaggctcaagaggactgggttctgagagcttccagatcgctgaacatgtggtggttcctgaagggtggtggccctggggagggcatggaagctccacgtcccttcccacatgccttgccctatgcagctcnnnnnnnnnnnnnnnnnnnnnnnnnnnnnnnnnnnnnnagtgaacataaggaaagtgtttccttganttttgtgagccctcctaacaaatcaattaaacccacggagggggttgtgggaaccccaattcatatctggtctgccagaagcacaggttacagcctggggcttttgattgacatcacaagtgggacagtcctggggaccgagggctcaacctgtgggatctgatgccgtccccaaggtanagantgtcagaactganttgaattggngggccaccaagggggtgtcnangnanaacaacttgcttgt

SEQ ID NO: 4919 - DNA, 1701 bp, Homo sapiens
ttttttttttttttctttgataatttttattatatacatatcagtactcacaatacgttgcttatttaagatggctgtttataagtataaagcagtttgagcaacactgattgtgcattattgtacttcagatgaaaaatccttacatgcggaatcaatgtcttttaaaatttcagataaagaattttcatttgaggagacatacaattgtaagtgctcattttttgtcaattttaagacaccattatgtgtaagaaggattaattttaccataaaattacaaacaccctccatgtcttgacattcacatgaaagaacagcataacattaatcatccaaatgcatatcagagcaaactctaggccttagtgtgaggtgaacacggtaactgctacattatggaaatcggttgggccttagttaaatattgtagtatttttaaaatttgtatattgaaaaagacaaaatgagctgttaagtgataaacagcttactcaatttagcataactttaatttagaaatggaatagtgaaattaaaaaaagcatatgaagcagataaacagtatgtctttagaaatattaaagatttttactctgtttacaagttttgcttttttggttatgcctcttaaatatctgtctttttactttgtctataaaaataattgtccttagtattcctaaattcttttccaaataaagcaattatcgtttttatatggtaagaagttactgaatcataggtttaagatcagtggcacaaatcatacatgtagaagattatgtaacaaattcattgttaggtaaggagtcagagagtacagtacagtaacagccatacaggagaggtagaattcttaatcacagttttatagaaaagatgcagtagtttatatctggtaccctgctttattagttatggtactgtaaatttgcttctcattgcaaatttaacagcgcaaaagggaggggtattcataggcaaggatcttattgacctttgttctgcaagtgttgcagaggatacccctagacacctgaagcattttcttggccaattaaggtaattgatcatatacggcatttacctcatttttaaaaaccttgccagtagggaaatctaagctgctcttctcccaggggcctaagagggaaatgtatctctttttatactactatgagtgtaaatgaaatcactctctggttatcattattgctcatcaagaattccagcattactaacctgttgaggggttctataccccaaattttaagtttgtttctaactcacaatgtagtcataaacaacgttataaatgggcataacttaaaaattatagttcattcatgatgaagttaaattactagtacttgagtaagacccccatagacttcaaaaagctagatggcagaaactttgttgtatatatgggttattcacatttaggtgtttaaaacttgggagtctatgtttctaatccttacttcaacatcaataaataaagtgttcagaaaggccattttaataaaagttgttataataaaaatttttaataaatatgtacacccagtgctaaaccttacagtagggcttacattttataaaatgtacctgcttacaaaaataattcaaaccagaattcttgtagaaaataaaaacctacagccaaagtttcttccagctaactggaaattaatc

SEQ ID NO: 4920 - DNA, 583 bp, Homo sapiens
agtagcagagaaagggaaaaggtgctgtgggggcttatggatccgagcgcaccactcagtccatgcaagacttccctgtggttgactcagaggaagaagctgaagaggagtttcagaaggagctgagccagtggaggaaagacccaagtggaagcaagaagaagcccaaatactcttacaagaccgtggaagagttgaaggccaagggcaggattagcaagaagctcactgctccccagaaggaactttctcaagtcaaggtcatagacatgacaggccgggagcagaaggtctactacagctacagtcagatcagccacaagcacaacgttcccgatgatgggctgccgctacagtcccaacagctgccacagtctggcaaagagggccaaggcccccggcttcgcgctgcccgagctggagcacaacctgcagctgctcatcgacctcacggagcaggagatcatccagaatgaccggcagctacaagtatgaagcgggacatggtggtcaacctcttccatgagctggagaagatgaccgaggtcctggaccacgaggagcgggtcatctcgaacctcac

SEQ ID NO: 4921 - DNA, 7138 bp, Homo sapiens
cccacgcgtccgggccggggctcaagatggctttagccgggctctgcgccctgctcgcctgctgctgggggccggcggcggtgctggccacggccgccggcgacgtggatccatccaaggagctggagtgcaagctcaaaagcatcacggtgtcggcactgcccttcctgcgcgagaacgacctgagcatcatgcacagcccctcggcctcggagcccaagctcctcttctcggtgcgcaacgacttcccgggagaaatggtcgtggtggacgacctggagaacacggagctgccctacttcgtgctggagatctcagggaacacagaggatatccctttggtgcgctggaggcagcagtggctggagaatggcactttgctttttcacattcatcaccaagatggtgccccaagccttcctggacaagaccccactgaagaaccccaacatgagtcggcagaagaggagctgaggatcctccacatctcagtcatgggtggcatgatcgctctgctgctgtccatcttgtgcctggtgatgatcctgtatactcgccggcgctggtgcaaacgccgccgggtcccgcagccccagaagagtgccagtgctgaggcagccaatgagattcactacattccttctgtgctgatcggcgggcacggacgggagagcctgcgcaatgcccgcgtgcagggccacaactccagtggcaccctgagcatccgggagacacctatcctggacggctatgagtatgacatcactgatctgcgccaccatctgcagagggagtgcatgaacggaggggaggactttgccagccaggtcacgcgcaccctcgactccctgcagggctgcaatgaaaagtcggggatggacctcacaccaggaagtgacaatgccaagctgtcactgatgaacaagtataaagataatattatagccactagccctgtggactccaaccaccagcaagccacccttctctctcacacctccagcagccagagaaagcggatcaacaacaaagcaagagctggttccgccttcttgaaccctgaaggggattctggcacagaggcagaaaacgacccccagctgaccttttacacggatccttcaaggagcaggaggcgtagtagagtgggttctccccgaagtcctgtgaataagaccaccttgaccctgatcagcatcaccagctgtgtgattggcctcgtgtgctcctctcacgtcaactgccctctcgttgtcaagatcaccctgcatgtccctgagcacctgattgctgatgggagccgcttcatcttgctggaggggagccagctggatgccagtgactggctgaaccctgcccaagtggttctcttctctcagcagaactccagcggaccctgggccatggacctctgtgcccggcggctcctggacccctgtgaacaccaatgtgaccccgaaactggggaatgcctctgctatgaaggctacatgaaggatccagtacataagcacctttgcattcggaacgaatgggggacaaaccaggggccatggccttacacaatatttcagcgaggctttgacctggttttgggagagcagccctctgataaaatatttagattcacctacactcttggggagggcatgtggttgcccctcagcaagagctttgtgattccaccagccgaactggccatcaatccatcagcaaagtgcaagacggacatgactgtgatggaggatgctgtggaggtcagagaggagctgatgacttcatcctccttcgacagcctggaggttctcttagattcctttgggccggtgcgcgactgcagcaaagataacgggggctgcagtaagaatttccgctgtatttcagatcgcaagctggactccactggttgcgtgtgcccatctggactcagtcccatgaaggacagctctggctgctatgaccgccacatcggggtggactgttccgacggcttcaacggcggctgtgagcagctgtgcctccagcagatggcgcccttcccggacgaccccaccttgtataacatcctcatgttctgtgggtgcatcgaggactacaagcttggtgtggatggacgctcttgccaactcatcacggagacctgtccagagggaagtgactgtggggaaagcagggagcttcccatgaaccagaccctctttggggagatgttctttggttacaacaaccattccaaggaagtggctgccggacaggtgctgaaaggaacattcaggcaaaacaactttgctcgtggtttagaccagcaactgccagatggtcttgtggtggccactgtgcccctggagaatcaatgcctagaggagatctcggagcccacccctgaccctgacttcctgactgggatggtgaacttcagtgaagtgtctgggtaccctgtgctgcagcactggaaggtccggtctgtgatgtaccacatcaaactcaaccaagtggccatctctcaggccctcagcaatgctctccactcgctggatggggctacatctcgtgcagattttgtggcgctgttggaccagttcggcaaccattacatccaggaagctatctacggctttgaggagtcctgttctatctggtacccaaacaagcaggtccagcggcgactctggctggagtatgaagacatcagtaaaggcaactccccatcagatgagtctgaggagcgggaaagagaccctaaggtgctgacattcccagaatacatcaccagcttgtcagactccggcaccaagcgcatggcggctggagtccgcatggagtgccagagcaagggacgatgcccctcgtcctgccccctgtgtcatgtgacatccagccctgacacccctgctgagccggttctgctggaggtgaccaaagcagcccccatctatgaactagtgaccaacaaccagacccagaggctcttgcaggaggctaccatgagctctctctggtgctcagggactggagatgtcatcgaggactggtgtcgatgtgactccactgcttttggagctgatggactccccacctgtgcgcctctcccacagcctgtgctgagactctccacggttcacgagcccagcagcactcttgtggtcctggagtgggaacactcagagccaccaatcggggtgcagattgtagattacctcctccgtcaagagaaagtcactgacaggatggaccactccaaagtggagacagaaacagtgctgagctttgtggacgacatcatctctggagcaaagtctccttgtgcaatgccatctcaggtgccggacaagcagctcaccaccatctctctgatcatacgatgcctggaacctgacaccatttacatgttcacgctgtggggagtggacaacacaggacggcgctccaggccaagcgacgtgatcgtgaagaccccatgccccgtggtggatgatgtcaaggctcaagaaatagcagacaagatctacaatctcttcaatggctacactagtgggaaggagcagcagaccgcctacaacaccctcctggatctgggttcccccaccttacaccgggtcctctaccactataaccagcactatgagagttttggggaattcacctggcgatgtgaggatgagttaggtcccaggaaagctggtctcatcctttcccagcttggggacctcagcagttggtgcaatggactccttcaggaacccaagataagcttgcggcgcagctcactcaagtacctggggtgccgctacagcgagatcaaaccctacggacttgactgggcggagctcagccgggacctcaggaagacgtgtgaggagcagaccctgagtatcccctacaacgactatggggacagcaaagagatctagcaccataaggccagggagctgctgccagaatgaagtaggaaagaggagggatccatctgggttggtctgtggatttttaatattttttaatggaacatgaaaacctccacagcaacatcgaaaccagggagaaagtgatccttgctccctgcagaacttcttcagtatgatgttctccatctgcatgattgggaaatctgccagccagtggcttcatgcagtgccatatttctttagaggattactttggggtttgctttgccattaatttgttccattcatttttttttccctgagaagtttaccaaaatgctcaagagctctgccgtgctccccatgaaaagtctattaagtaggcaccctgtgctcactcagttcctaaatccattgcaactgggagcagaggtgaggccagaaagttgttaggcctgccgcaggccccaccctcaagcattcctcaggaagcgtctcactctgggagccttggccctgctcacagagagagacaatagaaaattgaggaaggtggcccttgtctgtgtctcctggttttcttcctaggccttgctatcactatttccatacccgaaaggtgaaaccagctttcattataggccccagtgggccacttgggttttgagatccttccttattttaagccaggactgggattaaatctccctctgtcagatctctgtcccttcctctgaacaacatgatctttgagagggaacaagatgccatctgtcaactgcaccttcagaaaagtctacctgggagactagttagcagtccacattcaagagaagacttggagtttattgttttttaaaaaaaccatgcttcctttggatagacttctccagcctaccaatatatatccatgtgcctggattatctttaacccccacacctcttaccttggacaggtaaggcttggccgatgtctgattgggaccaggaggggtcaacactttcatatcagtgttacagtgaactaaagctattattgatcacaaaaaacttctgttcatccccaccttgctaaatttgcttgtgttgctagttttgcaaatcgtttctctgatgaccataagcaggaggattccaccatggtcactgcccatccagtcacagggattctgtgtagggaagcaccactgattgcagttaacatctagagtgttgtttccatcccactgcccaagcattggcatggtcatgaatggtggcccagccaacaggaagcccagcctttcagaaagagcctgggcaaggccctgttgactaggcaatggccttagctgtcccacacaactcagtggcctgaacacacaccttcagccaccatgcctttgaccagggctcctcatctggaaacatatgagaaaggtcagcaaacagatgcaagacctataaggctagtcattgagctatattggttttttttctaaatagtagtagtgacagataacatttattgagtgcttgctgtatgccagggcgctgatgtaagcactttaggtatcattgaattctcacagcaactcctgaggaaagtgctattcttgtctccattttagtgttgaggaaaacgaggcaaagagaggttatacaacttgcctcaaatcccttgtgcactgtaactcacactgagtttcagtgtgatttcaggctgttggtctccagggcacaggatcttagctactctgggatacccagttctgttttcagtatcatctggcacacaactgtccaagctctcagccccacaggggaacctggcccagagagctttacctttcccaagcatctgtggcatggacatgtcctctgtgcagtggaaggaggaggggcgaaagtacgcccttagcctttggagctagagcacccttggggacccctagttccactgcacatggccctcctccccaccctcatgactgggaaggaagcctgtgatgaggctgagataaagcacagggtggttttcactctcctctctccttctttccaaacactgaaggatttatttcaaactctctaatggcacctgcctcaggagattcccctactttcaaagcaaagatcagcagaaaaattggctgtcccacctgtggcaaatgctggagcctcagttaaagtgcctcaaggggcaaatatttcaccattgccagagaagatgtgacaggccaatcagacagggcccagagcatctctttgctgctactgttttgccatccttctattcatatctgtgcagaacacggtgttttaagcttgagtgaaaggagggtgaggctgccgatgccttcctgcccagaagtggatgatgtgggagttgacaggccagggagagggtgaagcaggtatcagagtcactcctctgtaccctctccttctgtttttattttaggcacactatcttcctctctcctatctttccctcaatctcccaagttcctctaccttctttatctttgtcttttacttcttctttctgtgaccctccttttttggcctcctctttccccaagactttcttcctcctgtttctcgttgagttctccccactgaatgtgtgtatgtatgtacacacacacacacgtgtgcacacacaatgcacacaactcctatgacttggcttcctacttacattcaagttaaaaaggctgatatgaacagggcaggggaaaatcttaggatggttgtacaattgactggaggattttttccccttggaagacactattgatctcaacctgctgacttttcctaatgcttacctgaaggaacccatcctggctagaaagggtgatggtactggaccggtattcaaccttgagttttcaagctgccaaacaggtcttaagggaggtgcttatatcccaccaacactctcccagctcccatgtccccaagacctctggagtttcctcttgaatgtacatgaaccactgtaatagcattagacttttaattgagtgtgcaatcgttttccatggagtttggtccgttcattattttttagttaactacacttcttgatattcaaatgttctattaaaaaaactgagtatgaagaaaaacactttactactgcagaaggaagaaagaatataatatgaccatcttcaggtataacagtgttgtttaaaagagaattattgtatgattataaaagatgaaataattaactgaataataaaacaaagctattagtaagc

SEQ ID NO: 4922 - DNA, 408 bp, Homo sapiens
agagacagatcatactgtgtatggaagaattagaccacaccccagacacaagctttgaaagagatgtggtgtgtgaagacgaagatgccttttgtttgtctttggagaatattgcaacacctacaaaagttgctacggcagcctggaaatgcagaaatcacaaaatgaagcagtgtgtgaggggctgcgtactcaaatccgagagctctgggacaggttgcaaatacctgaagaagaaagagaagctgtggccaccattatgtctgggtcaaaggccaaggtccggaaagcgctgcaatttagaagtggatcggttggaagaacttgaaaaatgcaaaaccatgaagaaagtgattgaggcaattcgagtggagctggttcagtactgggaccagtgcttttatagcc

SEQ ID NO: 4923 - DNA, 4885 bp, Homo sapiens
  misc_feature (1)...(4885): n = a,t,c or g
atcgtctgtttcatcaagaggagtcgcggcggcaagtacccaggtgagatgtgcaagaggcgtgggcttgcagggtggggcacgtccactttcccgtgagtctccaggtctccagccagatccggggaatgtgttctctcagtgaagccgcggccaccggaagagtcgcggtcgccagtccagtcgggagagtggggagcggaagcgcggccgcggcggcggcgggcggcgctgggacccggtagcccccggagaacaagggagctggcgccgccagcagccgccgagctgggttgagccgctgggccgcgccgcgcgccgccgccgtctgggaggctcggcccggccgcccgagcaggccgcgcgcgggccgccgggcccgaggccagagccatgggcgagaccaagatcatctaccacttggatgggcaggagacgccgtaccttgtgaagctgcccctgcccgccgagcgcgtcaccttggcggactttaagggcgttttgcagcgacccagctataagttcttcttcaagtctatggacgacgatttcggagtggtgaaggaggagatctcggatgacaatgccaagctaccatgcttcaatggccgggtcgtgtactggctggtgtcagctgagggctcacacccagacccagcccccttctgtgctgataacccatcggagctgccaccacctatggagcgcacgggaggcatcggggactcccgacccccatccttccaccctcatgctggtgggggcagccaggagaacctggacaatgacacagagacggactctttggtgtctgcccagcgagagcggccacgccggagggatggcccagagcatgcaacccggctaaatggaactgcgaagggggaacggcggcgagaaccagggggttatgatagctcatccacccttatgagcagtgagctggagaccaccagcttctttgactcagatgaggatgactccaccagcaggttcagcagctccacagaacagagcagtgcctcacgcctgatgagaagacacaagcggcggcggcggaagcagaaggtttctcggattgagcggtcctcgtccttcagcagcatcacggactccaccatgtcactcaacatcatcacggtcactctcaacatggaaaaatataacttcttgggcatctccattgtgggccaaagcaacgagcgtggtgacggcggcatctacattggctctatcatgaagggtggggccgtggctgctgatggacgcatcgagccaggagatatgttgttacaggtaaacgagatcaactttgagaacatgagtaatgacgatgcagtccgggtactgcgggagattgtgcacaaaccggggcccatcaccctgactgtagccaagtgctgggacccaagtccacgtggttgcttcacattgcccaggagcgagcccatccggcccattgaccctgcggcctgggtctcccacactgcagccatgaccggcaccttccctgcatacggcatgagcccctccctgagcaccatcacctccaccagctcctccatcaccagttccatccctgacacagagcgcctagacgacttccacttgtccatccacagtgacatggctgccatcgtaaaagccatggcctcccctgaatcagggttggaggtccgtgaccgcatgtggctcaagattaccatccctaatgctttcatcggctcagatgtggtggactggctgtaccacaatgtggaaggcttcacggaccggagggaggcccgcaagtatgccagcaacctgctgaaagctggcttcatccgccataccgtcaacaagatcaccttctccgagcagtgctactacatcttcggtgacctctgcggcaacatggccaacctgtctctccacgatcacgatggctccagtggcgcctctgaccaggacacactggcccctttgccgcacccgggggccgccccttggcccatggctttcccgtaccagtacccgccacccccgcacccatacaacccgcacccgggcttcccggagctgggctacagctacggcgggggcagcgccagcagtcagcacagcgaaggcagtcggagcagtggctccaaccgtagcggcagcgatcggaggaaggagaaggacccgaaggccggggactccaagtccgggggcagcggcagcgaatcggaccacaccacacgcagcagcctgcgggggccgcgggagcgggcgcccagcgagcgctcaggtccggcggccagcgagcacagccaccgcagccaccattccctggccagcagccttcgcagccaccacacacacccgagctacggtcctcccggagtgccccctctctacggcccccccatgctgatgatgcccccgccggcccgcggccatggggcccccacggagcccctccgggccgcgacctggcctcagtgcccccggaactgaccgccagcagacagtccttccgcatggccatgggaaaccccagtgagttctttgtggatgtgatgtgagcagggcccctcccccagctccattccgctcccaccccagccggctgcgttcctctctccatccgtccgtcttttttactttgtctggtacctgaaagggaaataaaaggaactaaatccaggtgcgctaactgctcgcagggtgctgcgagggtggggtgcacctaccgattggctctgcagccccctaacctgcctctggccccagttcgtttcctctgcccactaatccctgcgcaggacttcccaggaccccttttgtctctgggaccagacttgttggtgctaccccttactcccctctgcaacccccattttgggagttgaccccagcaatgaccttggtggcacgctcactccctcattctctcgtttcccctttagctccctttcaccatttattcagctacatcatccctctattaaccccaccccatcaggcacgtgtgcaaacctcttgactttaccccacattactgaaaccaaaatatatttgcttcatctgcccctactaaccatccccctgcctgctgcctcagtctgcaacctaaagctgtagtcgcctccaatagccatccatgccatccctgcctgtgcctagatcagaggcccagagggccccctcagttgcctgagcagctggtggcttccagggagcatctctgctctacccctgccccatgcctgccctgcgtgctggttccttcagacccctaaccctactaaccagcaggctcatctcacctccaggcctgaaacatttcttttctttcttttttcctcccccaatttaccctgggcctggagcagccaagaatttcgggctgtttgactttctgtgagcccccagcgaggggaggcccagcctcagaaggagaccaggaaccctgcttcagcagcccctcagggcttcccaaggatgtccagcccccacacccacacgttaacataatgagtcactaggcttctggggagggcccaacttcacccatgcatgagagactctcctcctttccagagagaatcggatcgcaccacgtgtggcagcctgcggcggggggaggggggcctctttagctctctttatctttctctctcactcatgtatgcatacatgcacagagatgcatacacaggtgcctatgcaagttcatttaaagccttcagggcttgtccccttgcaaagggctggaccctcctaatcctctcctaggttgtggggctggtcccctgacacctttctccccttcctggtagaccttaaacctcgcacacatgtccccagcattttctcacctggataaagcccataagctgggtctcaggctgggctcagcaaaggactcgccttgcaaccgacaggccattcccacccccacacacaacctcccctgttttcacattcaccatggcatcccagagcaaggacacaggagcccacaggccagttgaggttgggcaaggagacttccaggacttccagacagagtaccaggttttatttttcaccttattctctactttaaacaaatcataactttctctttaagcctctgctataaattctcctggctctcctgggcttccatattttgggggctggggtgtcaaaagtgagatgaagttcttagctccaggttttggggtaaaccaaggtaggaacattttggcatttatttcaattaacaatacttcnnnnnnnnnnnnnnnnnnnnnnnnnnnnnnnnnnnnnnnnnnnnnnnnnnnnnnnnnnnnnnnnnnnnnnnnnnnnnnnnnnnnnnnnnnnnnnnnnnnnnnnnnnnnnnnnnnnnnnnnnnnnnnnnnnnnnnnnnnnnnnnnnnnnnnnnnnnnnnnnnnnnnnnnnnnnnnnnnnnnnnnnnnnnnnnnnnnnnnnnnnnnnnnnnnnnnnnnnnagcggaggttgcagtgagttgagatcnnnnnnnnnnnnnnnnnnnnnnnnnnnnnnnnnnnnnnnnngcagactaacaaagaaaaacaatacttcctggggttttggtgtgcagagggctttgttggaagtgtgactcaatcttgcctgccttctgggagctctagaattgttcccaacccagtccatggcttctagccaccactacagggctgtttcatgtacttctctctctgactctgtcttgtccgactctcttgagaatttctcaacgattgctcatgcctgtcagtatcagtgcttccatcgttccatctttgattcacttctctttcctttctatttactcccaaaatgggagtcattcatcctgatgtcctcaattgctgcttgatatgctggtgattcccaaatacaaggtccaacc

SEQ ID NO: 4924 - DNA, 181 bp, Homo sapiens
aaacttccaaaaagatttattaattaaaccagactctgttgcaataagttaatgttttcttgttttgtaatcccacacattcaatgagttaggctttgcacttgtaaggaaggagaagcgttcacaacctcaaatagctaataaaccggtcttgaatatttgaagatttaaaatctgactc

SEQ ID NO: 4925 - DNA, 979 bp, Homo sapiens
ttaaaaagtatagcctacttaaacgcgagatgacatatatagagtttaattttacggtccctccgcaggggagcggcctccagccttattctccaccgctcggatctgtgtggtttcagtctgttcttggtgtggtcctcatacacagagctccctgtctagtttcttttctttttcttttttctttttctcgtcacacaggtaaccttaaagacagacccctctaaagaacgctttgtaaatacatgtgaggtatagccaccactgttttccttgctgttatttttccaagtcttggggagaaaacatcctcctctgatgggccaaagccctggaatcaagggtttccacgtaccctgcctaatacccgacgtagctcttgatgcaccgtccttgtgctgtggctggcggtgtctcagcctgaaacataaaccccacatgccccaggagcgatgtgctccctgaaacagacaaccacacgctgttggggagagaaggatggagataggatggagataggatggagatgtggctcttctcatctttgaagccagcagggcatcccggagcaggaggctggccgggctccccaagcgaaggcgttggtgtctgtcattaggtgtgtgttagggtgcagcaccggccgtcacaggatgctgataagcgcgctgagaggtggatgaaacaccaaagtctgtttccccgtccgcagtgggtgttgcctctttgtgtgtgtcccgatgttcctgcctgtgagtcggccttactccgtttccttagcgcccatgacacgccaagtcccgtttcgcactcggcttctcacccgcccagctcggctagggagggggagtttttagcacctaatatgcttcctgccattgcgcaatctgagcctgagcaactggaaacccccatttctcattagtgcaatgtcatatctgatcccaggaagcctggaaaataaaagacgatgcattat

SEQ ID NO: 4926 - DNA, 422 bp, Homo sapiens
ggcttctctaagagctcgtatattgtttcccaaattgcagttgcctatcacaatatcagagatattgacaaagccctctccatttttaatgagctaaggaaacaagacccttacaggattgaaaatatggacacattctccaaccttctttatgtcaggagcatgaaatcggagttgagttatctggctcataacctctgtgagattgataaatatcgtgtagaaacgtgctgtgtaattggcaattattacagtttacgttctcagcatgagaaagcagccttatatttccagagagccctgaaattaaatcctcggtatcttggtgcctggacactaatgggacatgagtacatggagatgaagaacacgtctgctgctatccaggcttatagacatgccattgaggtcaacaaacggga

SEQ ID NO: 4927 - DNA, 529 bp, Homo sapiens
  misc_feature (1)...(529): n = a,t,c or g
tgganancagntatgacnnnnnnnnnnnnnnnnnnnnnnnnnnnnnnnnnnnnnnnnnnnnnnnnnnnnnnnnnnggcacgagagagaacaggatgccctgtggcagggtctggagcgagaacaggatgccctgtggcagggtctggagctgctacagcatggccaggcctggtttgaagaccatctgagggaggcacagcgacagcagctgcatctaggggcccttggtgagaattttctaacagatttacactcagagcctggtcgccccccgttagcccagattcaaaaggtgaacatctgtttgcagaatctgattcatgagaagttctccccaagtccactgaacaaggctagttcctgcaccacccaggattcaaaggaaagacgaagggagcagaacttgtggcagcaacaggagttgtcaaggcagcagaaaggagtcacccagccaaaggaggagatggctcagcggggctgcaccaaggggccaagaggccctaccgtgtctaaaccctctntaatttc

SEQ ID NO: 4928 - DNA, 610 bp, Homo sapiens
aaagatgcaatatgtctcttacacatttcttcaagctgaaaagtgcttgtggtgaacctgcttacacaaattatgttggtggctttcatggatgtctagattacattttcattgacttaaatgctttagaggttgaacaggtgattccattacctagtcatgaagaagttaccacccaccaggccttacctagtgtttcccatccctctgatcacatagcacttgtatgtgatttaaaatggaaatagatgtgtgtttaatggaattgaagtctgaaaaggaagtagttattttagcagaaaatttaatatgaatcaaagcttatatgtaaacttcaaggaggaatggtaaaatgttcagccctcctagttatgttcctgatgtcttcgttatgaaactgttgatgtttgcatcatacatcttctctttccttgttttcctctacaattggaggagaaacaaatatatttcttactagcaaaataggaaaattggaattatttttctcccaacttggaggactctcaggaaaagggaaggattggaattaggcgtgttttttgtttgtttgtttttgtttttgtttttgtttttttgaggtgggagtttc

SEQ ID NO: 4929 - DNA, 1586 bp, Homo sapiens
gatgttcaggataactatgttatctcatttctgcatttaattaatagctcgagtattaaaagcccactcccttcaagaaaagctttgatttcccccagtcatgaaagcccttgtttcaaattctttaatctctgaacctagtatcataagaatttcctcttttgataacatctgtactttcatattctgctcactatcaaatgtattgttaacacttagtaagtttgaaaatgaaggggttttatctgcatttgacattgaaccttgaagtactttaagtactccaaggggaaaattaaagtggaagtttcttcggatcttgtttagaaaaaactataaataaaaaattgatgctaccaaattgtgccgttctaaataacatttttgagagcattttaacagcagtttacaaatatgtaaataatagattaaaaccaaatcttgattctcttgtgaatttttttttcattttaaaaatatgtttttgggctgttttcaaagaaagatgttgatagaacccttagagtgacttgggagaaaacaaagtgtcacatcaaaaagttgagaaacattttgaaagaaaaaattcgaacatgcccatgaaaaaagcatacagcttccacattaacactggctagattaaactctagtcagaaaaactcagcacttaacagacattccatgtcctatatccttaattttgatgttttctgactaaacaatatactcagattgtatacaggcatttcacattattaggacatggaatgttattgtgaagtgccatatactgtgatcaaatctccagtatacggatacgttaaaatgattggagtccaaaggtagggaacactaagaaaatgtataaatagcatacacatttctttgtactcatgagttagaatgcagtgttattcagaaatgtctgtttaaagcacctatgtgattgcatttttctattacatttggattttttagtacatttaattttaagaaaacatgggaaatctagcgactttctatggtaaaccacattttataatgtcacaagttcttgctataggaattaacattctagaattttatattgattataaaagagtatttcagaacatattattctgttaaaatgaactcttgcacagttgccgctacagcaaatgtgtctgccaataatcaaaattcatgagcaaacaatcgtttctggctgtaatgtatgttctttttgaaattctgtatgctaaaatcagttgtttcaaaatttcaagaattccactgagtagtgatttttctgagtactaagctatgatctcatcagaatgtgctggtttcagtctggagatagatttctgaggagcctaatacaagggagagaatgtccaaagaacactactgtggaaagttcttacgatggaaattgacatcttttgtatctcattctccagccgtgaaataaaggcagaggttccctgcaaactagtttggttgggataaatccaatatttatatataatgaaaaataaaagtttgcattattagtttatcacaagacccatgtgacaactcagaaaatattctcagcataa

SEQ ID NO: 4930 - DNA, 663 bp, Homo sapiens
tttttttttttttttttaaaaaacaaactgcaaaatggtatttatttacattaaaacatgaattgcctgtatacacacaaatataagaggaacaatctgttatgcacaataactgtaatatttagtacatgttatacacagcagtatctgttaagtcagtggtttgagtgaaaacacagtaccaaaacattcctgatacaaaataagttactcattcacatattctaatcatacaagacacttaatattttaaaagttacatacttcaaataacactggctaaatgtacaactaaagtttattaattttttttatgaaaagacttcagattgttattcataaatgatccctttcaggatgcattatcttttaaataaataaactaaattgacttcaagactatttataaatagcccactaaaatatgattgaagacattccttcattttattaaaggtgtagctatatactagagaatatgctcaactactgcctccaaattccaacactgtcattctaatttgcaaataggaattatttaaattccaacttcaggacatgagatgagctgcctgccctattttgtcaattgtttccaaaagcattaacggattaagagactgtcttgaacatctcaaacatttgagaaattcaaggttttct

SEQ ID NO: 4931 - DNA, 1589 bp, Homo sapiens
tttttttttctttttggatttcccagttggaagagctccctctcccttttctttatcatcatctgagaccttttgatcatcaggaattggttcctgggactttagaagtgaagctctttcttcgtctacccaattgccccactcttctgctggtgcattccaatcagagttgggatcagcagaagacagaccatttaacccagaccattcatcatcgatatagggttgattacggctaacatcccactgataatcagaagtggtagactgagaaactggctcagcagtagacccaatgccagaaaatattgaacggtcactccaactccttccccagtcttttccatttgtattagcatctccagtgtcttgactccaggcagatggctcagttttcctctttcctgcagaagcaggtgaaacggagttccacttctcctcacctgcactgatctgtgaggagagttttacagacttttcattccagcctcctccattgacagtgaggttttcattcaatcctgaagaaatctgtgaaggaggcacactattttgcttggtatttgacttggatttatctgtctcttgtagtattggcggcacttgggaagagctcttgtcagaatcactttttgataagattacagatggctcggtagaagtagcaggtggaagagtcttgataggctggctatttttgacgagtacttcggctggatcactagtgcttatggtcttcaaggaaaaagctttttcctgttttggacgggttttagaggtattcactggaaggtcttctctaatctctttttctaattcttctgtgtcctgtgcagtagagttatcttcaccttgcttcttctttttcttttttttctttttggatttcccagttggaagagctccctctcccttttctttatcatcatctgagaccttttgatcatcaggaattggttcctgggactttagaagtgaagctctttcttcgtctacccaattgccccactcttctgctggtgcattccaatcagagttgggatcagcagaagacagaccatcaatgccagaaaatattgaacggtcactccaactccttccccagtcttttccatttgtattagcatctccagtgtcttgactccaggcagatggctcagttttcctctttcctgcagaagcaggtgaaacggagttccacttctcctcacctgcactgatctgtgaggagagttttacagacttttcattccagcctcctccattgacagtgaggttttcattcaatcctgaagaaacctgaagtgtagaatctccttttccagatttaaagttgctaacttgaacatttagatgagaatcacctttattcttcttggaaccaacaggaaatgatgcggttgtaagttgctcggtggtaactgtgatggtattttctatcccagggatagttgaatccaatgaaccagaatcagtcagcaccttatcacgtttacgctgctgtcgtttctctctgtgactaattttagtttcccaggctccttcatcaacttcctttccatcatggcgtgaactgttttgcactgctt

SEQ ID NO: 4932 - DNA, 1592 bp, Homo sapiens
ttttttttttttttttaagtgggacaataaaaatttaaaaataattttaaaatagaacagcttagagatagaaactaaattatttccaattcctactgtgccccaaacaaggttcacaaaagggctgtcctcccaacaattttctgaattctatatattcagcattaaattccatgataaagttggaaatccattcaccatttgtaatacatattgatgcatttaataaaattgcatgggccgtatcttttgcatttctgtatcctagtattaagtacagtgcctaccacaggccaggttctcaatacttgaataaatgacacaaaaatagccaggaccagcaagttttttctgggtgggcttcatagaatctctgtacttgctggaatcaccatgaaatccatggtcttcagctttgcattttcagcaacatagttatattgagttatcctcaggtgagcagtgagacccttgggagcggattcatggtagggtggctttgtaatgtgtcaccttggtgaggctatgtttcccggaactctcttccagtaagatgggccacaagagacattttgcttgataaccggagggcggaagtgaagcagcagcacattgtttttacacttggaaggttggtgctggggcacccagggcgttgttgcagttcacacgttgccatgtatctgctagatcacctcgttggtgtgggcagtagtcaggcctgcagccaggcctgcagctgctccaccttccccaggatcatcctttcagcttctctaattcctgggccagatgcatatttaactctgtgaggaagggcaccagcttcttctgcaggacacccacatcatcgaagctggaggtggtgagagactgacatgggttccaggccatcctcgtgggttccagctcgtgctcgtgggctccactgtgtcctcggtctcccacactttacatccatcttcccttcccgagtgcctgccctgcagacttcaagctccagcattagatgcaaagacaacagccttacagagactgtttaaccagctcccacaatggcatgcggtcagatccctataataaatcccttaaaatacatatatacataatctttatcttagtggttctgctcctctgattgtaccctaacataaatggtcagcagaagcttaactcatgagtctaaatgtcaatcaaataaatttcatatagatcattgtcaaaattacccagaatactggggttgggtggttggttcctgggggaaacaaagcagtatcagtctatccagtcttgactagggctgaactagttaggatggaataaaggaaggggtggggaaggtggcagaggctggactgtatgagacagaactgggaaatggctaatccatgtctgaattacttaaagctgcagggctgggactagggtaaggcaagggaggcacacaggatacaaagtttaaggaggcactcactcagtcctggccctgtaaagctggctaacaaattacaggtctaatctttttggcactttatgaatgaagaattgggagagagtgaggtagggctgagccaagactggctcttggg

SEQ ID NO: 4933 - DNA, 935 bp, Homo sapiens
tagactcaagagtgagagccttggtgttcagtgtacggtgctgggctcgagcacattcactaacaagtagtattcctggtgcatggattacaaatttctcccttacaatgatggtcatcttttttctccagagaagatcaccccctattcttccaacactagattccttaaaaaccctagcagatgcagaaagataaatgtgtaatagaaggcaacaactgcacatttgttcgtgacttgagtagaattaaaccttcacagaacacagaaacattataattactactgaaggaattttttgagtattttggcaattttgctttcgataaaaattccataaatattcgacagggaagggagcaaaacaaacctgattcttctcctctgtacattcagaatccatttgaaacttctctcaacataagcaaaaatgtaagtcaaagccagctgcaaaaatttgtagatttggcccgagaaagtgcctggattttacaacaggaagatacagatcgaccttccatatcaagtaatcggccctgggggctggtatccctattgctaccatctgctccaaacagaaagtcctttaccaagaagaaaagcaataagtttgcaattgaaacagtcaaaaacttgctagaatctttaaaaggtaacagaacagaaaatttcacaaaaaccagtgggaagagaacaattagtactcagacatgatggctgctacattgtgtaaagaactgggcttagcctatcaaatggtctgtggacttacttggaaaaactgatttgaaactttcacagatctcagctttcatctgatgtcacttttcatgatcttctcattgggcccccttaacctggtctgaagttctgggatgttttcagtttgatcagtctgatactcagtggcactttattaaaacatcagctgtgga

SEQ ID NO: 4934 - DNA, 545 bp, Homo sapiens
gctgaatataaggaaatatgtctaatggacaccagttaatactttttaaaactactctttaaaaaaaaaatacgttccccttggttaactgattttttaatccagggtggacattttttcaacctttattaaaaagacaaataaactattttgtagaagatcagactcctacttaactggaagagaaatgtctattaaatgtctctcctctttctctgggtcaagaccatgtaattttatgcttcagagatgaagatactgtttgtttacaaagagtttagtttttaagacatccaaaactctatgctagagcaaaaatcaaatagcaaaggacactagccagaaaatacagtgtgtgtgtgtgcacctgtgtgcctgctgaacaacttgacagtgtaacagataaggtaactgaagatggtggatatttgaattgtattagcttaatgtctacatatctttggccaaaactctattgtcatattagaaacatgttatctttttcatgtttattagtaatttatttttgattctttgttttcttt

SEQ ID NO: 4935 - DNA, 927 bp, Homo sapiens
cgcgcctccagggaacgggtcttgtggctttgtctcccgcgaagagacgattggcggagtcgttgaggtctccgcgccgctccctgtacaaactggtgggctcgccgccttggaaagaggctttccggcagagatgcctggagagaatgagaaacagccgggacaggctcctaaacaggtaccgccaggctggaagcagtgggccagggaattctcagaacagctttctagttcaagaggtgatggaagaagagtggaatgctttgcagtcagtggagaattgtccagaagacttggctcagctggaggagctgatagacatggctgtgctggaggaaattcaacaggagctgatcaaccaagagcagtccatcatcagcgagtatgagaagagcttgcagtttgatgaaaagtgtctcagcatcatgctggctgagtgggaggcaaacccactcatctgtcctgtatgtacaaagtacaacctgagaatcacaagcggtgtggtggtgtgtcagtgtggcctgtccatcccatctcattcttctgagttgacagagcagaagcttcgtgcctgtttagagggtagtataaatgagcacagtgcacattgtccccacacacctgaattttcagtcactggaggaacagaagaaaagtccagtcttctcatgagctgtctggcctgtgatacttgggctgtgatcctctagagccagcttggactcacatcattctatggggttgaagacaactcattccctctgaggagccttgtacatacaagccttttatttataacttattttgtattgaaacttttaaacaatactgaagaaaaaaaaacttttccgacatctgttcttggtcttttgtgacgcggttgaagggggaggatagaaaaagacaactgccttggaggagataaac

SEQ ID NO: 4936 - DNA, 1051 bp, Homo sapiens
gttttttttttttttcccggcaagaaatcatgtttattcacattccccaccccaccacctgagagtcactttcactccaagccctgggcctgacaggagggggccaaagaggggggctgcctaaggcagggcccagaccccacagtgtgggcctctggagctgtgtctttactcttgctgccgatcaatcccatgctctgaaatgcgcacactctggctccttagtagatgccataggtgggctcatgactgtccctgtaccggtccaggtagcgcaggggctgccggtgggggaagcgcttctgcttggggtggtaagggggcggccgcacgaactcaaacaccggctcccgcatgtccagaagctggtggaagatgtaggtgacggagtcatcccagcggcactggaagaaggacaagccggctggagtcatggtttcttggtgtttcttgtagaaatcaaaagtgcggaaggtccgctgggccagctgatagcagggtgaggggcgtgcgtcctcagagaagtcaatcggctggtcctgcttgaagagcaggaaggcaagacggtggatgccggagcctcgggcagggaagggggggaggtagggacacgtcacctgtccttcagccacccggttacccaggatgttggttagcagccagtggaggtactcagcatctggctccagcaggtgcccatccaagctagtgagtagcaacgtccacaaggagccctcttctgcctcataggtcacctctggcgcttgggcagcctcggttggagtcacctcattgccacagtacacaggcatcaggtcatcctcacccacagcgtaggccacgtgcagggggactcggggcacaaaggtggcaccgtggaacaggtctcggtagaggccgtaatactcagccagacgctgcttgtggtaggggccacaggtcctctcccactcggcccgcacggcatccagcgggacactggctgtgcggaggcgggcagcccgctcctcttccacattggcccgaagctcctggatggcctgtttccgtt

SEQ ID NO: 4937 - DNA, 811 bp, Homo sapiens
tacagacagattcacattgacattccaaggacgaatcctctcattccgttgttccagcaaccacttgtacaggagatctttgaaagaattctatttatttgggccatccgccaccctgccagtgggtatgtccagggaattaatgacctggtcactccattctttgtcgtcttcctctcagaatatgtggaagaggatgtggagaactttgacgtgaccaacttgtctcaagacatgctgcgaagcattgaggctgacagcttttggtgcatgagcaagctgctggatggaatccaggataactacacctttgcacaaccaggaatccagaagaaggtgaaggcactggaagagcttgtcagccggattgatgagcaggtacataatcacttcaggaggtacgaggtagaatacctgcagtttgccttccgctggatgaacaacctgcttatgcgggagcttcctcttcgctgcaccatccgcctgtgggacacatatcagtctgaaccagaagggttctcccactttcatctctacgtgtgtgcagccttcttgatcaagtggaggaaagagatcttggatgaggaggattttcagggtctcctcatgctgctacagaacctacctacaatacactggggcaacgaagaaattgggctgcttctcgccgaggcatacagactcaagtacatgtttgccgatgccccaaatcactaccgccgataggtgctgtctcctccggggacccagactgccttcatctctgatggcagtctgatcactgtggccactgtgcgagccgtggaccccg

SEQ ID NO: 4938 - DNA, 735 bp, Homo sapiens
ttttttagttctgtaggtcagataatttaataaatatttcaaataaatatataataaaaactgaaataaaatgtcaagaatggggaactaatggtattaagttttatatagaagggcatgagggaagtgtattaaaatttgttcaaatttatgactgagagggctaagaaggtacttaatttcctcagatgatactttgcgaacatgtggtctatttggttgacctttgcaaatagttgaacaaccacaccgtgtattcccataccccctagactgcctgtccaggccaagccttagtaccacaagtccacagtgaagtccactccaggttatctgcataggtagcccaggcacctttcctcttttcctttaggtgcctcccctctacccacaacctcttatttcatctcaaacacagctattacaacatgttttatttcactggaaaattctgtaaagaactaaatctggttcccttgaagaaaacatttagcacagcttaaataaaagttgagaaggagggtaagagtgcattgccccattctagctctgttgctaccttacctctgactctaaggccctgtgggatgaaaagcaggtatccaaaagaactctgcttggccctctgatacggccttgaggtcagccctggtgcctgctttctggcccacagaccgctgaaatcctaggagctgccatgggagttaccaaaaatatgtgaataaactgaatgca

SEQ ID NO: 4939 - DNA, 428 bp, Homo sapiens
cgggactcccgggaagtggaccggcagaagagggggctagctagctagtctgtgcggaccagggagacccccgcgcccccccggtgtgaggcggcctcacagggccgggtgggctggcgagccgacgcgcgcggaaggaggctgtgaggagtgtgtggaacaggacccgggacagaggaaccatggctccgcagaacctgagcaccttttgcctgttgctgctatacctcatcggggcggtgattgccggacgagatttctataagatcttgggggtgcctcgaagtgcctctataaaggatattaaaaaggcctataggaaactagccctgcagcttcatcccgaccggaaccctgatgatccacaagcccaggagaaattccaggatctgggtgctgcttatgaggttctgtcagatagtgagaac

SEQ ID NO: 4940 - DNA, 672 bp, Homo sapiens
gacgagccgggccggaagaagaggtagggcgccgccgtgacagattagtcctaaagggaacggggttgttagttcaattggctaccggaaaaaaccaggctgggctgggcgccgccatgacaaccgataccggaaaaggcgggtcgttccccccggacagccctacgccggcaaaggtctcgagatgcaggcggccctagaggtcaccgctcgctactgtggccgggagctggagcagtatggccagtgtgtggcggccaagccggaatcctggcagcgggactgtcactaccttaagatgagcattgcccagtgcacatcctcccacccaatcatccgccagatccgccaggcctgtgctcagccttttgaggccttcgaggagtgtcttcgacagaacgaggcagctgtgggcaactgtgcagagcatatgcgccgcttcctgcagtgcgctgagcaggtgcagccgccacgctcacctgcaactgtggaggcacagccacttcctgcctcctgaggactcctctgacggcaggaaaactggacatgaatgactgcccccccgcccctcccctgcagagtggccagatggagtcctgagccctggacatgggcccggctttcctggatatcaggacttccaataaataaagactctgtatactgggaaaa

SEQ ID NO: 4941 - DNA, 600 bp, Homo sapiens
acacaccacttgtatctcctatgcccgtgtcaagcagcagcagggcggtgggaacggctgcacctgcactgtggcagctcgcaggcctccctgacgtccaggcggaggctttctcaagtgtgggtgccttgggtccgacccaggaccccctccccagctcccgtcctgaggcggcagagctgagccaaggtccaggaccagtttcaagagggtgggccaggctcctctgagtccatttctagggcagcccctgcacccttgccgtgctggactcggtggggacgtctgggtggctctctgcaggtgacacacgtgctgtggctggccaggtgggtggcaggtatgtgggggtggagctctcagctctatcactgccaggccctggggtgatgctgggcagagctgtccctgcgagggccctcggaatccaggagttgggcgattccgggatggttccagagcttccaaacccacatccagcccaggatgtgagaagcagcccagaaaggcctgagccaggctgtcctggtggggcaggtactgtggccccgcctgcccagctgacaggaggcagccagcggatgcccgggtgggaggggc

SEQ ID NO: 4942 - DNA, 437 bp, Homo sapiens
gcataatacttggaagaaagggctccatgtgcctagaagagaggtactgagaggaagactcactttggaggctgtagcatacaattttcagatattgcctcaggtaaaaatatacttcctggactttgttttctgacacataagaggtgtgttctgctccctgtaaagacaagggtgggtatccagatggtcccatgagtagggctgcacaagatgctggaggcttggtaagttcctctgggtcgcagatcggtttctcgggtcgggatagtgtgagtgcctagcacacgtgtcgggcacgcagaagggccccttaaaagtttctctttcatcctggccagttttagatacacaattttgtcagtttacttacagtgcatactcttgggtaatacttgtgctgaccaagtatcttagaggcttattttaatatagta

SEQ ID NO: 4943 - DNA, 298 bp, Homo sapiens
tttttgatgtttaaagtatggtgatgaatttttgggtggtgatgatgaggtaaagcaccattttcatcaagtcgtatcaagggtcatgctaccaacataatgtcactgacacaattaaccttgattatgtggttggggtagtattttccagatttctcctctgtaaaattactactttttttttttaaccattgcttttatgtccttccctagagaacatcttacaccaaaactgtctcattttattaaaaaaacaaaaattatttcctggcttttaaggtctttttttgtttagtgg

SEQ ID NO: 4944 - DNA, 443 bp, Homo sapiens
  misc_feature (1)...(443): n = a,t,c or g
ttttttttttttttttaatactctatttgactttattgtgtccaaggattctactgagtacaatcccagctgattttagagtggagacagaattgccccaactgcaacccccccacctccactccagcccacttcaaatttgcaagtgacatgaaagcaaaggacttccataatcaacacagggtagatgaccatagcccttctagtttggattacttcccgatgctttcnnnnnnnnnnnnnnnnnnnnnnnnnnnnnnnnnnnnnnnnnnnnnnnnnnngtatgcttagttagctggcgcgcacacacatacacaccttgtatgcttagcagctggcacaaggccctcctacttttatgctccctgccaactggcttcagaattagccaactggaatgctgatgcctgggtctaatcctgctccagcactacaatcctggg

SEQ ID NO: 4945 - DNA, 398 bp, Homo sapiens
  misc_feature (1)...(398): n = a,t,c or g
aaaacaagaaaaaaaaaggaatactttagaaccttttctgatgccttgtgactttcagaatttaaaatcccccttgcagataaggccacccacggcggaaggcgggaagccgagacggggctgaggggaccttgctcccattggagctggcagggcgggaaggggtgctgcggtcagcagaggggcacccttcgcctgcgccgtgtgcagtgcctgcagtcactccctcattcccaggagtagccttgggtcagatgctggctcagatctataactgctcctgtctggtagccaggcctgcccagatgtgcaatggctggaataaagggttcttggaagcaatttgttacagggnaccctgtgggctgtggctgcttgtggcacacgtgaaagttgtg

SEQ ID NO: 4946 - DNA, 88 bp, Homo sapiens
gcggcacgaggagagctagcaccatgagcttcaataccctgaaagacagtcttatgagctacaacctaactacttcaaaaacaatttg

SEQ ID NO: 4947 - DNA, 519 bp, Homo sapiens
cagaacctgcttggccactatcttatccatggcttccgggtacggccagagcctaatggagaccttgacttggaggccatggtggctgtgtttggaagcaagggactccgagttgtgaaaattagctggggacagggccacttctgggagctttggcgctctggcctgtggaacatgtctgactggatttgggatgcacgctggcttgagggaaatatagccttggccctgggccacaactcagtggtgctatatgaccctgtagtagggtgcatcctgcaagaggtgccctgcacagacaggtgcaccctctcttcagcctgcctgattggagacgcctggaaggagctgaccatagtggcaggtgctgtttccaaccagctcttggtctggtacccagcaactgccttagcagacaacaaacctgtagcacctgaccgacgaatcagtgggcatgtgggcatcatcttcagcatgtcatacctggaaagcaagggattgctggctacagcttcagaa

SEQ ID NO: 4948 - DNA, 448 bp, Homo sapiens
gctgcgcatgctcgcgctgtgaccccggcttgaggtaacaccgcgagctgaggctggggcccttggcgcggaggctgagggacccgccgcggcgctgtcgccggagagggagggcaccgctgtcgtcggccagaagccaaggagtcctcagtgacggtgggatccacaacatctccacatcgctgtccccacccagccagggcagcgccagcactagctcagacgcaaggacggaaccgctggactccaggttccttgcctgggagtaggagaaatccacctgctgggggctgagtgtggcctgagggacaggccctgggtcccgggatgcccctgcccgagcccagcgagcaggagggtgagagtgtgaaggccagccagggagccatcccccaagccaggcacagaagtcatcccggcagcccccagggaggcccagaaagttctc

SEQ ID NO: 4949 - DNA, 1068 bp, Homo sapiens
aacagggccgcacagctggctatgaccccaaccctggacaactgtcctggtgactgaggatctcctctctgtgctggctgagctgcaagaggctctatggcattggccgaggacagccacccaggcctggctggggcctcagatactggtacaggcggctgcctggttgtacatgttgttagctgtgaggaggagttccagcaacagaagttggacctgctttggcggaagttggttgacaaggctccactcagacagaagcacctcatctgtggccctgtgaaagtagctggtgcacctggcactctgatgactgcccctgagtactacgagttccggcatacccaggtgtgcaaggcctcagcactgaagcatggtggggatctggcacaagacccagcctggacagagatctttggtgttctctctgtggccaccatcaagtttgagatgctgagcacagccccacagagtcagctcttcctggctctggctgacagcagtatctccacgaagggcacaaagagtggcacctttgtcatgtataattgtgcccgtcttgccacactctttgagagttacaagtgtagtatggaacaaggtctgtaccccacttttcctcctgtgagcagtctggacttctcactgctacatgatgagggtgagtggttgttgctcttcaacagtatcctcccctttccggatctgctgagccggacagcagtgctggactgcacagccccggggctccacattgctgtacgcacagagatgatatgcaagttcctggtacagctcagcatggatttcagctcctactacaaccgggtacacatcctgggggagcctcgaccacacctctttggtcagatgttcgtccgcctgcagcttctgagagctgtgcgtgaggtgctccatactggcctggctatgctgggtctccctccactgagccacatttaaggccacagaggctccaatacctgggaatgttcacaaagtcatcaactggaaaaaaagcaaaaacccacggccaaaataaattggtactgtttgttacaaaaaaaa

SEQ ID NO: 4950 - DNA, 1904 bp, Homo sapiens
gaggacactactgtctgtgtcctagcactccctacaaccacaggctcagcccacgcactcacagctgtttgtaaccatatctcctcggtacgtgctgtggctgtgtggggcattggcaccccaggtggccctcaggatcctcagccaggcctgactgcccatgtggtgtctgcgggggggcgggctgagatgcactgcttcagcatcatggttactccggaccccagcaccccaagccgcctcgcctgccatgtcatgcacctttcgtcccaccggctagatgagtattgggaccggcaacgcaatcggcatcggatggttaaggtagacccagagaccaggtaatatatgctcctgggcagggtgtggtatgggtcatgcagatgctcccaggcttgcaggctccacctgacagctgcatgttgtctctgcaggtacatgtcccttgctgtgtgtgaacttgaccagcccggccttggcccccttttggctgcagcctgtagtgatggggccgtaaggctcttttcttttgcaggattctgggcggattctgcagctccttgctgaaaccttccaccataagcgatgtgtcctcaaggtccactcctttacacacgaggcacccaaccagaggcggaggctcctcctgtgcagcgcagtaactggatgggcagcctgggctttctgggatctcaccaccatgctagaccatgactccactgtcctgggagcctccagtggatcctgggcttccctaccggcttgggcaccccctccctgactctccaggcccacagctgtggtatcaacagcctggcacaccttgcccacccgtgagggccaccatctcgtggccagtggcagtgaagatgggatccctccatgtcttcgtgcttgctgtgggagatgctacagctagaagaggctgtgggagaggctgggctggtaccccagctgcgtgtgctagaggaatactctgtcccctgtgcacatgctgcccatgtgacaggcctcaagatcctaagcccaagcatcatggtctcagcctccattgatcaacggctgaccttctggcgtctggggcatggtgaacccaccttcatgaatagcactgtgttccatgtgcctgatgtggctgacatggactgctggcctgtgagccctgagtttggccaccgttgtgcccttgggggtcaggggcttgaggtttacaactggtatgactgaggtatcctgcggtggctggcgtgctgggcatggggcctgctcacagacagcatggagcagggaagggctgtctgtgcccatgctcagcatgccttgaggggaggaggtggtggccgtgggttcctgatgtcggtgcaggagctgaaggtgagtggagtgctgccaagaatatgcccgactccccatgacaagacagaactttgtaacaaacagtaccaatttattttggccgtgggtttttgctttttttccagttgatgactttgtgaacattcccaggtattggagcctctgtggcctttaaatgtggctcagtggagggagacccagcatagccaggccagtatggagcacctcacgcacagctctcagaagctgcaggcggacgaacatctgaccaaagaggtgtggtcgaggctcctgaaagagaaagggcctgctggtctcatcctctgcttcctttgcctttaccctatacctctctgcacgtcccaccccattttgctgtgtgctcacccccaggatgtgtacccggttgtagtaggagctgaaatccatgctgagctgtaccaggaacttgcatatctagagacagagactgagtcactggcccatctctttgctcttgtgccccaggccagaataaagaatagagtgtagagtgaaaaaaaaaaaaa

SEQ ID NO: 4951 - DNA, 1852 bp, Homo sapiens
gcgccggaggacgttccccgcggccggagccatggagatgccgctgccccccgatgaccaggagcttcgaaatgtcatcgacaagctcgcccagttcgtggctcgcaatgggcccgagtttgagaagatgactatggagaagcagaaggacaaccccaaattctcgtttcttttcggaggcgaattctacagttactacaagtgcaagctggcgctggagcagcagcagctcatctgcaagcagcagaccccggagctggagccagccgccaccatgccacccctgccacagcccccgctggcccccgccgcgcccatcccgccggaccagggcgcgccatccatggacgagctcatccagcagagccagtggaacctccagcagcaggagcagcacttgctggcgctcagacaggagcaagtgacagcggccgtggcccacgcggtggagcagcagatgcagaagcttctggaggagacccagctagacatgaacgagtttgacaacctcctgcagcccatcatcgacacgtgcaccaaggacgccatctcgggcgggaagaactggatgttcagcaatgccacgtccccgccgtactgtgagctgatggccggccacctccggaaccgcatcacggttgatggggcacacttcgagctgcggctgcacctcatctacctgatcaatgacgtgctgcaccactgccagcgcaagcaggcccgggagctgctggccgccctgcagaaggtcgtggtgcccatctactgcaccagcttcttggccgtggaggaagacaagcagcagaagatcgcccggctcctgcagctctgggagaaaaacggctacttcgatgactccatcattcagcagctacagagcccagccctggggcttggtcagtaccaggccaccctcatcaacgagtactcctcagtggtccagccggtgcagctggccttccagcagcagatccagaccctcaagacgcagcacgaggagtttgtcaccagcctggcccagcagcagcagcagcagcaacagcagcagcagcagctccagatgccgcagatggaggctgaagtcaaggccacgcctccaccgcctgctccacccccggccccagcacctgcccctgccatcccgcccaccacccagcctgatgacagcaagcctcccatccagatgcctggctcttcagagtacgaagctccaggaggggtccaggatcctgcagctgccggcccccggggccccgggccacacgaccagatcccaccaaacaatcccccttggtttgaccagcctcaccccgtggctccttggggccagcagcagccgccagagcagccaccctacccgcaccaccagggcggccccaccccactgccccccctggaacaacagccatgagggcatgtggggcgagcagcgcggtgaccccggctggaacggccagcgcgacgcgccctggaacaaccagcccgacgccgcctggaacaaccagttcgagggcccctggaacagccagcacgagcagccgccctggggcgggggccagcgcgagccacccttccgcatgcagcggcccccacacttccgggggcccttcccgccccaccagcagcacccgcagttcaaccagcctccgcacccccacaacttcaaccgcttcccgccccgcttcatgcaggacgacttcccgccacggcaccccttcgagcggccgccctatccccaccgcttcgactacccccagggggacttccctgccgaaatggggccccctcaccaccaccctggccaccgcatgcctcatcctggcatcaacgagcacccgccttgggctggacc

SEQ ID NO: 4952 - DNA, 582 bp, Homo sapiens
  misc_feature (1)...(582): n = a,t,c or g
ggttggactgtgaagaaacatggcggccgcgacgttgacttcgaaattgtactccctgctgttccgcaggacctccaccttcgccctcaccatcatcgtgggcgtcatgttcttcgagcgcgccttcgatcaaggcgcggacgctatctacgaccacatcaacgaggggaagctgtggaaacacatcaagcacaagtatgagaacaagtagttccttggaggcccccatccaggccagaaggaccaggtccacccagcagctgtttgcccagagctggagcctcagcttgaagatgatgctcaaggtactcttcatggaccaccattcgctgttggcaagaaacggctttacttacaaaacagactctttaccttctgctgtgtttgaagtatgtttagtcagcatgctcaggaaataaatgtgaattgcccttgagacctgcttctacattggggtgctttgttaactctacctgatcttcacttgtcaagtaatttgagaccacttcaaaancctctgnaaacaccccnaaaggcagaatctgctatnttgaggnttccaataacttcccaagaatctgg

SEQ ID NO: 4953 - DNA, 339 bp, Homo sapiens
tttgacttgtcaatttttatttatcaaaactttgaaagtctatcagctaacatgacttaaaaattgaggttatgaggcattttttgaaattcatatatccttactataatagtgaatcatcaagtgttgaatgtaagtgcagtagaaattatgaaatctcttgccacagaaccatacagaaaaatccgtttatcagcaacaaacattaattgcatggtgaaggatgttttgagtgtctgcgacctgatatcaaaatataaacatacagacatatttgggaggcaaaggagtgaataagaatggattatttatgttacagaaaacagcatggggtttctg

SEQ ID NO: 4954 - DNA, 2361 bp, Homo sapiens
  misc_feature (1)...(2361): n = a,t,c or g
ggaaattcgttgaatccaaaagtgacaaatggatcgatatccacaacccagccaccaatgaggtcattggtcgggtccctcaggccaccaaggcagaaatggatgcagccattgcttcctgcaaacgtgccttttcctgcatgggcagtacacttcagtattaagccgccagcaggtcttgctccgctatcaacaacttattaaagaaaacttgaaagaaattgccaagttaatcacattggaacaagggaagaccctagctgatgctgaaggagatgtatttcgaggccttcaggtggttgagcatgcctgtagtgtgacatccctcatgatgggagagaccatgccatccatcaccaaagacatggacctttattcctaccgtctgcctctgggagtgtgtgcaggcattgctccattcaattttcctgccatgatccccctttggatgtttcccatggccatggtgtgtggaaataccttcctaatgaaaccatctgagcgagtccctggagcaactatgcttcttgctaagttgctccaggattctggtgcccctgatggaacattaaacatcatccatggacagcatgaagctgtaaattttatttgcgatcatccggacatcaaagcaatcagctttgtgggatccaacaaggcaggagagtatatcttcgagagaggatcaagacatggcaagagggttcaagccaatatgggagccaagaaccatggggtagtcatgccagatgccaataaggaaaataccctgaaccagctggttggggcagcatttggagctgctggtcagcgctgcatggctctttcaacagcagtccttgtgggagaagccaagaagtggctgccagagctggtggagcatgccaaaaacctgagagtcaatgcaggagatcagcctggagctgatcttggccctctgatcactccccaggccaaagagcgagtctgtaatctgattgatagtggaacaaaggagggagcttccatccttcttgatggacgaaaaattaaagtgaaaggctatgaaaatggcaactttgttggaccaaccatcatctcgaatgtcaagccaaatatgacctgttacaaagaggagatttttggtccagttcttgtggttctggagacagaaacattggatgaagccatccagattgtaaataacaacccatatggaaatggaactgccatcttcaccaccaatggagccactgctcggaaatatgcccacttggtggatgttggacaggtgggagtgaatgtccccattccagtgcctttgccaatgttctcattcaccggctctcgatcctccttcaggggagacaccaatttctatggcaaacagggcatccaattctacactcagttaaagaccattacttctcagtggaaagaagaagatgctactctttcctcacctgctgttgtcatgcctaccatgggccgttagaaacaagtttgtttaagactgactccatcctgagtaatctccctttatttttgaccagcttcatttgtcagctttgctcagatcagatcgatgggattggaatacattgtaactaaaatcttcctcaggactattaacccctgcaaagtttctatagggaactgcctagtgtaacaatgaaaccagatttctcacttgctcttcatacttctattttgaggtaactgttgtaactatgaaatgcttatctgaaagtagtgcttaaacctgatttctaaaaattatcccattttctgatgatttgaaggggagaaaagccagtgtatgtaaagaaaatgttccagcccagcgcnggtgctcacgcctgtggttccatcattttggggggccacagtgggcggattgcttgagcccaggagttgaggaacgtggcgaaaccccgtatctattatttaaaaaaattgaaaaagtaaaaaaagaaaagggaaaaaaaattttttaaagaagatgttccaataattgcaagaagaactcttagatggggaaacaggacagaaataactcacccgccttttggttgaccctcaaacatagcgcgtaccgtaaatgccacgtgggagagacctcctgcaaagttttcgtttagccccgtcgttttatcccacaatacacaagatataatccatttttatatatcccaaagttgtggcaacagcttctttcttttctgctcaatgcccactttgtttcctagtaattcatgaccactattaattctatcattgtcactgctcctgcttaagatcacttctcaaggatacctcagtaagcaatggataaatcaactttttgttatatgtgccaagtactaagtttcagggttctct

SEQ ID NO: 4955 - DNA, 446 bp, Homo sapiens
gcattttctatatttacaatttttttaaaactatgataaaaatttcccttctctataatggctacataagaaagaaagtatactcatttgtagcaggcatacttgcacagcatttcatccacctctttgtaaagaccagagggctttgtcttctctccagtaggtctttagaacaaaataacaacttgggctctcattagaactggttaatgtgctgtataggccatcctaagtgttggtatcacagcatacccaatgtccaagttgccatacgtacgggcatgctacagcttcattgagaaatgcttacgtcagttgggtttttaagggctcttttacagcatctacaggcccctctacagaagtcccttgggttttattttagctgaggctcatttttccttctcactccaagactgacccattctttgacctcagataaaaca

SEQ ID NO: 4956 - DNA, 507 bp, Homo sapiens
tttttttttgtttgtatgaacaatccattggtcacttagacccctatgtaaaaataaaagaatcctcaaggcatgaaaacaccagtaatctgtaatctgcaggactcttcccctgtctgggaaaatatttgccacaatttgcctcaagcaaattcttcttggtcactcaaggctaagaaaaaaattcagattgtaagagttgtaattttttctctctctcttttttttttttttgccagcaaactaccattctggtggcaaatataaaagtgcagaatatatggaccacgaggccgagcatacaccactaacaatggtacatctgcctgcccaggctgcttgggagtctctggaacaggctttttaatatttattctacaatataaatgtaggtataacctattatataaaccatcttaaacttaaatctccatgtacaaaaaagactaagaatatctaataataactagtgcagtgcgtcagtttttgttttttttttgttttgtt

SEQ ID NO: 4957 - DNA, 988 bp, Homo sapiens
  misc_feature (1)...(988): n = a,t,c or g
tgttattccttggcaaggtgctgatagtctgcagcacaggtttagctgggattatgctgctcaactaccagcaggactacacagtatgggtgctgcctctgatcatcgtctgcctctttgctttcctagtcgctcattgcttcctgtctatttatgaaatggtagtggatgtattattcttgtgttttgccattgatacaaaatacaatgatgggagccctggcagagaattctatatggataaagtgctgatggagtttgtggaaaacagtaggaaagcaatgaaagaagctggtaagggaggcgtcgctgattccagagagctaaagccgatggcttcgggagcaagttctgcttgaacctagccgacggttatggaaacccattgacattccaaaacaatatatacacacacacataaatcagccaaaatcagagaaaaggaacagggatttaataccttttttatgcttatttttctcaaacatgtactcctttcatacgggtggcttttacaaggcaacttccgtcatttaatgttttcaactgtaattgtcttaatggaaatgttaaaattcatatctgattaacatttttaataacttagaggagattttaactttatttaaaaataggtaaaattattgtacctaattatgtctaaagtttattcaggggtaatttccctgatgtctgtataaaatcaagatcttattttactgatgcataagtcctagtgggtcaagactaggcatatgctttcagataaataaggaattactccaatcagttttccccaatcaaagaagccatgtcattttacttttagaaacatacaattggggcccaatatggggaattttcataatagttcatacatttgtcagccaacattaaaagggtaaccaactcctcagggtattttgtagttttacccctaacggtttcttttaaaaggangtaggggtaaaaaaaggaaaggggtagg

SEQ ID NO: 4958 - DNA, 680 bp, Homo sapiens
ctggcggccgttgaaaaatggcgactgtggcagagttgaaggctgttttaaaggacaccttggaaaaaaagggggtattagggcatttaaaagcaaggatccgagctgaagttttcaatgccctagatgatgaccgtgaaccccgaccatcattgtctcatgaaaaccttctaattaatgaattaattcgagagtatttagaattcaacaaatataagtatacagcatctgtcctcatagcagaatctggtcaacctgtagttccgttggacagacagtttctcatccatgaactaaatgcatttgaagaatcaaaggataatacaatacctcttttatatgggattttagcccatttcttgcgtggaactaaggatggcatccagaatgcatttctgaaagggccttcacttcagccttcagacccaagtcttggcagacaacctagtagaagaaagccaatggatgaccacctaagaaaggaggaacagaaaagtactaacattgaagatcttcatgtttctcaggcagtcaacagataatgctttgtttggggtatcttttgtcttaaaattgtattattaattaaataacttatttattgtcccaatgttaccaaaatgcaccactaatgtttgtaacattgggacaataaataagttatttaattaatgtcgacc

SEQ ID NO: 4959 - DNA, 392 bp, Homo sapiens
  misc_feature (1)...(392): n = a,t,c or g
ctcccttacagcccccagacccttcttgaaacgagagccagcaagctgagcacagaccagcagcgacctcccttccagcccccagaaagctcggtcacttgagcctggggtgctcccgggccgctctcanagaagnggcaggtttcacgttcattccgagtggcggatcgngtggcttncaaagccttttacagnccccgcccnccatcccgtggtctgnctgcnngaactctnccgnctgngagaancctctttccganncgacctnccggncaccccggncctgtgcctgctcggaagagctcactgacagctgcggtctgggcaccgcggnccatgtgtgtctgcatgaggaactctttantggcnnacncctaanagacggctgcggg

SEQ ID NO: 4960 - DNA, 312 bp, Homo sapiens
gccggttcccagcagcactggctgatgctgccccagctgggggctgattggggaggggacaggagaagggaccattggctccaccctgaggaccaggaaggagtgtccagagggcgatggggttgaggtcgaggaggtggaacctgtgacttggttgctccaaaggtctggaaaggggtggttgggagctggggctgcagcccctggggtccccaccactgctctgccggctcgccgggcaagccctcgcagggcctggcctccacacttctcaggagagctgacgtgagtgctagctctgccccttggctg

SEQ ID NO: 4961 - DNA, 1083 bp, Homo sapiens
cggacgcgtgggttcttagtcagatgctgtggtacttggcatttaacaactagaattcagaatccagatttttaaaggtgaattattttaaataactgagttgtaatagagaagtaatttatttgaaattattttaggaaatggaagataaagtgactagtccagagaaagcagaagaagcaaaattaaaagcaagatatcctcatctgggacaaaagcctggaggttcagatttcttaaggaaacggttgcagaaagggcaaaaatattttgattctggggattacaacatggctaaagcaaaaatgaagaacaagcaacttcctactgcagctccggataagacggaggtcactggtgaccacattcccactccgcaagaccttcctcaacggaagccgtcccttgttgctagcaagctggctggctgattaagaggctgaactgcatgaatctgctaaatctcattatttctccttaatatgttacttatctactttttatttcctttcattcactagtcatttgagactgacagctttgcaggtagcagtagtgtgtgctgctattgtggaatatacgtgtgtagagtttttgattagtttaacagtgcactggtgaagaggacatgttagagcaacataagtaaactacttgaaaatagttgtatatattacctaacttctagtgtagtactggttctaacaagtaacaagcaagttttaaaattttaatgttttggctttcattacttcatcttaattatagctttgtatgttactcttatttaatataatctctattgtattgatttcttctgtatttaccttttggattttgtaaaacagaagtttaagaccacaagttagaagaaaggtcacatatttcaaacacaactagatggggctctgaaagatttgtatctctgtgcttgaacttgaatggccttaaacctgtttcagctttaacagtagaattttacttgggcaatatttgcccattctggtgtaacttatgtgactctagtgcttaacagctgccgttgaagctaatattcagttctgtagagttagaatacctttt

SEQ ID NO: 4962 - DNA, 1617 bp, Homo sapiens
ttttttgttttttttttgaggatgggtagaaaagaattttattgagcaaaagaacagctctcagtggagaggggatgcagggagtggtccccaacccccacagcagggtgatttctctcctcactgcagctgagtctgggtcttttatgggctcagaataggggaatacacgttgactgatttgtaagtatgcaaaggcaccactcaaaaggtgggcacagcagtgcaagaaaccaattaggaaagggcaggtatacgtaaaataggtgaagggttgggatcaatcggaggaaagcacaccaaatgggaagacaggttctcaattcagtatgaggatttagccgggactgtcttcagctttaaggttgggtttcaccaggtacccacccctatctgcctgggcatttgactgcctcctgccactatcattacctgaccgggtttccacaacccaccatccacagtgaggaagggcagggctcctgaaaatgagccagcaattctccttcaggtggatggagatacaagtcttaccagtacagtctcatgcataatcacacacagaatgtctccactttggtatctagcaatggctgaaaaagccacagcactgtgtgtgtcctctggtgtctgatgaagtatgactcctggctaaaggctgtaccacattccctatacacataaagtttctatcctgagtgtgtcctctgatgtctgataaggttggacttccgactaaagccccgtccacactccctgcacacaattggcttctcccccgagtgtgccttctggtgtctggcgaggctcttctttaggctgaagcccttctcacataccccacacacgtagggcttctcccctgagtgtatccgctggtgactgagcaggtttgtcatcttgctgaagctcagtccacactctccacagttgactgttccaaatcctaagacttctatcctcttcaacaatttgtctgtttcctcagggttccctgtctgagctgggctggcttctaactccacccctctgaggccgttccgagagctgactggctgcctctggggtggcctggagaacgctcccagagtccttttcttggttcttccaaacaaaggcatggcaccttctccctcaggaccttctgcttgatcactccagggtctcccctcagaggcttgttgctgcttctcctggtcccctgggcctggatccccaggctggatgttaccttcctgccacacaagcatgtgaagatccaggggggatgattacacagcacatgctgcatggggaatttctgactggagaaacccggagggcagaaaggatcgaggtagagctctggctctggatctgctggacaggttgccggtgaacattttttttcctctctccaggtctctttcccttgctccagctgggtgatgagttctggtttagaaaatgaaattcccagtgagaccaggttgctgtagttctccagcatcacctctctgtacagagtcctttgagcagggctcagcagcctccactcatcctgggtgaaatccacagccacatccctgaatgccacgaacgcttcgggtgctgacagcgggaacccaggagattcgg

SEQ ID NO: 4963 - DNA, 103 bp, Homo sapiens
ctgacggagttataacccttctgaatactctgatctaaagctttatgtcctagaacttccaaaacacaaagtccccaaaatgaagactctagggccctggctg

SEQ ID NO: 4964 - DNA, 828 bp, Homo sapiens
ttttttttttttactttcatgatcagctttaatttaagggacatgtaaataaaaagatgcatttgacaggacagcagactagttcaagcaggaggttagaccagtaacaacaaccaagaaagcaaagtgctcgtttccatcttggctttaccacacttacaaactgatacccaaataacagaaatgtttctcaaagctgcacaagaattttaaggattcatgaccccactttcattaaatagtcccagaagatagctaaataacattttcagatagaacctcacactgcataagtttcataacaaacaaacctaagatatgctgacagaaatcacattgagtttgcaagcactcaaatagaaaacccaagacctccggcaacaaattagaaaatatgaacagaaatattttaaaccacaagtatttcatcccaactaaattccaatttcttcaatgttctctgagttgttagatttcaaagtgaagagaactgaaatctctttttattcatagcagagccaaaactggaagtcacttattaaatacctgtgtacaaaacacccatacttggggcctatatgccgatttcaggttggataaacgagtcatgttgaatgacaaaaagttagactggggagatttatggagagaagcaagcacctgtgatttgttggtttggcgttacaataaacactgtaagtgaaaatgagtcacaggcagttagaatggcgttaaggaaaccatttaggtctaaaaatcaggactgaagtgatcaacagttaacagatgaagccatgagaactggcatgctctggaaaggctggtgcc

SEQ ID NO: 4965 - DNA, 942 bp, Homo sapiens
ggttttttctctttttttttttttttttttcaaacaacctgtttatttgggcttatgatttactaactgcaggtctatgtgcaggaaggccagcgtcccctcctgccgtttcacccacatccacagagcagccctagtgccaaggtgcagccactgccacccacggcacacggggaacgggacccatgctgcaggcctgctctcctgcccagggagatgccacgtgtgtctgtccggcagcttcatgacacagttaccaagcagctagggagggcttagatttgttggtgtccccaggcctctccctcgggggcttgggcgcatccccacagccccaaggggatgggggctctgccacggggcccaattccacagctccaacgtgggcgcccctcccgtgcccatggggcagagccaagtatttccagaggtggcttggaggccctggggtggcggggagaggaacagggagagcatgagacagacccacagggctgaggccaaccctgcttttatttcacaagagcttctcgatggctgacaggagctcgggtttcaggatggagtccggctcggcccccgcggccttgatgtcctccagcacagccatgtcccacgagaaggtcaggagggcagagggcaccagcccgcactcgttcaaggccaggttctcgtcctcggacagcttctgccctcccgaggccagcagctcaaaaggcagccagtcgctctgcagggcctcccggacgaacccgtacaccgcccccaagccgctcccgagcgtagaaagtgccctgcaggaggcagccatcggggaggcgcacgcgcagcagcgtgtaagttgtacttgcgcagcccccgctgctcctccttctcccgcatggccttggtccgcagcacgctcagccgctccaccgcctcggacctgagcctctgctcccg

SEQ ID NO: 4966 - DNA, 423 bp, Homo sapiens
ttttttttttttttggacttcaaaacagtgtttactgactctgggcttaaacttctagtccactcctagaacagaaaccctcaaagttcaagagtggttttttttgtacaattgtttatacaaattcaacaaaggtaaaatcgcatcagggaaggtctaggaaacaccaccttacaacaatggcacttataaatgcagaactttacaactaggaaatagccatgttacaaacctaaatgagaactcaactcacacttcagaggagagaagcaaaagcaaaagaaaggctatgtgggagcatttattctacgtcttgactcactgtataaattagatctatgtaagtacaagagctcatgctggagcagaacctcctgagtgcaaaggctgaagtcgaaattttaaaatttgagaaaagtgaat

SEQ ID NO: 4967 - DNA, 841 bp, Homo sapiens
tgtaatttataaaatatcctttatttattctaaggaacagtcaagcagtagctttaaaaaaaaaaaaaaagacacattttttgaaagatattcttagtgttgtgacctggcattgggcccctgtgagcgggacggtggctgagaccgcctgctgtggctttgcgagttctctgcactcactggcaggggtttggtgggaaacggggaagctttggcatggttctgtccagttgcttataatcaagaataatgagttttgaggtttacaaagagcagaagtaacatttatacggctggcatttgacaaaagattgctgataatatactcattccaggaagtgtaaaaatgctttaaaggaatgataatttgtacttactgtttatggggactagatatattagaattatagcatcattatggggacatagtgtttccctataaattcagaaattctctggttgatgtaaaatcatacttcctggttttacttaattagtaaagaaataaataaattagagtaacatttagtcaggtagagttactcctttttccccttctttattaataaattttatttttagcacaatcatttacccaaaaagagagtttgagaatgttcgagaatctctaccactcggtaaccatgctggctgttatatcagaaaaatccataaacatacacagcagcgagctgttttcacaagacttcctgctaataaacacaacactttctcctccactcagatgggagcctcagatgccaaaacggcagatgtgccaactaactataggctcgttgctaagctgagaaacctatcaagtttgtccagcaaattcgat

SEQ ID NO: 4968 - DNA, 1376 bp, Homo sapiens
agcctggagagtgcgcgcaccgccgcccgggcagccgctggctccagctcacgaaacagccccgggcgccgcgccgctctgagtccagcctcctactgagaacagtccctcccttgtgcgggtcgcacggctagccgcaggttcggccacgtcaaatccattttctcaaaaagcagggagcagagctctctcttcgccgccgacgcagaaaggagctggggaggaaaaagctgctgccttttgcgctggagattcgtggggcaaggcttctcattttcccaggctgcttcccctcccgggtgaggagcgtcctgagactaaggaaagagcctggaaaatggagcagacctgggacgagagattattttgcagaggatgatggggagatggtacccagaacgagttcacacagcagttctgtttcattgacagcttttcttagtgacactaaagatcgaggccctccagtgcagtcacagatctggagaagtggtgaaaaggtcccgtttgtgcagacatattccttgagagcatttgagaaaccccctcaggtacagacccaggctcttcgagactttgagaagcacctcaatgacctgaagaaggagaacttcagcctcaagctgcgcatctacttcctggaggagcgcatgcaacagaagtatgaggccagccgggaggacatctacaagcggaacactgagctgaaggttgaagtggagagcttgaaacgagaactccaggacaagaaacagcatctggataaaacatgggctgatgtggagaatctcaacagtcagaatgaagctgagctccgacgccagtttgaggagcgacagcaggagacggagcatgtttatgagctcttggagaataagatgcagcttctgcaggaggaatccaggctagcaaagaatgaagctgcgcggatggcagctctggtggaagcagagaaggagtgtaacctggagctctcagagaaactgaagggagtcaccaaaaactgggaagatgtaccaggagaccaggtcaagcccgaccaatacactgaggccctggcccagagggacaagatctaaaaaaaataatgctgggaagtcctaaccacatcaagaatgcctcagatcagtgacccaaggaaccttccagaatggatgaaatagacccaaagctgaattcacctaattttagggccaaaaacccaaaaaacaaaacaagaccaaaaaaatcttcagatactgggagaacaaatctcaattgctcaattgtatcttatgaaaacaatttttcaaaataaaacaagagatatttaagattcattaagttcttgtcatttcaaattttaagaaaaatattttctaatggaattacatata

SEQ ID NO: 4969 - DNA, 415 bp, Homo sapiens
attaaacacataatcttgctaggagagaccatcttgttagtattatgaaacactggtgggagtaagaaccagtatcattgatatgcaaaattgtgcagttatctctgcaaatcattaggaaaatgttgaaaggttaaaaatcaaaacaaaatatagtggtgatccccaaaactattttgacattattttgacgatgagtaatttagtctcaaccaaaatctttttttcccattcataataatcctcctcccctcaaatgtctttaaaaaatacatgaaacagttcaataacaaaaaccgaagagcacgaactattttcaaaaacagaaaaatctctagtgcagaaagaaacctcaaagagcagattcctttgcagacattaatcaatgcgcttgcaaagattatgaagatttctc

SEQ ID NO: 4970 - DNA, 438 bp, Homo sapiens
ttaccaccaaaatggttttatttttgtcattgacaacaagcacaacactgcaattgtatcattattttgtttagtttcttaaatattacttaagtatgcattaaaaatatgtttacattttaaaaatgtgacactttaaagaagtcctctgtaaacacgatcccttctcaatatattttcctgctttgtttcatacataaataacttaatctacaaagtcataaataataccatcaactcttatggcctggaagtatatacaaattttggagtctgacaaaagtgttctttatgattttataaataacacatagtatttgtagtgttgattataaatcaaatgactttttacaaattcctactgtctcctcaacctgttctaccagtaacagatcttccagtttacttggttggtaaagatgccaggcatttaaaaag

SEQ ID NO: 4971 - DNA, 720 bp, Homo sapiens
gtttgcccttctcggagggtacctcctgttccctgtctgagcatcctgcatggaagtcaaaggaaatccctttcttggtgacgacttaaatctgggttccctcagacattgggttgcaccccaacaaatattaaatggcttcttcttaaagcccagagaaagaggttttttaaaagactgtcgccaaatagctgagccaaaaggctgatcagaattcactttttggaatgtggcagttaaacactaccttgatcattctctcctctttcctcgaggaactcctggagggtttgagcgtctggaaactctctgctctgacccgaggaagcaccctcctgacgccgccttcctccggttattgaaaggacgcctcagaaatgctttgttttcttttacgatgtattcagaagcctttactgattaaagttttcttttatttgggtggccgggagagacccagggaggttctggaggttcctttctgtctcctggccccaccaggggatttccccatttctgtttgctgcctgaaagcaggatgaggaaggccaaggagagtccttgcacccgtgagcgtcaggatgaggaaatgacaggaggaagacgtgggtttgggttagtggctgctggcgttttggcccttggtgtttctggagcctccaggggatctaggggagcctgggcttgccgtgcatgtcgataagcagagctgttcttggg

SEQ ID NO: 4972 - DNA, 1036 bp, Homo sapiens
gcggacccaggtgcggaagtgcgagggcccaggtggctgaaggggcgttagaacatccaagcggtggggcacaggcagatccccgacctgacctggaccacccttctcctcttggcccgccccttcaactcgcctccgcttaggtctggattggccccgccccctgacctgagcctggtccttcttcaggcactgacccttgacctccggtggctcccccatctctcaggcgcgatggctacgggcgcggatgtacgggacattctagaactcgggggtccagaaggggatgcagcctctggggaccatcagcaagaaggacattattcaacccggacaagaaaaaatccaagaagtcctcttgagacattgatttttcaagaggcccgaggggatgcaccgggaagtctatgccttgctctactctgacaagaaggatgcacccccactgctacccagttgacactgggccagggataccgtacagtgaaggccaagttgggctccaagaaggtgcggccttggaagtggatgccattcaccaacccgggcccggcaagggacggagcaatgttcttccactggcgacgtgcagcggaggagggcaaggactacccctttgccaggttcaataagactgtgcaggtgcctgtgtactcggagcaggagtaccagctttatctccacgatgatgcttggactaaggcagaaactgaccacctctttgacctcagccgccgctttgacctgcgttttgttgttatccatgaccggtatgaccaccagcagttcaagaagcgttctgtggaagacctgaaggagcggtactaccacatctgtgctaagcttgccaacgtgcgggctgtgccaggcacagaccttaagataccagtatttgatgctgggcacgaacgacggcggaaggaacagcttgagcgtctctacaacccggaccccagagcaggtggcagaggaggagtacctgctacaggagctgcgcaagattgaggcccggaagaaggagcgggagaaacgc

SEQ ID NO: 4973 - DNA, 415 bp, Homo sapiens
ctgggcaacagggagagactccatctcaacaacaaaaacaacaacaacaacaaaaaggcaaaaacaaacccctggaaattaactggtaataaagagggggaaaggaactggttggaaactttccttaaaaaaaaaagtcaaaaccctgatttgccaacatgtagacctcagcttaatgtagacttgcagaaagccattaatttagggtagtattgatttatatttgactggtaattaagagcatacatgctgcttctttattatctgggtgacacaaattcatgtggcctgaggaagggtggaaatagtaggggggaaatgtttgtaagctttgagaaagattttttttctgtctgcaagactgcattgaaagcactgtacctaatccaccaccacaccaccaccaccactcctt

SEQ ID NO: 4974 - DNA, 494 bp, Homo sapiens
cgctccgggagctggtgcagtggctaggcttcgcaccttcgagatcttcgtgcacctgctggccctgttggtgttctctgtgctgctggcactgcgtgtggatggcctggtcccgggcctctcctggtggaacgtgttcgtgcctttcttcgccgctgacgggctcagcacctacttcaccaccatcgtgtccgtgcgcctcttccaggatggagagaagcggctggcggtgctccgccttttctgggtacttacggtcctgagtctcaagttcgtcttcgagatgctgttgtgccagaagctggcggagcagactccgggagctctggttcggcctcattacgtccccgctcttcattctcctgcagctgctcatgatccgcgcctgtcgggtcaactagcctcaccgaggtgccggagagggagcgctggacaactagaatgttgacctcgagccgaggccctacttgcaagcgcaccggaggagaggctct

SEQ ID NO: 4975 - DNA, 1573 bp, Homo sapiens
ttgaactggcttgaaggatggcacctgctacactgcaatgtggccgcggcctggcttctggtgtgtaggtaaaggtaaggctggtggaatatatgattccatcatttcggaccaaagttactgaaacctgtattggttgctggacctatctccaaccttctcagaatgcagaaacgtctgggacaacacgagcatactctctccacacctgtacatagcttcagctttctacatccccaaaccacacttgtaaatttgggagttgaaattctgtcctgttaagtttcaagcttggttcgtccccaccgccattcaacttaaggctctctacgacaggcataggcatgaccagggcaaggacagggcccattctctcataaaatgtatacttcgccttatgtgtgctaatgattgcccaggaagcaccatcatttatcatctctttatttggttctgttgggcatggagtggcctgaaattgaattattctttcttgagaaaggcataagtacattctttctgtatcctcaaggtcaaatgcacatttatggagttgtgacacaggatcatctgcatccaataatgtggtctgcttatcaactttcctaattatcaatcttgggagtgccatgccagtaactgagcacacaagcttgactgtttgtccataatgaatgtagccatctctgactgtgaattcttctccttctgatccatcatcatccaagaataatgtaaatgctccccactgctgtgaactggcatgaaaattccctccttctacatgcaagtatctggtactaactgtctgggatcgtagtcgattaaacagagccacctttgttcctgagccaatgcataagtcagcatttttcaatgactgcttctttttggaaggtttggacgacttgctgaggaacacaccaatgtcatcaccgttgccatagaacacctttacagacaacatgaaggtgtttcgcttgtctgagtcagatatatacaatgttttgggctgtgcaatagttctttcccttcccaagtttaagctgctgcatttcttggtcactatttcctatcccaataaatgcacacggttgagactcttgttcagaacaaccatcgcgttccatttgttctttttttttcttccatccgctgcccataagatatacacaaggaggtgggcaaaaaaaccttttttcatttccatatgacttctgtgcaacttttgcatgaagaataagtactgtttgatcccctcgctcttttaaataatttcgcatagcttccctagtaagtcgtttaggtggaggccgctcaccaaatttccttttaatccacgccatggtacctcaagaacatgttaaggtaagtcacagcttggaacacttcgatgcacctcaaaacacctcagccagtgtatctgtatcattctcctttcgttttgagatcataatggttccgaagaactataatgcttccatttgaatgatagtctcataatttcaatgactcaatgatgctggatagagcagtccaatcatctcaaagagaaactcaatacaggttgttc

SEQ ID NO: 4976 - DNA, 1801 bp, Homo sapiens
ttttttttttttttgcattaacagtaaccccaagaaaggcatcagggttctggagtggttgtttgagtgacacagcacaaggccttgatttcatcatgcttttgctgtggatgtagtgtagcttgctgaacaggtatggaagctgtctttgctgttaagtacttctcccgtttgtttatcaacctgcagctaacaggatgtctgcttttttacaggtttatttcacagagcagtgtacattcttgtcttccaggggaacttcaacatggagttacttttgatccctcagttttaattcagtgtctaaaggtttacaagttcaacttactctattttattcagctctttcacttactctgccatcacttcctacttgaatctgagttttagctactgtagaggtctcagacctttcctttttagtactattagccaggtaaaactttggttcttgtgagtggtagggatgagtttttaggacagtattcaaagcctttttaaaggaaccaactactcaaatgctctacaatgccaaaaatacaatactcctgcaggttttcccaagcaaggccaaaacaatcaaaatctgacagaaaaacacagctgttcagctctggaatctgatgataggctactttttaatgtcaggacatccttctaaacttccacttacagtgtcacatgtaagcatgaaggctggctcgttggtgagccattgctttgtttttaggaagacagttatgaatgccatggacaatctcagtacatgttgtttgttatgattttattcacgctaaaggaatgggtattaaaattaagtgcatataatatagaattcagtttcaagtctgaagttagcgtaaatttagattcttcagactaacataaaacatgattttgagaagttaaataggaagatgccttttttagaagtttagcatatttagtttatctcccaaatcttgcttagaaatcaaatgtatataagagaagttagttacagagctagattgattaactacttctttaatgaagatttgctatgaatttgtttactctttcataccaccttcagatagctagtcagttcagcaggagcagagaccaggttagcacgcggatggggtgtaattcagtgtttttgtgttgtacagcctgagaaatgccagtggcctgacagcagcagacattgcacaaacccagggtttccaagagtgtgcccagtttctcttgaacctccagaattgtcatctgaaccatttctataacaatggcatcttaaatgggggtcatcagaatgtatttcctaatcatattagtgtgggaacaaatcgaaagagatgcttggaagactcagaagactttggagtaaagaaagctagaactgaagctcaaagcttggattctgccgtgccactcacgaatggcgacacagaagacgatgctgacaaaatgcacgttgatagggagtttgctgttgtaacaggtgggagtggacagtttcctgttagctgcaacaacaatccaatggttgaagacaccaaacagcaggagagtggttctgttggaccaaaagaaatagaaatatatactgtgtcagcaatgcagaccccctgtcgttgcaggaatcaatatgaaaaacagtagctccgtatcgaatacattgacaaatggatgtgtcatcaatggacatttggacttcccctccacgaccccgctcagtgggatggaaagcaggaatggccagtgcttgacaggaactaacggaattagcagtgggattagccccagggacagccgt

SEQ ID NO: 4977 - DNA, 1592 bp, Homo sapiens
  misc_feature (1)...(1592): n = a,t,c or g
gttttccttaacagttagtacatttccttgtgttaccacgcatggggaagaaaacgcatggccccagaatgccacccccacctgacctccccggaagcaccccgcctctgcccagagcatgtgcttgcttctagagaatcccgttccagtcattgcgtggacagaaaacgtaagagtcctgggggaggggtgggagggaatgaagctagggacctggggtgggggtgggggcggttgcatgcggacccggtattctgaaaagaaagaaatcttcaaacacctcggtcctgtccggtgaaaaaacgacagcattacacattctcgtgccaggaaatggttactcacccccgctctctggagtcctttggagctttctgataccattcacacgatggagcaattcacacgttcgttttctaagttctttattgtccaagcatataaggtgagcacagcacaaatggctgccatggaaagtcgtgcttccccagcataagaacagagccatctttgagccatgggaagcctcatttaatgagacctttttccccccttttaaatctgatatgttatcgcacttagggttttgttttattttggcttttaaggttgagagtgggctgaacgccttcataatgngggcggaggcgggagtgagaggagaagggagagagctgttctttttctaatgactacacctgaaaagtatcaagagacatctttgccaagagactgtagcagccagctgccccccgtggagcaaggtttaaacgacaaaattaaatggcacctctgtttaagatctgcttgtgtaaacaagactcgtttggggaaaacgacccgggaggagagcatctgtgatcaaaatctctcattgtaagcacaaattgttccgtgtctggttattaaaatcgctttgggtctataacagccactcttgtccccccttttaatagaaaattgtcattctagcctgggatttctccccactggaggtggagggtgggaagagaagggagtcagctctgacagcttacaaactgggaagttctgtgcatctccagggattccagagttgaagatctggttgttggaagctgggcgcccagtgctttttttttttttttttttttagcccagatgccgtcaggaccccactgaacaagggtgaactcgggtggtggtctcggttggccaaggctgagttgaacgcctcaggccaaaccccaagttgaaagggagcattgtggcttttataatccaatgatgcaatgatgataccagcttacaggagttctcagcaggtgctttttattaactgatgaagagctaaggctcacttttgatagataatatatatttattaaatgcattaatgtgtgttttataatgtacctttatcttcccccggctgactgttgcatacttataaaaaagaagttaaagaaatttcaagacaatcaatatgtaccataaacgactatataaatattacaaatttaaaaggctgtaaagcatgggcagataggttttattttcaaaatgctgttcttaacacaaaaataaaggctttactatttacttaaaaaaaa

SEQ ID NO: 4978 - DNA, 593 bp, Homo sapiens
  misc_feature (1)...(593): n = a,t,c or g
tcaagtatgtgtatggttgaactcacacattaaatgtggatatatgccatctagcatctcaggtccccgtcagtgaacacaagagcatgcccgagttgtgtttggggtttaggtcaccctattatttgacttagactcacctcatctctgctaataagttcattagaaaatgtgaggccaggcatcagtcctcgtttcttgagccagaatatcgacgcaaaagaaccggaaaagaaaatgccttccactgcagcaaaggctacaacacgttcacctatttaggagttaacaccaacatgattctagtgagttggtattcaagggccaaaaatccagtaacattacttggaaaatgaagctcaggtttaagtaggggcaagggtctccttaccataggtagcctctttgtccccaatccagcgcaaggcccagtctgccttcttcttgacacaaggcatcgcttcaatggcattgaagagaaattccctagtaggcacatacggtatcagcaattgaagcattacagtataagacctccgattaccatctgctanatannagntctgggacnaaggccanattcangtatttgc

SEQ ID NO: 4979 - DNA, 440 bp, Homo sapiens
cggcacgaggcattatggcatagtgattaagatgagggaccctggaaccagcccgtgattttgggcaagttattttaggtccactttggactgcttcatctcttaaatgaagacagcaaccaccttcaggagtgtgaaggtgacaacacttaaaactgtgcctggcacattgtatttgctattgtcttaatgttctggaataatggtttccataacttgggaagaaaactttgagaacaggattggttacatcaagttgtatagtgaaaagataaagatctgttatttaaacttgcagtttaaaagtccattaggaatcattcttttccgtaaggctttctttgcaagagatctgcattaaataaagttgctaggaaataactaaaattggggaaataatctaataatagcaagatgttaagcatactattattgtattt

SEQ ID NO: 4980 - DNA, 121 bp, Homo sapiens
cggcccagctgatgcaacctggctggactcgcgtgacagttcccggcacgcggcggcgacggtgacccaggaaggggctctggtgccgggcctgagcgggggaagcaggggtagcggagcc

SEQ ID NO: 4981 - DNA, 2290 bp, Homo sapiens
gcgcccaggtagctgcgaggaaacttttgcagcggctgggtagcagcacgtctcttgctcctcagggccactgccaggcttgccgagtcctgggactgctctcgctccggctgccactctcccgcgctctcctagctccctgcgaagcaggatggccgggaccgtgcgcaccgcgtgcttggtggtggcgatgctgctcagcttggacttcccgggacaggcgcagcccccgccgccgccgccggacgccacctgtcaccaagtccgctccttcttccagagactgcagcccggactcaagtgggtgccagaaactcccgtgccaggatcagatttgcaagtatgtctccctaagggcccaacatgctgctcaagaaagatggaagaaaaataccaactaacagcacgattgaacatggaacagctgcttcagtctgcaagtatggagctcaagttcttaattattcagaatgctgcggttttccaagaggcctttgaaattgttgttcgccatgccaagaactacaccaatgccatgttcaagaacaactacccaagcctgactccacaagcttttgagtttgtgggtgaatttttcacagatgtgtctctctacatcttgggttctgacatcaatgtagatgacatggtcaatgaattgtttgacagcctgtttccagtcatctatacccagctaatgaacccaggcctgcctgattcagccttggacatcaatgagtgcctccgaggagcaagacgtgacctgaaagtatttgggaatttccccaagcttattatgacccaggtttccaagtcactgcaagtcactaggatcttccttcaggctctgaatcttggaattgaagtgatcaacacaactgatcacctgaagttcagtaaggactgtggccgaatgctcaccagaatgtggtactgctcttactgccagggactgatgatggttaaaccctgtggcggttactgcaatgtggtcatgcaaggctgtatggcaggtgtggtggagattgacaagtactggagagaatacattctgtcccttgaagaacttgtgaatggcatgtacagaatctatgacatggagaacgtactgcttggtctcttttcaacaatccatgattctatccagtatgtccagaagaatgcaggaaagctgaccaccactattgggcaagttatgtgcccattctcaacaacgccaatatagatctgcttattatcctgaagatctctttattgacaagaaagtattaaaagttgctcatgtagaacatgaagaaaccttatccagccgaagaagggaactaattcagaagttgaagtctttcatcagcttctatagtgctttgcctggctacatctgcagccatagccctgtggcggaaaacgacaccctttgctggaatggacaagaactcgtgggagagatacagccaaaaggcagcaaggaatggaatgaaaaaccagttcaatctccatgagctgaaaatgaagggcctgagccagtggtcagtcaaattattgacaaactgaagcacattaaccagctcctgagaaccatgtctatgcccaaaggtagagttctggataaaaacctggatgaggaagggtttgaaagtggagactgcggtgatgatgaagatgagtgcattggaggctctggtgatggaatgataaaagtgaagaatcagctccgcttccttgcagaactggcctatgatctggatgtggatgatgcgcctggaaacagtcagcaggcaactccgaaggacaacgagataagcacctttcacaacctcgggaacgttcattccccgctgaagcttctcaccagcatggccatctcggtggtgtgcttcttcttcctgggtgcactgactgcctggtgcccagcacatgtgctgccctacagcaccctgtggtcttcctcgataaagggaaccactttcttatttttttctattttttttttttttgttatcctgtatacctcctccagccatgaagtagaggactaaccatgtgttatgttttcgaaaatcaaatggtatcttttgggaggaagatacattttagtggtagcatatagattgtccttttgcaaagaaagaaaaaaaaccatcaagttgtgccaaattattctcctatgtttggctgctagaacatggttaccatgtctttctctctcactccctccctttctatcgttctctctttgcatggatttctttgaaaaaaaataaattgctcaaataaaaatgtattggccctt

SEQ ID NO: 4982 - DNA, 845 bp, Homo sapiens
gtccaagggaacttatattatccagctctaagccctcccaagaaatgagccagtgagcatggggcatggtggtgggggtggggaagcacagtctggtttcactgggcatcgaggagtgccaggcatctactgctctgtccctggataagtcaggctggtgggaagaggcagcaaggagggaggacgtactttgtgaagacagacggtgtctcctctgccatgttcctgcaggcgtcaggggctctctgaagcctgaactggggagtaggaaaggtaagaatggccaagcaaatcagggtccaagcccagtgtcccttctcctagcccaaggccacagggcccaggtaacccagccctctccaaaggaaccagaccgaattaagccatctgctttctatgccagaccccagcagaccattcagccaagaagcaagctccccacactctcattcccatcaggtgaggggtccctggggctcaggcctctctcagctgccctttgacagtgacataggttggtccctgctgttgttggggatgtccatgggagcagaatgctcagacacaaagccggcactcatcataactgtctccagctgcccccgtctgtatatcctgtcccttcttcacagggcctcatcacatgaaaagaagcaccttggtaaatgaggaagcagttcctaatttccagtttcttccttccttggggttggggacctcctggctgagagctggaggctggccatactcacggctccattctgtatggccttccacctcctcttgtctgtttaccatagatttattgacagcgactactcgccaggtgtgctggagtcaggtgg

SEQ ID NO: 4983 - DNA, 527 bp, Homo sapiens
accaccctcagtgaactattaacccattaatagagaggcaggatggtagaagaaacatgggaactggattcatacaactgattttgcttcccatctcctccacttactagctgtatgacctgcacgagaacaccaaccaccttctgttctaatactactatcttacagggcagtcacatggagaaaacagcatcattaaatgagaagttcttagcacaaagtctagcaccctggagacccttattattgagaagctagacagccaagatgtcagagtacaaaaggagtcttttggacacttgactgatggaggtagacaaaggggacttataaactaatcctgattggaggaaaggtcacagtattccagtagctaaatacaggtaaggaaggactactactaggggttaccttggttgatcagctcctgttgaatttcctccagcacagccatgtctatcagctcctccagctgagccaagtcttctggacaattctccactgactgcaaagcattccactcttcc

SEQ ID NO: 4984 - DNA, 1505 bp, Homo sapiens
  misc_feature (1)...(1505): n = a,t,c or g
ccagagttccaccccaacaagaccacggtgggccttggttccgggacaaattacccagccctgccaccgtctgcacggcccctggagtgtaccatccgggctggtgaggtcagtggctggcaggagagggccaggccaggctagaggcccgcagctaatctctgctgcacccccttcctccaccaggtgctgtacttccccgaccgctggtggcatgctacgctcaaccttgacaccagcgtcttcatctccaccttcctcggctagccaaaacagctggcaggactgccggtcacacaccagcacgtcccacctcgtgctcacggattttattacacagatagtggcggcaatggcctcagcccagcccaccctcacctgcttttccagcccacaaagggggacgatcacggcccagcaaaagcgatgctgagaggggaaacagtccagagtccaacagcagaacttgggggaagcggtcggggtggccaggaacataaactatgtataggggccgggggcttctgcccagggctcccctggaccaggacgccaggtagggcagggaacctcagtagtcctccacccagccattctcagagatgaatgcgtcaataacctccttcatagccaagttggggatgagctgttcctgggtcagggggctccgggtcacggggtcaaaatgacccacacgctgcaggtgctcctcgatgtccttgcggtcgtaggtgatgccactgggcgtgatgcacggctcccgcatcagctcaaagctgatcttgccacacaggtagtcggggatgtctcgcttcttcctcttctcatccacctgagaaaaaagctcgtccatgtccgccatgtacttgtcgtgcttggcctcaatgcagcctgctgggcccggacgtggctgtcgtcctcatcaccctcgtggtttcgctggcactcttccagctccctcgtcatccgcggcaatgagcctggagaggtaggagtgcagctcgctctcctggtggatgcgccgctcctcaatgctgttccagcgcttcttcttcgcgattcgaagagcgctggggatgtcgtccccgaagttcagccgcttgttcctttggccaggctgtaagctcgctgcagattgcgatggcctcatcatagctctccatctccagcttgcactgccccaggaagaagtgcgccttcacagactgcccgtccagctccagggcgcgcccggcagttcgccagggcctgctcgtgctgctgcatcttcaggtagcacaaggcccggttggtgtaatacacggccaccagcgggttccgggtgatcgcgcggccgtagcaggccgccgcctccgggtactttcggcccacgaacagacgattgccctgctccttgagctcctgcgcgctcgggctcttctcggcgttccgccgccagcccagccgtgcgccgccctccttctccaccttgcccttcatggcgncgcgcggcacggcctgggctc

SEQ ID NO: 4985 - DNA, 43 bp, Homo sapiens
ggtagatttttaggtattaacaatagataaaaagatacttttt

SEQ ID NO: 4986 - DNA, 1285 bp, Homo sapiens
ttaatttaaaaaaaaattaaatatttttattatatacttttaaacatatagaagatagaaaaaaacagtacaatgaacagccatgtccaccagttagattctgtaacattttgccacatacgcctcacatacattttgttaaaccatttgaaacattttaagacactctaacacttcattcctaaatgcttaagtatgcaaattaagacagtcttttataaactacaacacccttctcacagctcataaaattaccaataattatccaatatcattcaaaatctaatccacattcaaattttctcaactgcctcaccaccgtgctggcctcccacccccaccccagtcttttacagatggtttttcaaaatagagtccagtaaaatatttcacattgcatttggttattacataacttttaatcaagaagagttacccattccacttccttttttctttcccaacacttgatattttgaagaaatgaggccagttatcttctataacgcttcacattccagatctgtctgatcgtttctttagtggtgtcatttagtgctgctctatgccagcatttcctgcaaatgagaaattagaaccagaggcttgacgaattccagttaaaccatgtcctctgtggacaccagttaaacttgactagagcacttcatatgtcagagtgtacagtgcagtatgcctaggttatcccatatcacaataaaaaaaagtctgctggtctgcctactagtgatataaaatggcatcatatcctaaagctctttattgtgaaagtatgtttcttccacataaccaaccagttaagtatgagaattctagtagggatgtagattaaccttttatctaatagttttggcatcaaaattctttaatattgattgttttacattaacctttcaacttttctaacatctgaactttttaaatgttcaaaaacatttgttttccacaaaccataaagttttacaaaagtaagattcactttcataatgctggcagacttactccttaatttaaggaatgtgagcaccttccttctttttgattttgtctgaaaccctgtaaggaaaataaaaggaagttaaaaaaaatagctatatagacatagatagctatatatagatagctttatatggatgttaaaaagcattttgtttcacaagacattttacttattttattcaacaaaatatgatcagaaattaagttgatagtcttttaatgtactttaaaagttatcccaaagaaaacaattattaggctgcag

SEQ ID NO: 4987 - DNA, 386 bp, Homo sapiens
caaatatgagctctattttgaataaaaggggctacgttgtgagagaagttctaaagacctcaaatgtccttagacacaatggcacttgacttgacatgcttttgcagacttgatagtatttggtttaaaacagtggtttctaaccactggaacagcagaaacagacttctcaactattagtaatcacaaccaaataagagcagagtgcataacaaaattagatattcaaacggagtcctcccattccaagaaactggaaacccctagtttatgttaaaaggccagtctaaattctttcacttacatctttacagaaaactatattttctctcttccatacccagaaatctaatcagaaaactgacttttctcatgttaactggacc

SEQ ID NO: 4988 - DNA, 450 bp, Homo sapiens
  misc_feature (1)...(450): n = a,t,c or g
ggaaataactgatttacaacaacatggatggacctggaggacactatgctagtgaaataagccatgatctcacttggatatggaatcacaaaattgaactcacaagcagagtgtataaaggtggtttcatggactggagggaggggataaatggggagatgttggtcaagggtacaaagtttcagttaaacaggagtagtacgttctggagacctgttgtgcagcagggtgactagttaatgtatacttgaaaattgctaggagtagatctcaccaggagaaatgaatatgtgaggtgatggatgtaactagcttgattgtggtaatcannnnnnnnnnnnnnnnnnnnnnnnnnnnnnnnnnnnnnnnnaaatacatacagtttttgtcaatttaaagatatcagaattctagaatatgataaagttgtgttttcaagcatgtaaagat

SEQ ID NO: 4989 - DNA, 459 bp, Homo sapiens
  misc_feature (1)...(459): n = a,t,c or g
ttttttttttttttttggggtatccataacctcaagacatttatcctttgtgttacaattcaattatacctttaaaatgcacaattattattgactgtagtaaccnnnnnnnnnnnnnnnnnnnnnnnnnnnnnnnnnacattttgtgcccgttaacattccccacttccccctcaccatgccctcactgcctttcccgcctctggtaaacatccttctaccctctataagttcagttgttttcatctttagctccaacaaatacgtcagaacatgatgtctgtcttgctgtgcctgggcttatttcacttaatgatctctagttccatctacaatgttgcaaatgacagggatctcattcttttttatgggctgaatagnnnnnnnnnnnnnnnnnnnnnnnnnnnnnnnnnnnnnnnnnnnnntggctgttngacacttggggtgcttccaaatctg

SEQ ID NO: 4990 - DNA, 979 bp, Homo sapiens
gcggcgtctactactactaaattggcggccgctcgacaaagcacagcccagggaaacctcctcacagttttcatccagccacggggcagcatgtctgggggcaaatacgtagactcggagggacatctctacaccgttcccatccgggaacagggcaacatctacaagcccaacaacaaggccatggcagacgagctgagcgagaagcaagtgtacgacgcgcacaccaaggagatcgacctggtcaaccgcgaccctaaacatcttcaacgatgaccgtggtcaagattgactttgagattggatggcagaaccagagggacacacagtttgaccgcattttgaaggccagcttcaccaccttcactgtgacgaaatactgcttttaccgcttgctgtctgccctcttttggcatccccgatggcactcatctgggggcatttacttcgccattctctctttcctgcacatctgggcagttgtaccatgcattaagagcttcctgattgagattcagtgcatcagccgtgtctattccatctacgtccacaccgtctgtgacccactctttgaagctgttgggaaaatattcagcaatgtccgcatcaacttgcagaaagaaatataaatgacatttcaaggatagaagtatacctgattttttttccttttaattttcctggtgccaatttcaagttccaagttgctaatacagcaacaatttatgaattgaattatcttggttgaaaataaaaagatcactttctcagttttcataagtattatgtctcttctgagctatttcatctatttttggcagtctgaatttttaaaacccatttaaatttttttccttacctttttatttgcatgtggatcaaccatcgctttattggctgagatatgaacatattgttgaaaggtaatttgagagaaatatgaagaactgaggaggaaaaaaaaaaaaaaaagtcgacc

SEQ ID NO: 4991 - DNA, 1032 bp, Homo sapiens
gccggtacactgcgcaggcacaacagagccgctcccctctcctcgccccgccaccgggacggagaagcgcccgccgctgcatttccggcgacacctcgcagtcattcctgcggcttgcgcgcccttgtcgacagccggggccttcgtgagaccgcttgttttctgcaggtgcaggcctggggtagtctcctgtctggacagagaagagaaaaatgcaggacactggctcagtagtgcctttgcattggtttggctttggctacgcagcactggttgcttctggtgggatcattggctatgtaaaagcaggcagcgtgccgtcccctggctgcagggctgctctttggcagtctagccggcctgggtggcttaccagctgtctcaggatccaaggaacgtttgggttttcctagctacatctggtaccttggctgggcattatgggaatgaggttctaccactctggaaaattcatgcctgcaggtttaattgcaggtgccagtttgctgatggtcgccaaagttggagttagtatgttcaacagaccccattagcagaagtcatgttccagcttagactgatgaagaattaaaaatctgcatcttccactattttcaatatattaagagaaataagtgcagcatttttgcatctgacattttacctaaaaaaaaagacaccaaacttggcagagaggtgggaaaatcagtcatgattacaaacctacagaggtggccgagtatgtaacacaagagcttaaataagaccctcatagagcttgattcttgtatattgatgttgtcttttctttctgtatctgtaggtaaatctcaagggtaaaatgttaggtgtcagctttcagggctctgaaaccccattccctgctctgaggaacagtgtgaaaaaaagtcttttaggagatttacaatatctgttcttttgctcatcttagaccacagactgactttgaaattatgttaagtgaaatatcaatgaaaataaagtttactataaataaaaaaaaaaaaaaaa

SEQ ID NO: 4992 - DNA, 506 bp, Homo sapiens
gaagagggcatttagactgcattttcctggttaaagaaggttaaagcaaatgtttattgccttttctagtgaactaactcgtagagatgttctcagcaggaagacagtcttagcactgtcacttagcagattgcacttaagtcccttgtgctggccagatggcgtggctggttgccttaatatgtcccaggacccctgacagggctgcctggcctctccctcgtgctcctcaagagcccagtccatacactgtggatgtcattgctgtcgggttaggaagtcttgtcctagaacgccctggctggtatgaccacagttcatggcggctcttctcgcttgggtcatggtcatcttccagcacctgctgtgctggggaaggccgaggatgggggcccagcactgtccaggcctgctggggcctgggcttggggagtcctgtgggcagcatggaacatgcaagctggggcttcctgtgaccaggcaccctctggcactgttgcttgccc

SEQ ID NO: 4993 - DNA, 492 bp, Homo sapiens
tttttttttttttttttttaagagtcagtatttattctgattaatattttacaaaattttgacatttaatttatgtaaggagggctaatttattaaacactttacaggtttttctttccacagaataacacggtaagtagcaaaataatacttggcacagttataaataaagaaaatataaaataaaaacatccatagcttaagtacaatgatgctgttttacgcccattaatatcaaataaattcctggaaacaacaaaaatatgaatgaaaaaaaactccaaggaagtaattcatgttcagtgctgagaattaagttcctatttgctaaaagtatccaattaagttgataagaactattcccaaaggttcaccatcatacacaactttagaactggggtttataggttgggttccacacacaggacctacaaaataattaaacagatggtatactgctgcatagctggctcctgaccatctgaccatttc

SEQ ID NO: 4994 - DNA, 1281 bp, Homo sapiens
aaaaatatgtttatctttaatgatccaagattctgcaagacacactgatatacccagaattgggtggaaatacagcatctcagcagtgctactgccagcctgggggtggggagctggatgctggctgaaggacccccatggtgaagtcgattccaacctcacgggagcctcagtgccctatctccatggaaaccagcctggcactgggatggggccctagggagcctgcatgaacatctctgagaggtatttcccattaaaaacaaccacaggtgcccacccccaccccaagctactgcccagctccccctcctctctgtgttgtcggccaagataaaggaaatgggagtgaccacttaacgacaaacaaaagcagattgtacctcctattagggaagaaaaaggaagggaaagggtagtaagggagctgcacttcaagctcagaattctgccaagaccctagagcggctatggcagacagcggtgcatgactgccagaggcagcgctacccaaacccctggaggtaccctttgttactgctggggcccctgctgctgtgggggaaagacgggtcttcaaggctgcttcctgccatctagcgctgcccaatgtttggaccaaaaggggatggcacctaggatggctctacaactccatactcagtacgaaaagagggctcccaggatctcaatgtggtatcagggatgagagtttgcccaaactccctccttcccaccctgctggactgtcagagctctgggctaggaagaactccagggaaggccaggatgagtgggggaaggagacaagaaaatggtctccaatttggcatcaaaacagagtaagttcaaagaaacaaaaccttgatttttttatagcaggttctcctggccagctcatgacagcaggtctccacccactcagggatggcccaataaaaagttgggcaaagcaagggcatggctaccctcagggcagtgcatggaactcagaaaagtgagtctacaggatgcaggagagaacagcagagcccacagctctgccactctgatatgtcctccatcagtcccacgtgccctaggcactgacctcatacctgcctcaggagcagcttccttcaggctgagtcctggcaggggaaagttcccaggcaggtgtcccagaaggaacatgagtgttctctgcagggccctgcctgagctcttcaggggatggagaggaggccacccactcctcatgccagagtgcaatgctccccagtccctgtcgacgcggccgcg

SEQ ID NO: 4995 - DNA, 596 bp, Homo sapiens
agaaattttattttgtttatcatctttggcaccatggaagaaatgcagaacaaagctgtggttttctttgtgttttatttgtggagtgcaattgaaattttcaggtactctttctacatgctgacgtgcattgacatggattggaaggtgctcacatggcttcgttacactctgtggattcccttatatccactgggatgtttggcggaagctgtctcagtgattcagtccattccaatattcaatgagaccggacgattcagtttcacattgccatatccagtgaaaatcaaagttagattttccttttttcttcagatttatcttataatgatatttttaggtttatacataaattttcgtcacctttataaacagcgcagacggcgctatggacaaaaaaagaaaaagatccactaaaaagaaagatttaagatgggcttcttgccagtttgagcctaatctgattcttacagtttttaccttcttgaaaccaatgtaaaagtttttttaatgttaaatgattaaattctcagtgaggctatcttccttttccccagtaacattcctgaatttactggtatcctaatgtagta

SEQ ID NO: 4996 - DNA, 1044 bp, Homo sapiens
cttgatttaggaactgaccaagacaatgtaaacaaaagcttttaaaactaattttattcctaaagttaaaatcagctagcgggtagcactgaaaatacaccttcactatacaaaacaatgtaaactgattacacattaataaggaatttagcacacacacttctaataaaagaagctagatgcagcccttgctataaaaagctatacctgaacaaaaatggacatgtggagtctaaggccctggcagtcgactagagaatgtcagttgttcccaattatgtttaaatgcagaaacagcaacaatgtggaaacttacattcatcaaatgttagcatttaaaatatacatgactaataaagtgaacattcagaggagccactgctcagcatgttccatgtcggccacttgtggacactgatctcatccaaagaggacagaagtttcaaacatctgagcagtttaagttaaaaataggatgaaggggaaataagagaacaggataagtgtcctcccaagacagcagtggctgatgcccacatggcgcaaacaggctgacttcaatgagtgttcacgggatgtgtgataaagcccagctgagcccgggaagctcacgtgtccacaggcagacaggctcacggcatggaccaatgtttccacaactcaggatggatctttctgtccccacttagtagtcaaaataatgttttaaaatagcttcagcctttgaacataactttccagtcccttctgtgcattgaaatgttgggggtcaagtttgggggtgactgtcctggtgaggggagcctgtttcaggacttgaacacgtgcacggctcgcaccacatactgccggcagatgggacactcactcatgcgcttgccgcacttggtgcaggtaaccatgtgcccacactccagtaggacacagtcgatgacggcatccatgcagatgcgacacaggctgtcgtcttcctcatcctgcagctgcagccgctcgccataggacttttggttttcttcattctctttgtataaccggtttact

SEQ ID NO: 4997 - DNA, 425 bp, Homo sapiens
acttttgaaaatcaagcaaattactatggggtttcttgggtcttcattattccatttatatatattttttatttcgaataataaatcaacctttatttttggcaataagattatcactgacgaaaatatgtacagttcaagaagtagaaataatattttccattagttaatttaggaaatattggaatagcatattataattatttatgaggttcccaatgttgtttttcacagaaaataaggtaaacattcaacttaaatcccccatgaagttttttcatgctcatactcataatcattatcacataatgtgcttattcaacaaactttgtatctgggatatatttttaacaataagtttgttaggcattatttatttatctttaggaggggaaaatatttgcatctgtttatttaccctttgg

SEQ ID NO: 4998 - DNA, 331 bp, Homo sapiens
gaaattacaggaaaagaattgaaataactttcagtagctgtgaggctgcaaccatttgaggaggggggaaaataaccacaagtaaaaaggcgaagagcgtgaactcatatttgaacttcgttcaccttacttgtttttatttggggtaaataaagcaaatatatggtatgtaaatatttgaacttcgtttaccttacttgtttttatttggggtaaataaagcaaatatatggcatgttgcagcaccgtttgcctaaccccctttaaaagatggtcgaatagtagtttgctatacctttactgggagggcagggggagcacaaagttgaag

SEQ ID NO: 4999 - DNA, 5217 bp, Homo sapiens
  misc_feature (1)...(5217): n = a,t,c or g
cggctgcggttcctggtgctgctcggcgcgcggccagctttcggaacggaacgctcggcgtcgcgggccccgcccggaaagtttgccgtggagtcgcgacctcttggcccgcgcggcccggcatgaagcggcgttgaggagctgctgccgccgcttgccgctgccgccgccgccgcctgaggaggagctgcagcaccctgggccacgccgatgactactgcaaactgtggcgcccacgacgagctcgacttcaaactcgtctttggcgaggacggggcgccggcgccgccgcccccgggctcgcggcctgcagatcttgagccagatgattgtgcatccatttacatctttaatgtagatccacctccatctactttaaccacaccactttgcttaccacatcatggattaccgtctcactcttctgttttgtcaccatcgtttcagctccaaagtcacaaaaactatgaaggaacttgtgagattcctgaatctaaatatagcccattaggtggtcccaaaccctttgagtgcccaagtattcaaattacatctatctctcctaactgtcatcaagaattagatgcacatgaagatgacctacagataaatgacccagaacgggaatttttggaaaggccttctagagatcatctctatcttcctcttgagccatcctaccgggagtcttctcttagtcctagtcctgccagcagcatctcttctaggagttggttctctgatgcatcttcttgtgaatcgctttcacatatttatgatgatgtggactcagagttgaatgaagctgcagcccgatttacccttggatcccctctgacttctcctggtggctctccagggggctgccctggagaagaaacttggcatcaacagtatggacttggacactcattatcacccaggcaatctccttgccactctcctagatccagtgtcactgatgagaattggctgagccccaggccagcctcaggaccctcatcaaggcccacatccccctgtgggaaacggaggcactccagtgctgaagtttgttatgctgggtccctttcaccccatcactcacctgttccttcacctggtcactcccccaggggaagtgtgacagaagatacgtggctcaatgcttctgtccatggtgggtcaggccttggccctgcagtttttccatttcagtactgtgtagagactgacatccctctcaaaacaaggaaaacttctgaagatcaagctgccatactaccaggaaaattagagctgtgttcagatgaccaagggagtttatcaccagcccgggagacttcaatagatgatggccttggatctcagtatcctttaaagaaagattcatgtggtgatcagtttctttcagttccttcaccctttacctggagcaaaccaaagcctggccacacccctatatttcgcacatcttcattacctccactagactggcctttaccagctcattttggacaatgtgaactgaaaatagaagtgcaacctaaaactcatcatcgagcccattatgaaactgaaggtagccgaggggcagtaaaagcatctactgggggacatcctgttgtgaagctcctgggctataacgaaaagccaataaatctacaaatgtttattgggacagcagatgatcgatatttacgacctcatgcattttaccaggtgcatcgaatcactgggaagacagtcgctactgcaagccaagagataataattgccagtacaaaagttctggaaattccacttcttcctgaaaataatatgtcagccagtattgattgtgcaggtattttgaaactccgcaattcagatatagaacttcgaaaaggagaaactgatattggcagaaagaatactagagtacgacttgtgtttcgtgtacacatcccacagcccagtggaaaagtcctttctctgcagatagcctctatacccgttgagtgctcccagcggtctgctcaagaacttcctcatattgagaagtacagtatcaacagttgttctgtaaatggaggtcatgaaatggttgtgactggatctaattttcttccagaatccaaaatcatttttcttgaaaaaggacaagatggacgacctcagtgggaggtagaagggaagataatcagggaaaaatgtcaaggggctcacattgtccttgaagttcctccatatcataacccagcagttacagctgcagtgcaggtgcacttttatctttgcaatggcaagaggaaaaaaagccagtctcaacgttttacttatacaccagttttgatgaagcaagaacacagagaagagattgatttgtcttcagttccatctttgcctgtgcctcatcctgctcagacccagaggccttcctctgattcagggtgttcacatgacagtgtactgtcaggacagagaagtttgatttgctccatcccacaaacatatgcatccatggtgacctcatcccatctgccacagttgcagtgtagagatgagagtgttagtaaagaacagcatatgattccttctccaattgtacaccagccttttcaagtcacaccaacacctcctgtggggtcttcctatcagcctatgcaaactaatgttgtgtacaatggaccaacttgtcttcctattaatgctgcctctagtcaagaatttgattcagttttgtttcagcaggatgcaactctttctggtttagtgaatcttggctgtcaaccactgtcatccataccatttcattcttcaaattcaggctcaacaggacatctcttagcccatacacctcattctgtgcataccctgcctcatctgcaatcaatgggatatcattgttcaaatacaggacaaagatctctttcttctccagtggctgaccagattacaggtcagccttcgtctcagttacaacctattacatatggtccttcacattcagggtctgctacaacagcttccccagcagcttctcatcccttggctagttcaccgctttctgggccaccatctcctcagcttcagcctatgccttaccaatctcctagctcaggaactgcctcatcaccgtctccagccaccagaatgcattctggacagcactcaactcaagcacaaagtacgggccaggggggtctttctgcaccttcatccttaatatgtcacagtttgtgtgatccagcgtcatttccacctgatggggcaactgtgagcattaaacctgaaccagaagatcgagagcctaactttgcaaccattggtctgcaggacatcactttagatgatgaccaatttatatctgacttggaacaccagccatcaggttcagcagagaaatggcctaaccacagtgtgctctcatgtccagctcctttctggagaatctagaggtgaacgagataattgggagagacatgtcccagatttctgtttcccaagggagcaggggtgagcagggcaggctcccctcccgagtcctgagtccctggatttaggaagatctgatgggctctaacagtgcttactgcagccttgtgttccaccaccaacttctcagcatgtttctctccttggaccttgggtttccaactctgcagccttcaggtctggggccaggagtgggacccacccatttgtggggaaagtagcattcctccacctcaggcccttgggtagatttggcaaaagaacaggagcagcataggctgtttgagctttggggaaatgaactttgctttttatatttaactaggatacttttatatgatgggtgctttgagtgtgaatgcagcaggctctcttgtttccgaggtgctgcttttgcaggtgacctggttacttagctaggattggtgatttgtactgctttatggtcatttgaagggccctttagtttttatgataatttttaaaataggaacttttgataagaccttctagaagnnnnnnnnnnnnnnnnnnnnnnnnnnnnnnnnnnnnnnnnnnnnnnnnnnnnnnnnnnnnnnttntcccaagcccacacctatgcctcagaaagtcagcatgtgtcctgaagacgttcatagatttataggaaataaagccaaatgtagctcatacctctttataaaactaaactgttgttagataaaatgagaagagaccattccatcattgaagtgttggaatataaaaagacattccagagcatagccttttggtaactttctaggtaatcttgcaatctctccatactggctccatgttgaaattgctttttccctcaggaccctgggtaagatggctacatttaaggtgactctgaatggtggggttctagcttggtcactttcatttcttgccatcataaaaactagtaggctgtggagtgcgcttcctgtttgtgtcatctggtcgtagaaccttttccaaacagaagcatctgcctttggctgttctgtgacctttgaagccagtctcagtggtttaggcagctttgcagttctaactctagctagaggccaggctgtgtgcagagctaaagcacaaatgagcagtacatcagcatgggcagagaaaatacaggactccagatgggaaggttttaagagtcacactggcatggaaggcttatctgccattctatttatagcctgaaatgattctggcctaccctgtcctgtctgtatgatctaaaaaccagccttttccccagaaggctctgagcacatccagaagtgataacctgaccctccacaccaaagacaccctggtgctgctgctggtgagactggtgtccaaggcagggcccagcagaaactgcagcctgctgtctaccaaaggaggtacccgagttgggtactttaaaaaaaaaaaaaacctgcccttacccctctccctaatgggattttttttacctgttcctgggcccattacagagcctctgaagtttgcagtatgctttcaaatgaaataatatacttccattgattcaggaagcagattttttgagtgcctatatgtgagacagtgtgctggttgaaggcctgatgctgttattccaggagactgcaggcccttgatgccaggactctctctactaaggccagttcaggtctgggaaagggagctgcctattgcccaccacctgttgtcagtaggttaggagctgttgactcaggatgaggaagtatggtctttaaaaaaaaa

SEQ ID NO: 5000 - DNA, 457 bp, Homo sapiens
gaaggcaggctaccgttgtcactactactaatttatctgcagtatgagtagcagtaggtgacttcaccataactcacatcatctggatctcaaagagccactctgatgacgtaagtataatctggcagtatcgtgggaatcaggaccaccgtctttgctgtagcaatacccgggacctcagtttacatatctcctttatgtgtcgagaaagtgtatgtgtgggtggtaggagggccaggaaaaaaagctaaaatcactcaccgtgtgattgttcaggcatgaactgtaccgcactaagcttcactagcttccttacgctactgtacccaatggagaggtcattgagaagctgtagtgtcttggaggtgattggttcacaacggccccagtacttcaagttggtgatgatttttcctatgaagacgcttaggaccatggtctcatcatttcaagccca

SEQ ID NO: 5001 - DNA, 465 bp, Homo sapiens
tttttttttttgggatcaactgagaatatgtttatttaaaagcaattttaaatattaaaaaaagtagaaattaacacatacagtactgaaaaactgtcacattaaacacatgtgaaatgacaagtgtactgatgtttgatggtaacatccagatgagaattcggcatttaactagtggcactacaggattcctatacaacatgttgaagttctaggcaataaaaaaataaatagcaattgctgttcaacagtaaaataagacacacactatttgcagaacataactttcccctctgggggaaaaagaactaatttgctatttttttttcataaggttccatatcttcaaaatactatataatgtacaaaattgcagatagtggcttactgagtttaagatcaagatcagacttaaactcaacaagatcaccaaaggtatttctactgagttttcctatgtcccac

SEQ ID NO: 5002 - DNA, 1659 bp, Homo sapiens
tgaacgtatggcggctagtgatacagagcgagatggactagccccagaaaagacatcaccagatagagataagaaaaaagagcagtcagaagtatctgtttctcctagagcttcaaaacatcattattcaagatcacgatcaaggtcaagagaaagaaaacgaaagtcagataatgaaggaagaaaacacaggagccggagcagaagcaaagagcgtgcttatgcgcgaagagactgaactgaagacgctgcagactcagatagcaaaataataagcctacttcatgataagggaagaagacatgaatccaaagataaatcctctaagaaacataagtctgaggaacataatgacaaagaacattcttctgataaaggaagagagcgactaaattcatctgaaaatggtgaggacaggcacaaacgcaaagaaagaaagtcatcaagaggcagaagtcactcaagatctaggtctcgtgaaagacgccatcgtagtagaagcagggagcggaagaagtctcgatccaggagtagggagcggaagaaatcgagatccagaagcagagagaggaagaaatcgagatccagaagcagggaaagaaaacggcggatcaggtctcgttcccgctcaagatcaagacacaggcataggactagaagcaggagtaggacaaggagtaggagtcgagatagaaagaagagaattgaaaagccgagaagatttagcagaagtttaagccggactccaagtccacctcccttcagaggcagaaacacagcaatggatgcacaggaagctttagctagaagagaagacggggtctccctatgttgcccaggctgggtaacacagtgtaacctgatgtgcttcccctgggaacccagcctgacagaaactgcagctgaacagcagcaaaagtgttggaaagggcaaagaaattacaagaacagcgagaaaaggaaatggttgaaaaacaaaaacaacaagaaatagctgcagcagctgcagctactggaggttctgttctcaatgttgctgccctgttggcatcaggaacacaagtaacacctcagatagccatggcagctcagatggcagccctgcaagctaaagctttggcagagacaggaatagctgttcctagctactataacccagccgctgttaatccaatgaaatttgctgaacaagagaaaaaaaggaaaatgctttggcagggcaagaaagaaggggacaaatcccaatctgctgaaatatgggaaaaattgaattttggaaacaaggaccaaaatgtcaaatttaggaaattgatgggtattaagagtgaagatgaagctggatgtagctcagttgatgaagaaagttacaagactctgaagcagcaggaagaagtatttcgaaatttagatgctcagtatgaaatggcaagatcacaaacccacacacaaagaggaatgggtttgggtttcacatcttcaatgcgaggaatggatgcagtttgaaaatgatcacacttgtaaagtttgggacttatagacttcttgttctgatgtcacgtccttgttcaccaaacagctagcactctagcttgcatgggtgttgcattgactttaatttattgaaaaatacaaatttttgtaaatatcagatcagtgata

SEQ ID NO: 5003 - DNA, 931 bp, Homo sapiens
gctctcaactcatccaagtgactactgcctggtgctcttggggatgcagggaggcctgagaaggccaatgtctatacagaaagttctaacatagtgcactgagtcaatgtgggcactttaaagccctttcacctgccaagtcacgaagcacccctatagttgtgtttgtaaaatactggggggtttgaaggggaaaagggataactccaaggtaccatctttgcatttcagatccacacaacttaaagatctgctgccgagtgaatggggaagtcgtccagagcagcaacaccaaccagatggtattcaagacagaggacctgatagcctgggtctcccagtgagtgacaggggctgtcctgccagccccgctccacctgccacacatgtggaggctgacctgagccctccacctttggctgtggccacctcagccagcccctggtctcaccgggtccttttgctttgctccaggtttgttaccttttacccaggggatgtcatcctaactgggacccccccaggtgtcggtgtattcaggaaacctcctgtctttctcaaggtaggtttagcgaaaagcaaagagagcaagggcccccaaagcccctggcaggcttgccctcagacttgagaagtacaggcttgtgtatgtgtgtctgacggaagggctgacactgtcatggcctgctctgttgcagaagggggatgaagtccagtgtgagattgaagaactaggtgtcatcatcaacaaggtggtgtgatggctcctgcacaggccctgcacataggatgagggcatctgctcccactcagcctagcccagggaaaggcccagtgacaggtgtggacaggtgccagccctgcaagccgcctcttctcggtagaagggagaaggacagagctctcttcaataaattcgtcaggtcaaagc

SEQ ID NO: 5004 - DNA, 674 bp, Homo sapiens
tttttttttttttagcaagttaaccaattttaatggaaccaagtaattacacaataaaattttatattcatccacaaaaaaacatcttgcaacctttggaaattgtagaaagaaaaccgtggggagcatatccttgtggagcatctctggttgtaactagtgattagtattttggtcttttgacttcaaccccatcagcttccatcttcttcctcttctcaatgattgcactaatcttcttccactggcgatcaagctctgctttgtcattggtttccttgaagcgcctggttttccgcccttcagacattttgataccatactggaatgcagccttgggcaaagcttctttgttgttcatatactcgctgtattcttcctgggtatcaaagtcccaacgggcctaagggccccttcttgttaccctggtccattttgctataatccacctcctcatcactatccacagccatgtcatccatcgtggctgggtagcactctgcataactgttggacatgccaaagaaatctcccagctgctttttgtcttctggcttcttcagcgattctgtgccttcccagccagcagacccagcaaacttttcattgatggacttgatcaactccttggtagacccaggtcctttgtcaacgtccatgggctcatcatctac

SEQ ID NO: 5005 - DNA, 656 bp, Homo sapiens
  misc_feature (1)...(656): n = a,t,c or g
gccaacacattatgaagttattaaatttaagggacagaggtagtatagttagatatactttctcttaggaaaaataatgggcaaaaatttttgttgcaacttttcatatatattttccccttaccaattgttttatccttatagtattgtaggccctgaaagtagaatttttctttaacttattttgagatttgagatttaaattttatgtattgtttacagtcagagtaaatcactggatttcttttgtttgttttgatttgctctgttttattcagtcaaatctagagtttgaatcctctgctaaagaatttgcatccactggtgtaaacagtgaaaggtatttgcttgttgaaaaaaaaaactggcaaagtgaaaagatacagtcaaaaatctagaatttctttaattttgcttctctgacgagttgtgaagcaaaatacctgaagtgagtctttgggtaggggaagggtattgagaccttttctagtatgaatattttttaagtttgggggaagagaaacttgcagtgaaaaggagttttttcattcctgaaagttgcagatccacaaaactaacaggataattgggcaaataaattacatataaacacacacagtctntataatgttatatacaatgctatatgggtntgt

SEQ ID NO: 5006 - DNA, 1013 bp, Homo sapiens
ttttttttttttttttttgccattaagggccttttattcgtattcatcacatcggagatcatctcttcctaggaagcttttaaaaaatccccaggttggattagggcactccctctgggtccctggcaatttcctccaggttagggatcccaaggggtcgctgccttcctgggtctctggcctggcccttggggagcacagtcatcaagaagtgctggggggaagtgagctctttatttagacatagctctgctgagtggaaagtgggcaccagccccattaatgcttgctggctggtggcttccaagcacgccccactgccaaggctcagctctgcagttctgccactgcaggtccctagcacagcccccagggtccttaaaagtcatcatcatcacagatgtcaaggtacacgtcgaaagcctctctgttgcagtttccatcaggagtgaagacatatttgtggaaggtcccatctacgcagatggcaatgacagagttgacgttcttggaagtattgcgaccgaaggcgcagatgcaagctgactcagcaggcacagtgaagctcgccaggctccactgagagtccacgtactgcccaatcataggccccaccttgcccacgcgagccagcgcggagcggcggttgaggcgggtatccttgagagcaaagatatggacagtacccttatcactggaagcgcagaggaaggaggagtcgtggctgaagttaatgcagtagagggtggcagggtcagtgcctcggcgcagctccaccagtttctccttggattgtgtgtcaaagaggcgaataagggtacccttctgggaggctgaggccactacagtgcctggcacaagttgcagactcccacacttgtgtcccgggaacactagcagttgcttctccaggctggggcagaggtcacagagccccttgggtctgtcccgggtatcaaactcaaacagctttcggggattgtcggggaaggagtacacatagatgcggttct

SEQ ID NO: 5007 - DNA, 306 bp, Homo sapiens
taaaatgtttaacagcttccctggggcattcaacccactaaacatttcctgaggtgtgctcaatttctctgacaaatgtttataagcatactggccatgaaactgtaccacttcccacgcaaaacaggggacttactttactaatgagagctagctaggagtgacataaaaattctttttagtataagaagaaatgatgattaacccagttatgggaaaatgatacttcaccatggaacagactgttcattaacaaagagtacttaactaagccgtaagagcctttggatccacagatatacatcc

SEQ ID NO: 5008 - DNA, 512 bp, Homo sapiens
atagctgcttattctgcttgaagttttttagtcaggaatggccagaatgtgtgccctgagtttatgatattctcatggaaattgttaatcttatgaatttttttttacatgatacacacggtaagctagctctataattaaaaaaaaaaaatccagaagatactaaacaaataacaggccagcttaccatactttacaaactaaagagcacaatggtaaagcagtaagcacaggctttggacaagacacaaacctgggtttgaatcccagtgctgccactcactgctaactctatgacttaaggcaagtcatttaatctttctgacccactattacctccaaattaaattggggctcattccacctaccctgcaagtttttgtgagggttagtagtgaagtctgtatattatttgacacatgataggtactctatagtaaagaatcttgggctgaattttgagttgggtaaacttgctggtctagcatctgacatgaactctttccagagtt

SEQ ID NO: 5009 - DNA, 378 bp, Homo sapiens
  misc_feature (1)...(378): n = a,t,c or g
aacggctgggactgaggggctcaggcagggtgtgccttcctccgcatgcccctccctccccacggccctgccaagcagtctataccagcatgagtactgccccacccctggggacaacctggctccaaccaacccctcccctgcctccaccatatccactaccagggcaccctttagaacaggggtctgggggtaccccaggggtgttaaggctcaggagtgggcagcagtcagggagagacagaactgggggaaagggatggttgtgggtctttctgtttcccaagatcctngaacatgggaagcgatggcagggcattagaattcagggcagagaggatttttggggaggattcctttttttgttccacntttttt

SEQ ID NO: 5010 - DNA, 502 bp, Homo sapiens
cttcctgatgtaaaaactaacatgctagataatccagtgtcgggaagacaaagatgttttgcttctctgaagaagcttataataatatacagtatatgtatatgtagggagcaattggtcaaaagtggctttttgtttccccaaggggaaagactggctttgtaattataattttttccttatttattttacttaaaactggtagagtctaagtattatatgaagtgcccatgattctgtcagtaaatttgaacatatttttattagttaatgtcagtttaagttgtccttttgtttgtttctatttttaaggtgaattttaatttctatctgaaatcagttaagataccttgagaaaaactgcagtgagaggagataaatatcctttttcaggaggaactgatatctctggctaaatatttgtccttttattatggtttctaaatcagttattttcttcagctttaatttcataaaattaaaaaactattttaaaaaaaaa

SEQ ID NO: 5011 - DNA, 446 bp, Homo sapiens
cggacgcgcgcgcccctccccctccccccgcgctcccaacgtgtggcggctcgcgacccccggcaacccggagaaggtctacagagcggcctgcgccacgaacaaaaggatgccacggagaaagaaaaaagttaaagaagtctccgaatctcggaacctggagaagaaggatgtggaaactaccagttctgtcagtgtgaagaggaagcgtagacttgaggatgcattcattgtgatatccgatagtgatggagaggaaccaaaggaggaaaatgggttgcagaaaacgaagacaaaacagtcgaatagagcaaagtgtttggccaaaagaaaaattgcacagatgacagaagaagaacagtttgctctggctctcaaaatgagtgagcaggaagctagggaggtgaacagccaggaggaggaagaagaggagctcttgaggaaag

SEQ ID NO: 5012 - DNA, 1378 bp, Homo sapiens
ggaggaggaagaagaggagctcttgaggaaagccattgctgaaacctgaatagttgccggccttctgatgcttccgctaccagatctcgacctctggccactggaccgtcttcccagtcccatcaagagaaaaccacagactctgggctcactgaagtcttcccaagggattgttgaagaaacttctgaagagggaaactctgtacctgcttcacaaagtgttgctgctttgaccagtaagagaagcttagtccttatgccagagagttctgcagaagaaatcactgtttgtcctgagacacagctaagttcctctgaaacttttgaccttgaaagagaagtctctccaggtagcagagatatcttggatggagtcagaataataatggcagataaggaggttggtaacaaggaagatgctgagaaggaagtagctatttctaccttctcatccagtaaccaggtatcctgcccgctatgtgaccaatgctttccacccacaaagattgaacgacatgccatgtactgcaatggtctgatggaggaagatacagtattgactcggagacaaaaagaggccaagaccaagagtgacagtgggacagctgcccagacttctctagacattgacaagaatgagaagtgttacctctgtaaatccctggtcccatttagagagtatcagtgtcatgtggactcctgtctccagcttgcaaaggctgaccaaggagatggacctgaagggagtggaagagcatgttcaactgtggaggggaagtggcagcagaggctgaagaacccaaaggaaaaaggccacagtgaaggccgactccttagtttcttggaacagtctgagcacaagacttcagatgcagacatcaagtcttcagaaacaggagccttcagggtgccttcacccagggatggaagaggcaggctgcagcagagagatgcagagttctttcacacgtcgtgacttaaatgaatctcccgtcaagtcttttgtttccatttcagaagccacagattgcttagtggactttaaaaagcaagttactgtccagccaggtagtcggacacggaccaaagctggcagaggaagaaggagaaaattctgaatttctagggtccaaaagttgacaaaaccattagtaggaggggtgggccatgttcattaagccatagtggtccctagttcattgttgagcaagttttagccctgcagttttcaccaccagcacctacccagcattctggtttttatgttttttatgatctatgcagacaactgtgtattctgttttataacagtttgtttgaatttacttacagttaaaaaatttaaatatatttatgtttgtacgaaaaaaaaaaaaaa

SEQ ID NO: 5013 - DNA, 923 bp, Homo sapiens
tttttttttttttaacatcgcatggcagatgggtgttggaataattactttctccacaatctatcattttaatagtttataatagtgcagttcatggaaacatgccaagtccaacaaaagcacaacagattagattacagtcagattgagaagactggtgtgcgttggcagatagacgtgctggacatgctccacacgcgacctgcagacgggacatgactgtagctgggcggcgcagctctcacagcacacagtgtggccacagggacagaaggtggagttgatctcctcctcgcagcacaccatgcacagcatggcttccttcagcttgcgtagcttctcctgcagcacccgggtctgctggcagctgaggccctcgcagctgctgcagttcatgctgctttctgaggacttcagaggcgagtgtgaagggctctggttgtttcttgaaacgaggtccacaacgccagcattgtacagagccctcctggcatggtcatacacctcctttgatgttcttttaatatcaaagacatatttcttgccaaggttaatgttttcattcagaaacagagatgccaagtggcccttcaagtctacggctatactgcatcatcacggcgctggtcactgtgtcacacctgtagaatgcgtgcgtctctgttatcgctcggtagagcccgctggccgccctggtgctgatcattttaaacaagagcacgatgctgttcccagattccttggtgaccgtcaaatatacattctttcctgactgggtggccatctgcaccacaggataagctatcctattaattgggctaaagtcatctttacaaattgagattccttcaggtccaaccccaatgagcagtttctgcccttcgctatcccgcacagaatgccattctatggccatagttttc

SEQ ID NO: 5014 - DNA, 465 bp, Homo sapiens
aacctgatcacataatgtcattccttgctcacttgtaaccccctcctcaggtccaagagaatgggaggagggtcatgttgaagtgtagccactggaactttcttgcatttatggagttgctttttctttccccaaggaaactgatgtttgcctgtccgctttatctttgtagtacatgaacagttcagccttagactatgtaactgttttctcatccttagctgaaaatgaggggcctactgtattgcgagactgttcaggggtaggggtggagggggtggtcccttaatggcccctgaagatgttggatgtgtttctccaaagctgctttgtctctttcctgaggttaatagtgaaactactaaacattaatagatttgcacagccacaaagaatgagagttgataataccgaagaagtgatgcaaaaacaggaaatcacattactgatcattgatagtattac

SEQ ID NO: 5015 - DNA, 316 bp, Homo sapiens
gcggcacgagctgaaatggttccaccattgggtatatcagagtcctgtgattgtgagagcctgttagcacactctcaggaggtgggatcgacatatcgttttctttatcttaagacatagcacagtggcatttcctgtatacatttgaagagattgagatcacagctgttatcacctcaattcccataatgaactgcgtgtagtccttctactcggctacacggaatacctgagactggtatctacaaggaaacgaggttaattggctggtggttcagtaagcacaggcatgtgcttggcttctgggaggcttcag

SEQ ID NO: 5016 - DNA, 176 bp, Homo sapiens
agcatctccttctggggaggcctcagggagcttcaaatcatggtgtaaggcacagcagtagctcacacatcacatagcaaaagcaggagcaagagagagtgaggcggggaggtgctgcacactttaaatgaccagatctcagaagaactcacctcactatgcaaggacagggccgt

SEQ ID NO: 5017 - DNA, 386 bp, Homo sapiens
  misc_feature (1)...(386): n = a,t,c or g
ccaaagtccatgcttcaggcaacagctgaagctaataatcttgctgcagtagcaggagcaagagatacctattgtaaaagtatggaacaggtatgtggaggggacaagccttacattgcaccttcagatctggagcgaaaacacttggatctcaaggaagtggcgataaaacaatttcgttcagtaaaaaagatgggtggagatgagttctgccgtcgttatcaggaccagcttgaagctgaaattgaagaaacctatgcaaattttataaagcacaaatatcttctatgctgctcgccccaccctcttttntggcatgtttgctatggatataatctccnngactnactggcttcattggcctaactctatactggcttggggta

SEQ ID NO: 5018 - DNA, 501 bp, Homo sapiens
tttttttttttttagtaaacaacttagataatttatttagaaagtagaaaataaaaagtatgattctaacatctatttagaatatgaacaaaattagaaatggttaaactacagaaaaaaaggcagagaaactgaagttggcttaatggttatccaatacaaacaagcaaaacccaagttaccttcatgcaaataagcattaaggaaaagaatacgggaatgtttacagaatgcgccatggcaaacatttttcaaatttacataagatactgtacataaatgaaaaaataaattaggtaatttacaagaaatgttttacagattacaataggctataacttagtttattatgaataaaatttatggcacatcatacatttttacatcacagattcagtgttaaaagaattcagacatgataaagcttagacttgacaagaatgatgtaatagaatgaggcaactgaaactgaaatggcatgtgtaagtaaaattaatcccc

SEQ ID NO: 5019 - DNA, 424 bp, Homo sapiens
  misc_feature (1)...(424): n = a,t,c or g
tgctctagatcttactgggaatcagctggcctgagttccaactgcttttaatgatagtttaaaacctggctaacttgtgattagaaccaaatgatatcttttggggaacaatttcatatagtcttaaataggtggctttattcaaaccgcatagttccaaatcatgatatcccgtatttctctctgtgtgtttgtgtgctttttttttttgacagagtctcccactctgtctctctnnnnnnnnnnnnnnnnnnnnnnnnnnnnnnnnnnnnnnnnnnnnnnnnnnnnnnnnnnnnnnnnnnnnnnnnnnnnnnnnnnnnnnnnnnnnnnnnnnnnnnnnnnnnttgcgccctgcctatctgcttattttaaaagcagtaaatctttacattatccctaagtgtatactctgatatcacagacc

SEQ ID NO: 5020 - DNA, 2130 bp, Homo sapiens
gacgacttcgtggactaccatttggttgcagcaaagaggaaatagttcagttctttcaagggttggaaatcgtgccaaatgggataacattgacgatggactaccaggggagaagcacaggggaggccttcgtgcagtttgcttcaaaggagatagcagaaaatgctctggggaaacacaaggaaagaatagggcacaggtatattgagatcttcagaagtagcaggagtgaaatcaaaggattttatgatccaccaagaagattgctgggacacgaccgggaccatatgatagaccaataggaggaagagggggttattatggagctgggcgtggaagtatgtatgacagaatgcgacgaggaggtgatggatatgatggtggttatggaggttttgatgactatggtggctataataattacggctatgggaatgatggctttgatgacagaatgagagatgggagaggtatgggaggacatggctatggtggagctggtgatgcaagttcaggttttcatggtggtcatttcgtacatatgagagggttgccttttcgtgcaactgaaaatgacattgctaatttcttctcaccactaaatccaatacgagttcatatggttattggagctgatggccagagccacaggagaagcagatgtagagtttgtgacacatgaagattcagtagctgccatgtcctaaagataaaaataacatgcaacatccgatatattgaactcttcttgaattctactcctggaggcggctctggcatgggaggttctggaatgggaggctacggaagagatggaatggataatcagggaggctatggatcagttggaagaatgggaatggggaacaattacagtggaggatatggtactcctgatggtttgggtggttatggccgtggtggtggaggcagtggaggttactatgggcaaggcggcatgagtggaggtggatggccgtgggatgtactgaaagcaaaaacaccaacatacaagtcttgacaacagcatctggtctactagactttcttacagatttaatttcttttgtattttaagaactttataatgactgaaggaatgtgttttcaaaatattatttggtaaagcaacagattgtgatgggaaaatgttttctgtaggtttatttgttgcatactttgacttaaaaataaatttttatattcaaaccactgatgttgatactttttatatactagttactcctaaagatgtgctgccttcataagatttgggttgatgtattttactattagttctacaagaagtagtgtggtgtaattttagaggataatggttcacctctgcgtaaactgcaagtcttaagcagacatctggaatagagcttgacaaataattagtgtaacttttttctttagttcctcctggacaacactgtaaatataaagcctaaagatgaagtggcttcaggagtataaattcagctaattatttctatattattatttttcaaatgtcatttatcaggcatagctctgaaacattgatgatctaagaggtattgatttctgaatattcataattgtgttacctgggtatgagagtgttggaagctgaattctagccctagattttggagtaaaaccccttcagcacttgaccgaaataccaaaaatgtctccaaaaaattgatagttgcaggttatcgcaagatgtcttagagtagggttaaggttctcagtgacacaagaattcagtattaagtacataggtatttactatggagtataattctcacaattgtattttcagttttctgcccaatagagtttaaataactgtataaatgatgactttaaaaaaatgtaagcaacaagtccatgtcatagtcaataaaaacaatcctgcagttgggttttgtatctgatccctgcttggagttttagtttaaagaatctatatgtagcaaggaaaaggtgctttttaattttaatccctttgatcaatatggcttttttccaaattggctaatggatcaaaatgaaacctgttgatgtgaattcagttattgaacttgttacttgtttttgccagaaatgttattaataaatgtcaatgtgggagataat

SEQ ID NO: 5021 - DNA, 403 bp, Homo sapiens
gagtgaatatgatactaatgaagatgggtttttcagggattgtggtccatcaggagtctgtgtgtgccacctatggaagtggcttaagcagcacgtgtattgtagacgttggggaccagaagacaagtgtatgctgtgtggaggatggggtgtctcatcggaatactcggctttgtctggcatacggaggatctgatgtgtcaagatgtttttactggctaatgcagcgagctgggttcccttacagagaatgccagttaacaaataaaatggattgtcttcttctgcaacaccttaaagaaactttttgtcatttagatcaaggacatctctgggcttcaggaccatgagtttcagattccgacatcctgattctcctgccctgctttaccagtttccgaaa

SEQ ID NO: 5022 - DNA, 683 bp, Homo sapiens
ataaaagaagacacactgtatttataaagcttctaggggctgtaatagatacataattttggatgtggtataggttggcctatatatacaaaaatacgtcactaaaattaagtggagtcacaataactttttatgtaactttgttttagttctaatttggtaacagtgactcaaaataaatagaatcatattttaggtggaaactcgatgatccatgtaagtagcggggctggagttctgtgctgtctgggcagagaaagcacttggactgaatgatgggcacagctctctctgtgaagtcctgcagagtcactaaccttgagttcatgtgctctaagcttcactgtccctccaacccaagatcccaatttcttttattccatcttgtttcctcttgtaaacagaagagcacaatatgacctgttttcaaaggagccggcaggaatctggttctgataacaaagtccctgtcactcctgtgtctattagttctcctaggtagtttcttcagggctgcgccaacttcacttcacagtagatgaaggaatagtgccatggagaatggcatccagaagaggtatactggaaagctaatgccccaggatctctgaagaacatatcaggcctgaggcttggggtcatggatggttttcaaagagcagaatcttccataaccttacata

SEQ ID NO: 5023 - DNA, 613 bp, Homo sapiens
  misc_feature (1)...(613): n = a,t,c or g
ggccttcattggattctttctagggaaattcatcttgtagagcaaagcatgcagagtgctatttcttttttttttctcttgaccagaagatttgtttacctaccatttcattggtagtatggcctgcggtgaccatttttttgtgtgtgtacagcgtcatacaggctttgcctttaatgatctcttatggttagaaaacacaataaaaacaaactggctactggacaaattgtatattaccagatcatcactagcagctttcagttgcacttcagtcctttatcaaattcataaagaattgttctgggaagtgaggagcacctctgcctgggcccaccctgtctgggaagtgagggagcccccgcttcccgggagccgccccatctgggaagtgaggagcgcttgcctggccgcccaactgtctgggaagtgaggtgtgcctgtgcctgggctgccgcactgtctaggaagtgaggtgcgtctctgctgcncnnnnnnnnnnnnnnnnnnnnnnnnnnnnnnnnnnnnnnntgctgtgcaatcctgcaagtatgaagtgacagccttgtgtgtgatctttctgccctccccaagtttgcattttcgacattaa

SEQ ID NO: 5024 - DNA, 689 bp, Homo sapiens
ttttttttttttttttctatattggtttttatttataaacagattgacataaaataagtccagatggcagcgtgagtagctgtgctgctgacttgcttacaaggaagcctgtggacaggcgaagtgggtggaaccgagctccagcctggaaaacctgccctcccatcccccttagcgccttcttggccttccggcctgattttcttcgacagcagttctggccagggcaaggagctgtggtgggggcagtataagccagggactcccttcccacagatgaggcctagggctgcaaaagggccccgtgaagagaggagaaggtgacagggatccttctcctccccatatggagtgatgtggtcaaggctttatgggtctctccacctcaaagagaaagtgccctagggtagtgtcctctgaagaggggccacgcctatctgcagagggcctctctgggaccaaagcagggcagtctccctcctcctgaaacccagtgtctagtgtgggaggagtattaactacagggtttgcccaagtgccagaaacaataaattaacaataagatctttttgtaaaaaaggtagaggtttgcaccacgagtttggattcaggggaatctggtgagaaggtacgagctgtggggcgatggggtgccacagcaagaccaggacagagttggccttttcctc

SEQ ID NO: 5025 - DNA, 1029 bp, Homo sapiens
cttttgaccagaacgcacacctcgtcggggggcccagtccagccaccccccagcactttatgtagagagtgtgacatagacctgcatatttgtcagtgccatgatggaagaagctgagcatgtcttaccaaaaacagagagaacgagcctggatacagcagatgtaggggacagccgtgggaccgcgtgagaattgaagcggtggggttcccgcaccctgggctggctggtggttttctcgggaagcaggaccctcctgactggtgctcttcctgtgagcggatagagtgatagactgggtcgtgtgtgagacgcatgtgctccaccccactccttttgggggaagccagggcaacagtggcctctgggagggggtcaggaagaggcgaacagctcaggcagcgcaggtgtgatgggcacagtacgcagagcaagctcgggaagttggtaggatctcaggcttggggccgggactctggagtgaatccccatttctctaccggcttgcttggagtttggacagaagcatttcacctctgatctcagcttccccacctgtggagtgggtttagtgacctgagtcactagggaatgtcacctgaatgcacagcccagcccatgcacctgccccagcccctccagctttggagccaaggccatcgttccagccacttgactgtcctcgacggcctgttccagacagggcgtttgttttgtccatgccttcctccctgcacgcacacggcgtcaaaaccaagctgccggccactgtctccagaacgcaagggttccaggcccgtgtgtctgaagcagtgagtggttccacacaggtgccaggaagtgcccatatgagatgacgaggaaaccccttttgcaggtgaggggacagctttctagaaaagccacacctggcatctggggacacactttggaaagtggggaccctccagcctggagaccccatggactgatgcctccactgctgtgtgccccatgttgtgttaacacctgcgtgtggggaccccatct

SEQ ID NO: 5026 - DNA, 1114 bp, Homo sapiens
cagccctgttggtggggctggggatgtcagcggggctgcctctgggggcgctcccggaaatgctcctgcccttgcgtttgtcgccaccctcaccgctttcatcttcagcctctttctctacatgaaggcgcaggtagccccagtttcggccctggcacctggggggaactcaggcaatccgatttacgacttttttctgggacgagagctcaaccctcgtatctgtttcttcgacttcaaatatttctgtgaactgcgacccggcctcatcggctgggtcctcatcaacctggccctgttgatgaaggaggcagagcttcgaggcagtccctcactggccatgtggctggtcaatggcttccagttgctctacgtgggtgatgccctctggcacgaggaggccgtcctcaccaccatggatatcacacatgacgggtttggcttcatgctggcgtttggggacatggcctgggtgcccttcacctacagcctgcaggcccagttcctgctgcaccacccgcagcccctggggttgcccatggcctctgtcatctgcctcatcaatgctactggttactacatcttccgtggggcgaattcccagaaaaacactttccgaaagaatccttctgaccccagagtggctgggcttgagaccatctctacagccacagggcggaaactgctggtgtctgggtggtggggtatggtccgccatcccaactatcttggagacctcatcatggctctggcttggtccttgccctgcggggtgtcacacctgctgccctacttctacctcctctacttcaccgcgctgctggtgcaccgtgaggcccgggatgagcggcagtgcctgcagaagtacggcctggcctggcaggagtactgccggcgtgtgccttaccgcatcatgccctacatctactgaagcggctccaccaccccaggtgggggcatgtgcccactcatccaccagcacacccaggaccaggagcctcgacacacttgggactcaagggcttgcaccccacccagccctgaggatgaacaacctcagagaagaggtggtttagagcaaggaaaaaaatgaaaccagtgaccaaaaaaaaaa

SEQ ID NO: 5027 - DNA, 508 bp, Homo sapiens
tctggaccaggcaagaggtgcctactggagggtcttggtgaagcggtaactccattcctttcccttgggtcccccaaaggtaataaaagtacctggaggagaatagtcaggtgattgacctctgcctgtctctctgacggtgatgtaggtgcagacaccgcctgcctgccttgtcctggggttttgtaactgcagctttgacacaggcattcttccctttgaagcacacagcttgcttttccagcacctagacttttacctctcttcatgccttaagacttagaccataactgggcttgaaatgctcaccccttcctgggtctggtcttgggcacctaaggctattccttttccaaaacttgaaagtgaagtcccagtttccagaccaatctcttttcctgtctccaaaaaccatttttgtttccaaacctagctcccccgaaattttaagactatttacctagattcggagatggtcttggagagttccaaaaggggtgtgtgtgtg

SEQ ID NO: 5028 - DNA, 324 bp, Homo sapiens
attcatctattttctaatcaacgtaggaagacttcacggaggtggaaagtgagtcctctctggtaggaaaggtagggatttaaaaatccagggagcttttgaatgaaagagaagtggctgggacaggaagggatctgcaggcatctagcacagttttagaaagagcgtgggagcctactaacaattacaaccgcttggagtgggctggagtgatctgacttaatgttttatagtgatgttaagtcatatgtatcacatagtttctgaagtttgatagcaatagggatccttttcatatgttatgtaattaaatttacccccggg

SEQ ID NO: 5029 - DNA, 228 bp, Homo sapiens
tcacccataaatggataattaagatttggttattatagacacttaatacttaggtagctaaggtagttttaccaataaattatattaatttaatatttcagtattggcaaaactggatggcatacttcattttacaattttggacagggatgggttctgttttgttttatttaaatttggaactttaaagttctctgcaagaagagatttgtataataaattccctgg

SEQ ID NO: 5030 - DNA, 728 bp, Homo sapiens
  misc_feature (1)...(728): n = a,t,c or g
ttgtggaaaaactgaaatacgcagtctggacactgcactgagattccggcatactggcacagacacagctatgtcgcatcttacagactacaacagacaacaggcttaactgcaagaggtttacagacaaaactttacatagatgtgctagaagaattccaaactgctgtcaaagagagtataggaatcggtctgaagagaactccgcccagtcccttctgtttggtcactgcagctgcactctgtatgcacctattagcaacttaaccttggcagagggtgcttctgtcaaccttatgaagagtttattgggacctgcaacagggctgaatgagtaaacaaaatgactgtccagaaaaacaggaagctgaaatttatcattcagaactacagcttgtacactacacggtccacagagccgagcaataacttctttacccaaaaagtttgcatggaagataaacagcaggatgccagagccttctggtatgttctgtgggggtttgtaattgaaatctgttgaaaaatctggaccctcacagagtcgatgacatgcgattggaaaaactggttctagcagagcaaggcgagcttcaaagtaatcctttattgtctcttctgctactcttgaaagtgtctctaaatggttcttcagcaagtcgtacacaagcacattgttagaccccgggaattccggaccggtaccgcagggcgttcaaatnnncaaa

SEQ ID NO: 5031 - DNA, 160 bp, Homo sapiens
ttctttatggctgacctcctaattaacatgtgttctctggaaaaacatttcactcaaacaaacttcacctcatgtccctcggtttatatttcccttcacaaacacaggatagataaggaacagtcagagagctcaatctatacaaatacagttatgcatg

SEQ ID NO: 5032 - DNA, 526 bp, Homo sapiens
  misc_feature (1)...(526): n = a,t,c or g
gctggaagaataattagagtaacagatgaagttgccacatatagagattggatatcaaagcagtggggcttgaagaatagacctgagccttcatgcaatggtccagtgtcgtcctcttctgccacacagtccagctctagtgatgtagattccgatgcaacaccatgcaaaaccccgaaacagctgctttgccgtccgtccactgggaaccgagtagggtcgcaagatgtatccttggagtcctctcaggcagttgggaaaatgcaaagcacccaaaccactaacacatccaacagcaccaacaaatctcagcatggatcagcaaggctctttcgttcttccagcaaaggcttccaaggtacaactcaaacaagccatggttccttgatgacaaacaaacaacatcaaggnaaatccaataatcagtattaccatggcaaaaagaggaaacacaagagggacgcgcccctctcagacctctgtagatatcagcgctgcgcgtggactgtcttctctgtgcaatgat

SEQ ID NO: 5033 - DNA, 779 bp, Homo sapiens
aattagagcaggtatgcttttgatggtagggaagggatggaaaaaaggaaaagcaatagaaactgtccaattcacatcagttatccgtctgctttttcttgagagcttgtggaaggtgttaacgtggctgggaacatcaacaccttggcatgcatgaatgttaagtcaggaaggccagcgatcaccttgatagcttcttcacttaggtgctcttctcttttcggtttcctactggtagatgtgcttgtcttctctactgtagacatgagtcttgcaaatgcatcagtcactttgaggcttgaggtggagatttccagcttagaagttgttaactcatacaactccggatccacacctgggattgtggtgctgctgctagagctactgtcatccacgggcccaaagaaatcaaggttcagaagagtggaacctccactagcatctaaagggttagtaaggccactgctactccagtcaaactggacgggtggtagagactcctggaactgatcagatgtacatgtgttcatatctggtgacatggtggctgtctgaccgatggaagctattttttctgcagcagaaagtggtttcagtggttccttggtgggctctaacatacccaatcctgctgcatacatgggcactataacaggctgcttcttattgcccgtgaagagaatgtttcgggtgtctattcccaaggaggacaaaagcttcttgttgctatgggagccgccccactggtatctcaagccatgtgcatcatggatatcctg

SEQ ID NO: 5034 - DNA, 435 bp, Homo sapiens
aagaatccagctgaagggaatacagtatttgtttataatgataaaaagggcaccgaagacccaggagactcacatcttcagtggcagctcaatctccttacacacatagaaaatgtgcagaacgaagttaccagcaggatggacctaatagaaaaagaagtcgatgttctggaaagctggcttgatttcacaggggagttggagccaccagatcctcttgcaagatttgccccaacttaaacgccacataaaacagctcctaattgacatgggcaaagtacagcagatagcaactctttgctctgtatgacaacagtgaacacttaatgaaagaatgtcggctttcttcagtcaaagcatttttattatccacgtgatggctaagtggataatttaaaagcttagtaatgtctggtcattcactgatttgtgatg

SEQ ID NO: 5035 - DNA, 470 bp, Homo sapiens
  misc_feature (1)...(470): n = a,t,c or g
gtagttaggatggctgaaggggatactcaccggctgaaggcgactgtgattccccctacccccacaaggcgattttgaccccctgagggctgctctagaggactcaggccccgaagctgtcccagggaggtccccgctgcatcccaccacccaagctgtgcctcatggagtcgatgtttagcagccctgccgaggcggcgctgcagcgagagaccggggtgccaggactgcttactcctcttccggacctggacggagtgtacgagctggagcgagtcgctggatttgtccgcgacctggggtgtgaacgagttgccttgcagttccctgaccaagctattgggagatgctgtggctgtggctgcacgactggaggaagacgacaggggtcaaagatgttcattctggggttgacacagcctacgnagcttgctgcgttggatgtgctgggtgctgagcaagctggagct

SEQ ID NO: 5036 - DNA, 370 bp, Homo sapiens
gggcacgagccaagctgtagcaatggcgtccgcgtccaccaagagcaaacagaaccacagtaaataccctgcacccagctcctcatcctccgtcctcctcctcctcctcgtcctcttccccatcctcccgtcaattactcccgagtccaactcaacagactccaccaagtcccagcaccacagcagtaccagtaaccaggagaccagcgacagtgagatggagatggagggcagagcactaccccaacggtgtgctaggaagcatgtccacacgcattgttaatggtgcctacaagcatgaggacctgcagacggatgagtccagcatggatgacaggcatcctcggcggcagctctgcgggggcaacca

SEQ ID NO: 5037 - DNA, 584 bp, Homo sapiens
  misc_feature (1)...(584): n = a,t,c or g
gtgcaacaatactttacttaccatactcatatagaaagatcctgttatggaaacttaatcgaggaatgtgttgaatcaggaaagagttattataaagtaaagaatctaggagtatgtggcagtcgtaatggggctatttgccccagagggaagcagtggctttgcttcaccaaaattggacaatggggagtaaacactcaggtgcttgaggacataaagagagaacagattatagccaaagccaaagcctcaaaaccaacaactccccctgaaaatcgcccggggcatttccattcctttatacaaaaactataagcagatgcatcccttcctaagccaggaaaaaatctgtttgtagatctaggagaaccattgtgcttaccatgaatgtgtccaattgttgggtatgcgggggagctttatgagtgaacagtggctgtgggacgggatagacattcccccttacttacagggcatcccaaaaacccccagactcactttcactcctcaggaatgcccgcagtccctggacantttaccaaactcaggtatgagggacggtgtgcatatcccgcaagtggact

SEQ ID NO: 5038 - DNA, 574 bp, Homo sapiens
  misc_feature (1)...(574): n = a,t,c or g
actccacacaacaccaaaagcaccctctttttatagtccctttgaaatcatatatggccaaacttttgtcttggggtctccacccttaccagactctgagccactcagatattacctcccctccttaatccagacatggtctttcattcgtgaagcagcaaataaggccatgcctctccctgttaacacctttttgtcctctgaacgtaactgtcttacaggcacagacgtgtttccagacaatccagatgatgcttctgctacagcgacatggcccagtcccaaggcgcaagggccacttgtgtcagcagtgtgcaccagcagcgtgcgccggcaagatagcagaagcatgaaaagggccggccagaagacacctactctggctggaagacacgtacccctgaagatcaagaaagaagctatctgggaacaatgtagcagttacgtcagaccaggacacttcctgtttacaggagactataaaacctttgtcctatcatcacttgatgtggacgccattttaggcctcagcccgnctgcacccaggcactgattaaaacagcatgttgctccg

SEQ ID NO: 5039 - DNA, 572 bp, Homo sapiens
atgaaactgaggtttcactgagcaaataacttctgaagtaagtttttcaatcaacaggtatctctgaaaaattccccccagataccaattttccttcaagaaatatgaagtgatatatatgaaactggaatttttttcaaaatgggtcttacaggcattatatatggattatttcttaagaaaaaacaaagcacaaatataagtttattaatgttagcaaaataaaaagacataagtggcttgttaaaaactaatgtgtaagttttcctgtttccttatctccagagcatttggcattctttatcaactggtacataaaagaatagaaaaataaaagattgtcatattgccctctgtatttctcttttaatatatcagtatggtagtctaccagaaagtagtaaatggcttcaattgtagaaaggaaagtatctggctttcctttttgatggcgccaaaagcaagtttttcttgttttcaactcaacttgtaacaacccttgaagtcgctcatcagtgaatattttgtttgtttggttccaggtgctatctataaatataatttttttcagt

SEQ ID NO: 5040 - DNA, 608 bp, Homo sapiens
ttttttttttgtagcattacccggatataattctctagaaagagaattcccattttattcatttatttattttttgcaaacaattttagaggcagggtgttaaactgattaaaatttcacaagattgacattattgcttaaagtgcttgaattggttacattttaaaaaattaaggtacagattattttaaataaaaactacaatatttttagcaacaaaataataggaatgccacacaaatacagtaactattttggttatacagaaatggaagccaaaaataaattaatgtaatactggaaaacagaaatttaattaggcagaaaagtaggaaataattttccctgacccatgccacttacatgagttcattacaatagtgctgataaatgccttgaccatataatagcaaacaagggcaaaacatttagtgcacaatattttaatacacgtgaatatacaaagttgatcaaaatgcaatgttgaaagataaaatccatctgtaataaagctacactccaatatctaaaataagccctaagctccagttagaacatagatcattattaggcatgcccatgaaattaagggtatccatgaaaataaa

SEQ ID NO: 5041 - DNA, 2372 bp, Homo sapiens
tttttttttacgatagatcacagttttttattcttaatgtcacaagcaggagaaaaatctcacattcatactaaaaattccaactagactcaacaggaatgaagtctctatttgtaatggaaagtcccagcctcccgctgccgtccagtgcgtgtactgtacacatccacactcattctcactcagggttcccggaccgggctgtcctgcctgcggaactgaggtaaactagctcaggtactgacactaggagggtctaccttacataaggtacaggtagaagcttgattgctaggcccaggcccacccagaccctccaatcctaacaggtatttaggcttgaggttcactccctcctcagctgcacacgcagccaggtattaacgaggatcagagctgttctgaggggtgggaaggagcagccccgccaccactcactcaccctcagtcacatcggggagggggcaccagttacatttacatcacattatttataaaataagaattacatttcatataacatggccagaaggagctctagtcccccaggaaagctgccggggacagcatttgagcctcttctttgcacaggcataacttaactatacagctaattcctagttaatagcatttatacttaaccacctcaatgaaccaagcttgaaggaatttaaaaggcaatttagcttaaatacaaaaataaatttttgttaaaaaacgtttaaatatttttttcttttaatttagacacacgcattcatacttctcccaaagaggttgggcgtggcagcaaggcgcttgggcctggggtatgtggtttcagaaggacggaaggaaaggatgggctgcagagggcccctgtgggggaaaaataggattttaaaaatatggttcattaatttaggttttctaacatctactttgggtgacgtagcctccagtgagggtcagttaagtgggacagaaaccgcagagggaagaggtctttgcttcccctggggcccattctccctggctgccagcccttgaagtcagaacaccatgggaaaattcaggagtcggcacttgtagccgtcaagtggtgctactttccacattcaattaggcgaggccccagaaacttgaacaggaagtccggcactaccaacatgccgccactcatacaactcaactcttcctccaaactcgattcaaagagcaatacacagagcatcagacaaaggaacacaggacaagcttgaaacatacaatcctggagaggcagacgagggcccaatggggccaaagggtagctgggcgaggaggcaagctgaagcagcggtgggcatcctgcctgctccaagagcttctcccttcaccctggctctgccaggtaacagtcttgagccaccaagttgagggccaactggcagaggttgagatgaaacattgttcaggcttggccaggagaaacggcaggagcagcacccactggggtctccaaggcaaagctagattcaagggcatttaaaaaggagggaatcctgcaaggaaccggtgagggacacagcagcaagaaatggggaaacagagtccccagaagggaccagaggaagagaaccacttctcacagctaagccaagcaagataaagctttacggatagcccatttcccaaatcccatcaggtgcacaccaccgatccaggcgggctggaccctgccccctccagcgacgacggtctcggggaaaggtggaaggggcgcctgcctaagggtgcgctaagcgggagtcagggcagcggacactatgtacaggtgtttccttagttctccagcctccccagtggaactgttcaagtagaggtcccgggctttggccctccgcatcctgcttccccttccctgaggcttgtgcttcctccagaagggaaagggccccagggctgccactgccccctggcggctgaagccagagatccggggtaggtttgctttacgcaactggaagggtccaaggctcttcctagcaggtgccaaggtccagatttagggaaggggtggggggaacagggacaggggacaaaggctactttttgcgggtgtgctgccttcgggcctgcagtcgctgtcgagcccctggggtcttggatcccgcaccaatggaaaatgaaggggccgccgatccgaaaggtgcaacaccaacaaagccttgggcgggtgctgaggatgccccaaaggagaggctgctgcccgatgtgcccactccaggcgcaggggtgttctgaccaaaggtgggggtggcggtgcctccaaacacaggtttgctctcagttgtgctgcccacgttgaaggcaaacggtgtgctctggccggtgggaggatccagaattct

SEQ ID NO: 5042 - DNA, 674 bp, Homo sapiens
tttttttttttaggtttgaactgactttattattttgtaaatgtgaattttacaaagcgctttacaattaatgatcacatccttttgtttgtcatggatttccactgtctgaaacggctctgagcacgcttgaagccctcggtttccctgttcgcttttgaatgtttcagttttagttattgatacaatgtcagccatggctaaaaagtaacagtcttgactctaccgagtaacagcacaaaaacagagtgagggctcaggaaaacaaaacaaaggcttcctccttaaaaaaaagacaaaaaaaaaaagctaagcatctgtggctgaaatctaactcagtggtactgtgaaaccttcctttacagcacaggaaaatttattttttaacagtcgtgagttacagtactttaacccctaaacagactctttaaaacaaccgtctcctttttaaaagtctcttttttccaaacgacttcatccgaaggatggatgctctacgttgcacccagtgccatccaaatgttcaagtcaaaaatatttatacattttatacttagttctttttttttgtctgctaaaaatagtattgcaagttttggcttcttttgacataaaaatcacaatcgtgtacgatgctaacaatggaagcgactgatcggaatacgagccggtcg

SEQ ID NO: 5043 - DNA, 877 bp, Homo sapiens
  misc_feature (1)...(877): n = a,t,c or g
gactgaaatgctccatctatgaagacttgcttccccaccaaagatgtcctgggattctgctggatctcaaagatgtgccaagccaaggaaaaagatacaagagcagaatagtacttaaaatccaaactgccgcccagatgggcttgttcttcatgcctaacttaataatttttaagagattaaagtgccagatggagtttaaatattgaaattattttaaaaggtaggtgtctttaagaaaataacaagcaaccctgtgatatgttccgtctctcccaattccctcgttatatagagggcttaatggtataaatggttaatattggtcccaacagggctgactcttctatcatataatcaaaactttttacatgagcaaaattcagtaagaaatgggggaagacaaaggaaacgtctttgagaagccccttcatatttatttatttatctcttcctgaaccatgaatttcatatgtggaatattgctatattgacagattcttgcctgtctgtgttattctaggatctgttacaggtccatggcaattactgtttattttttcctggaaaaatatttttttataaaaggcttttttttttttttaaaataccatgagaggcattgggctaagaaagaaaagactgttgtataataccttgttcaatggttgtatttagtgagctcatagaggtccatcatatcatgaccgaggctaggttgtgtggggcagggaaggtaggggctaagggggttgtaggccttgctggggcagcctcttcaggaggcaaggttgttcagatctcccttgccattacagtaggttactattaatgagggcagcacctgatgccnttttgtactgaggtatgtaccttt

SEQ ID NO: 5044 - DNA, 418 bp, Homo sapiens
agtcttcatgcatcaatgaaatgaaaaatataggattatttatttcccacttagttacaaaaagaaagtacttaaggggaaaatcgttcttactaagtcatgtattttcaacttgtcttccctgttatatcataaataccgacatactacataccccatgtaaaattttgcttaaactctctagcacttggcatgtagaatatgtaccataggtatcaggttaaaacactaaagtctgccagaaacttttgacagtagcaagaaaattgttgaagaaaaaataaattatttactgagggtagttatgttaaagttttgcgaacttaaagggctgactttagttccttcatggtaatggcttgagtaacatcatctttgggattttttaaatactggtccagtctaggagaacctggaa

SEQ ID NO: 5045 - DNA, 536 bp, Homo sapiens
tgtagttaaacaagttgggtcttttactctacgtacaaacacaccaggttgagacgttgaggtgtctcagcaacagggtgttcggaggaaactattacaggatttcacctgtagttgggtgatttgggggatgatctaaggaaggaggatttggttctagattagacgcacgctggagcccaggaggtctgaggccgcagtgggcccatgaatcgccactgcgctccagcctgggcgactaagcgagaccttgccacaaaaacataaaaaaagattagacgctgtgggaaggaagagggtaattctcagcttatgatcgctgcatgtgacagggtgagctgtgcgttccctgcttagaatcaagaagaggtcttagttcatctcactttgtcgtggtgtctgcgtggcgcttcatgcctcacagaacatgggctggctacgagggtcaaaccaggccacagcaacgcgtcaggggccgcttgctttcttaggagcaacaggtccagaggcttccgctccaagagggactggggccc

SEQ ID NO: 5046 - DNA, 1301 bp, Homo sapiens
ccagaacttactttaataagcaccactgataccagtattgctgaaatggattttgcaaatttaacccctagaagagaagagcgagaatgaagcaaaatgcttctttcaggtgagtgtgtttctgcctcttgtatcagcaacagaagcctcagattatccagctgtatcagaactttccatagaaaaaccaaggacagcatctacagaaacccctcgcaggcttacacctgtaccagggagcttacaagaagcatttataaagaggaaaaaatcatttatggagagatcccaccagaggcagaaagaaataaggaataaaattcatgtctctgaaaattctcaaatcaaaacagttaaagagaaaccatctataagttcatctgtgagtcgtctaaagggcgtgaataaagtcagagcatcttttcctgaagacagaaagactacacaggctctaaggcaccaaaggggtctaaggttatacaatcaactagctgaagtgaaacaacaaaaggaagaaaaaacaaaacaagaagcttatgcccaaaacagaggcaagggcaaaagaattccataagaaaacactagagaaacttcgagccaaaaatacatgctgactttctagaaatagtgtaaaggttttttaattgtgtatatgtagcattagacaaaattatttaaagtcaataaattgttattcgaggaattccatgttgtgatttcttccactgtccatcaaggtcactttagatcctctaaagagctggagtcaaaagatttatcttcaagtttgccctttttaatgaaactgatccagttgtcctgtcagcccataattactttggcttctgtcatctcgttttaatatgggatatactgatgaagacttcaaaattcaccaagaatctttgggatctaatttcttcaaccaatttactttagggtcctttttactgtaggtggtggggatctacctggttctcaatttgacaccctggaaaaaaaagcattgcttactattttagagtatatcaaactgaacactctgagaaacctacacaaatactgtatcagtagaaataccaggtttaacaagcacaaagccaagaaaaccaacgatgccagatactgaatttctatagcactgacctttgaacaccctagcaggtgtaaactgctgagtgcagataccatgcagtgcaattatgactgaactgtacaactcgtattcccaaatttgcaatattgctgagaaatgctttcacaaacctctcaaattcctttaacaagtacaataatttgag

SEQ ID NO: 5047 - DNA, 448 bp, Homo sapiens
ggttaatttgaaaataatcccaaagagagaatctcctaataaaaactactgtttgggggaaaaaaagattactgaattataaacatttgaaatattaccttgagaactcagcattcactgaacagatgtattgagcagctgctgtgtgtgctggatattggggagatacatctaacagatgaaaggagacagagtaaatggtagattacagaataataaggactacagttgatataagtatagggatatatgggaacatagtcttggtcaagaaatagcttttaaaaattctgtgtgtacgtttaaagcagtatttttggatggagtaggattgtggaataaaaaaagtaagaaagtgccatcatatttgtgtgctatttgcaaacccatgttatttttttgttaccaccaggcaatttccccagccagaccctggtaccccatggct

SEQ ID NO: 5048 - DNA, 503 bp, Homo sapiens
gttgtggttaaaattttttttttttttttttggtttctgatctccagttggtgcagattatgttggcagccggtgactgcagaaaaaataaaaatatcaaaacagaaaaaaaacaaggccctccccaaaccaaatgacttaaaaaacaaaacccatatggcgaggaatggagagaggatcctattgtcttggaggcccatggaatctacttccgtctatgaaacgttctccgaaaagagcatcgctcgctggctggctgggacagctctgttctctgtgtttcctacttctgtgtacattctcgggttcaagtttgcttggattttgaccttttttttaatgtttaataaaaaaagcagtgtctgctgccatgttgcgtctctttctctctttgtctctgtatgcctctgtctctgtgcttgtagctgttccttggagcgcggtgtggtgttcttgatgtagtgagctcaagtctgcggctgtttctggggacgtggtggagg

SEQ ID NO: 5049 - DNA, 849 bp, Homo sapiens
  misc_feature (1)...(849): n = a,t,c or g
aagtaaaagctctactgagatgaagaaagaaaaagaatacctgctcagctccagagacacgtaaagggacagagattgggggacagaaggaagtgcattaattccttccacgacccctgaagagcagcggtgggtctgagcatcctatctccaggaagcaggccagcaggcaagccagctgccacctcgtcctgtgcaaagcacagccggccgtccccaaaagatttccaaagatgatgttaaacccagccacggttctgatctccaggaaagcaattgctgtggtacaaaaggacaagggttaaaagagaacagtgggagctctctttcccaactaactcacgcagtgtgacgcagaggctttcagcacagcccagggtgcccgggactgaaaactccttcaccagccccctccacaggatatagaagacttagatcactacgagatgaaagcagagcccattagtgggaaaaagttggaggatgaaggaattgaaaaagaaaatttggcaatattagagaaattaggaagactggaagacaagagcatttaactgcaaactgttgtcgttgtcaactgggttgtcttcctgaagtattgaatccggtatgtattgtgtggaggagcattacgtactggaacttctcacaaaacagggctgaagcagtgcctactcgacagaaccggtcatcgtaccaagaaatgccacgtgactcanaggcnaagccagagtgcagcttggagccaagaagatgatgtctcaatctgtcaccccagattgagtgcnatggccgnttttcagccactgnaactctggctnccagggtgactggacgtttnattaaccc

SEQ ID NO: 5050 - DNA, 457 bp, Homo sapiens
gaactcaaattttcatttttaatgtaatccccaagattttctccaagaaataaattgttgttttgtattttgtaacttaaaagcagctattggtaaatttctgagatatagcaggagaccaaaacatgtttggaaagagaataaatatatgaagagagactggttgttttattttcaatgtattgaatatattagactactatttattttctgagtggatgtgattaaatattcagacgtttagtgtatgattaagagtgagatagagatttctttggagtaattaaatccatcctgtcttttacacaatggacaaatcaagttaaaaaaatttttagatagcttagcttgttttctggtgctgttgacctgcaagagaatatacttttgcatatacaggtgaaagttttgcaatttatgtatacaagaaattgtaggcattaaaaatattttattg

SEQ ID NO: 5051 - DNA, 1242 bp, Homo sapiens
gtttaagccacccaggctattatatttttgttatagcagcctgaacaaagacagctttgattcttaacatatttaatgaaactcgagcttcataaaccagtgaaatgcctacccctatggagacggggagctggtcatgggacccaggtgcctggaggacatcccagtggctttgaaggctccagccagtcaagacggtcaatattagcccttctgccaacatctggcaatgtgaggctggggtggacgttggcctgatgttgccaggagtaggatgctgatgctgccagagagtaggtgggctccaaaccccaggcttctcacttgcttactaagcacagcagtctgaagcttgggacctggcagtgcgtctttggagaaggcaaaaaagccacagcagcaacacttaggagcaagacccttcccgctctccaccctatttcctcccctgaagaagagcaacagctcaagctctagcatggcacagaacgctaggttgggccaggcaagcagccatggtggggccaggtgaagcaatgtgggtctcagcaaggaacccctctgaaggtggcagtggctcccagggctgctgcacactggacaccacaactttggcatcagctgcatggtgagctgcagagtggtcagaggggctggggccctgccaagagagcaaggccagacctgcccagccgggaggcaggaaggccctgatccagcaaggagaagtagaggaagtccacagccacctctgttactcatcgctactgggacatctggggacaggctctgttcttgggagagcaggtcaccaggatttgtagggctgcctgccggtgacagacacgtaagtcacagggaaaggccgggatccaggcctcagctgtagcagcagctggaagaggtggagccgcacggtcacaatacatgcagacacagagcagcaatacgaaacagaacagctcagagcggtcagctcctcagcagaagctgcgtgggccgccactccccctttctgcaatcaccccatgatgtctccaccccacctcacatccagatggggctggatggcagagcagatgaagcctgctctgtggcggggcagcctaactgaaatgcacacctttatgggggaagtggacggacacctcacctccctcatgtttcacaccgtggactgcacttgagtcccagctcttcaccacatccctaggagtcttaagaggaaatcagtctgatttg

SEQ ID NO: 5052 - DNA, 202 bp, Homo sapiens
tcggaaagtgtttcctggacagatttccacccgacagcttcgtgcacatgtgtcaggacctgcgtgtgctcaatgctgttcgggactatcacatcgggatcccgctcacctatagccaatataagcagctcaccatccaggtgctgctggacaggctcgtgttgcggagactttaccccctggccatccagatatgcgagta

SEQ ID NO: 5053 - DNA, 394 bp, Homo sapiens
  misc_feature (1)...(394): n = a,t,c or g
cacatattaacaacaaatctctatcagtataacccaaaggaagctaaacaccacctcacacttgacaatgtttcctgtataattcaaacattacaaataagcctaatataagcctaatatgtcactcttgaacttcaggaagcctaatatccaaaaagttagtttaaggtcaaaagtttttgaattaacttttttccattagtatggtcatatctttcttactaatttgtaagttatgtaatttatcaatttttttttgttgttctgtttcccaacctctatgtcagataaagaatcacccaggccagacacaannnnnnnnnnnnnnnnnnnnnnnnnnnnnnnnnnnnnnnnnnnnnnnnnnnnnnnnagccaggagtctgagcccagcctg

SEQ ID NO: 5054 - DNA, 615 bp, Homo sapiens
  misc_feature (1)...(615): n = a,t,c or g
gcggctccttccagagcagggctaactcctacgcagtgtgcccagagtcagcctgttttttttcaatatcttcacgtcatccaatcttcttttcctttaaaaacctacttgtgnnnnnnnnnnnnnnnnnnnnnnnnnnnnnnnnnnnnnnnnnnnnnnnnnnnnnnnnnnnnnnnnnnnnnnnnnnnnnnnnnnnnnnnnnnnnnnnnnnnnnnnnnnnnnnnnttcaaaaacaaaacaaaacaaacaaaaaaacccctacttataactgctgctaatcagagtgtattttcacggcaacttgaatctttgctcctaaaggctgtcctcaaaacctgaccaaatatactttacttaatgttaagtttgcctcagttttttcctttaggtcaacaataggtatgacccaagaaccctagaacttggtcataaagcttctggtgcccttgtcacttccctcctctattatttctgtggccctcatctcctttcccactgggattcccaggaaaaactttacaaatagagcagtgacagatgagttccccaagggcttgctttgaggtagaaaggaagagtggtttgaaattcccttaccttgtcattatcataaga

SEQ ID NO: 5055 - DNA, 451 bp, Homo sapiens
  misc_feature (1)...(451): n = a,t,c or g
tttnnnnntcttgaaatcnngaatgccctnnnnnnnnnnnnnnnnnnnnnnnnnnnnnnnnnnnnnnnnnnnnnnnnnnnnnnnnnggcacgagagcaannnnnnnnnnnnnnnnnnnnnnnnnnnnnnnnnnnnnnnnnnnnnnnnnnnnnnnnnnnnnnnnnnnnnnnnnnnnnnnnnnnntttaatggttcaatcctccaagactgcctcccacttccgatgccaatcacaagcttcaggttgtgacctgtacttttgaccaacccactgtaaatcggggtctctatgcctacctcttcaggtttgattaatttgcttagagcagatcactgaacccagggaaacactttacttatattttccagtttattaataaaggatacaataaagtatacagatgaacagccagatgggaagagatgcatatggaaaggccagcagaagtcca

SEQ ID NO: 5056 - DNA, 142 bp, Homo sapiens
ccagcctgacgtggtattttctttacggaccaggtagactttaaaacgagggtaagagaaaagccagtgtctttctgaggtaaataatttctgccaggaaacttcccagccccaccagcagcccccctaaaaaaatcactcg

SEQ ID NO: 5057 - DNA, 59 bp, Homo sapiens
caatttttgcttttgttgcaattgcttttggcatcttcatcatgaaatctctgcctgta

SEQ ID NO: 5058 - DNA, 860 bp, Homo sapiens
  misc_feature (1)...(860): n = a,t,c or g
ttttttttttaactaggctggaattactagattttatttttccccagaaccccttaaacttcaccttcaccaagtaacaggctgacttttggaataacaactctttcccaggctgttgttaactctttccaagagacagaatttattaaaaaacatggttccaggatatttccaccccagaattctaaatcagtcacagaatcataccttcttaggtcttgattagaatgaaacaatctatagacacacgtaacagaatcaaaatattatgtaatgttttttgccttctcttgctcaatacacttccctcttttcccccaaagagtttgttactcaaagatagatagatatgtaagtaagtannnnnnnnnnnnnnnnnnnnnnnnnnnnnnnnnnnnnnnnnnnnnnnnnnnnnnnnnnnnnnnnnnnnnaaaaagaaaaattccacaaagttccaaaaaagcaaaacttgaatttactgaacaccaagcactatgttgaatccatgcaaatgaagtgatgtgtaggtnnnnnnnnnnnnnnnnnnnnnnnnnnnnnnnnnnnnnnnnnnnnnnnnnnnnnnnnnnnnnnnnnnnnnnnnnnnnncatataacccattctctataatgggacttgagcacccatggattctgatatcaagttgggttcctggaacccaatcccccatggataccaagggatgactgtattgcccttttcaagaaagcatctatcagctctcattcgtgactcactcagaataaggaattccttattcaaaaaacaatgtaagtattccgagctaactgttctcagccatgaacaaattaaacttggccaggtgtggtgctcatgcctgt

SEQ ID NO: 5059 - DNA, 2219 bp, Homo sapiens
gtcgcgtgtctaggtgagtcgcggtgggtcctcgcttgcagttcagcgaccacgtttgtttcgacgccggaccgcgtaagagacgatgatgttgggcacggaaggtggagagggattcgtggtgaaggtccggggcttgccctggtcttgctcggccgatgaagtgcagaggtttttttctgactgcaaaattcaaaatggggctcaaggtattcgtttcatctacaccagagaaggcagaccaagtggcgaggcttttgttgaacttgaatcagaagatgaagtcaaattggccctgaaaaaagacagagaaactatgggacacagatatgttgaagtattcaagtcaaacaacgttgaaatggattgggtgttgaagcatactggtccaaatagtcctgacacggccaatgatggctttgtacggcttagaggacttccctttggatgtagcaaggaagaaattgttcagttcttctcagggttggaaatcgtgccaaatgggataacattgccggtggacttccaggggaggagtacgggggaggccttcgtgcagtttgcttcacaggaaatagctgaaaaggctctaaagaaacacaaggaaagaatagggcacaggtatattgaaatctttaagagcagtagagctgaagttagaactcattatgatccaccacgaaagcttatggccatgcagcggccaggtccttatgacagacctggggctggtagagggtataacagcattggcagaggagctggctttgagaggatgaggcgtggtgcttatggtggaggctatggaggctatgatgattacaatggctataatgatggctatggatttgggtcagatagatttggaagagacctcaattactgtttttcaggaatgtctgatcacagatacggggatggtggctctactttccagagcacaacaggacactgtgtacacatgcggggattaccttacagagctactgagaatgacatttataattttttttcaccgctcaaccctgtgagagtacacattgaaattggtcctgcatggcagagtaactggtgaagcagatgtcgagttcgcaactcatgaagatgctgtggcagctatgtcaaaagacaaagcaaatatgcaacacagatatgtagaactcttcttgaattctacagcaggagcaagcggtggtgcttacgaacacagatatgtagaactcttcttgaattctacagcaggagcaagcggtggtgcttatggtagccaaatgatgggaggcatgggcttgtcaaaccagtccagctacgggggcccagccagccagcagctgagtgggggttacggaggcggctacggtggccagagcagcatgagtggatacgaccaagttttacaggaaaactccagtgattttcaatcaaacattgcataggtaaccaaggagcagtgaacagcagctactacagtagtggaagcccgtgcatctatgggcgtgaacggaatgggagggttgtctagcatgtccagtatgagtggtggatggggaatgtaattgatcgatcctgatcactgactcttggtcaacctttttttttttttttttttctttaagaaaacttcagtttaacagtttctgcaatacaagcttgtgatttatgcttactctaagtggaaatcaggattgttatgaagacttaaggcccagtatttttgaatacaatactcatctaggatgtaacagtgaagctgagtaaactataactgttaaacttaagttccagcttttctcaagttagttataggatgtacttaagcagtaagcgtatttaggtaaaagcagttgaattatgttaaatggttgccctttgccacgttaaattgaacactgttttggatgcatgttgaaagacatgcttttattttttttgtaaaacaatataggagctgtgtctactattaaaagtgaaaccattttggcatgtttgttaattctagtttcatttaataacctgtaagggcacgtaagtttaagctttttttttttttaagttaatgggaaaaatttgagacgcaataccaatacttaggattttggtcttggtgtttgtatgaaattctgaggccttgatttaaatctttcattgtattgtgatttccttttaggtatattgcgctaagtgaaacttgtcaaataaatcctccttttaaaaactgc

SEQ ID NO: 5060 - DNA, 824 bp, Homo sapiens
aaaattaagtttgacatggaaaaaatgcactcggctgttgggcaaggtgtgccacgtcatcaccgaggtgaaatctggaaatttctagctgagcaattccaccttaaacaccagtttcccagcaaacagcagccaaaggatgtgccatacaaagaactcttaaagcagctgacttcccagcagcatgcgattcttattgaccttgggcgaacctttcctacacacccatacttctctgcccagcttggagcaggacagctatcgctttacaacattttgaaggcctactcacttctagaccaggaagtgggatattgccaaggtctcagctttgtagcagggcattttgcttcttcatatgagtgaggaagaggcgtttaaaatgctcaagtttctgatgttttgacatggggctgcggaaacagtatcggccagacatgattattttacagatccagatgtaccagctctcgaggttgcttcatgattaccacagagacctctacaatcacctggaggagcacgagatcggccccagcctctacgctgccccctggttcctcaccatgtttgcctcacagttcccgctgggattcgtagccagagtctttgatatgatttttcttcagggaacagaggtcatatttaaagtggctttaagtctgttgggaagccataagcccttgattctgcagcatgaaaacctagaaaccatagttgactttataaaaaggcacgctacccaaccttggcttgggtacagatggaaaagaccatccaatcaggtatttgaaatggacatcgctaaacagttacaagcttat

SEQ ID NO: 5061 - DNA, 1224 bp, Homo sapiens
taacaataaaatagctctttgtttattcactttgatttggatcattggaaatattaaacaataaataaaacagagcgggggctgaggaaagcaggatcttgctgaagtcattcgaatgcatcccaaccagtgctcagctgcgtaacgacatggagagaggcaggggggaatagaaagcaaatttaaaaacaccaacacccaaacacacaagactgcacacaagaaaaagtgctcaagaaactttggctttgaagggaattcagtgaagggaagcgattgtgcaggaggaagggaagaaacccacgatcaccctaaggggcggggggctggaggggcgaggccctgagacaggctagggttaaagctgacgtcccacagctcaggacgtacaaccgatggcagttttgtactaggaagaagctgagtgatgaggctgggtgatgggatcgcttgacgggctgggagggaggacaggaggtgtaaaaggtggctcaccttcccctaggaaattcagtgctcttttggtaagaaaaaatagtcggtaatgccctgatcctgacaagctgtgagatgctgtcttgcctgtctctgccttttcttctaagttttcctccttttctttgcacaggtgtcaggtcacaccccaggggtgcaggagctggtgttttcatgacaaacaaaaatggggaggttgactctatctcaaaactagctagcccagtccacagggcaggataatcctgatggcgtgtagccacatttgctgcaaaccagatgtctgcgatggatataatgatacccccggggctccttcctcaggggtgaggacaggtgctggttcctgatggtgcatggctggtgtccagtcatctttaagcctgggcagtggcccctcgaggctcgggcttccctgcacaaggtatttttgatccttgccagcggagggagagagagttatcttggtttcctttcacttgttttcgggctgcttcaaagcaaacatcccagttccaaatgttctttgtggtttgaatcctggcagaggccagggtcacatccaagtgggactggcctctagcaccaccttctggccacagcagagaatgggattccatcaaagcctctcaaccagccgtttccctaaagaatcacccagatcttaactgccctctccaccttctttttttttttccctcctattttacattctattttctcatatcc

SEQ ID NO: 5062 - DNA, 164 bp, Homo sapiens
ctccatgcccagctctttttacagtggctgatcaggtctttactgcggatctggaaagaagctgatagaagatgggtgccagaggggcctgggtagagatgttagctgagagatacccagtatggattctgtcagttttctggagctacgaagtgaagagtgtc

SEQ ID NO: 5063 - DNA, 459 bp, Homo sapiens
ttcggaacaggggggatggggcgcaggccgagctactcaggagagagggtctgtcgcttttaaaacgcattaaaggctctctcctggccttatttaacttgcctaagctaggtggagcacggctgagctcaggtaagctagcagctttccagcagaaggtgttctcccgaagaacgcagacctggggaagggttgactttttgggggcccctgctgagaacagttcaagagctccctaactgtagaggctgctggaggggcgaggggcagaaccccgggctgaatcatctcccgctttcccgggactttgctttcactttcctcagtcttgtggacagagtcaagtagattttcaaaagtgctccagaaaggccggaatagtcatgtagtggatgaaaagggcagtcacaaaactgcttaaagaccagctgtcttgccagtaattgcagtgctttaaga

SEQ ID NO: 5064 - DNA, 1452 bp, Homo sapiens
gcggccgcacagcgctgggcatcaatccagcagggctcccgactcactccctggagaccagctccccaaccacccggccctgatggcatcccgctgcggccaggtgtcctctcagccgaggtccttgtcactgcctagctgcgtccgcctgccacaccagctcacccgagatgtaggtggcctggacgtgaagggagtcgtcgagcaccacgaagtctgcgtcagcaccaaagtccagggtccccttactcttctccagccccagcaactgggcggggtgcagggatgcagcctccagggccgactccatgctgcagcctgtggcctgcaggaagtgccggacacagacgtccattggggctatgctgccactcagcgtcttggtgcctgccacgtaggccgtcagaccgtccacttccacttcctgctgtcccagcgtgtgccggccgttgcccaggcccaaggcagggatggcatcggtgaccagcaccagcccctggggatgggcacggtgggcgatccgcagggcggcggggttggtgtgcgtgccatctcaattcatccccttagaagattcagcggcctgcgggcagccggtcgctggtcaggagccccacgatgcctgggtcgcggtggtggaaaggcagcatggcgttgaagaggtgggtgatgaaggtggctccgctccacacagcatcctctgccgcccgcaggtcagccactgagtgccctagggacacgcagatgctacggccgtcagcgcccggatcacttcgtggctacggcccaactctggggccagcgtcacgatgcggacattgtccaggggcccgtaggtggccagcaagtcctggaaggcatcggcctcgaaggagcggaggtgggcctcggggtgcgcgccccgcttctcccggctgatgaaggggccctccaggtgcagcccgaggacccctgccccatggggaccaccactcttcacagggatctgaggaacaacctcaccttgtgataaacctccggtggggaagtgaccagggtggggcagaaggaggtgacgccgtgcgacaggatcctccgggccacgagggcaacccccgaacccacgtcctccgtggcttgagagaagtcaacaccaaatccaccgttgatctgcacgtcgatgaatccgggagccaagatgcggcccccgcagtcccgccgctcgtcggccacgcgccgctcctcaaagaacagcttctctgggtccaagatgcggcctccgcgcacccacagatcctccctgagcagtttccctccgcgcaggatccggcagttagtgaactggagcacggggcccccgccggccctgtcgccgcgcatcgtgagccgtgtcgggagcgagcggctccggagccccgcggcggccaaatcccgcgcccagtgacgaaccccagccgagagcggagccgcgcc

SEQ ID NO: 5065 - DNA, 258 bp, Homo sapiens
  misc_feature (1)...(258): n = a,t,c or g
gaggtgctcaagtgccagcagggcgtatccagtctggcctttgccctggccttcttgcagcgcatggacatgaagccgctggtggtcctgggggctgccggccctaacggctccctcgggctgtctttccttctgggaggccaaggcgcanctggccaagagctgcaaggtgctggtagacgcgcttcgacacaacgccgccgctgctgtgccattttttggcggcgggtctgtgctacgcgctgccgagncggttcc

SEQ ID NO: 5066 - DNA, 189 bp, Homo sapiens
aaacaggtacctgtggatgtggtcgagatgaaaggcaagttgtattttagtcactttgaggcgaatggggcctacgtgctgttttactcttggctttaacacttccatgcgaggggttgtctgagcagctgagtcaggactgtgagccctcaccatgaatagtcatctccaggtcacagaacgtgttta

SEQ ID NO: 5067 - DNA, 539 bp, Homo sapiens
tcgcatgcctgcccgcccgccagcctgccgggtacggccttttccgccggggcttccaggtcaaagaattcgcctttgccgctaccgctttcttaccctccgcacccgttaagttctccggtcgggcggcagtctctgaacacttagccgcgccatccggggtcacaccgcctggaaggaggtgacgggggcggcgcggggcgcggacactccccgctgagagtccgcctgccatggactcggaatattacagcggcgaccagtcagatgatggtggtgctaccccagtacaggatgaacgggattcagggtcagacggtgaggatgatgtaaatgagcaacactccggattcagacactggaagtgtaggaacgttcatttcagagaatgaaactagtgatcgagaagatggcctccccaaaggacatcatgtgacagactctgagaacgatgagcccttaaatcttaatgctagtgactctgaaagtgaggagcttcacaggcaaaaggacagcgactctgaatctgaggaacgtgc

SEQ ID NO: 5068 - DNA, 338 bp, Homo sapiens
  misc_feature (1)...(338): n = a,t,c or g
tgccgcattctgtccctggtctcatgtctcctgggataattccaccaacaggtctgacagcagccgctgcagcagctgctctgctaaccaatgcagctattgctgaagcaatgaaggtgaaaaaaatcaaattagaagccatgagcaactatcatgccagtaataaccaacatggagcagactctgaaaacggggacatgaattcaagtgtcggactgggaacttccttttatgatgatgccccaccctnttaattcctgttcagccttaccttccaggcattctgttcaccatgggcantgaggccaggatggaaccaccttcaggcaccatttggc

SEQ ID NO: 5069 - DNA, 1264 bp, Homo sapiens
cgagattccgggattggaatcaaaatgctaatttaaaaggtcaagtgaagctgctcctcacgttttggcgtgcctgcgctctctgcaggcagaagcgaacaaagacccagcaagagaaggcagaggctaagacccatcccgtatctgctctcctgaaataattctggagtcatgcctgaaatgccagaggacatggagcaggaggaagttaacatccctaataggagggttctggttactggtgccactgggcttcttggcagagctgtacacaaagaatttcagcagaataattggcatgcagttggctgtggtttcagaagagcaagaccaaaatttgaacaggttaatctgttgggattctaatgcagttcatcacatcattcatgattttcagccccatgttatagtacattgtgcagcagagagaagaccagatgttgtaggaaaatcagccagatgctgcctcttcaacttaatgtgggatgcttctggggaatttagcaaagggaaggcagctgcctgtttgggagcatttctcatctacattagctcagattatgtatttgatggaacaaatccaccttacagagaggaagacataccagctcccctaaatttgtatggcaaaacaaaattagatggagaaaaggctgtcctggagaacaatctaggagctgctgttttgaggattcctattctgtatggggaagttgaaaagctcgaagaaagtgctgtgactgttatgtttgataaagtgcagttcagcaacaaagtcagcaaacatggatcactggcagcagaggttccccacacatgtcaaagatgtggccactgtgtgccggcagctagcagagaagagaatgctggatccatcaattaagggaacctttcactggtctggcaatgaacagatgactaagtatgaaatggcatgtgcaattgcagatgccttcaacctccccagcagtcacttaagacctattactgacagccctgtcctaggagcacaacgtccgagaaatgctcagcttgactgctccaaattggagaccttgggcattggccaacgaacaccatttcgaattggaatcaaagaatcactttggcctttcctcattgacaagagatggagacaaacggtctttcattagtttatttgtgttgggttcttttttttttttaaatgaaaagtatagtatgtggcactttttaaagaacaaaggaaatagttttgtatgagtactttaattgtgactcttag

SEQ ID NO: 5070 - DNA, 956 bp, Homo sapiens
ggagctggctggaatctctcagcctcacctgccagacaacaccccctccttcctcaccctgtctcctgcattctcctgaaaccttcatccacacaatgcctcccaacctcactggctactaccgctttgtctcgcagaagaacatggaggactacctgcaagccctaagcagcccccacagacatcagcttggctgtgcggaagatcgcgctgctgctgaagccggacaaggagatcgaacaccagggcaaccacatgacggtgaggacgctcagcaccttccgaaactacactgtgcagtttgatgtgggagtggagtttgaggaggacctcaggagcgtggacggacgaaaatgccagaccatagttaacctggggaggaggagcacctggtgtgtgtgcagaaagggggaggtccccaaccggggcttgggagacactggctggagggagagatgctgtatctggaactgactgcaagggatgcagttgcgagcaggtcttcaggaaggtcagatagccggagaggagccaagatccctccagacagcaccagctcacagacgctcttgttgtgcccccttcaagcccagattgtgccaggtcagctgtcccttcctctggccacctttcctccctctgggtccctcctcacccctccccgtgttaatctgtaacttgcagcccccaggccaaagtcctttctcacactccactgcccaatagtgacctcacttccaggtcaaggtctggcgtcccaaatgaaagaagcaggcaaagggaaggagcccctgagaacaaccaatctccgctctctcctgtccatttgacctcttcttttccttctaagaaagaactaagctttgggcatttggcgattagtgaaaattctatcctgatggacttctggaaaactgtgactggggttcaagagtttaaacaggggctactggcag

SEQ ID NO: 5071 - DNA, 683 bp, Homo sapiens
gatcccaatcagcatgtctctgctctatttgacaattgctcggcagttgggagtcccactggagcctgtcaacttcccaagtcacttcttattaaggtggtgccaaggcgcagaaggggcgaccctgggacatctttgactacatctacatagatgcttttgggaaaggcaagcagctgacagtgaaagaatgcgagtacttgatcggccagcacgtgactgcagcactgtatggggtggtcaatgtcaagaaggtgttacagagaatggtgggaaacctgttaagcctggggaagcgggaaggcatcgaccagtcataccagctcctgagagactcgctggatctctatctggcaatgtacccggaccaggtgcagcttctcctcctccaagccaggctttacttccacctgggaatctggccagagaagtctttctgtcttgttttgaaggtgcttgacatcctccagcacatccaaaccctagacccggggcagcacggggcggtggggctacctgggtgcagcacactctagagcacattgagcgcaaaaaggaggaggtgggcgtagaggtgaagctgcgctccgatgagaagcacagagatgtctgctactccattcgggcttcattatggaaggcataagaggtatgggcttattaactgtgttgattctacggtt

SEQ ID NO: 5072 - DNA, 444 bp, Homo sapiens
tacaggatggagatctagtttcaggcctttatgaaagcatttatctcctgtatgacataggttctctgatcctgtttctttaacataattggatagtgaaaatatattctacttgatagtctcaaatgaagaacatctgtatataaggagtatatgaaataccatgactgttgatcatgctgagaggcctttagcataggggagtgtgtaacataccatgactattgataacgctaagaggcatttagcataggtgatttttttgactcattctacctaccacctacaaatcgtaaccaacctgtggaagccagcgtcccatcttatccttatgtagtagggggagtaataaatgttttcaacctattatttatgtaagtaagcccccttaggagcagctattatttgggtaacacagaggaattagataggggaagcacaaga

SEQ ID NO: 5073 - DNA, 557 bp, Homo sapiens
  misc_feature (1)...(557): n = a,t,c or g
ttcaaggctagaaagaaaaagaggcaaaagcaacaaggacataactcacaaaaaacttctaaatgaagagcggaagacaaaggagtatggggagttagagaagacagaaatattaccctctcaacatactgcaactcaggaatgacctcagtcaacctgcacagatggaagagtcagctgtgacaggtggagggagatgaccctggaagggcaaaggtctgagacactggcctcccctcttcccaggactcacttaaggataagtatcagtaatctgacggcctccactgccacatcatactctctgtccatgaccatgggaaaccatccggtcctgcagaaaggagaaagtcactcaatattcttcatttacaccctttccaaacatttctgtttctctttaggattcagaggacttcttaaaggngagttncctaccgtggagggcaggatgcnttggggttangcccaggacntttttaggaggctttnaggggggttnggaaggtttaccaggttngggggnatttgggggaccccccggnccaaggggcctt

SEQ ID NO: 5074 - DNA, 932 bp, Homo sapiens
caaaatcatacaattcagtcaattttatttttagcatactgttaaatatcacatcacaataaaaatcaaattggcattaaaagtatagaagatataggaagttctatacccttccactgtacttctcaaagttggttattagaccaggaaaacttaatgtaatattatttttaaaatcatcttaaaggatccaagtccatgtaactctttagaacaagaggaataggtcagatagaagaagctgtgtaatgtattaatacatccgttcatgtgctgtccacatgaatgtgttgactgtgctctccatgttcaggtatttgtaagcagtgttgacttttatcccctcttcagtaatctttaagtccccaaaacattataactttttctttttttgttgagacggagtctcactcttgtcactccaacctaggtaacagagagacacctctgtctctgaaaaaacaaaacttgaagtttgaaacccccagcttgctgaggagccctttttatttttggtactgagagtctcaaggtcccatagctacatggtacagggctgttgtctgcttgctgcacagcaggaaattacaccatccacaggaaatggactatttttgcagtccaacatcagccaaccacacacagccgtgtttggaagctgaagagtaaagaaatttctaggaatggctgttgttctgttttttagcacagccatttagatataacatccttcacttaaaaattaaaaacatcagtactaccaccaccaccaacaacatcaacacagatcttcacatctgcccattctgtggttagtcaatggcttgcaataaatgtgcaaactgcatctataggaaacatttttgtgattacggaatactttagttgattgctgaaaatattgaaaggtcttcattttacagtgatgagta

SEQ ID NO: 5075 - DNA, 381 bp, Homo sapiens
tctgtctccaaaaaaaaggaggtatatatacatgtgcttgtgcctgcaggtatgtgtttgtgtgttctaggttttgaccacgaaaaaagaactgatttacttgtggcattttaatacatgccaaaacagtacaagatacctgagaaactctgcaacctgtgctcttcttcttcataaataactgagtccacataatggtgatactgggatctgagagaattggacttaggccttatgctgcaagtactgctcatcactactaagagacccccttttaatgcggaggtgccatttttataatgcattccagaaagtaatcaattgatgcgtgactaggaaaatttagaggagtttttaatcacatgacttcacctgacgaga

SEQ ID NO: 5076 - DNA, 1350 bp, Homo sapiens
gtagactgttgggtaggctgcgtgctagcttcggcgcggatccctgggcgtccgtacgtcggagtccttcgtcctccagggtccctgttctttgcgccagcgggaaccactatctctgcactcctggggttttgttacatggctgctttcctcaaaatgagtgttagtgtcaatttcttcagacctttcaccaggtttttggtgccatttacccttcataggaagagaaataacttaacaattttgcagagatacatgtcttccaaaataccagctgttacttatcctaaaaatgagagtacacccccttctgaagagctagagttggataagtggaaaactaccatgaaatctagtgtgcaagaagaatgtgtttcaacaatctcaagcagtaaggatgaagatcctctagctgccaccagagagttcattgagatgtggagattgcttggcagagaagtaccagaacacatcactgaagaagagctcaaaacccttatggaatgtgtttctaacacagcaaaaaaaaaatatttaaaatatttatatacgaaggaaaaagtgaaaaaagctaggcaaataaaaaaggaaatgaaagcagcagcaagggaagaagcaaaaaatatcaagctgctagaaaccactgaggaagataaacagaaaaactttctatttttacgactttgggataggaatatggacatagcaatgggctggaagggtgcccaggccatgcagtttggacaacctttggtttttgacatggcttacgaaaattatatgaaacgaaaagaattgcagaatactgtttcccagcttttagaaagtgaaggatggaacagaagaaatgttgatcctttccatatttatttctgcaatctaaaaatagatggtgctttgcacagagagttagttaaacggtatcaagaaaaatgggacaaattgcttttaacatcaacagaaaagtctcatgtagatttatttccaaaggacagtattatctatttaactgcagattctcccaatgttatgactactttcaggcatgacaaagtttatgtaattgggtcttttgttgataagagtatgcagccaggcacatccctagccaaggcaaaacggctgaacctggcaactgaatgccttccattagataaatatttacaatggggaaattggtaacaaaaatctcaccttagatccaaatggatacgtattttgttatgtctgaaaaacaatggtaattgggcaagagggctctgcaattcggttcccaagagaaaaacatactgggttttctgggagatttctcagcattctcaagagtttatcaacaggactaaaggaagt

SEQ ID NO: 5077 - DNA, 464 bp, Homo sapiens
  misc_feature (1)...(464): n = a,t,c or g
gnnngnnnnnttgnnnttttnnnactgatactcgtnnnnnnnnnnnnnnnnnnnnnnnnnnnnnnnnnnnnnnnnnnnnnnnnnnnnnnnnnnnnnnnnnggcacgaggggcagaggtcatgcccctctgtgtgttcttctgcaggtacctcagtgtgaagtctctcccagaagccatgagaatggaggaggaggaagaaggagaggaggaggaggaggaagaggggggaggtgactccctggaagttgatggggtggctgcaactccagggaaagcagaggccaccagggtcctcccaaggcagtgcccggtgcaggctgagaaaagtcatggggctcccctggagtaagtcactgagcctttcctgcagaatgtttggttccaccctaaaaccacagggatgatcactgtcagagtgaataagacagcgcttcacagtttanacatggcttacctgtcctgc

SEQ ID NO: 5078 - DNA, 626 bp, Homo sapiens
ttttttttttttcagtgtttaaattgaaaggaaacttttattgagtcatgttttcaaagcaatctagttttaaaaaaagttgaagacaagacagaaaaaagaacatgacacctaagagaatcagacaggacagacagacgggagcaggggggcggggacagcggctccgtggaggtcagatcttctccatcttggagatgaggtcgtcgcagatcctggtcagctcctcgttctctttagtcttctgctccactgtcttctccagcgactggatgcgcatctgctccttcctcaggctggcctggagggccaacgcttccgcctgggccttgctccggacctgggcgatctcctcgtttgccagctgcagcttctcctccgcgtgggccttcagggcttggtacctctgggccctcctgggtgatccttgccaggtaatcctccacgcacttcttcagtgactcttcgttcttgcggtagccctcgatcacctctttctgtttctcaaaacgcttgaagaggtcggagaaggacttctccatggagttcagatctgtggtaagttggtctttttcttttagaactttctggatttcagctttggaaagttccttctgcttctgaac

SEQ ID NO: 5079 - DNA, 693 bp, Homo sapiens
ggtatttgaaccagagcgactccattttgagtgagggctgggaaaatgaggctgagacttactggcctgcattctcagaaagttaggcattcctaccctctaggattgaattgggaccccctttcctgtaacattatttctggtgacccacagaagggactatagtgcagaaacgttgacccaacggctacctttgcgtaaagtgttggggtcctgtaacatatttctggcaaaccacagaaaggatgatactgaagaaatccccccaaccccaaagaaatagactgcagcactgattggacgactttgggtaagtgatggggtacccgagtaacaaatgggattgggttagaggcccaacttaggggagttggagtttctcctaagacagagtgagttagaggcccctcttaataaaaggcaaggacacttgactgacctcaggttaaaggcccaacttaggagggttagggtcccttttaagatttagggggttagaggcccctctcagtaaagtccctattggtaaagtccctttcgcctaagaacaggtttggcaatatgggatgctaactgctattctctttggattaacctgccgtgtactatttgctgacggcatggggtgacaaggttaggcatgcacaggagtgtgggacatggggaactttttcctccccaaaaaggggaaac

SEQ ID NO: 5080 - DNA, 609 bp, Homo sapiens
  misc_feature (1)...(609): n = a,t,c or g
tcatataaatggtctttcataaaacatagtgtatctatgcagtttatataaactacatgatttattatttgagtctatgtattctgacctcagaactatctctgggctacagtattaccaaagtgggatgcctttaaaatgcagtcaaacttcatttgtatgaagtagaaaagaacttgggaaacctttaaaaatatatattgtgatttatgctttaagaaaatgcatacttttttctaatgaagagtagttcataatatataagggttttaaggccctgaaataacattagtgcttactcattgctctctcatcttgcctccagtcagatgttattggtatagtgaaaagaagaccagattttgaactagatctggattctctttttagtaactcagggcatgttatttaaccttctctgtgccttaggtttttaaggtacaatcagtgtaccctttcaaaccttcacaagatggaaactcaggaaggaggttatggggnttggggaggccntttgcgtgggccttatattatggccacggccatgtttnactgttggaggttccgttttgttccgttgttttnccggtacagggcgttccagtttac

SEQ ID NO: 5081 - DNA, 962 bp, Homo sapiens
gcttgaggttgggggttgcgtcgctctctggtaaaggcgtgcaggtgttggccgcggctcgtgagctgggatgagccgtgctcccggtggaagcaagggagcccagccggagccatggccagtacagtggtagcagttggactgaccattgctgctgcaggatttgcaggccgttacgttttgcaagccatgaagcatatggagcctcaagtaaaacaagtttttcaaagcctaccaaaatctgccttcagtggtggctattatagaggtgggtttgaacccaaaatgacaaaacgggaagcagcattaatactaggtgtaagccctactgccaataaagggaaaataagagatgctcatcgacgaattatgcttttaaatcatcctgacaaaggaggatctccttatatagcagccaaaatcaatgaagctaaagatttactagaaggtcaagctaaaaaatgaagtaaatgtatgatgaattttaagttcgtattagtttatgtatatgagtactaagtttttataataaaatgcctcagagctacaattttaaaaaatgatttagcacaagctaaatctcaaagccttggtataattttcttgtttaaatttggggattttaaatcagattatagtttagaatatttgcatattaattatgggcaagcacacaccttctgaatagaaatattgttcattactcatttagcagataatttgggacctatgtctacttttcaaggcaaagtgaagatgacagtccttgctctcagggagcccccactttaatgggagactgataaactggtaattagactgtgataaatagtatgatggaaattagcttaagctgtttaagtagggactcttcttattcggtggaaaggcttgttccaggtacaggcaactggcctggcaacttggatacttggaaccttgtatttaaaagtgaatttacc

SEQ ID NO: 5082 - DNA, 482 bp, Homo sapiens
ttttttttttttttttttagaagacatgaaaatttttattttcaaaaagaatgtatttttacataaatctacaacagaattcaaatgtagaaaaaataaactatattcagggatacagcgctcagcacagcacaccccctccccggagtgggccgtccccccagaacaagactgaaggggcctcgccggccccaggacccccacagcagggcagccacaggctggcacgcggagctccccgtgtctgtcacaacagactgcaaatgcgaggcgcccagaccctgagcgtcgaagacaaaaaccaacccattttcactgtggcaactcacttcttagtgcaggtcactcatccgtacacctcatcggaaacagaggggcaggggaaaccacaggatatacatctccagatgcctcagataatcccctcctcacccctgccactcgaggacctccaggagagcccacctgacaaaccccccgcc

SEQ ID NO: 5083 - DNA, 622 bp, Homo sapiens
gggggaggcgcgtcgcgaggcgagcgtcctccttttgtgcgagcgccggcggctcggcttctcgaaggagaagaaactgaggcctggaatttgattaactcattcaaggttacccagttggtaattcatttgcacacctgttagcaagaaacagaagttgaaggactggaacaagtgaactaggaaagagggaacgccaatccaaggatagaaggacaaggacagaatcaccagcactggctgaaggtaccttaacatggggaatcttcttaaagttttgacatgcacagaccttgagcaggggccaaattttttccttgattttgaaaatgccccagcctacagagtctgagaaggaaatttataatcaggtgaatgtagtattaaaagatgcagaaggcatcttgggaggacttgcagtcatacagaggagctgggccacgaaatacgagaggcaatccagcatccagcagatgagaaagttgcaaagaagaaggcatggggtgcagttgttccactaagtaggcaaattaaagaaattttacgaattttctcagaggttagaagcagcattaagaggtcttctgggagccttaacaagtaccccatattctcccacccc

SEQ ID NO: 5084 - DNA, 811 bp, Homo sapiens
ggcacgagggtcctctgcatggggtcaggtgcttctgtgcttgctgtcctacctctctccacagcagggctctcaaaaccattttgatcccccattggcagagggttcccctctttacagagttcagtcattaaaagcatggatcagctgttaatctcattggaggagggaactgtttcctgcattcattcatctgggaaccttcttgagtagccactgtctgccagccactgctctagagatgggaaaacagcacggaacaaaaccaaggtctttcttccagcgaatttatatccttcaggaagctggttcctgccaccaacttaggcagggcaacagttctcctcccctagtgggcacagggtaccagttttgtaggaaaagtggtccagcaaaggaagaaagcagaccaacccagctgccttaccttattctggggccattcccccagcgatgagagctgctcttgtttctactgccaccatctcttctggctgcacttcacctgctgcttgagcttctgaccttccttcagtttccaccaaatgaggacaggaaatagcagtcaagacccctgggccctgctgaggcgtgaaacagaagcaatggatgagtgctggacgaagaatggcctggggcaggaacaaatagggagcatttgaaagcttctggctgataaatctccagggtgcatcccggttgccacgcctgcccccattaacctgctcctggtaaatactgatccagcagctgctccagggagagggccgtcttttttttcccagccacgctggtgtttttgcattgagga

SEQ ID NO: 5085 - DNA, 873 bp, Homo sapiens
tttttttttactaccacaaacaattaggaattttttatcgttataggtgttgttaaaggactccagtagcaaagatcaaagtctccgaattttgcctttggagaagggggtttcatttcagacatcaaaggtaaggctctcaagtcaatttatgctctgctgggttgagtcagtcaggatacaaattaaggtccatatatttcagtgacaagaaggaaacggttatgtaaatacacaagtattaacatcaatctgtattaaattatgtaaacatatacatcttctgaggtcagcacatagatcctcttctttgagcagagctctactgaagcattgctcgaatctgtttggaagttgattcatcgttcaagtgctttgtagtgaacctgagggcatttagcagcccctccacactgtctggggcctgctccttcaaaacttttatgcagcctttcatatcgatcttggatgtcttgcagaaagctcccacagggtggaacatggtcatagaggatgatgactcccaccatcaccctcatgcagaacatcagggtctcttcactcgtaaacctacttctgtactccggagtttccagcatgactttacagacacttgtcattgtgctgaggcagtctgtggtgttctctattggcagagttttgttttcagagacaaagtgcattgtggcattgctaagggttttcagcattggcgtggcttctgcatagaagagggacattcgattggccatctcattattgacttcattctcaatgtctaggtgcatgttgttgatgcggttgcgactgattgtccttctgtagtagctgaagtcattcctaaataagccgggttcctcatcttcagctcat

SEQ ID NO: 5086 - DNA, 1108 bp, Homo sapiens
tttttttttttttttagaaaaatgaaagctgatttttattttatcatcaacagccattctttagacatgaacatgcatacgtaatattctacgcacacatcacagcttttaacgttagttaataaaggttaaacacacaacatacatccttacaaaaaaagtcaaaatgcaaacttaaaactttaaacaaaagtattactaatttaaaaaaagtttgtgttgggtaccatttgtacaacacagttaatttaaacattttcattttggttgcacatgaaaaaggcggcagtagaaaataaagtcattgagggtttttaaatagcagaataggcagttttgccatgcaggagaagcaatattaaatattagtttcaaaaaaaatcccacatttaaaaatatttagttcaagtcacagaatttttcctcagtagagaccccaatgcaatgcataattagctgccttagatggccccgtttgaaaaggatgaatatcccttcagagtgtaactttactgattttggcacagaaaagaagtcttaagaacatgattaaaaaagagggaagaggaacagaggaaagaaataaaagcaagaataaatgagatagtaattgcaatcactaaaaaactgcattctcagtcattgcagaatactgtcttctgtctacagcaggtgcttattccagaattgttattgcagcatggatttaatttgcttggaggtagtctcatcattcaaatgttttgttgtgtacctgagagcatttagaagaccttccacactattaggaggttggtccttaagaactttgatacaacctttcatatcaattttggaagttttagcaaatgctcccactggatgtacgtggtcatagagtattatgacacccaccattaccctcaagcagaatgacactgtctcttcatttgtaaatctgcttctgtattccggtgtttccagcatgactctgcatacactagccattgtgcttaaacaatctgtggtattttctattggtaaatttttattctctgatacaaattttgttgtggcatcactcaaggttttcagcattggagttgcctcagcataaaacaaagacatt

SEQ ID NO: 5087 - DNA, 1875 bp, Homo sapiens
gtacaaatattacagaagaaaatataatttcactttttaaaattggggtgggaaaatcccattgcatatttgaaataggcttttcatactaagcttcatagccaggagtccccagagtcttgttcctctgaaagccactggggagtggcctctggggtgctgattccacagaggtgtatgctgtagacaggagagtgccatctatgccaaaactcgccctcaaaaacaaacaaggcttgctgggaggcgtgctgggcttggccatcagtatttccagtgtggtaaactattgctggcacttccccctggaaataactaatgaggttacgagttgggcacctgcacagatgtccttctctcatagttcctaatgcttaggaatagaggagaaataaaaaaatggattctctcaaaacactgccatttgaatagcgacagaagtgctcccccagcccccaactttggacagcaaagttgaggagaatgagcagacacagttgtttgcttgatctgaatctctctaaagtaaagtatttccaaactgtgtgacaagagcctacctaccactgtagcggtcaaagctgaagcttcttacagcagtgaaacgaggcaccacctcccccacactcctcattccccgcttaaaacatggatactttcaaatttgactgtttcttaaactgccatcctaagatatggaaaatttttatagtaaagtgtctagttagcttatttccttttctaaaacaagtgttttcaagataactgtattttacctttatatgtactgaatagctgtttctttttgaattatttgccttttaaaatttgataatgtctctggatataacaggacaggagttcttaaaaaatatcttaagaaattcactttatgggtaaacccaaggtttttgccaacttgttgcctagaaaataagggctagtttcagtttatacaaatagaattattaaacattttacagtccttgattagaaaccagacccaatctccttataacaccacagcgtatcctgccattgacagtgtaatcacaattctccctttttcatttagctgcttttttattattactaaatgttttggattgagcatttttccctctgtaattttcttccttcacgtttattttattttaactcttgtagtattttattgttgttaatttacaagtttaaaaatattaggtactattaataatggttaaaaatagaaaaatgcatatttttgtatgataatcaaatgtaaaatacttttatttttgctggacagttgttatatcatgattattgtgctacagtttattgtgcataatatgaaaaacaactatgacagccttcagtcgggccagggtgaagctgcttataccacctctgccgtcagagggacatgtggtgacagcagtggtgtggctgcacagggcgcactagagagagctcagcacccctgctgcccgccagcagagcccgtgctgagggaatgccgcacagatgctgatgcactgggtgaaatttctagtattgaacgtaaaggtgtacagtgtcttgctgttattttatgatggaaactgattttgaaaccaaaaatagctaactaactttatttaaggaaaggatattaatttgtactaacagagggtgaaagctgttcacatttgtcaacaaaatctgcttgctgcagtagtaacctcaagtggttaaaacttgatttcccgagaaaactaaaacctttgtgcctaaaattgatgacttgagttcaagtgggatgagcaagaagatgtgttatcttgttgttcaacagtattgaatgtgaaggaaattttgatggcttaataaaattccacagcgactgttaaa

SEQ ID NO: 5088 - DNA, 880 bp, Homo sapiens
gattacttaagatcattcttaaatgattctacaaactttaaacttatttacagatatgcgtttgactttgcacgggccgaagatggtgttagtgattgcgagctgctggctggcacccttgcagagcaggagtaagtgagtgctgttcagctttccagtcctgaaaaggaccagcgcagcctaggacataaacactgccaagtgcatgttgggactgttattaggaaaaatctggcccctttttccagtttttcaccaattcttagagcaatcaaaatacaaagttattaataaagaccagtggtgcaatgtcctagagtttagcagaacaattaatcttgacctcagcaactatgatgaagatggagcatggccagttttgttggacgagtttgtggagtggtataaagacaaacagatgtcctaggactttatgcatagcagcgagagagtcactgttaccacagttttgtcacccattagccataaattgctgtttgtatcaaagcgcatgctgcttctcttgcactgtttccctttcgcagggacatgttggtgtttgctattgaattggccagctctgcttgctgtgtggcattgttctcttggaaggctgctttgcagtttgtatttacactacagattggtgaatttgccaacgtcctcactgtgattatgtgtatattgctgtttaaattttgtatatgtgtataaaaggaaaaaggttcacctagagattatttctgaaaaatgtattgtaaaaataattttgtggcatttctagtccctttatttgaatgaaccaattatactttatttggtctcctatgtagcatttcagagaacaagagagaactgttaccatgacacacattgccag

SEQ ID NO: 5089 - DNA, 411 bp, Homo sapiens
ggactcagcagtttactctttcatcaataatgcactcactctgaagtggcaggctggacactgtggcccagctctgcatgggtgtttatagtttatgccagtaaatgtttctgttgaatctgtcaggagctgcaggcctgatcccttttcaagttggtggtgagagcagtgagtcagcatatttgtaaacttcagaagagtacagaacactgataatttactgtggcactggtaatttcatgaatatggagtgggcccatatgttcatttttagctctgtaaatctcaagaactgttactgccttggtaagctgtatcagtggcattggcacccagataaagagaactttctgcctgtcttgaagtaaatgaggcatcaacccagacttgtgttaggctggcctttgctgg

SEQ ID NO: 5090 - DNA, 869 bp, Homo sapiens
  misc_feature (1)...(869): n = a,t,c or g
gggcggcgcccatgtaacccggtccgtgccgcaaagcgaacgggggccgcggcgcgggccccgcgggggttagaggtcaccatgctgagggtcgcgtggaggacgctgagtttgattcggacccgggcagttacccaggtcctagtacccgggctgccgggcggtgggagcgccaagtttcctttcaaccagtggggcctgcagcctcgaagtctcctcctccaggccgcgcgcggatatgtcgtccggaaaccagcccagtctaggctggatgatgacccacctccttctacgctgctcaaagactaccagaatgtccctggaattgagaaggttgatgatgtcgtgaaaagactcttgtctttggaaatggccaacaagaaggagatgctaaaaatcaagcaagaacagtttatgaagaagattgttgcaaacccagaggacaccagatccctggaggctcgaattattgccttgtctgtcaagatccgcagttatgaagaacacttggagaaacatcgaaaggacaaagcccacaaacgctatctgctaatgagcattgaccagaggaaaaagatgctcaaaaacctccgtaacaccaactatgatgtctttgagaagatatgctgggggctgggaattgagtacaccttcccccctctgtattaccgaagagcccaccgccgattcgtgaccaagaaggctctgtgcattcgggttttccaggagactcaaaagctgaagaagcgaagaagagccttaganatgtgcagcagcagcccaaaaacaagcaaagcggaggaacccagacagccctgccaaagccataccaaagacactcaaagacagccaataaattctgttcaatc

SEQ ID NO: 5091 - DNA, 391 bp, Homo sapiens
  misc_feature (1)...(391): n = a,t,c or g
gcatttaaatattttaataactttttcctgattacaaaagtaatgcatattccaggtaagacacttggaaaacagaacaacacagaaaaagccctcagtgtctatccatctggagacagtcactaacaatttggtataggccttctttgcacatgtacctgaaaacatctatatataattattttaataaaacttatacagtgaagagatgaaatatcctgcttttctcacttaacaaagtatatcatgactatttcccaaatcaacaaatcatcctcctacataagttttaatggctacatggtattctcttccccttattttggacatcnggattgtttcctcattggttggctattgaaatatccctggttacattccatcttaggca

SEQ ID NO: 5092 - DNA, 576 bp, Homo sapiens
tgactcacctccgccgtgctaactcctcgctagctctccctctcacacacgctcacacccggctcgagatggcggcggcggcggcggcggcgggggactcggactcctgggacgccgacgctttctccgtggaagacccagtgcggaaggtggggggcggcggcactgccggcggggaccctgggaaggcgaggacgaggacgaggacgtcaaggataactgggatgacgatgatgatgaaaaaaaagaggaagcagaagtaaaaccagaggtaaaaatttcagaaaagaaaaaaatagcagagaagataaaagagaaagaacggcaacagaagaaaaggcaagaagaaattaaaaagaggttagaagaacccgaagaacctaaagtgctaacaccagaagaacaatttagcagataaactgcggctaaagaaattacaggaagagtcagacctcgatttagcaaaggaaacttttggtgttaataatgcagtttatggcatagatgctattgaacccatcttcaagagatgactttacagagtttggcaagttactaacagataacttacacaat

SEQ ID NO: 5093 - DNA, 491 bp, Homo sapiens
aaagagcaggagtcactaaactttttgattgggcgcctactggatgatggctgtgtgcatgaagcaagtagagtatgccggtattttcatttttataatccagatgtcgccttggtattgcactgcagagcacttggcctcaggggaagctagtatggaggatctgcacccagagatccatgctctcctacaaagtgctgagctgcttgaggaagaagcacccgacattcccctaaggagagtccacagcacttcaagtctggatagtcagaagtttgtgacagtgccctccagttatgaagtggtaactaacctggaagtgctgacaagcaaatgcctccatgggaagaactactgtcgacaggtcctctgtctgtatgatcttgcccaaggagttgggctgttcctacacagatgttgctgctcaggatggtgaagccatgctccggaaaatcttggcctctcagcagcctgaccgatgcaaacgagcc

SEQ ID NO: 5094 - DNA, 756 bp, Homo sapiens
cgcgaaactcctgccttaaagccctaaatggcggcttcaatatcagccccactgagcatgagattcatttacttaaataaaatctgaatctcagcccaaacctgggagattcaaaacctgagagcggtcttaccaaagacgcccgtatgtctggtgaagtcagttggatgcaagcagtttgtgctggtaccagggccccagctactgatgaagtggcaggagtccacagaagcctacttcgaagttcccggggcttccaggggagattgacgagattcctggggaggcgattcatgacagctgagttccttttggaggatccgtcttcaggcagtctgatcccccaggaaagcagctggaaaacaagagcatgtgaaggaagcgcagagctcctcgccagccagacagccagccccgcaccgcaggagtcgacatgcacggcagcctagacgccatcagttaaacttatatgtaggcttgttgaggaaaacgactttcaaacacaaggcaaaagaaaaacatgaaaccaagggttccaacattcatcatccagtttcagagacacccttgaaggaatgctacagcctctttcttacccattcaaaccagtcgctctgctgcatacccacatcacaggaggccctcagccccgacacacaggctcactcagcccggggacatcagcacctgtgccagctccgcaaggtatccaccatgcggccagaactgaggcccagcaatagctgaaatgtcctt

SEQ ID NO: 5095 - DNA, 1016 bp, Homo sapiens
tttttttttttaagttcaaaagtacatttatttaaaatgtgggcaagatatcaatataaaagaaaacagagtataagaaataaaaataatcaaagtacaaaacatttcaaatctttaacatccataatttagagatagcaaggtctttatttacaccattttatttctagttgaagtcccgtaacagttttgtgaaaacatttaaaaacctggcaaatgaatcataaaacctaatgtgggctcttaaagtcatataatacaaaacataatttatgtttcctcagaataaaattgcacatcttaaaaagatgcagtatatttattatatctgtcttcctgcttcacagtctgatcccccaggaaagcagctggaaaacaagagcatgtgaaggaagcgcagcagctcctcgccagccagacagccagccccgcaccgcaggagtcgacatgcacggcagcctagacgccatcagttaaacttatatgattcatagtccagcgtttgagtgagcactccagtcagaacgaactctgcattgtgaacatctatgcctctggcaaaatattctcggcataaatgaaggtcattttcacaggatattaaaattatttccgacaaactcgagttctgcttgtgctccatgagcttccggaaagatggctgcttggataacacctttcctcctgcacactctacgattgccttcatagtggaaagacttgggcagattccaggtgtgatgtaaaaatattttgccttaaagagtggagaaacgtgtgcccgttttaaggattcttccaagctgaaagagaaaagtacttctgcctcagcatctcggagaatgtagttctgctcatcaatgaacttctgacacctgaagcattcttccagccactctggcgtcactatgtgcttcaccgacagaaatcgccgtcaggaacttcacggtgcgagtcactttgctggcaatgaggtgtgtgcacttctgtgcagactccgcaacctctccaccaag

SEQ ID NO: 5096 - DNA, 330 bp, Homo sapiens
tgtccagctatacaatatatcgcaaaatcctgacaagttcattgtattaaggtattaactattacatggaaagcaattctgttcatcttttgatgtttgtgttgaaaatgcttatctttgtgttttgatcttccaacagctgagagcttgaactgatttaaacatttgtcaatatacttaagaatgctttaagtaaagaaggggaaaattttaagtaagttttttcccttctaggaagaaaaactatgatgatgttaagaaaatgtcattatagagcttgctcaataatatgttctttaaatccacctccatttgtacattataggtatc

SEQ ID NO: 5097 - DNA, 515 bp, Homo sapiens
ttagagcatatttttaatacaaaatctgtctttgtgaatagagaatagggacgtattttttaaaattgctaccaatcccaaggagcaaggagcatcgatgctttgacttttctgcagggcaggtgacttggcctagctggttttgggtggtgagtgcagtgagtgggccatgacacagtacacgccatgttcacctgtttcccaaaatgtttaggtttttccccttcagtaaatgtgactgtctctccccgttctgaagaaagccatacaacgacggtttctggtggcaatgggagcgtgttccagggcgggcccgcagcttcaggcactggctaacttagaagccaggagggggtctataggtgctgctctctcatcccgggatgtcagtgggctgcctgtttatgctcagtcaggagagcctaggaggctgacccaggcacaggtggcagcgtttcctggagagaatgctttggaacactcttcagaccaggacacctgggacagcctgagga

SEQ ID NO: 5098 - DNA, 555 bp, Homo sapiens
tttttgagaaagcaaatcgtataccttattaaccaaaatagaatatatatatatattgcttatctgaaatgcttgaaaccagaattgttttgcattttttgaatatttgtatacacataatgagaccttggggatgggacccaagtctgaacgtggaattcacctgtgtttcgtgtatatgcctcatacacataattttgtgcatgaaacagagtttttgtataagaagatacactgcagctgaagagggctgggtttttttttctcttagggtcgctgcataaactgttgtatgcctggtgctttgcgacttgtcacacgaggtcacgtgtggaattttccacttctggcatcacgtcagtgctcagaaattttctgatctcagagcatttcaattagggatgctcaaacgcaactgtttctacttccccatttcaggtgtgagatgtaacccaccttgaccataaattggcttttcatagtgctcagatgtttcataattcttcccccaaaataatgaagtttgcagtttaacaactttttttttgagggggg

SEQ ID NO: 5099 - DNA, 362 bp, Homo sapiens
ttctggatttataaaagggagttttgctcacataattctaaaaacaaaaaaatccatttattaactcatttaaaataaaataattggcccattttgggtgatagttattcagcaaaatatttaacgtataaaattagagatgacccttcccctcttccccctttaagtatctgcttcaggtaaacatcaacttaataatgtaaaacatttcaaaaaaccatgtttgtgtgtgtgtgcataatacaggcctcctaaaagaaaagataaacagttgtggaaaagggaatttgtatgaaaataacatttggaggtctgtgaacctttgaactctttggtcttgctgctcttctgtaaaatggaag

SEQ ID NO: 5100 - DNA, 438 bp, Homo sapiens
  misc_feature (1)...(438): n = a,t,c or g
ctgggtgtaaggattcccactgtggctcttcacatgatggaactgtttgacacaactgtagagcagctgtatagcatcttcactgtaaaggagttaacaaataagaagatcatcatgaaatggagatgtgggaactggccagaaggtatgttactaattactgcccttcatattaaaggtcccaaaacactaaggctaggtttttcgtatggataaattttccttttcataatgcggtaataaggttcctattttttttcttagaacactatgccatggttgcactgaattttgtgcctactctagggcaaacagaattacaattgaagggagttcctatctatctatctgttaaagaagagaacatggaattctgttgggcagaagcagccttttgaagganttaaaaggtttcactggcagctgaccccccccctt

SEQ ID NO: 5101 - DNA, 770 bp, Homo sapiens
cttggactacaactcccggcagagctcgcggcagggggtgtgccgcaatcggcgaggagcgtgggtgactcaaaccaagtgacggaagtgagcgagggcgtgcctgtttgttgcaggcgcggtgtagcaattggaggacccaggaagaaggggcggacgtattcttgggtcaaccaatggcttgagctcaggagcaaccagggcacggggcgtgtcggggctgattctctggctgtgtggggcgcacggtcccgggatactggggacggcggggtgggagggcgccgtcctggggccgcggcggccgggcgggggagatggcggcgcgatggagcagcgaaaacgtggttgtagagttccgtgactcccaggcaactgcgatgtctgtggactgtcttgggcagcatgcagtgctttctggccgcagattcttatacatcgtcaatctagatgcccctttcagaaggtcaccgaaagatctctcgccagagcaaatgggacattggagctgtgcagtggaatcctcatgacagctttgcacactattttgcggcttcgagtaaccaacgagtagacctttacaagtggaaagacggcagtggggaagttggcacaacctttacaaggccacactcgtgtcatcagcgacttggacttgggcggtgtttgagcctgacctcctgggttaccagctctgtggacacctacatctacatttgggatatcaaagacacaaggaaaacctactgttgcactgtctgctgttgcgg

SEQ ID NO: 5102 - DNA, 525 bp, Homo sapiens
ctgaaggcatttacagtgggcctggatatgtgctgaaagccaaacttttaaattttttggtttttttaagcaaagaaatattttaaataaatcctatttcaacactgaaattgttgaaaaccgtctcataacaaaaggaaaaaacattggaatttttgttttagtggtcagtataggggaatgaaagcgtctgttgttacccacgtaactattttgataagtattagaggttaaccttaaatccagcaaaacattaaaacagaaacttttcaacttggagcctgccattcagcgttgaggtagatgagttccgacactgtcacggctgtgttcccagcagcgaaggcctctgcggagctgccagtcgtcttgaacgtggcatgggcggcgtgtgacatctccaggggagggccgtccgaagtcgagaatcgtcagctgttaagtagggagctacacagcgcagaggaaaatgggacccacccattccgtgagggcctttttttccggagggagccgcacatttgg

SEQ ID NO: 5103 - DNA, 213 bp, Homo sapiens
ctgaagcatcttccaattacaacggcaatctgacacatttctgaattgcagtctgaatccagtgttcatgtgaaccttttgtgtagtccacatcagcaggcacaaaagttgtttatatataagttgctatgatttctccagaagtttacataagtcgtctagtttcagcttgcaaggtttaatctatccatcttacaaaagactaatatccaa

SEQ ID NO: 5104 - DNA, 825 bp, Homo sapiens
  misc_feature (1)...(825): n = a,t,c or g
ttttttttttaagtggattgtttttattaatttacaatgaaatagtttttgaatgacttcacacaaaaacctagagataacatcacaattgcaatgttataaagtttaaaggcctattcatttcactgtcagttgaaattcgttaccaggtgaaaattctggagctgggttttgcactgaggatgctacacagccactagcctttttaatttggtcttattaacagaaatactgacttagtgaaattacagggcataggcctcttaatcgctttttatgagtctgaacttttgctttcaataccaaatagtatctgaaaaacatgctcacttttgtggcttcttgagaaattctaagaattggcccagattcatgtgatagtcatttccttaatccatagtcaccatggggcctcagggagtaactcttcaaaagaatggaaaaggcgcaggtcctcaccatttccttctgtctccacgctttcagcatggcttacaggaaatgtgcttccaattggggtanctaattgtgtgccagaactcctcacagtggctcttgaaaccctccacacagattataccaggctttcctgtcatgcaaaatccagtcacatctaaccttttcccaacatccaaaatctttttccttaggtcctgctgatatatatggtgactgtagatccacattcggaggaatgtgttcttgactggctttgcttgtgtagatggttcatatacaagctttctgttcaggaaataagatgcactgttgtcctgtagccactggattgctgcacatacacagagctcacctggatcaaaagtc

SEQ ID NO: 5105 - DNA, 157 bp, Homo sapiens
  misc_feature (1)...(157): n = a,t,c or g
ttgacacctccccttcccatcatggcctaagctggtcttttcagtttactttggaatgtccttgctcaacaggaagggtccattcagtcggannnnnnnnnnnnnnnnnnnnnnnnnnnnnnnnntctcaactatcacagcagccgggcgcggtggc

SEQ ID NO: 5106 - DNA, 1293 bp, Homo sapiens
cggttccgggtcccaagatttggctccaagagctattcgcagagaaacagcctcgcacaaaaagccaccgcccccgaaacccgcgggaaatctgtttcctgtgaaaggcctggcctccgggcattggcggtttccctgatcctctctcccaaattttccggcaggggattgatcgaggcgacatttaggactggggtgggcgagggagtggcggttctcgtcccaagttacaggtgaggacgttcaggccaaggcgtagcaaggatcgcgccgccctgtagcttgaggaggcgccgggattcgaaccaaggctgtgcccaatcctaagccctgcgaggtcttgtggaaccgacatgacccactctttggtttgtccagagacagtgagcagggtgagttcagtgctgaatcgcaacactcggcagtttggaaaaaaacatcttttcgaccaggatgaggagacatgttggaactcagaccagggcccctcccagtgggtgacgctggagtttccccagctcatccgtgtctcccagctgcagatccagtttcagggtggcttctccagtcgccggggctgcctggaaggttcacagggcactcaggctctccacaagattgtagatttctaccctgaggacaacaactcgcttcagactttccccataccagctgctgaagtggaccggctgaaggtgacgtttgaggatgccactgacttttttggccgtgtggtcatctaccacctgcgggtgcttggggagaaggtgtgagacctctaggggctgtctcctccaggaagccctccgggaagcacagcaaagtccctcattctgcacagaaggtttattggttcctcttgggaagggtcccctcccaccacctgtccagaagctgcctttgaagtcagttctgggtttccccagctctggctgaccattttgttccctgagtgtctgagtccccggcaggcggccttcactcagggtcagcgggcaccaggttgctctggaagagcttgaggatgtggttctcgatcacctgttgcactgagatggggcagggaaaaggtgggctgtgagcttgaatcgggagtggggtggaggaggccaacctgcgctctccccttaggggacaaacaagggacccttgcagagacctgcattacagagcaaagctgggagaaccgaggactcaccccaggaacctcaacttcccctaagtttgtaaaaatgcacttttgtagcttttcagaattaatataaaaatatttcctaccaagcaaaaacaaaa

SEQ ID NO: 5107 - DNA, 653 bp, Homo sapiens
tgcactcaaaaaataccaatgtttattttttaataaagcaataattcaaaacaatttttttttctactcattcaaaaggtcataactcaggagtgctgtttataccagatgaatctacaaagccaagaacaggaatcaccgtatctccttcagtagacctgatactgtgagtcttctcttttctgttgacatatttgtgcaacatgctgtagtactggcccttcggattgaaagtatacagtgatgaaatttgctgccactctttcatgcttggagtgttatattcttttggatgcgagccctcaaagaaacatttaatattctcttttgccaattcagttgcatgctctgtggctttacttttaaggatctgctgctcctgttccaaatagattttccagaatttcagctgcagaaaactaactggagataggcatcgggtgacagatgtaaaaatcagaagaatgatgataacaactgctatcaagatccagcccaacacctgcgactgagccttcagatccttcaggaggtcctgcacgtccgacgccttggcctggttgcacggcaccagcggcagtccgcggcgcagctgcggttgcggccgaggcacaggcgctcgcgaaggcccgctcccggtggccgcgcactcg

SEQ ID NO: 5108 - DNA, 931 bp, Homo sapiens
  misc_feature (1)...(931): n = a,t,c or g
tgaaggtctgacaaatggggtctcagagtcctaggacccgcaccaaggtcagagtccacctgtagaggctgagcatttctacatgcacccagggtgctgggctgaggctaagggtggacgcgtagaccccatcacaggcttccttcctgagcccaagtcccccatttggtcactatcccttctcagagcaagtggattctcttttcctcacttggaatattcaatgttgaagtagtggcctggagtggcctttccctcagctgcctgtctgggctccctggcttcccggatcttcatctcatacgtgaggcaataggaggagtttctattcattgagacaaacagtgagcgggcaccaacaggccagcaagcttggcccttttcacaagaggtgcccttggagtctggagtctgggcagctgtctgctccctacggctctgcttcccagcgggcacacgggtccggagcctcagaatgaagtggtgcagaggcgcagggcacacctaggagaagctcagtgaccaccaaagcccttgaggagagacggggtttgctgtgttagagaaatggcaacccccaaggaccatgcacggctctggcaagtgcacaagtggctgattttcaccaagttcctcctaccccttgcctctgtcggagactaagaaaacattctaccccttcaggtcttcttttaaaaagaaaagagctatggcaaagcgtgccatacaaagttaaaaaaaaggaagagtggctttgcgttcttgaccatggccacaattctggtcacttctagcatctgaccttgagaacggtgtagaagctctgagccaccgcttggccttttagagagtctcactctccagctagctctttgtgtagtgtccagggcccggcagtcangatagagcgagcaaagaagatggacagttg

SEQ ID NO: 5109 - DNA, 317 bp, Homo sapiens
gcaattttttaaaaattttaattcaaatgaagtacaattgcaaatttagcctctgacttgcaccatcctgtatccagtgctcaaaagccagtgtggctggtggctgccatattggacagcatagatattgaatacttccatcgcctctagactgaagagatgggagcccaggggcagtgcaccgaggggaaggaatagctaaagcaaaggtctagtagcctgaaaaaacttggagaaaagatggcccctccatgaggccgagtgagaggaaggaagccttggctgggaccctgccacatccaatgtcaccggcagat

SEQ ID NO: 5110 - DNA, 6099 bp, Homo sapiens
gggagagaaaggagggatgaagccgcctgcccactggacgggagggctgcagccagagcttcagggtagccctgctggatgggacagcactgagggctggacctggggggatggagaacatgggctgggggcagcagccatgcctacctggggggcccgccccgcgtccccagatcgctttgcggtgtctgcggaggctgagaacaaggttcgggaacagcagccccatgtggagcgcatcttcagcgtgggggtgagcgtccttccgaaggactgtccggacaacccccacatctggctgcagctggagggccccaaggaaaacgccagcagagccaaggagtacctgaagggcctctgcagcccagaactgcaggatgaaatccactacccgcccaaactgcactgcatctttctgggagcccagggcttcttccttgactgcctggcctggagcacgtcagcccatctggtgcccagggcgccaggctcactgatgatcagtggcctgactgaagcctttgtcatggctcagagccgggtagaagagctggcagagcggctgagctgggacttcacgccaggaccatcttccggagcctctcagtgtactggagtgctgagagacttctctgccctgctgcagtccccgggggatgcccatagagaggctctgttgcagttgcccctggctgtccaggaggagctgctgagtctggtgcaggaggcgtctagtgggcaggggccaggagcactggcttcttgggaggggcggagctcagccttgctgggtgctcagtgccaaggagtgagagctccccctagtgacggcagggagtccctggacactggatctatgggacccggagattgcaggggagcaaggggagacacttacgctgtggagaaggagggagggacacagggtggtcccagggagatggatttggggtggaaggagttgcctggggaagaggcgtgggagagagaagtggccctcaggccacagtcagtgggtggaggggcaagggagtcagcacccctgaaagggaaggccctggggaaggaggagatagctctgggaggaggagggttctgtgtccaccgtgagcctcccggtgcccatggctcctgtcacagggcagctcagtcccgaggagcctccctcctccagcggctccacaatgggaatgcctctcctccgagggtgcccagccctccacctgcaccggaacccccatggcactgtggagaccggggtgactgcggagaccggggagacgtgggggacaggggagacaagcagcagggcatggcacggggtcgggggcctcaatggaaacgaggcgcccgagggggcaacttggtgactggcacacagcgtttcaaggaggccctgcaggatcctttcaccctgtgccttgccaatgtgcctggccagccagacctccgccatattgtcattgacggcagcaacgtggccatggtgcatggcctccagcactacttctccagccggggcattgccattgctgtgcagtacttctgggaccgtggtcaccgtgacataactgtctttgtgcctcagtggcgcttcagtaaggatgccaaagtcagagagagtcacttcctgcaaaagctgtattccctcagcctgctctccctcacaccctcacgagtcatggatggcaagaggatctcctcctatgatgacaggttcatggtgaagctggctgaagagacagatgggataattgtctccaatgaccagttccgggacctggcggaggagtctgagaagtggatggcaatcatcagagaacgcctgctgccctttacctttgtgggaaacctcttcatggtacctgatgacccactggggcgaaacggccccaccctggatgaatttctgaagaaccagccaggacacaggggtcttctaaggctcagcatccttccaggggctttgcagaacatggtaaacagcagcaggggagagaagaggaaaaaggtagtggtggcattcggaagacccgggaaacagagcggctccggcggcagctgctggaggtgttttggggtcaggatcacaaagtggacttcatcctgcagcgggagccatactgccgggacatcaaccaactgtctgaggccctgctcagtcttaacttttgagcctcacctgcttgagtggctgccgccctgtcagctccagccgcctccagctcagccctttctgtgagagtccctctgctgctcactctgatccagaggcaccctgagttggtgctttggatcagggaagccactttgggacaggtccataaagtgaactgatcttaccgagtcaggacctcagccagctctcaagaggttctgctcagccttaacttctcaactttgccttagcacagggtttctgtagggagtgggggctgctagaggggattagttccggagactgagactgttggctccacctccaagctgagctagggtggagggcagggtgggcaggaagtgacaggaagttaagctgttcctctccctgggctgctgctctggatggccagagaacaagatgctcccttgctgagctcctgggagcgtggaaggagatgctaggccctggcacagtgttatgtggactgggccacgatagggtggagtgagctagtgaagaaggcagagggagacttggcttctggtctcagctatgcctgttttgtgaccttgattgagttgcttgggctttacttctgcctacaaatcaggggtaaaaatacctgttgggaggagaaatgagaacatagaggaaagcctcttggaggaaaggtgcttggaccaagtctcaggtgtgtctgcctgtggctgcacaggctctctaaccgaaacctcactttcagagagatgtgggtcctttgtctccaggatccacaccctagattttaacactgcattctcactataacatgccctataatggctgcatcccttttgagcaacctccaaaatctacatttacacagtaggtaaattagggatgactgcattatcaaaatactctcagggttcctataaatggcagctctcctgttgtattcaggtgttgtttacagactaacaaatgtgttggcaaatccctggttagatgcacttcctggtgttgagatgaacacgtcgatttttcaccaatcgatgaagccatgctctgcaatgacaatattaatgtgatccgaccctaacattttctctatggaagacgtatgttgcataaagcaaggcacacttctgctttatgtgtgtgtgtatggggatgggaggacttaacggaagttgaaccagttggttctagatgaaccaattatctggaaaatgaaagaaccagagttggaaggcacttgactggccaccagaccaactctgctgttactgacatgctttcttcaccctgattcctagaggtcattgccctggatctgcttgaagtcctcctgtgccagggaatttactatctccagggtagcacattccctgtgtagacggtattaatcagtactccttactttagtgcagcctaaagtatgcttttctgttacatccacctttgaggctggtcatacctccaggaacaatacagagccagtcaacttcctggaatccaagaccagataaagaagtaggacaggtgcccctgggttctgttctgtgtgggcctgtggggagtctctagacaagatcttttccaggccctgacttctgcctccctctgagtggcacagggagttgaatactgcatggcgagtgtaatgatgatggggagggtccttgtgtcctcaccccttcctttttggtgatttacaccactgtaccatactgacccaggctgggggcaggtgtgttggagacaggctggtcaaagaggtgacaatgattaagagataacccagtggtccctgagaagagattggttagtatggcctgaactggtggctgggggaactgtgtctggtcaagttatggcagatgtcacagctttaggtaggtaaaaagggtcctagatgaaaaccttggagtttttttttttcctgatagggttgtttatacttcttgattggtttcttgccattttcactttcagtgatggtgggtgtgcagtagaccaaaagtgtcttctgcccttttgtgctaagggccctggttgactgagtggccccagtcagatgagaggcaagtcctaagcttcttatagacagggatgttgactttgttctgctgcagcctgataaactgggaccactgtgtggttagtaatgcacttgccatttggtgacacagactgaaggctatcctacacctgggccttacctcttcctctactggcatcctaatggcactctgacagcatccagggtgactacagggcccattggaaatggatcatcattctctcttctagtgtctatctttatcataacctgatgtcccaaacttgtgacaagttcttttggcaactgaaggaccaagaagggaaacggtgatgagagagactgcccattataactttcaaaaccccgtctttggggaagaatcatctagggtgacattccttgaagtaaatcccaggagaatctaggccaaagagatgagccaaggttagtgagacaatttatttttattgcctaaactgcagagcattctctacacagcgtaaaggagaagtggggcagctgcaggacatgtagagaaaccaaaccgggaaatcttacaaggagttgaaaagattaatgtcccaacctgatgagattacggccttgagacaataaggtggagcaacagaacaatgggaaagaggactgggagaggaatctaagaaccagatggcttcagctctctagaggagctgagccctaattcacagtgccctaacctgggaagcctgtgaggaacaggcctcaggcccttgccatgacctacttaggctacaatttcctttaaggcagcccctagctctgggaaggaatactggtagccagtggccagtgttcgccgtgggatcaccttctggccctccagcagcatgatggcacgctgtcgcccaaagacagcttgcaccacagcgctggggagagggatgaaggctcggcgggcccagggcagcaccgaaggtctgggcaaactcagcattagtggcggaggatggagccactccattcaggaccccgtgcacgtggtttgcttcaagggcatgggtcaggattcctgccaggtccccgatgtgtatccaggggaagaattggtggcctgagccgatggggccccccaggcccaggcgaaagggcagcagcatgtggcccatggcaccacccccacggcccagcacaacccctagagcaggaaagagggaaggtacaggggtcctctcagccttgaaggagcccactgctcctcctggtttctgtttccccttcctcactctccccatgctgacttggctctgtaacagaagtgagcagtatggctgtctttaagacctcacaccttctcatctgcaggttggctagaagtggtggcatcctctcactctgtaattgtaatctcagctctcctaatcccatcacttccccagcccagagaagacattccaaccctgtctgatacccaggcccgtttctcacctgagcgcaccaccacctggcgtgtagaatctccaggaagcctggctgcagcttcccatttggttacgaggttggagaaaaagtcaaagtcccctcctggggctgtcttcatcatactccgcagtcagactgggctggtagtaagctgccggtggaacacaatcatttgccctggggtgtccttggtcctgcctggctctctgtagtggaggctccccttggcatcaccttctctggcccttaggatctccccatttggagacagagccatttggatattttccccttgaacttctccatgacctgaagcgttccttccctggaggaactctttggttgcagggctaaacttagaggctgctagagtgtagtggttaagaacaggaacttgggtaccaggcgcctgaattttaatcagctc

SEQ ID NO: 5111 - DNA, 548 bp, Homo sapiens
  misc_feature (1)...(548): n = a,t,c or g
acaacaatttnccaaactattgaaataaatctatgaataattcaatggccgacattttccatacaaaccaataaaatgcagagtgtgcatgaagctatctgttacaatctgtggcactgatatttcacaaaagaattctgtcccaatctgagcccctgcattgtgccttcaaatcctcctggactgcaagtccgtaagaaacaggacctccaggttccgccccagggaggttggaattcagcaatataaaaagggtggtggtgccgcaggaaagggtggaactggaaacgctcctggtttcttacttttctccaaggactcctagaaggaccccacccccctccccccacccctgctcctaggaggacaacgtgatcactgtattcagctccatcaagaatggtccaggttcttctagatgatctgcacaaatggttcctctcctccttcctggtgtctgccattagcattggaataaagttcctgctgaaaatcnanatctcccctgggtccggtgttcttggaagcgagagagacaattgtcaaca

SEQ ID NO: 5112 - DNA, 1434 bp, Homo sapiens
actatgtctggtttcgaactcctgagttttaatttgtatccacccacctcattctccattagcgctgggattatagtgtgttgagcaaccgcgcccgtagctatatagagccttttaacatgaggtcaaaatactctcttctacctgttattacagcaatccaaaaaaagttatctattttcaaattaacaatctgagactctacttttagtagctaattagttgtatcacagggaaactttttttttttttttttaaatatttaagagctcaaaggtatacaggcagaaagtggaaaatctcactactactttttattctaagctcacggtgtttcagatatctatttcacaaccaagaccatgaaacccatcatagtatttgtgactactatgaaaactatgacatgtcagtcagccttgctgcctgctgtgtgctgtatataagtccattacatattccttatagctggattgaaaacctgaaaatgaaatgaagtccctagagaaacttggccatgctggtgctttttaccaagtttgacaatttaaaaaaaaaaaatcagtgttcaaaggagacatacaaaagtccatttaatgtagcagagatgtttaggggattacaatttctatcccctggtaaaaccaatacttggtagaaggataaagaaaaagccacgtgaaataatactgaatagcaccagaatagccttacactaaagctcgcatgcgcacagggctgggaggatggcttcctcttgccaggccctttaggtcatttcagcaattgttctgttaaacatagcattaatgttatcaagacacagcaagcagcagaaagcttgtggagtcacatttcatagtgtctcatctccaaatcagataaaagtggtatacagggttccatccagaaagcattcagtcagagcaagttaaagtcagtactttctaacatacttttaagatacttatgctgaattagcccaaggggagaaaaattaatgtgcttgatgtatttactaagacttgcatctcaagtcttcaataatgcctatttttgaaagaaacctaggcaacgaattgaagagacttggaaatgtgccaattccctaaatgtttttcctcctgtgggataattttttaaagggacaatatatttgaggagaagagattattcctggtgcacctacctaaccactgtacaaaagacttcaccatagacattatactcttgatatcccaaacataggagtacatgtcataaagaattgtcctgttggcacaattggagagccgagtgaacattcccatcactagtccacacatctcttcaaacttggctgctcgtgaccgccattcttcaattttttcagagtcttttcctttgcaattgacactgacaacactactatttgctcgaagccattgaaattcc

SEQ ID NO: 5113 - DNA, 366 bp, Homo sapiens
  misc_feature (1)...(366): n = a,t,c or g
tgaaatagatattcttggcccctgttaaaggcaatgaaagtctgnatcttaaaactctattntcaatttgtttaagaagcttgtcttagtctgtttnctgttgccgtaacagaatatcatagactgggtaatatataaaaaaatctatttcttacagttctggagggtgggaggtcnaagaccaccccaatatctggtgagggccttcttgctgtgccctaacatggctgagggcaccacatagcaagagggnaagnacatgcgtgtcagctcaggtctctcttcctcttataaagccaccagcnnnnnnnnnnnnnnnnnnnnnnnnnnnnnnnnnnnnnnnnnnnnnnnnnnnnnnnnnnntac

SEQ ID NO: 5114 - DNA, 688 bp, Homo sapiens
catcgacttggtacagcaacagacagaagatgtcatgccacgcattgagcccagacttccacccaagaaaactaagcaccaggaagaacaggaagatgtgaacaaaccagcctggggagtcagctcttctccctgggtgacctttgtctatgcactctaccaaattaaagagatgatgcaactcacaagagacaaccgtgcttctgagatacagcctttacagttgcacataggaaaggagatgaaaggggaccaatgagaatagggaaaattctcctgctggtagagcccagcctgtcccatgtgagactcactctgacccatctagaaaccagccatcccctgacgcagcagcatctcagacgcagaccagccccgctcaccccagtgtggacccgtgcacagaggagagtgaagagcagcaggctcagctggccgcgggaggacactgagggcatcctgctcatctcacaccctgcatggaatcaggctcctcagccaggacacagggtgaggccccccagccaggatatgcctcccctgggaggagcacagcactgcatatgcttctaaatatctaaactcattaacatggaaacacacacacaggagctacagtacatattggcagaaaaaggtaaactttcgtaatctcattggaattacaacagggaaatggagttcaaaa

SEQ ID NO: 5115 - DNA, 849 bp, Homo sapiens
ttttttggctggtccctgttgattggtcagaagacagctcagctaaaaggggaagttgtctgggtggttgctttttttctgacgtctgttcctcaggctggaagaaatgagcagaaaacaagggatgagtactttttagagtatgtgcatgttacgtaatacctgtttctgggcaatgctgcttcttctgactcaacaaatggggagagcaaattgaaaatgcgtaaattggaaggcaagttctgaaattaaacgttgtactttggcctgatgttctgacctttaaggaagcaagagtttgtaaacttccaaatatttactattctgaactgccgtgtaaacctgaccgtattcccaagtcaacataccagtataccaataggatgtgaataatgtgtgtgttgagtttaaaaccataggcagttttgctctggcaagtaatgaaagcgttctcgctttcctgagtgtgaggctccagcagactgccagagtggccagtgccacagttgtagcctgacttcagtgagttctgatgtgtgctttttgcaaatacatgttctcagaacagtgagatcatccaggcagtggccctggactgcactcacataaaaatcatgagacagccatggctacttgtttctgtaatacatgcatgtgtgttttttaaaacctatgataggcctctgattctgcagctgcaacttttatggaatgttttccttctccacatctcatgtgatgctcttattacaggacacagcattgttggttttgccatgtactattttacctatgacccgtggattggcaagttattgtatcttgaggacttcttcgtgaatgagtgat

SEQ ID NO: 5116 - DNA, 5018 bp, Homo sapiens
ggccaaaggtcaagatacttctctgggaaatgttgctgctgatgctgctttacaaagtcatacaatgagtgtttggtttaagaaagattttcatacttaaaagattttcatcttggaaatacatcaagtgaaaattaaattcttttgggaaacattttccttctgatatattatacttgtaatgggcgacatggcaaacaactcagttgcttacagtggtgtgaaaaactctttgaaggaagctaatcatgatggagactttggaattacgctcgcagagctgcgggctctcatggagctcaggtccacagatgcattacgaaaaatacaggaaagctatggagatgtctatggaatttgcaccaaattgaaaacatctcccaatgaaggtttaagtggaaaccctgcagatttagaaagaagagaagcagtgtttggaaagaattttatacctcctaaaaagccaaaaacctttcttcaattagtatgggaagcattacaagatgtcactttaattatattagaaattgcagccatagtatcattgggcctttctttttatcagcctccagaaggggataatgcactttgtggagaagtttctgttggggaggaagaaggtgaaggtgaaactgggtggattgaaggagctgcaatcctcttgtctgtagtgtgtgtggtgttagtaacagctttcaatgactggagtaaggagaaacagtttagaggtttgcagagccgaattgaacaagaacagaagttcactgtcatcaggggtggtcaggtcattcagatacctgtagctgacattactgttggagatattgctcaagtgaaatatggtgatcttcttccagctgacggcatacttattcaaggcaacgatcttaaaattgatgaaagctcattgactggtgaatcagatcatgttaaaaagtctttagataaggatcccttacttctatcaggtactcatgtaagggaaggctctggaagaatggtagttacagctgtaggtgtaaattctcaaactggaattatctttaccttacttggagctggaggtgaagaggaagagaagaaagatgagaagaaaaaggaaaagaaaaataagaaacaagatggagctattgagaatcgcaacaaagcaaaagcccaggatggtgcagccatggaaatgcagccattgaagagtgaagaaggtggagatggtgatgaaaaagataaaaagaaagcaaatttgccaaaaaaggaaaaatctgttttacaagggaaacttacaaaactggctgttcagattggcaaagcaggtctgttgatgtctgccatcacagttatcattctagtattatattttgtcattgacaccttctgggttcagaaaagaccatggcttgctgagtgcacaccaatttatatacaatactttgtgaagttcttcattattggagttacagttttagtggtcgcagtgccagaaggtcttccacttgcagtcacgatctcactggcttattcagtcaaaaaaatgatgaaagataataacttagtaaggcatctggatgcttgtgaaaccatgggaaatgctacagctatttgttcagataaaacaggaactttgacaatgaacagaatgacagtcgttcaagcttacataaatgaaaaacattataaaaaggttcctgaaccagaagctattccaccaaatattttgtcctatcttgtaacaggaatttctgtgaattgtgcttatacatcaaaaatattgccaccagagaaagagggtggattacctcgtcacgttggtaataaaactgaatgtgccttgttgggacttcttttggatttaaaacgggattatcaggatgttagaaatgaaataccagaagaagcactgtacaaagtctacaccttcaattctgttaggaagtccatgagtactgtcctgaaaaattcagatggaagttatcgaatattcagcaagggtgcatctgagataattctgaaaaagtgtttcaaaatcttgagtgctaatggtgaggcaaaagtattcagaccaagggaccgtgatgatattgtaaaaactgtgattgaaccgatggcatcagaaggcttgagaaccatatgtcttgcattcagagattttccagcaggagaaccagaaccagagtgggataatgaaaatgatattgtcaccggccttacatgcattgctgttgtggggattgaagatcctgtgagacctgaggtgccagatgcaattaaaaagtgtcagagggctggaattactgtgcggatggtcactggtgataatattaatactgctcgggccattgctaccaaatgtggtattttacatcctggggaagattttctgtgcctagaaggtaaagattttaacagaagaatacgaaatgaaaaaggagagattgagcaagagaggatagacaagatttggccaaaacttcgagtacttgcaagatcatctcctactgataagcatacactggttaaaggtataattgacagcactgtctcagaccaacgccaggttgtagctgtaactggtgatggtacaaatgatggcccagcactaaagaaagcagatgttggatttgcaatgggtattgctggaactgatgtagctaaagaagcatccgatattattctcacagatgacaactttacaagcattgttaaagcagttatgtggggacgaaatgtctatgacagcatctcaaaattccttcagttccaacttactgttaatgtagtagcagtgattgttgcttttacgggcgcctgcattactcaagactcaccgcttaaggctgtgcagatgctgtgggtaaacctcataatggatacactcgcttccctggctctggcaacggaaccacccactgagtctctcttgcttcggaaaccttatggtagaaataagcctctcatctcacgtacaatgatgaagaatattttgggtcatgcattctatcaacttgtagtagtctttacactcttatttgctggagaaaagttttttgacattgatagtggaagaaatgctcctttgcatgctcctccttcagaacattatactattgtttttaatacctttgtgctgatgcaacttttcaacgaaataaatgcccggaaaattcatggtgaaagaaatgtattcgaaggaatctttaacaatgccatcttctgcacaattgttttaggcacttttgtggtacagataataattgtgcagtttggtggaaaacctttcagttgttcagaactttcaatagaacagtggctatggtcaatattcctaggaatgggaacattactctggggccagcttatttcaacaattccaactagccgtttaaaattcctcaaagaagctggtcatggaacacaaaaggaagaaatacctgaggaggaattagcagaggatgttgaaggagattgatcacgctgaaagggagttgcgggcgtgggcccaaatcttgtggtttagaggtctgaacagaatccaaacacagattcgagtggtgaatgcatttcgtagttctttatatgaagggttagaaaaaccggaatcaagaagttcgattcacaactttatgacacatcctgagtttaggatagaagattcagagcctcatatcccccttattgatgacactgatgccgaagatgatgctcctacaaaacgtaactccagtcctccaccctctcccaacaaaaataacaatgctgttgacagtggaattcaccttacaatagaaatgaacaagtctgctacctcttcatccccaggaagcccactacatagtttggaaacatcactctgattgtaagctgaatgttaacacactagctgcattgtaaagaaacaaattgaaactgggtcttttcacatattgtgatggacaagctagtattcttgtctttggacttcaacagaagacacacttgtacgaatgtagatttatttttttaaaaaaaaaaaagcaaagctttctgccagactgagggtgctttttggggggtgggagaaatgaactgacagataaacagtaactcagcgtaagtgacctgtggatcatcagtagtacccaagcatggtcctgaacagtgtattagcagagctttagtttatctcagtcctggatgggagagagagggaggagtaaaactgggcaagacaaagagccctggatcgttgaattgatagtttaatttctgctgttggctgttaataatttggattatttatgtttataaatgatacagatctgtttacaaggtttgtagatactttttttgttcctgttcatagatgggaagcttccttataactgatgcagagaaaaattagtccttcaaatactgctgtattttcaggaaaaaaaaaaaaaggggtgtttctattgaaactgtactaaatttttgcctacaatttaccttgttaaatattgtagataaattgctaatactaatagccaaatagataacactaatgctttgtttaaaaaaacgaaaaaaacaaaacaaaacaaaaaaacatgagcagtggtgttctaatgaagttatgacatctgtcctaattagtttcttaaatacatttactacttaatggttttgaagcaactgtttaatttttaaaatttttgaaaacttgctaataaccttttgttcagaatttagtagattgtttaatgcaggacatcaactacataatgaaagatgcttgaaatgcttttgttatttcaggcaaatcaaattaaatcagactatcaaactacaagagaaccttagtcttttttgtttttgtctaaacatgttagtttagtgatgtcttggtgaactgtgagtgaactgtattgatttttctaatctttagagaccttcacacagcatgagggctgttggcattttgaaaaaggttaataagtagaagcatacatgttttccttttgtttttgaaacttgtttgtaaacataaataaatatgccctttt

SEQ ID NO: 5117 - DNA, 871 bp, Homo sapiens
  misc_feature (1)...(871): n = a,t,c or g
caattacatatgtaataatctaaacttgcctccttgtattataaatggaaataatcctgtttatttaaacgggttttcatgtacctgtagggattaggaaactcaaatggcctttttaatacctttccctagtttgagctccctgttctctttaacagataaaacaacatatttgcttcagcctggaatctgtttttggtgctttggtgcagagacaggaaatgggcactcagagtcacactggtagttgcacactgtatctacagagggcgtgtctcatctgtactctgctgggttacaggatttcagtaggtatttgtgtccacctgagaattctgtttattacctttcatttgacagtgtctttcctttctgcagttgattttgctagagaggcaattcataaggtgaggtcctgttcatagtatgacttgctttctcaatatctccttcaatttttagtaactcttggtctatttggtgtctttaaaaaaaataacctagtaataaagacttcttttaatgtggaaatgtggtctggtagtaagttatttctttccacatgtaactgacccaatctggtttccaaatgagaagtgtgcaggccccagaggttgagaagccatatttcaactgtgaaaaaaatctgcttcctgcatctgttgaaatatagttgttcatacttgccatcccttatctttcttgtaacaatttgcacagttcttgccagaataaatgccattatctgtatgtttcagggagttccccaatttgatcatttttgtgtgtgtgtggtgtgtgtgtgagagagagagatactgcagtaaaccatttctaaggatgaaagctcttgtatggcatagatntgaat

SEQ ID NO: 5118 - DNA, 437 bp, Homo sapiens
gattttaaaaaagcatctaggctgcttgtggaagtcagaccaaaatagcaggaaggtattgcagcaagatggatttgggaaaggaccaatctcatttgaagcaccatcagacacctgaccctcatcaagaagagaaccattctccagaagtcattggaacctggagtttgagaaacagagaactacttagaaaaagaaaagctgaagtgcatgaaaaggaaacatcacaatggctatttggagaacagaaaaaacgcaagcagcagagaacaggaaaaggaaatcgaagaggcagaaagagacaacaaaacacagaattgaaggtggagcctcagccacagatagaaaaggaaatagtggagaaagcactgggcacctttaggggaaaaaaactgagccacctggggagcataaccaaagttttttccttcagttag

SEQ ID NO: 5119 - DNA, 626 bp, Homo sapiens
  misc_feature (1)...(626): n = a,t,c or g
ttttttttttttcgctagctataagcagaaaaaaactttatttctatcaaattgaaaagtatgaaccttcaagcaagataatcaacataatcaataatacaattaacagttaggatagcatatacagatcagactggaggtttagatacttggaagcacatacaccaaaattaagagggccagcaactgtcccaccgaggaaaagcactctgactcatcataaacacacgacttctgggaaacttgagctgacatttcacaggacagtaaaccaaagagacaggttgtcattgggttatagaactgatctgagcttgagagggatcacagtgaaatgccattgtaactcaacaatttccccagagatctgttcatctcaaaaacaggaatatataaaaatcagtagtacaaattctcataaaactagaaaagccctttaagccctaatatccttggagcttacataaagactgagttttcatttttcttccctttagtcttccctaaattaaatacaaaatagtttgttatttaggacatttctgactatatagccaaagctttaaaatgaagacaagaatnatttttataaaatgaattagacacatatcaaccctagggggaat

SEQ ID NO: 5120 - DNA, 1125 bp, Homo sapiens
ggacttagtgatcttgtccaaccccctccccgcttttcacaggttggggagatgggcgcctggagaatggaaatccagttatcaaaattgactccagaagagagaaactaacagaacaataacaatggaggaaattgagaacattatcaaaaagctatcatcctgccaaactccaggctcagattgtcttacaggttaaaaaaagttagtccttcatgaaaatgaaagaccttaagcaacacgatggattcagaagctcatgaaaagaggccaccaacactaacatcttcagaacaagatatatcacctcgtattacaaatgttggtgaaatgaagcattacttgtgtggctgctgtgcagccttcaacaatgtcgcaatcacatttcccattcagacggtcctctttcgacaacagctgtatggcatcaaaacccgggatgcaatattttagttgagaagggatggatttcgaaacttgtatcctgggaatccttcccccattgatgcagaagacaactacgcttgcacttatgtttggtctgtatgaggatttatcctgccttctccacaagcatgtcagtgctccagagtttgcaacctgttgcatggcggcagtgctcgcagggacaacagaagcaattttcactccaccggaaatagttcagacgttgattcaagaccacaagcatcatgacagatttaccaacacttatcaggccttcaaggcactgaaatgtcatggaattggagagtattatcgaggcttggtgcccattcttttccagaatggactcagtaatgtcttgttttgcgggctttgaggtcccattaaggagcatctgcctacagaaacgactcacagtgctcatttggtcaataattttatctgtggaggtccactgggtgccatgttgggattcttgtttttttccaattaatgtaaaaactcgcatacagtctcagattggtggggaatttcagtctttccccaaggttttccaaaaaatctggctggaacgggacagaaaactgataaatcttttcagaggtgcccatttgaattaccatcagtcccttatctcttagagcataatcaatgcaacttatgagtaaaggttatatg

SEQ ID NO: 5121 - DNA, 150 bp, Homo sapiens
ctgagaaagaccgtacgtccaacttcagccccagatgtcaccaagctctcggactctaacaaggagaacgcgctgcacagctacagcacccagaagggccccctgaaggcaggggagcagcgggcgggctctgaggtcatcagccggggt

SEQ ID NO: 5122 - DNA, 1311 bp, Homo sapiens
tttttttttttttttttaaatgtcatagtgtttactttatttaaatcctgaggttaaaaataaagtatttccacatggccatggccagacactataaaataatatgcttagggatacaaaagttttccacccccattgagcaggtggggtgctggtatttgatgtgcttctagataattctttggcagataagaatgaattggggtcccagacccaccatcccggtaaggccacatgaattgaggattaatcaattaaagtgcaattcccaaatgttgagccttcccaaatggaggcttgggtagttgctctgcagccaccagaggcagagtgtctccggcataaccatacatccaagcagcctttttcctttttttaaatccagagatgcccccccaaatttcaagatgtactttattattttaaaagtgcttaagaggaaagagagaattattaattcagtctctcctgtttccttggaagaaacataatgaaatgagaagaacttactaaagttcccctacaaagtgctttcttggtaagtgttttgtaaacaagaatggccgtctcgatggtctttgtgtacatgaccatccttggttctaagcatcacgaatggcttctctctgctttaattcccaacacctctgagccaaggacagtttcttggcctaaagaattctcatatgtagaatcatgcgcacttttaaaaatgaaactcctttaaaatttcatcagtggacatccaaccatatcataaaacacaggctctgtgatttcatccccaactggcgatttcctttcatttgggcctgaaatagtttcaccaccttcgatgataattttaaaatttccaaaacaccatttattcttgagttatatgacgtggcttttcatttctattctccaaaccctgtggagtttttcagttcccgtgtctttgccctgctcttggtccagtccacctggaatccagtgtgttgaggtcaagcactctgtagagtccacttggacctggaggacaacactttgtgccaaacgtgcctccttgtttgtgggtaagtgaatctgacagaggttggcatgttcttgaaggtggtgagtggcttcagtggcatgatgaagaaggcatctggtatcgatatgaagacgtaactgttattcagagagatgagccatcaaggggctgccccttttaaaaaaaaaaaaaaaagagtgatctgggatcccaaggacgcttccttctggctgatttctagtgtaattcagtctagccagggctaccacctgcagcagtggttcttcaaattg

SEQ ID NO: 5123 - DNA, 1779 bp, Homo sapiens
gacattggtcattcaggttttatttatgacaacttcttagaacacacacatccaatctaggaacagaaatgtacaacatggggcttaaataactttcatacactatgtacagccatcggcagaggtacaaaacatatatacaccttgtgctagtcacatcatggaggacagcaggagcctaatgaagcctgcagcctgggcaggacatgattgctagaaaagagttggtggggcagggcagggccctgattcatctcaggggtcttctctgatcctcggctctttgtggaggagtttctatttcctacttccctggcaaggccctcaggacatggttcacaggactgaactagatgtgataggggcttcaaaggaccggacccagagaagaggaaaactctaccggtgcagataagtggagcacagggatcagttgtccttgtttttttttggtcttttcttcatttgaagattaagtattggagccatgggaataaaggttcaacgtcctcgatgtttttttgacattgccattaacaatcaacctgctggaagagttgtctttgaattattttctgatgtgtgccccaaaacatgcgagaactttcgttgtctttgtacaggtgaaaaggggaccgggaaatcaactcagaaaccattacattataagagttgtctctttcacagagttgtcaaggattttatggttcaaggtggtgacttcagtgaaggaaatggacgaggaggggaatctatctatggaggattttttgaagacgagagtttcgctgttaaacacaacaaagaatttctcttgtcaatggccaacagagggaaggatacaaatggttcacagttcttcataacaacgaaaccaactcctcatttagatgggcatcatgttgtttttggacaagtaatctctggtcaagaagttgtaagagagattgaaaaccagaaaacagatgcagctagcaaaccgtttgcggaggtacggatactcagttgtggagagctgattcccaaatctaaagttaagaaagaagaaaagaaaaggcataaatcatcatcatcttcctcctcctcatctagtgactcagatagctcaagtgattctcagtcctcttctgattcctctgattccgaaagtgctactgaagagaaatcaaagaaaagaaaaaagaaacatcggaaaaattcccgaaaacacaagaaagaaaagaaaaagcgaaagaaaagcaagaagagtgcatctagtgagagtgaagctgaaaatcttgaagcacaaccccagtctactgtccgtccagaagagatccctcctatacctgaaaatagattcctaatgagaaaaagtcctcctaaagctgatgagaaggaaaggaaaaacagagagagagaaagggaaagagagtgtaatccacctaactcccagcctgcttcataccagagacgacttttagttactagatctggcaggaaaattaaaggaagaggaccaaggcgttatcgaactccttccagatccagatcaagggatcgtttcagacgtagtgagactcctccacattggaggcaagagatgcagagagctcaaagaatgagggtatcaagtggtgaaagatggatcaagggggataagagtgagttgaatgaaataaaagaaaatcagagaagtccagttagagtaaaagagagaaaaataacagatcacaggaatgtatctgagagtccaaacagaaaaaatgaaaaggagaagaaagttaaagaccatgcggc

SEQ ID NO: 5124 - DNA, 731 bp, Homo sapiens
ttttttttgttccattagaagtattttattttaaagtacacttgaaattttaaatgtgtacaaattcagaggtttaaaaaacttcgaaagtcacagacacagaatttaggaagctgaaggctgagagtctcccttctcacttaatccatgctttattttgcattcctcacaggtaaggaggcagtgcctgttatgctgtggaccaaaaccagccccacggagctgatcttcaaaaaaatggaatttactctggcatactcctatgtatgatacctttccaaggccaaatcccaagagaccagcaagtgcaactttgggcaatgatccaaatctagaattagctgccaaataaccttggtagactagtccctgggtgacaagcatgcttacaagagaaaaaggcagagctctcttccagaaactttcttcctgacattctcgcataatctttgagatctctgctctgtggatgtgcagttttgattttggacaaaacaacaggctctgcttgcttggtggtggaaaatgggcatctttatcttggtttccacgagcagacgctgaagccatgatgactttgtgcttgctctccttccagttgtttatcctctgcttactccttgacccagtgtctgtgtggtctgggtcgcctccgaggccgagtccctcgttgccaagcccagcaggcctcgctcccccgtgactgcaccgccggcgcgctccagcttcag

SEQ ID NO: 5125 - DNA, 891 bp, Homo sapiens
  misc_feature (1)...(891): n = a,t,c or g
ttttttttttttttctggaaagcaactgtgtatttacacaacagtggacgccttttacattgcagaggggcgggtaagagcgggatggctaggaagctacagcacctatttggttatgaacacagcattttcagatggctgggggaatagatgccacttcccactcaagacagggatttgctcagcgggaaagcaggtaataaaggcagcacatcctgcactttgaactgcatccgtctcatcctgcagccaccctgtagctcaaagcacagttctggagcctattaggtccaaatctcaatctacccttgagtcagcgaggccttaggcaaggaggtccctcgaagtctgtcttcctgtggcaggatgaggacggccacaccacaaggcagtcgctgggcccggggcccgtgtccgaggtggcagtgtgcttgggctccatgtgccctaacccgtgcgtgtgttcatcactggcagcggtgactgcgtgctgccttgggggaagagcacttgagctgcctcagaacaccctggtgaacggaggaacacttgcatggatggaagcaggaccgaggcaccgtgttggtccctgtgagactctgggtgcactgagctttggggaggggtggtggcacagacctgggcctttctactctcctggcacacagcagtcagcgctcccacttcccttctccactacggtgtttctctctggtgtggtttgggtggaagttaccagaaacgcaaagccctggcactgctacttctcctgggggagaacagatttgtggcctgcctttcgccaggagggctcctggccttgccttgctgatcggcagagacttgctcctcaaagggaaggggtagttggtccttctccncgtgccgaat

SEQ ID NO: 5126 - DNA, 499 bp, Homo sapiens
  misc_feature (1)...(499): n = a,t,c or g
gaattaaatggccaagtgggtttttcctttgttgcaaatggggaatgtttttcctttgactctaccatccagttcaggacgtctcagtgtgtttaacatttgtcaacaggcccaaggactcacagttggaagactggagaagactttttaaaaagatctggatttttccttatgacttggaatccatctttgtcttgtataactaggtcatagcacaccattcatgtcagcagttaacagttttgaattccaaaaaaacctaaagcagtaaacagtcctcagcgaagccgcctttttgcctacccaaccctgggaaagtttgcagaagtggaaggagcagaacgtgagggtgtaacttacaaaaaggttctgggccggagaaggggcgacgttcgggcaccccccgaatggacaatctttccttctgtcaacggcaggggcaggcctagtttgantctgacagtcctncccactaaggaattnctgggtgactggaagg

SEQ ID NO: 5127 - DNA, 1658 bp, Homo sapiens
tttcgatttgctggctcagaaaacttatcagcatttaactgtttgcataaatttgccaaagattttatgacttatttgtccgcacctaatgcttctgttacaggtcctcataacctagaaacttgtctgagcgtggtgctgctgtctctcgccatggtcatggctggctcaggaaacctaaaggttttgcagctttgtcgcttcttacacatgaaaacgggtggtgaaatgaactatggttttcacttagcccaccacatggcccttgggacttctatttttgggaggaggaaggtactctttgagcacatcaaattcttccattgccgctcttctctgtgccctttatccgcacttcccagctcacagcactgacaaccggtatcatctccaggctctccggcacctctatgtgctgggccgcggagcccaggcttctagtgcctgtgggatgtgggacacaaacacggccctgctatgccctcttagaagttacctacaagggcactcagtggtatgaacaaaccaaagaagaattgatggctcctacccttcttccagaactccatcttttaaagcagattaaagtaaaaggcccaagatactgggaactgctcatagatttaagcaaaggaacacaacacttgaagtccatcctttccaaggatggggttttatatgttaaactccgggcgggtcagctctcctacaaagaagatccaatgggatggcaaagtttgttggctcagactgttgctaacaggaactctgaagcccgggctttcaagccagaaacaatctcagcattcacttctgatccagcacttctgtcatttgctgaatatttctgcaagccaactgtgaacatgggtcagaaacaggaaattctggatctcttttcttcagtactctatgaatgtgttacccaggagaccccagagatgttgcctgcatacatagcaatggatcaggctataagaagacttgggagaagagaaatgtctgagacttctgaactttggcagataaagttggtgttagagtttttcagctcccgaagccatcaggagcggctgcagaaccaccctaagcgggggctctttatgaactcggaattcctccctgttgtgaagtgcaccattgataataccctggaccagtggctacaagtcgggggtgatatgtgtgtgcacgcctacctcagcgggcagcccttggaggaatcacagctgagcatgctggcctgcttcctcgtctaccactctgtgccagctccacagcacctgccacctataggactagaagggagcacaagctttgctgaactgctcttcaaatttaagcagctaaaaatgccagtgcgagctttgctgagattggctcctttgcttcttggaaatccacagccaatggtgatgtgaccgtgtctggcggtgaacctaccctgaaacgtgacttctgcacaacaaacgtgaccaaacatcaaagctaaagcaatgtttataaagttttatggtataactagggggaaatgagctgcacaaacctcaatgtattttaaatctgttgctgtcatcattaacggtatatgacatataaaagcaagttaaaatttacttttgtaaataaagtttttggtttgtttccaaaaaaaaaaa

SEQ ID NO: 5128 - DNA, 428 bp, Homo sapiens
gatgaaatatagcagaagctagaagaaagcggtgaggtgagagagatgcatctgcacgttttcttcaacagcaccaggtgattcagcatattcctaattacctttcactattcgtgtatataagatcgtttacttgcataatatatcatcaatttgacatattcttaaaactagagggtgtgagaagcacagcaataggaagtctctccacaaactaggggaacacaaatggggtcattcacgtgcctggactgtcactatgtggctgtcacgtgaagtgctggtgttgatttccatttcagccagtgggtagctgataaggccagtgcccagcatccagcatgagcagatgtcggggagactgggaagtctccagcgttactgctctccttcccttcatgataagccagtgccagcatccagcgttg

SEQ ID NO: 5129 - DNA, 782 bp, Homo sapiens
cccactaaactatacttgtagacatattcattacatttattttaataactacttcattataggctgactggctttcctgtgtggataaagtgtgatctgaaagcaacgctgactgaatgtaaataaagcaaacgttcccagccatttttggcatgaacatggactacagcgtttaatgcagacccaaagccacacatttttggggagtaggttttacttgcagtacagattcttttcattacagatcacaaaaatacaatacaatgtgacaagcccagtttaagaattacatgcagtagctcatattaacacaaacagctccccacgaaggccgacaagagctaaatccggtgtcaaccagggttcattgcaggagtagaataatccggtacaaggaacgagaacagattgaaactagaaacaaagccatgcctgacagtcaatcaaggtcaatctgatcatttccatgaccaattacccatgtgaacaattcaaaatgacggtggaagagctgagcaccctgtactcacacacgatgcccacagcttggcaaaaggtacacaaacacttgtttgaaaagaatgactgaaacgtctactttcaaagaacaatggacacttttaaagggaatgctgacatttaactttacaaaatgaaatttaaaatgtaagtagtactctggggaagaatatgcctgaagcgtaaccatgatttcccagtggtataattaaacagagctctaatttaaaaactcttcctgggctgggcgccgtggctcacac

SEQ ID NO: 5130 - DNA, 382 bp, Homo sapiens
ggggaaagatggcggcgactctgggaccccttgggtcgtggcagcagtggcggcgatgtttgtcggctcgggatgggtccaggatgttactccttcttcttttgttggggtctgggcaggggccacagcaagtcggggcgggtcaaacgttcgagtacttgaaacgggagcactcgctgtcgaagccctaccagggtgtgggcacaggcagttcctcactgtggaatctgatgggcaatgccatggtgatgacccagtatatccgccttaccccagatatgcaaagtaaacagggtgccttgtggaaccgggtgccatgtttcctgagagactgggagttgcaggtgcacttcaaaatccatggacaaggaaagaagaatct

SEQ ID NO: 5131 - DNA, 1151 bp, Homo sapiens
tttttttggttccatcggtgattttaagaatttcatttaggctacagaggttcataggaggactcagagttccaggccctccaaggagactctggcctgtaactgatttaatcccagggcagtaaggtgagcagcatgtaaccccttgtcaaataaggcagtggaataagggttgacagaggccagcactcaggctgtgctgctcaatgacagtgaactcttccaggcacagatgatgagggtctgttgctctcagacttggaacatgagaacagcaactgtctcttgtccattaagaaaaaaaaagccaaatttcttctctgggcaatatccaagcccaagggtttaaggaagaaagcttccttacactttcagcactcaaagtgggattccaaaaatcgtaactacaaaacatgcagctaagcaggctctagccagtccagaaacatctccacatggtcagaacacatgacaaatgttgcttttggtttgatcaaacctggagctggtcagttgcacagctaatccatggcatccatgatgtcttccaggcttctcttgattttttacaccaacctttagccaaacttcactgagggcctgaagagacttgattgggaaggccatggacatgccaatagacccaagacccatgctagggaacagtgatccaaagcagaaagccatctccctagggccacctaatgaaggccagtgaaacgcaggtgtgttctgcagccccaggccccaacagagaggcatccaaatgcctttcccagctcaggttgcacacagagaggacaatgaatggagtgaaaggaaggtaaggcagggaagaagtttccatcctggtttccaaagaaagctcctcaggtaggcagagggttgggtcaaatgcaaaacccaacgaatggatggtcagaaagcctgtggtgttaccagtttttaattctttgtggattcaaaactgaagtagaagggccttctgagtcaaacaacacggcagcctgggctatgaaattctgttctgtgattttggcatcacaaccacgtaaattctcttcacacctctgctcccacatggaaggactgcagggaaaggcacatcacagcagcattgccctggggtgggtggcttcccagaccagagt

SEQ ID NO: 5132 - DNA, 331 bp, Homo sapiens
ccaccgtctggatgctgtctgtcatacaggcgcttggagctgctgagctttcctgaaaagggggacccttccttaaaactctaggaactagagtggcattgagatggaaatactcttatgctcattgaaactgtccctctgaacttctccctcgaaggcccgccacgatgactatcatggtggaggacatcatgaagctgctgtgctccctttctggggagaggaagatgaaggcggctgtcaagcactctgggaagggtgccctggtcacaggggccatggccttcgtcgggggtttggtgggcggcccaccgggactcgccgttggggg

SEQ ID NO: 5133 - DNA, 1015 bp, Homo sapiens
ttttttttttttttttttataatggcaagaaaacattcctaccaattttatttatccaggcatgtcttaaatatggctgtttgttacatacagtgattctgcagacatgttgacatgacagtgaaatacataaatatgtaatgagaaaaggcttaactgtggataaaacaaagtcattacaattaaagactcgagtttttggcatttccaattgtagtcagggcactgaggtcaaatttaactacaaattttgcattgtctacattgaacacatgattcttaaaagcctcatgttttatttcagaacaggcctcaggaagttgcagactgtgcaggaggttgtttagggcacaagtcatttctcccaatattaacttataggcagtctccaaaacaggaatattcttcaagctgagcattgcttgataaacagcatgggctacagcaacaacctctttttctttatgataacgcaagaatagtagtttagatgatggtataaacagtttttctacaaatgatgatggcagtttcgtatttatctgttcaacaatcagcgtgagtaaattcaagactgagatgatataattggtaccacaagtctggcaattctccagttggtctaatccatatgtaatgaccatgtcacaatgtatagtcatgctaggatccaagctgccgaggcaaaacaccaacacactcattagcagctgtcaacacagcctcagaaaaaaacacctggtttgcagccgtcacacatctcattactctgtacagaacctgtgtctctgaagcagcggtttcccctcgaacttggccgacaccaccaggactcggaagctacaggagcaacggttgagggtcgtgtcctccacctccacatgctccgcctccaggtcccgctgcagcttctcgcggaggtattcggcgctgagttccatggcggcagtccagctggaacggcagcccagcagggacacaaccccagctcgggcgccggccacgctaccttgct

SEQ ID NO: 5134 - DNA, 415 bp, Homo sapiens
gaatgagttactctccactggtgattaggtaatacagtagaatgaagagttgtataatatattcatttacagctgtggattgtggtaaggactatgtccacagtgatattccaaagaattgggtttatatttgtgcttcatctgttaatcccaggtgtcctcatgttgctgaaatatttagatagctaaaatatcccttaatttcacagatgaccaggaagaaattaaccaaggttttattgactgccatgtatgtcccatgatgcatttctgagcaaatgcttatcctagagaataactctgtatgaataaaattgcttaattgagtctcttactaaataagtaactagtgccatgcttttgtgagctcttggtatggcccatattactttgttttttgtttttgttattgttg

SEQ ID NO: 5135 - DNA, 744 bp, Homo sapiens
gctaactatctcacaatataggtccccaaccactgaccaaactccagtccaggcagccaccagctggcctggtcttgctgcttcctttagcggcttccaaggtccagggacagggggtctgggccaccaagaggctctgctaggctgtccctgcagccacagccaccccactggacccctgcctcccatctgagaggacagccctcttcctgggagctgggatctgacacttgctgataccaacggcagataccaggtcaaggattcggtgacttgaagacaggcctcctctgttgctttgagtcaatttctagtacctgggcctaaatcttgactgcacaccggtcatatttatttgaggtaacgagatgtgagcagaaacaacctgtgtcacacctgggcagaagctttaaaggccagtgctgcccttgttggggaagcaagtatagatatgaatcgttccacaacgcggagcgccccctgccgacccatgctgggcgtgtactatagatgaggagactgaggatcagagagataaagtcacctgtccaaggtcatactgtggatgtagctctaacccaagccctcccgactgcagcacaaattctcagccactaccctattagccccttcatttgaaggtgtcttcatcattgccaagattccttttcctcccggccccctaagtcttcaggattccctcatcttcatctccccagagaagccatgacaccatcttctcca

SEQ ID NO: 5136 - DNA, 772 bp, Homo sapiens
cagagggagccgatgctactattttattgcaggaggtgggggtgtatgcaccgcacaccggggctatgagaagcaagaaggaaggagggagggcagagccccttgctgagcaacaaaggccgcctgctgccttctctgtctgtctcctggtgcaggcacatggggagaccttccccaaggcaggggccaccagtccaggggtgggaatacagggggtgggaggtgtgcataagaggtgataggcacaggccagcccggtacagacccctaaggcgtcctgacaggtggatttcgacaaggtcattgtgcccctgccaaggcacagcgtagatctggaaagagcagaatgctttccttttcagatgtggctggtcatggaaggggcagttgtccaagttgggctgggtcttggtacacgtggttcggcccagctccacgtccaagaagtagttcaccccagctacgatctgcttgcgggcgcgcaccacctgcagcgcgcggctgtggtacatgtcgttgctggctttgttgtactcgccgacggcaaagtccagtgcacgccgcacaccctcctcctccacgctggcgtccatggggcctcccaccaggcgcggcggcttgccgggactggagccggccgcggggctcagcggccagggccacggccaggatggccagcaggagcagcggggcgcgcaggggcccggccatggtcggctaggacgcgggacgcggggagtggggcgcaggcgagaggctggagctagataga

SEQ ID NO: 5137 - DNA, 517 bp, Homo sapiens
ttttttttttcacttgacaattttatgattaaaaccaacaaatggaaaacagacagtgttgggtgttgctgacataatcaagcatttcgtgcggacccactcaaccaccccatttcttggatctatttctggatgtaccaaatgtgtctgaagatgaactcactttcgcacatcaaagatgtatccagtgttaaacaccggagccagaacccaggtgaaaatctgctggttcagggcaacaccacttccggctttattaaacactcaaaagtcaggttcccaagaaacgcttggatctatgcgcaagtataacatgtcaaaactgttaaatgtgaccatgagaaaaatgacatgagcatgtttcatctttgggtagagggtggtggttttctgggaagacactgtctgagacaccgagtagagaagtcaaatggaagacgtttagcatgtgcttaattcttgcttgataagaacaagaaatcccggaaaaggtcacccacagaacggtaagcaaagt

SEQ ID NO: 5138 - DNA, 414 bp, Homo sapiens
  misc_feature (1)...(414): n = a,t,c or g
ttaaaactcaagtacattttcctcatctccaatattttagaacggaataaaacataaactgaatcaaattttgaaactgtctttgacaagataaaaacaccaaatatctacttaaaattcattttgaaaatacaatctcagataactcagaccaaaagtgctgaccattggttttctccagaatactcagttctaaatgaacaaaaatttatatggcacttttctagattttgagaaacatttttgtttcttagaaaagttatttctaacaatatattaatagagaaatagcacaattctattcagcgcctaaattttacgagcgaaatatgaaattttatttttatgctgttatgtatgatcctggggctacaatagcacanctctgggccgtacnatcgggattgctaaata

SEQ ID NO: 5139 - DNA, 1922 bp, Homo sapiens
tttttttttttttttttatacttatgattagttttattataaaggatacaaatcagctccacaagccaaggaagacacagggaaaggtctggaagggtcttgagcacagtgctcccatgccccctcttcgtggaattagggcacactgccctgccggcatagccacagcttcaccacccaggaagctatgctgagctttagtgtccagagtttttattagggtttcatgatgtactgattaaagcactggccagatgattaaactcagcctccagtcccccgccccataggtcaggctgactcaaagcctcaaacctctaatcacatggtcagtctgtctggtgaccagccccagctctgagtcatcccaccttttagcataagctcaggtgtgatcccatggcctcacaaataacaaagacactcctattaccctggaaatgtcaaggactgaaagtctccctcccaggaagcagggacaaaggccagttcaattctttagacaacctccaatccacacctcctggaactcctaccccaattgaaacaaggataaaatccactgaacatggagggcccattgctggcctgaactatttttgtttcttttttttttttaaagctttttattatagacattttcaaacatatacaacagtaaaatgaataatataatgagccctcacacctccatccctagtaactgattatccgtgtgtggcttactctttgatcgatactctcctgctttcccctagcccccacagttagactgtcccgcagcaaagcccagacagacatcctatcggtctgagaattccttatcaaaagcttcccgaagaggaactctatatagggcaggactaagtgtgctggctataggtctgcagaaatctcaacccttgggagcccttgggtggggcctgggcaggtccctgggcagtagccgtctgtagtgggcggctcatctgctgacaacagtatgacgaacaaatagcattttgtacccgcactacaatgcaggagaacgccaaacaccgctttattgcattcaaaccttctaaggcacgtcagccagccctggccttgtctacagccatgattatctccttaaagagttaactctaaaaaaatattaagctcaagaaataacagctcaaatactcctaactaattaaaatcaatagtgagaggcagaatacggtaaaagataacatattagtattattgatcacagatcaatttcagagtacttaaaacaggaataatcagctaccacatcttgaaaaatacaaagacttgatcctaaccttttatttatcatgccacacggactgagacagtccccagtacctgggtctaggagagttattttatgtttgtgtttctgggaatttccgatacttcccagtgtatcagagtgttcccctcacacatgctagcaggcatctccccactaatggaatagcaagagtggtgaacagagcgatcctctactttctcatcatattctgcaaaatgagaagtcagatggatacaaaggttcctccaactctaggactccagggttgtgtggcggccctgcaaggctaggttatgtaaggtctcaccattgcaaacagaatggttcaagacagcaaggatgcactcctcaatttacaactccaaagcaccttgcacagagcttggctttggttacctacttgactctcttttaaacagagggtcttatgcttccctatcctgcagctgcacatttgccagggaagtggcctcactgttgccctcatttctgccagaagagagccagagcaggagccatggatttatctctggcattctactcctccaagcccagctgtttcccaagtattaattggtttcagacaaggctttcgtttcagaaaatcaatgaagatgct

SEQ ID NO: 5140 - DNA, 795 bp, Homo sapiens
  misc_feature (1)...(795): n = a,t,c or g
cttgtgcctaaacaacctcctacacagtctacaacttcctgaggcctgttctgaaataaaacatgaggcttttaagaatcatgtgttcaatgtagacaatgcaaaatttgtagttatatttgacctcagtgccctgactacaattggaaatgccaaaaactcactaataggggtgagtctttaattgtaatgactttgttttatccacagttaagccttttctcattacatatttatgtatttcactgtcatgtcaagatgtctgcagaatcactgtgtgtaacaaacagccatatttaagacatgcctggataaataaaattggtaggaatgttttcttggcattatatttaacttttcttcttctttttccttgacaaatcttgataagtttttttatattagttttattttctagaaaacgtcttatgaatttctcccatttgctctagcatggcttatagaaaatgtcagtgtttcttacagctcaaatttgtatagttgttttaaaatgcggtctctttcttcttcccctggtacttttttctttctgtctactgaagttagttcttatacatggtcttatattttggctgtctttttttccctaggaacattcatannnnnnnnnnnnnnnnnnnnnnnnnnnnnnnnnnnnnnnnnnnnnnnnnnnnnnnnnnnnnggaatactttttttttttnggaaanagggtttaactntngtgncccagcntgnaggncaagggcccaatntnggttngtngaaccntcngcttccggggancaannnatttt

SEQ ID NO: 5141 - DNA, 357 bp, Homo sapiens
atttaatcattttttaaaaatctgtgatgctttacctgggcatgtctaggcaggtcctcctttgctaggacgtgcccttttctgtcccggaatactctaaacttggcattttggcagcgtgaagttttcccgttgtgactttctccttgttcccttttctcctccttctttgcagacaatgagtagccactgctgtttgccctggcccatcaatgagaagatctgctcttaggagccctgctttcctgctgaaggccctgaaatcacctgtgttccaggccacctgctaacaataaataatggctgccctgatgtgggggaattaggctcaagtggtagagcgcttgcttagcacgc

SEQ ID NO: 5142 - DNA, 407 bp, Homo sapiens
aattcggcacgagatagattatgttttgtaagaacacaaagctcctgtttcttgttagtctttgactgaacttgacactagttaacagtctggggaccagtgaaaggttaatatgtactgtaaaattcaattctcagatattcattgtcatgcttctaattacacttctttttggccaccaggccaaattcaattgtaacagtacatggaggttcacaatatgtattcacactggagacgtcggcattgtttctattgatgctaatattctaggttgtaatagtgcactacttttgacagctcaatgaactagccaaatatctattttgggcagttgaaggatacaaagcagtatagtcattgatatagttcgggatgtttggcccttgtccaaatctcatgttgaa

SEQ ID NO: 5143 - DNA, 652 bp, Homo sapiens
tttgtcacagaacactgtttgcagtagaggaaactggcattgcagtctggtggtataatggcttgtccacataaaccagtacatgttcatcctttagcgcaaaaagccctaatggcgcgtaccctattaaaattcaggacatctccaatattctctctctctgtttttctttgtcatcttttttttttttaaataaacattttcaaggtttgtccaaaagaaggccatataggttcttggctagcggaagacaattcagaacagctgttgcacacttggactgtcaccttctccaggctggcagttgatatcttattttttttccaactcatttttattaaaaaaataaaaaaatgctccaactatcagctttacaaaatctctaagggaaacacaagagcaaggtgctgaggtaaaaacacctgaggtagcttcttctgtgtgtttttctcgttaaaaaaatctgtgaatttaacgccctgggccaacaaccttggtaaatttctactttcctccacattttttttttttaaagaaaggaatcattttgctgaatattgatggcttatacaccaaaatgcaaaaagacaaaatacattctttcattgtggaattttttctttgtttggttgattggttggtttggtgggtt

SEQ ID NO: 5144 - DNA, 557 bp, Homo sapiens
  misc_feature (1)...(557): n = a,t,c or g
gccttgaggtggaaggcgggaaaatggcggattcctcggggcgaggcgctgggaagcctgcaaccggccccacaaattctagcagtgccaagaagaaggataaaagagttcaaggtggaagagtgattgagtcccggtatctgcagtatgaaaagaagacaacccaaaaggctcctgcaggagatgggtcacagacccgagggaagatgtctgaaggtggaaggaaatccagcctgctccagaaaagcaaagcagatagcagtggggtcggaaagggtgacctgcagtccacgttgctggaagggcatggcacagctccacctgacctggatctctctgctattaatgacaaaagcatcgtcaaaaagacgccacagttagcaaaaacaatatcaaagaaacctgagtcaacatcattttctgcccctcggaaaaagagcccggatttatctgaagccattggaaatgatggagtctcagacactactgctgacgctactatccgtaaagattggggaacaatcttgctgagtttgaaanaaggnannaaagaattt

SEQ ID NO: 5145 - DNA, 1098 bp, Homo sapiens
  misc_feature (1)...(1098): n = a,t,c or g
ttttttttttttttttcagcattaatataaagatatattccataaaagagtttggcagtcaaagagaagcatcacacttccgaaaaacacaagcattcttctcctagtctacagagaattgtgtaaaaaaaaaaaaaaaatcatcatcaacagccaccagtatacaccacactagaatgtacactccggcaagtaaattaaggttgcagtccatccctgaacgatgagaagtggtctgagctatggcaaagtgttagaaagtagcccagctagacaaatgccccagctatccccaggggagttattcagtacttaagacttcatttccaagagcagccccagaaaagccctgacaggaagggtggaccagtgatcaccgatatcccattaggggcggtcaccagaaacaaaatgcctggagcttctgagcagctgcagcctggggttgtggctaggcacggggtgtggttgcagaagaacggctgtctccggggagaggcaaatggcaggccagccagccctgggtacatggccacaagaggagccctggccaacagtttcaggctggccatcttgggctggggctccctgggcttgcagtggggagggtcaggattcaaattctgggtgacaatttcagtagcaccaagaccagaagacagtgaggccacgctggggagtgggggagtgcttgtatgtgggatgcatggagggaggctgcagtatgtggaggagaaagagaggctgttgtgggctggttcttaagacactcaaggggactcaaagggtcggctccagccatggacactatctaaggctgctcagaggagaatgctggaggagaggaagaggaagtgaaatggtgtgagaacattcttacccctataaataaactatttacacactttaagaaaaggagagccggctctcagtgaagaaccatgcnccaaccgaccggcgccatcagggcttaatgctatcaagaccagaggcagttccggcgccaggagaatagctggtggacacagggggacagtggacaaggcactcccgtggcacaagtccacgcactggctcaggcttacttcacttgaacat

SEQ ID NO: 5146 - DNA, 368 bp, Homo sapiens
  misc_feature (1)...(368): n = a,t,c or g
gagaaacatattgcttttgtgttttttaataaaaaatatttcaacttttcatttagaaacagtgggtaaatgtgcaagtttgttacaagggtatattgtgtgatgctgaggtttgaggtacagatccnnnnnnnnnnnnnnnnnnnnnnnnnnnnnnnnnnnnnnnnnncaacctatccttctgccctcctcacccacagtgttccagtctgcagtgtctgttgttcccacctttgcatcctgaggtactcaatatttagctcccatttgttagaacatgcagtacttggttttctgttcttaatttgcttagattatggcttccagctgcatccatgtggctggctgcaaaggacatgattttgttc

SEQ ID NO: 5147 - DNA, 1534 bp, Homo sapiens
gtacagacaacaccaaaagtagaagaagaacaggatttgaaatttcagattggagaactggcaaataccctgacaagtaaattcgagtttctaggcattaatagacaatccatctccaactttcatgtgctgctcttacagactgagactcgaattgcagactggcgggaaggggctcttaatggaaactaccttaaacgaaaacttcaggatgcagcagaacaactaaaacagtatgaaataaacgccactcctaaaggctggtcctgccactgggacaggacctctggaagcaactactcctgattaacctcggtgaagttaaggaaaacttcgtggctgaagatgtgaatgaagaacaagattactatcctctgccagcaggggatcatagacggtatttctatgtaaacgaacagtcgggcgagtctcagtgggagtttcccagatggtgaagaggaagaagaagaaagccaagcacaagaaaatagagatgagactcttgccaaacagaccttgaaagacaaaactggcactgattcaaattcaacagaatcctctgaaacttccacaggttctctttgtaaagaatccttttctggtcaagtttcttcttcatcactcatgccacttactccattctggaccctccttcagtcaaatgttcctgtgcttcaacctccattacccttggaaatgccaccacccccacctccacctccagaatcacctccaccccctcctccaccacctcctcctgcggaagatggtgagatccaggaggtagagatggaggatgagggaagtgaggagccccctgccccaggaacagaggaagatacccctttgaaaccttcagcacaaaccacagttgtaactagccagagttcagttgattccaccatctctagttcttcttccactaaaggaataaagaggaaagctacagaaattagcactgcagtggttcagaggtcagctaccattggcagttctccagttctctatagccagtcagctatagctacaggtcaccaggcagcagggattggaaaccaggcaacaggaattggacatcagacaataccagttagccttccagcagcaggaatgggtcatcaggccagaggaatgagcctgcagtcaaattaccttggactagcggcagcacctgcaattatgagttatgcagaatgttctgtcccaattggagtgactgctccctcattgcagccagttcaggcccgaggtgctgtgcctaccgctaccattatagaaccaccaccaccacctcctcctcctcctcctccaccaccaccagctcccaaaatgccaccacctgaaaagacaaaaaaaggaaggaaagacaaggcaaagaagagtaagaccaaaatgccatctttggtaaaaaagtggcagagtatccagcgtgagttagatgaagaggacaattctagttccagtgaagaggatcgggaatcaactgcacagaagcgaattgaagagtggaaacagcagcagctggttagtggca

SEQ ID NO: 5148 - DNA, 439 bp, Homo sapiens
tcccatcacatgggtctgtgggtgagatatgttatgctgttcctccctcgggaaggttggtattgaggggtgccttgctccagaggcgccagcccagcatctgtggtgagttggctaagatccagagtgacctgctcagagctccccagaggccttcactctttggggcagtctctctagggtcactttctgaatgtaccttctacctaaagtatacaaacacaaagagccagctgagctggttctagtgtgaaagccgtaagtgccacccagcaggcgtttgaaaacaagaaatcattcttctgtggaaggagaatgtgccatctcagctaccctcagtccgccagggagcccagtctgtgtattcatatgaagttgtgaaaaccatgagtgtgtgccatggccattcgtgtctacacacagccactattgttcctgt

SEQ ID NO: 5149 - DNA, 363 bp, Homo sapiens
gcaaccgtgctgtaaggcagtagctaaaaacagaaaatagtccatcgggaagggtaagatggctttctgctgagcacagggctagaagtgacagcccagtgggccttccaactatatgccagggtgttagatgagtagagaggagaccacccaggaagtctggacaaggggtctggcatgagctctggagaagatatatttgaggaacatggggtatgctagtttgttgtcctgaattgctgtagagaagataatttaaattgcatcttagaagacgaccctgagggtgaatttcaacttagggcaattgttttagtttgtttcttattggtttaaatggatacttgaagctggtaatttata

SEQ ID NO: 5150 - DNA, 839 bp, Homo sapiens
  misc_feature (1)...(839): n = a,t,c or g
actttttgagaagccaagtcaatcatcttatagaatgactacattcaggatttgtctaataatttcctcatgattaaattccagtttaacactttgtgcaagaaaactaaataggtaaaattcttaagtcacatcaggaggggcataatgttagggtgttccaccttgggtgatgctaaattgaatcacttggttattgtggtgaccattgtaaaggtacattttcccctgtataattgatacctcttctgtaggattatatttaaatccttgtagaagatcctattccacaatagcttttcatccaatagttttagcatctattgatgaacgttacgtgaaaaatctatgaactgctctttatgaacactttttaaagcctttataaaactattttctcttactgtattttcactttttgcttaacctaaatttggccctttttaaaaatcctaaaatcatatggcagttttagaatggtagctggttgctgctatagtttgcatgtttgtcccccaaaatctcaggttgaaatttgatccccagtgttgggggtgtggcctaatgggaggtgtttgggtcatgaggacnggatccctcatgaatagattaatgtcctccctggcgagtgagtacatcctcactgtaatagttcctgtgagagctgattgtttaagagcttggcacctggcacctccccccactgtcttgcttcctctctcaccatgtgatatctgcctatgccgactcgcttctgccttccaccatgagcagaagcancctgaggcctcagcagatgctcagacatcagaatcgtgagccaaataaaccttttccct

SEQ ID NO: 5151 - DNA, 1412 bp, Homo sapiens
  misc_feature (1)...(1412): n = a,t,c or g
aatatctcatgaatgagtttgaagtttgcttggattttgaaatgaatgggactttgtctttattactaattcaccaaatttgttgagcgcaaaagcaattaatgtagtttaagtatttagtatgtacagttctctgtgttaacagctgagaagtaagcaaccttttctgactgcatatggtgtattcctcttttgagtccccataatattttataaattgtaatgccccatcttgtactacagttgtcttattcgtattgtttataaactttgagggttaggactgggtcttactcatctttatgtgccttccttatgcttcaaagaatttaccatctaatggaagagaacatttgcaagttggctccataccaagctccttccacatactctactcatctgaactttgaatgcagaatctttaaattgcaaccccacatactaaggtcaagaaagaacttaatgggaattaatctccacccattagctttaccctgacatcaggattgccaaatccaatggactcttgtctattcttacgtgacttctgctggaaaatgcgaatgttgaccatcctgccacttggaactctcttcccactcctcacattgcttttgctaccactggaagttccttctgtttcttgtggagtaccttttgctgtctgggacttgtagataatggtgtttcctagggctccctccagggccctctgcctcactaactggatatacttttcctgagcaaatcccaggaaacttgcgtcagaccgtgacttcaaatacaggttgataaatgctaaactgtctccaaaccagacttcatcctagcctccacacccagacacccaactgctatggatcaactttttagaatatcctcacttcaaactgaccttacctaaaataatgactttttcccccaataattgcccctgctatattccttatttctgaatggtacctcctagctatatagattatctgaggagcttactgaaatgctgattctgaagataagggggcatggctttaagattctgtatttctggcgagtacccaactggtgctcatgctgctgattgagaaccacttctgaatatagcaaggctgtaaattatccactacgtgccctcgtaattgtcttagttcaagcccagattattgtagtagacttagtatttctttgccttagttgatctgtgacccctccaatatctattccacactgttgcctaagtggccttagtaaaattcaagtctggttattttattcccctgcttgggaatttctcaatgtaggaatgaaactcatttcaggcattaacacataggcccttcttgatctgacatcgtgtttnctctagttagactaaagattccccactatggaggtgtttcatccgtaaggtt

SEQ ID NO: 5152 - DNA, 565 bp, Homo sapiens
ggtcgacctctcgccctttctcctcttcccacgtagatggaatatcagtgaggcccagggtttccactaagactccaagctccagtttccccatctctaacatgagaatattgagtgcttctgtgcaatctgtctaccctggaggaggtctggaagtaagctgggttctctgtctgcagacgtactctggcctcttctgcgtggtggtcaacccctataaacacctgcccatctactcggagaagatcgtcgacatgtacaagggcaagaagaggcacgagatgccgcctcacatctacgccatcgcagacacggcctaccggagcatgcttcaagatcgggaggaccagtccattctatgcacaggcgagtctggagccgggaaaaccgaaaacaccaagaaggtcattcagtacctggccgtggtggcctcctcccacaagggcaagaaagacacaagtatcacgggagagctggaaaagcagcttctacaagcaaacccgattctggaggctttcggcaacgccaaaacagtgaagaatgacaactcctcacgattcggcaa

SEQ ID NO: 5153 - DNA, 424 bp, Homo sapiens
atgcagttaccagacccatcactttaaatccttaaagttagaagctagcaaattttctgtagtgcagaacgtttattgctgtttttgtgtttgaatagtataatgtttgatgcctctcttctgcaaagcgtattcatctcattgactgtgaatctgtatattattctgatggatacagataatgatcttttctcttgtgaggtatcttcatttatgcactgtccaaaaatagccatgtgtaagagtctttctgtatgacgaactacatggaaaagacttctgtggacataattctgaccgaaacccatgaagttacttcagtataagaagaacgttacacggaaatcaccaaatattttgcaactttatttcttctgacatggagtgaacatcaataggaatactttccaaagaaaaatgggga

SEQ ID NO: 5154 - DNA, 456 bp, Homo sapiens
ttttttttttttttaagagtgtccttcacatcatttatattgtattgcacacaaacttttttaactccgtcaaaaacaacaagaacagatgaataaggaagcccagtgctttttgagatagaagccttcttcagaatcacctccctctcttaagaagtaatctggtgaaaaataatggttaggcaaaggcaggtgttggaggatatgttttcccaatcttttagaatctcttgcttaagagacacagaggtgactggagactgagttaccagtatactattcattttccaagcagacgtcaaaagatactctttaatagtggaaactgagggttacacagtaaggttcagacttcagcaggaatccttgttgtcaagtaaaagtttaacctagcagaagcaaatgagacccagatgtcctcacctttttttttttttttaaccctgggggttctaa

SEQ ID NO: 5155 - DNA, 411 bp, Homo sapiens
ctgcacgggcgcagatgtaggcaccggtccgagtgcctgccctctgtccccgcggctgggtctcgtctgctccggttcctgggctcctaattcttggtccagcttcttccaggtctgcgcgtctgttgttcccagcgctctgcgaagcctgaaaaggaggagcaacctgtccagaatccccgcaggacaggaaaaggaggggaaatctcgacatggaaaaactctacagtgaaaatgaaggaatggcttcaaaccaaggaaagatggaaaatgaagaacagccacaagacgagagaaagccagaagtaacttgtactctggaagacaagaagttagaaaacgagggaaagacagaaaacaagggcaaaacaggagatgaggaaatgtttaaaggataaaaggaaagcccag

SEQ ID NO: 5156 - DNA, 651 bp, Homo sapiens
acctctgtgactgcctggatgaagactgcttaggatgtttctatgcttgtcctgcctgtggtcgtaccaagtgtggagctgaatgccgctgtgaccgcaagtggctgtatgagcaaattgaaattgaaggaggagaaataattcataataaacatgctggataatctgcggtaccaaactatggagcctttaaaggtctttatttctaaaaatctgttactctaagatacattttaagcttgattatcatatgacaaagattttaaaaccatctcagtgtgccctaatttttcatcttgggtgctttaagattcactatttgatataaattcagataggctatttttcagtagtcagcgttaagcctgtctggatcaatataaacaagtagggtgtaggcagtcctctatttgcatgtttcccatgggcacaaatttcagtgacctagatttagtttaaataccagtttccttaccaggaaggaaagaaaactggtaaggaaactgttgttgttaaaatctaggttaaaattttagttagcacattgtaactgagtaattacatgaagtacaaacctctctgctagctcttcagtctacaaatcgctatgtaaataacagatatgcttcatgattgtgaccagtcatgtta

SEQ ID NO: 5157 - DNA, 638 bp, Homo sapiens
  misc_feature (1)...(638): n = a,t,c or g
gatttcaatgttttcctctctgctccctttcctttcttatttgtgtatttattacaggaagcagtattcactcaacatcatcctcagtgtctttgccattattctcggggctttcatagcagctgggtaagactttggactgtttctgctcaataacttctttgtgtctttgacaataggcccagccccatcctcagtttttcattttccatctggctgctgttgaattgagcaggcaagagacaaatctgttgaagttagtggaatccccatgtgttcctatgaaagtcaaagtgggtcccacattggccagaaaatttctgagaatatatgaagagagcattgcaagatattaatatagcttttcttcacaaaaagcagtgaactgtttacatttcttactgaatgtttgtcttcattataacaactttacttgagaagttcttagggcatttgattaataataacagacttacaaagcctttgtctgctgatttattttattattccatgataccttaggcagttgctgttttccgatgggtaggatgcttaaatatatttgtacggttgggggtatggggccaacangggtgcctgactactactttaataattattttggcaaagggnttacg

SEQ ID NO: 5158 - DNA, 774 bp, Homo sapiens
ttttttttttttttttttaagtcacaggcgcatttattattgtctggaacatcaaggcctttcctcccctggcagtggcacaagggagggccaactctcaggaggcggccacgctgccaccagcagcaggcccatggggtggcagggtcatgggcggcagaaacagcgccttcagcttgcctgacaggctggcgatctcaggatcctgggcttcgtaggacttgaccaagcgagcaaacttaaggacaccttccccgtcgcagctgaagccataggctttgataacctcctgctggatctgcgtggccacgggcagcacgaattgcagcatcttacccatgtcgttgcaggcgttatcccgagcctcgtccatgcgcactgcattctccggggcggagaacgcctggatcacctccgcgaggaccacctttgcttgctcagcgctcaaggccgccggttgggtcgaggcggacgccatagggcgtctgaagctctaggttcagcggaggtaaatggaaaactcacgaataaagagccacgtcctacaaccgttcccaacgcccctgggagcggaaaggaaacagctatccggcgcagccggaagcgcccaggcgtggcccaaaccttcataccccaagcttacaactgcatcaagaccaccaaaactacccataatttttgcacagtgaaaacaatctatcattggcaacaaacatcataagaggggctttccggtaaaaagccagaaagcctactagacaaattctaaaagag

SEQ ID NO: 5159 - DNA, 569 bp, Homo sapiens
  misc_feature (1)...(569): n = a,t,c or g
ttatttgagtcaacagtagaaatgcgaagaaaattctgtcacctgatactggggccagctccccttcccttgacacatcatctaaagggggaaataatcttctgaagtatcaaataactctggtattttgatgagtgagcaagctggtaagcaaataatgagaaaagtgagtgttgaatttcccttgacataacccttttggaaaatgcagcggcagatgaagaagaatgtgacttatattataatgaaagcaaaaatattttcaaatagattcagggggctaataaacagaaggtctggctatgagtgtcagcctaaaggagagcagagaaaaagatcctagagttctcagccagggcaagatgactgcttacaatacacagctttcatatagggagtgagtgtccctttttcatcctcttaagttacgtaaggggaaggggaaaaggcattcttccaaacacagatcacttcagagtagtctccncttgagaagctagtgacgtgttgccgataaaatgaccggtgccggatccctgttgagatgaggaaccatgcccttggggggt

SEQ ID NO: 5160 - DNA, 397 bp, Homo sapiens
cggacgcgtgggctcccagacctctggagagatccgtgggccagctccccagccccccactgctgcccactccgccacccaaggcaagctccaaaaccacaaaaaatgtcacaggccaagccacactcttccaagcctccagcatgaagagtgccgacccttccctccggggccagctctccacacccacggggtctccgcatctcaccacgaagcaccgccaggacagttttcaaggaagagaaagtaaagggtctccaaagaagcggctggatgtccgtctgtcgagaacgtccagcgtggagcggggcaaggagagggaggaggcttggagctttgacggggcattggagaacaagcgaactgccgctaaggaatctgaggagaacaaggagaa

SEQ ID NO: 5161 - DNA, 1380 bp, Homo sapiens
  misc_feature (1)...(1380): n = a,t,c or g
ctcccaaacccacaaaaatgtcacagccaagccacactcttccaagcctccagcatgaagagtgccgaccnctttctccggggccagctctccacacccacggggtctccgcatctcaccacggtccaccggcctcttcccccaagccgcgtcattgaggagctgcacagggcgctggccacgaagcaccgccaggacagttttcaaggaagagaaagtaaagggtctccaaagaagcggctggatgtccgtctgtcgagaacgtccagcgtggagcggggcaaggagagggaggaggcttggagctttgacggggcattggagaacaagcgaactgccgctaaggaatctgaggagaacaaggagaacctgatcataaattctgaactcaaagacgacttgcttttgtatcaggacgaggaggcgctgaacgactccattatttctggaacactgccacggaaatgcaagaaggagctcctggccgtgaagctaaggaaccggccaagcaaacaggaactagaagaccggaacattttccccagaaggactgatgaagaaagacaggagatccggcagcagatcgagatgaagctttccaaacggctgagccaaagacctgccgtggaagagctggagagaagaaatatcttgaaacaaaggaatgatcagacagagcaggaagaaagaagagaaatcaagcaaagattgacaagaaagcttaatcagagacccactgttgatgaattaagagacagaaaaattctgatacgattcagtgattacgtggaagtagcaaaagcgcaggactatgacaggagggcagacaaaccctggacgagactgtcagcagcagataaggcagcaattcgtaaagaattaaatgagtacaaaagtaatgaaatggaggtacatgcatcaagcaagcacttgacaagattccacaggccatagagattttcttctgagaagaatttgtgtttaattttttgataccaacactgaacattcatcagggaactttcctgaagttcagctcaagactaccctacctgctgtgtttgtgagaagagtaggatcacacacacaggtgcaatcttgaccacacttacctgcaagaggagtaaccagaggacacacttccttccttctttggtgtctgaggagtgtgaaactgttggggtcagttaagacccaacataactctatcagaagaaaactgttgtttgcctttcaaccttgttttacagttctgcagtgtaatggaggacgggcaacgtgcatgtgcaggctcaccactcccaggcctctgacatgagggacatgtgacagtgtcattcagtattatgttcaaaagacatttttatcctgatcataata

SEQ ID NO: 5162 - DNA, 2152 bp, Homo sapiens
aaatggcgtgcccgtctctccgccggccccctgcctcgcagtggtttctcctgcagctcccctgggctccgcggccagtagtgcagcccgtggagccgcggctttgcccgtctcctctgggtggccccagtgcgcgggctgacactcattcagccggggaaggtgaggcgagtagaggctggtgcggaacttgccgcccccagcagcgccggcgggctaagcccagggccgggcagacaaaagaggccgcccgcgtaggaaggcacggccggcggcggcggagcgcagcgatggccgggcgagggggcagcgcgctgctggctctgtgcggggcactggctgcctgcgggtggctcctgggcgccgaagcccaggagcccggggcgcccgcggcgggcatgaggcggcgccggcggctgcagcaagaggacggcatctccttcgagtaccaccgctaccccgagctgcgcgaggcgctcgtgtccgtgtggctgcagtgcaccgccatcagcaggatttacacggtggggcgcagcttcgagggccgggagctcctggtcatcgagctgtccgacaaccctggcgtccatgagcctggtgagcctgaatttaaatacattgggaatatgcatgggaatgaggctgttggacgagaactgctcattttcttggcccagtacctatgcaacgaataccagaaggggaacgagacaattgtcaacctgatccacagtacccgcattcacatcatgccttccctgaacccagatggatttgaagccgtcaaaaagcctgactgttattacagcatcggaagggaaaattataaccagtatgacttgaatcgaaatttccccgatgcttttgaatataataatgtctcaaggcagcctgaaactgtggcagtcatgaagtggctgaaaacagagacgtttgtcctctctgcaaacctccatggtgggtgccctcgtggccagttacccatttgataatggtgttcaagcaactggggcattatactcccgaagcttaacgcctgatgatgatgtttttcaatatcttgcacatacctatgcttcaagaaatcccaacatgaagaaaggagacgagtgtaaaaacaaaatgaactttcctaatggtgttacaaatggatactcttgggtatccactccaaggtgggaatgcaagattacaactacatctggggcccagtgttttggaaattacgttgggagctgttcatgctgttaaatatccctcgtgaggagaagcttccatccttttggaataataacaaagcctcattaattgaatatataaagcaggtgcacctaggtgtaaagggtcaagtttttgatcagaatggaaatccattacccaatgtaattgtggaagtccaagacagaaaacatatctgcccctatagaaccaacaaatatggagagtattatctccttctcttgcctgggtcttatattataaatgttacagtccctggacatgatccacacatcacaaaggtgattattccggagaaatcccagaacttcagtgctcttaaaaaggatattctacttccattccaagggcaattggattctatcccagtatcaaatccttcatgcccaatgattcctctatacagaaatttgccagaccactcagctgcaacaaagcctagtttgttcttatttttagtgagtcttttgcacatattcttcaaataaagtaaaatgtgaaactcaacccacatcaccaccctggaatcagggattgctcactccaggttactgcaaccctaactcactctagtgggaccttgactggagaaactccacgatcttcctgaagaagagaaatggatgtttccaaattccacaataagcaatatgtggtgataatgaaaagaatgattcagtcttgacggtgaatggaagacacttacctaacaagtactgctcatttacactcaaattaatcttgaagtagtcttaaaatgtgtaagaagttaaaacttgagaagcaaaaaatgcctgcaaaaagaagatcattttgtatacagagaaccggatgaatataagcaatgaagatgaacatttattgatcttctacatacaagacttcaccataaggccaggagcagtgctcacgc

SEQ ID NO: 5163 - DNA, 616 bp, Homo sapiens
gatctataaaaagtcaccaactgatgtgtttgaaaagcatccttgtctttatatcctaatgtttggatgtgtctttgctaaagtctcacaaaaattagtggtagctcacatgaccaaaagtgaactatatcttcaagacactgtctttttggggccaggtcttttgtttttagaccagtactttaataactttatagacgaatatgttgttctatggatggcaatggtgatttcttcatttgatatggtgatatactttagtgctttgtgcctgcaaatttcaagacaccttcatctaaatatattcaagactgcatgtcatcaagcacctgaacaggttcacaagcatattgactgactaatagcccaaggaaaagaggagatgaagttaggggaatctatgagtgaaggaaatccccctgtgcaggaggttcaagttctttcttcaaagagtcatcagaataacatggattgaagagacttccgaacacttgctatctcttgctgctgctgtttcatggaaggagatattaaacatttgtttaatttttatttaagtgttatacctatttcagcaaataaaatatttcattgcttaaaaaaaaaaaaaaaaaaa

SEQ ID NO: 5164 - DNA, 525 bp, Homo sapiens
ggcaggcctgcgactccggccttgtccgcgcccgctctcggcgcgacgtctccagccatgaaccggtttggtacccggttggtgggagccacggcgacttcttcgccgccgccgaaggcccgcagcaatgaaaacctcgacaaaatagatatgtctttggatgatatcatcaagttgaatcgaaaggaagggaagaagcagaattttccaagactaaatagaagactcctccagcaaagtggtgcccagcaattcaggatgagagtgcgatggggaatccaacagaattctggttttggtaagactagtctgaatcgtagaggaagagtaatgcctggaaagagacgtcctaatggagttatcactggccttgcagctaggaaaacgactggaattcgaaaaggaattagtcctatgaatcgtccacctctaagtgacaagaatatagaacaatattttccagtgttaaaaaggaaggcaaaccttctgagacaaaatgaagggcagaggaaaccagtagcagtt

SEQ ID NO: 5165 - DNA, 282 bp, Homo sapiens
ctggacacaaacaaaatgaaggtgacccacctgtactgcctggagagaccacctaaaggacatgctgttaatggaggcaaagcaagtgggaaaaaatgctcaaagaatggcctcataacctgagaaccagccctgaaaagtgttctgagatcttatacacaaacagctcagaaatcacagaaaatatattcttttaccatagtggaattaaactagaaatcaataacagaaatgtatctgaaaaatccaaaaatacttgtaaattaaacaaaacactttttt

SEQ ID NO: 5166 - DNA, 1359 bp, Homo sapiens
agcgtcggactaccgttggtttccgcaacttcctggattatcctcgccaaggactttgcaatatatttttccgccttttctggaaggatttcgctgcttcccgaaggtcttggcccgagcgctctagctctgtgggaaggttttgggctctctggctcggattttgcaatttctccctggggactgccgtggagccgcatccactgtggattataattgcaacatgacgctgggaagagctcgtggcgtgcgacaacgcggcgcagaagatgcagacggtgaccgccgcggtggaggagcttttggtggccgctcagcgccaggatcgcctcacagtgggggtgtacgagtcggccaagttgatgaatgtggacccagacagcgtggtcctctgcctcttggccattgacgaggaggaggaggatgacatcgccctgcaaatccacttcacgctcatccagtccttctgctgtgacaacgacatcaacatcgtgcgggtgtcgggcatgcagcgcctggcgcagcctcctgggagagccggccgagacccagggcaccaccgaggcccgagacctgcattgtctcctggtcacgaaccctcacacggacgcctggaagagccacggcttggtggaggtggccagctactgcgaagaaagccggggcaacaaccagtgggtcccctacatctctcttcaggaacgctgaggcccttcccagcagcagaatctgttgagttgctgccacaaacaaaaaatacaataaatatttgaaccccctcccccccagcacaacccccccaaaacaacccaacccacgaggaccatcgggggcagagtcgttggagactgaagaggaagaggaggaggagaaggggagtgagcggccgcccccagggcgtagatccaggagctggcggccgccgatccgatggagaaggggggacccaggccagcaggagacaggacccccgaagctgaggccttgggatggagcagaagccggagtggcggggcacgctgccgccttccccatcacggagggtccagactgtccactcgggggtggagtgagactgactgcaagccccaccctccttgagactggagctggcgtctgcatacgagagacttggttgaacttggttggtccttgtctgcaccctcgacaagaccacactttgggacttgggagctggggctgaagttgctctgtacccatgaactcccagtttgcgaattatagagacaatctattttgttacttgcacttgttattcgaaccactgagagcgagatgggaagcatagatatctatattttaatttctactatgagggcctgtaaataattctaagcg

SEQ ID NO: 5167 - DNA, 1165 bp, Homo sapiens
aagtgtttgtaatggatttgtatttttcttaattttatgctctttagacgtttaaaagaaccaaaaaagaaacttttgcttcttcgttttcggttgggatttgcagtttaatggcctcagatccttctccagatccccagggtttctttgtcttatttatggagaaaaaccggtcactttgtccagcgcactgtgaggcccccactcaggccagccctggcccccccttggtacttggaaccgaagttacagattatattaaaataataatgtacaaaactttgtttttttgccttattatgcagaagtgtaatttcttttttggtttgtttttttaaaagcaaacgaaacgtgtaaatagtctgttgatataaatatatgacgttactaaattcttaatctagatagactttataaaaaccgtttccagaaacccctctggttgtttgtctaacatggtcacaaaaacccagggcgctgctggctgtaaacattatcagaagtttaatggcagcaactttccttcaactatggcaaggcgcttcccggcggctctgctggttgggggaggaaggttccgccagcgacctcccagcccctgggtccgtggaggggttgggtccccccagcagagcccctgggccagcagaacagcactcctgggcggctcctgtgggcttcaggactggccggctccagccgcaagggcgatgctgtggacgtttgtgtggatggtgcagtgttcttggaatctgtagaccagatcggtggaggtatagaagtgcaagagtctaaaggctgattaacacatacacacacacacacacacaaaatcactgctgtgtgttttcttccgcctgaggcatcagcgtcacctcggtgtggtcgtcgcctcccaggcccttggccctggcctcctctcagtttgggttttgccctcacccacatgagcccccccatgccctgccccccttgcggccttttgtgttccccgatgtctgggctgtgtcctgccgggattcccagccttcggggtcagccgtcgagccacttgctttgctcagttctgtgtttcagccacatttccacggtggaccctgtttgttttaaatattctgttcccatgtcaatcagtgacgataaatacagccttgatttggatgaa

SEQ ID NO: 5168 - DNA, 338 bp, Homo sapiens
ccggcccggcaggtgctgtccttattcccagcccagtcaagagctaccggggctggctagtcatgggggagcccagtagagaggagtataaaatccagtcctttgatgcagagacccagcagctgctgaagacagcactcaaagatccgggtgctgtggacttggagaaagtggccaatgtgattgtggaccattctctgcaggactgtgtgttcagcaaggaagcaggacgcatgtgctacgccatcattcaggcagagagtaaacaagcaggccagagtgtcttccgacgtggacttctcaaccggctgcagcaggagtaccagggctcgggagca

SEQ ID NO: 5169 - DNA, 1351 bp, Homo sapiens
ttttttttttttttttgagaattcttctgtattttattgcactcaacatttaatagaagacatttacattatttttagaaaatccaccgatgttgcacaatggcacatatttgtaaagacaaggctcattaattcagatatttggaattcaaaaatatttaaagttaaccacagcataatgaatcctcaacgtccagagttctacaaaaatccagcaaaacttacttttactcattcatcagttctatgtcactccttagtttccctaaaaaaatatggctttataaaaagtagcttctataattcacaaaatgaagagttttattataatttgagtatcatctctgtatcaccgacagcacagctttagaaaattattgcttttcttattatcttattatttcaggtttcattacacatcgagtacccatgcagacttcactacattgtataataactatgatctatagtgataaaaatatgggaagtatctttgattttaatcctaaaagcagggggaaaaagtcaccttatcttaatgttaacaaaatcaagagctacccctaatatatcgatcaaaccacttcttatggctttgccttatagttgctcatggtcctttcaaaatgatgtggtagctaccttcttttctgacaaaggattattttcaacagagcaattatttctgagcccaaaataaaccacattaaataagaagaaaatcttcagtgtagaaagaaaaaggctcattgccgtgaaatagcagcaggcatcgggctctgtgagcttttcacacatcctcaatcaacccagctcaaggcgttactgagttcatctagtaagagcactgagcggtctctagtgctggaggggaattactcaattagccaaaggcagaataatctttaagttatgcaccagtaatttatacaggttttctaaaatttaaacaaatgctgaagagactatagctattatatgattaatctgaggtgccaacaaagcatttttgcatgataatagtagggccattctttttccttgtgtcttaacaaggaatttcagctttcccctctcatttaaaaaaataaataaatgataatttaaaactttcactgaaatattaatttttctaattaatcagctaaaagctacaaaaatttcaaaagtgttaatctgaacacttaaagctaatgtagaaatttttgataagaatatcagtgcaggtatatacaactcaaatcttcacagctaatgatgatctctgttagcgtttttaagagtgctaacacaaagtactcttaatagcttttaaatcatgtttaacacagtgtacacaagtcagtccaac

SEQ ID NO: 5170 - DNA, 415 bp, Homo sapiens
tcgaccctgctcagcatggctgcgtttagtgacttgttctcttcagtgtccggaggctgcactgcagcgcagccgcttgcggcgggcggccaggtggcgactacagcagggactggctgccaacccctccggctacgggccccttaccgagctcccagactggtcatatgcggatggccgccctgctcccccaatgaaaggccagcttcgaagaaaagctgaaagggagacgtttgcaagacgagttgtactgctgtcacaggaaatggacgctggattacaagcatggcagctcaggcagcagaagttgcaggaagaacaaaggaagcaggaaaatgctcttaaacccaaaggggcttcactgaagagcccacttccaagtcaataaaaagcaactcctgcctcccttcaaaaa

SEQ ID NO: 5171 - DNA, 405 bp, Homo sapiens
ttcttgaaagaaacatttatttatgatctttattggtgaaataatttcaaacaaatccagaacaggttctcacactttgagcctttagtgcaaaaacactatgccatgcgggaaataaaatgcttatccagtggagcgctcccctgatgcattgaaatattaggatactcaagcagaagacgacttatgtgacagaaatctgctcataaatctgcttgaaaaagggcatgataaacctcatattaaggtttctcacaacataaatatgcttaagcaacttaattccaacttaatttcaaaacaccccaggaatcaactatccctttaaataaaaaaaataatcaatttatattcttcttaaaagaactccaacaatttaaaataagttccaattccatatatata

SEQ ID NO: 5172 - DNA, 526 bp, Homo sapiens
tcataaagcttttcaaagcacttagtcttctacttccctaactgaaagtcctcctataatcaatccctacccccttctagaagtatcttaaaagaaaagcaaggtgattgtaagtattaaatagaaatctcatcttagtttatattcagcaaagtaagaggcaagagaagaaaactgcagccttgacatctgtcatctgagaaaggacatctggtttcatgttaggcacatacatgcatgtgtgtgccatctactgatgatttgtacacagctggacctcgtgtgtttgccatgctcagctctcatttgcttttcaaggatacctgggatggctgttctcagagagtacttacggggaacagactgccttttagtaacaagggatacttgggaaatacattgtgagtatgatctatcccagattgctggggaaataaaggagggccctgattatatttggtttattcctcactaaatgtttaagaagtaaatgctcccaaggcatttgaaatgaacatagaaacat

SEQ ID NO: 5173 - DNA, 2140 bp, Homo sapiens
  misc_feature (1)...(2140): n = a,t,c or g
ataatgaaagcaggaagtcatgtgtacaaagtcattcatatgaaaagaataaacatccacattccttttctttgtccttgacaaatatttatggaatgccggaaattatggaaaaacaattccaatgttacgaagtccaaagaactggaatgagaaaactcctcacggcacattatgctgcatggaatgacaatcatcctcggggaattagggcagcatcttctaccacttttaaaggctaccacgagacggggtggaaatgccaaaaatggcacctcatctctgatcaaagattcagagcatgcaagtgttgatgccatgaagagtcccagccttctccccactaaaataccaggcaacgcttagcagctgctgtcctaacaggctactttctgcaactgctgacgcaggttagttcatgtggttaaaggtcagaacgctggccccttacagagctgaagtgctcccacactcatcactggctctggagggaaaagaccactagctgtaacttcctacaaaactttttttccacaaaatgtaaaacaataacaaaacctacctgcccagggtgataatgccgtagccgtgactttaaaacttgtaactagcagagtaaaattctaatccctttctaaaagaattcttataacccttagcacatgaaatactgctctcaaaatacttccattcagattttaagcatcttgttcctcagccatgcaacaatttctcacttctctctcttcctaatttgttttctcattggctttccaaaggaaattattctaaaaaacatcagatgcttagtatagaatttggaaaggaagataaggttgagcaagttacatcatatgctctggtttgctgccaaagtatattgttgctgtgtttcttaacaggaaagtggacgagaattgttttagggctgtgcttggcggggggtagtgaatcactaatggatttggggagagactgttcatgctggttatgtgagccaactgcatatgnacaatcattctaagccttctttggacatgcaactatttctattccacaactggtagttttaactctctcttccttacctacaccattgtcattacaatgtctagtaggaattgaagtataccagggacattttccaaacactcttttaagtcacctggatagtggtgaagccaccagcaagccattgatgtagtgtgtgtgcctggcgccatctgaaaaaggctggctgaccctggttccctcacacctaggtacaaatactcaattcttagacacaaaagccttagcaagtgtggccaccaacacacacacaccttcaccagggctatgtcagaagatgacctagtgctggttcctcatggctcacagagccagggtttggagagcggctgctgcttctatgctggccacttggagcctagaatccaagcctgaagtatgtgtgtgtgtggggtggggggggtcacaggaccaggggtgaggcttcctgcctttgattgtgcgagctgccttggggcccctgccaacaanacnacagccagtgttccttgaaaaactccacctcccagaacctgaaggaaatatagctatggtcttttgaccatttctatgatgaaagctgtatcttctgagatacttgttttatgttggaaagtcagtaaagtgaccactaagagtcaaactcttagctagaaatgttaatagaaagtctgatcaaagtgtatattcaatgaggaacaagtgatattaaagcaaagttaaacttcatgtaactatttttatttcagtggattccaaagcatgagttgggctgcttttgaatagtgggagacgggagtttaccccgatcacagaaaccataccaactgaaagacaaatcagcatcttgctggacgacccctcacagagctcctagatccttgaagtgtgaacttcagcagctgagaggtaacaattgtacacaaatcacactatcatgctccaacgaatgatgtggcccttatgaaacaagatgttagaatgaattctttatagtctcagcgcaaaaaagattcaagtactgtttaaggtttttgtttggtactactttcttctcttcaaacagtatttcctgaggttaactttcttg

SEQ ID NO: 5174 - DNA, 972 bp, Homo sapiens
caatgaggagagggctgaactcatccttttatatttcttttcaagattggatcagagctcatctccatccagtcttgtttctatgaaggcttcaatctgtttccatgcaaatttgctaatcagagcccagagctgctgggtccctcatctccctcatctattatagattgacttacagcagggagagaatctctttagctcattcctaatggggttgggatcacaatatggtctggtccaatctgcatcttgttgtgtcccaagaccctatctcctccccaacattcttattgcctttggtcccagtaaggaacgaattgggggccagggaggagaacaggggggatcaagaagggaaacccaattccccctttgaaagtgggttctttgaactatgtgtttgggggaagttcctctggatactaatttgaatttatatacctcatgttttgggggtttgacgtatatatatatatatatatatgcatatatatttcataatatttggaaggtttttgatgctagaaaaatggaaacaagagaaccttcaaaaatggtacttagatgggaactggaggccaatctttcataaagcccagccccatagctgcttgctgttaggcctccagccattttgacattggggtggatagtcgattcacctgcctgtcagtcgattcacctgcctgtcacccagttctgtggatgtgctggtgctgagcctttgctctctttccaaatggttacagggatgttgatcagctccaccagagggagctctgatgggaggaattgctctgccatccttgtccctgtgtctcctgtcggcaggcagccattgtatctcaccagcagaccaggagactggtcccaaggttactgcaccacagggcaatttcctgccatagttagggaagggaaacacctgaactaaatggaagagacatcctgcggtgtttaatatcacacccc

SEQ ID NO: 5175 - DNA, 679 bp, Homo sapiens
tttttttttttttttttttcttgttctctgacaggtttattagctttcatgttaatggatgtttttaaaccctgcaaccctctgtcaacttctttccacatcaagaggccatgagatacagtaatggcctcttaagagtcatgccacataaagatgatgactttgatgtcctggcctgcctcctgtaacaatgtgaggctgttttgggtacatgctgtaataacaacaggactatcacaggaacaatgaagcagagaagcagaaggtgcctacaaagttttacctaaatgtcttgtttgtcaggatggagctgatgcgcccatactggcagaacaattagcacagagtagttctgaaaaggaggaagaattcacaaagcatcagttatgggtgcagggaagtcgccatctgccaatgggcaccagagtgtcactgtactggaaggggaaaaggagtgggctggatgagatccaggggcctctctgcccatgttcaaagtcagtagctgctctgcctgccggcatcacagtgtcaacacattttgtgtgtgtctcactcagtctcacacccaagaaagtaaaaacaattgatgtaggaataaggggaatggataaagaatggtacatgcttattctaaagcaggagagcctacagattgttgtcaaagctcatgtctatc

SEQ ID NO: 5176 - DNA, 1571 bp, Homo sapiens
tctcctaggctcaaagctgagtacactcccgtaattttaataatattttaggcaagtcctatgacaattataccaacaagtttcttcaaccccaccaccaccccaccatctctatgctttgcttgcccagactcccttcaccctttcctctgctattaccgcttatggttgaaagtaaaaagcatctccagattacagcaaattcagtggccctgctccatagcctggcctctgctgaaggaagaaaaggggtgaaacatgaacagccatcatgggttgtgatgaggcactaccagaagcccagcttgtgtttcaaaaacaggctcttgggacactttcccagcagataactcttcactggcttgggagaacaggaaggactatttcacaaacaccactgtgtttgaatttctagaggctacccaggccaagaatacatccctgcagtgcttcaccacacactcattgctgcagtattcattgtcccagtccttactcacaatgggaggggttctcacaaccagacctcacacatcgaggctggggtgagagtgccacaggagacccactcaccaattcaacatccatctgagaaggagactcaacctcaggaactacatctgtgatcatctcacagatagtctcaggagaaggtgcctccactgtatggcctcagggctgttgttcataggccgctcaggactactttccacagttggtgggactaaggtagtctgcattttcaaagtgggtagaggcacactcttgatctgcagaggaggaggctgttgctgtaaattgattcgaactttctgaggtggaaggctgttgcatggcctggagtggaggaggctgctgcagaatggtaacttgctgctgagtcgggggctgtggcatctgttgtaatggagggggctgtagtcggggtggacggcacgttgcatagaagcagcagcagcagcagctgctgctgcctgcaacactgaccgagtgacaatctgggcttgttgactgggctggatagtagctgtactggtttggcctagttggagccctcgggaggtcaccactgtggctgggataacagtaaccatccctccttgagacatagtaatagaagagggcaacatttgtttggtaataatcaacttggtgatattgggctgacccccagctccagaagatgcctggtttgccacataggatgaaagggtggagttaacaacaatggatggggacagggcagggtcatgcccacaggcatgtccaatgtctggaccccatactgggctgaaaaactgccatcctgtgaagaggaagggtctgccaggtcatcaaagtggccaaccacatctgagacagccaatgagggatcagaatccaaggagataggtgggatttcaaattcctcatcacccaagcttggtgtatggaatgtctcggcccctgacaggaaggggtgcgaaggccctgtgatcgtcaggtaattgtcatttctccgggaaactccatcttcacacaaccgctcccaccgtctcagaccctcatcgctcccaccgcccccacttcag

SEQ ID NO: 5177 - DNA, 631 bp, Homo sapiens
accgccgccagagcaagcgtccatgagcttgccaagtgttctctgctggctctttcctgccactgccaacacgaggttggaatttggcagaaaattgtgatctccagtccgtgtggtgatgctggtggtgcaggttttgtttgttcctttcgggtggtgacttcggccttttgtttgacctttgcctggttagacccaagggctgctaccttttccttggacggctcatgtcaggtcttgcaggatcagtttaatggccacagaaaggaagcaggacagcagggcccctctcacccacaactggaccagggtccagggattcttagcagtcctggggcactgacctttgccagctacctgggggagggcttgccactggaaaacctttcaggccgcccccatcagtgggctccaaagtaaatggctgaaaacaaaaatgtttcacttcctaacagttttcctttttccactgtgtgactgaaagctcctatatcattttatatttctgaatctataaaacaaaacaaacaagcctgacagtgtctggaggagccaaaggtggcctccctgtccccaaatatattggctatatgagagtaattttacccctctacgtacctaaaggcaccca

SEQ ID NO: 5178 - DNA, 2202 bp, Homo sapiens
tttttttttttttaaaggttaatcagcagaagtcgatttatcgttatttattatcaaaatcatgaccagtgtgtagacatacttgtgaaaatatacagcaacttggggcttataacacatgagcaaagatgacattaacacgtgcactgttcacatcttggggtctagaggtcaagaacaaagatcacagacaagacgttactaaacggacccctgcagtaggtcccgaattgcagaatcatccaattccagcatggtcagcacggagatattcacagaaagaaacccagcaaagtcctctctgagccgctagagtcaacaagcttttcatacacactatggagagcccacgccccacataacccttgagaacacagttccatgtcttggctaacacggctctcaccgctggcctcaacacccctgggccatgctccctctgctcttccatccccaccacaacgaagaaaggtatgaccgcacgttatatatagtaaagaagaactttgaggccgcaggacagggccgcagcagcaagctctctgggtagtgccttactgctccacccacctgagccctgttccaagtgcaaggagcttcccaaatcctagagaatgactgtacttagaaagttttgttttgtttaagagaaaatggctttacatgaatttatgttcctcatggcagatatgttacacttccctctaaacagaaagacaagcccaggtggggcccgggcatcctcgaggaatgaagcagccattcccaccacctctcagggactaacaggtgcatgtggacacttgaaccacgactgtgtccacagctcctcctggaccaggcctggtgcctgagtgtgaagactcctggcctgcgtggcaggggcagctatctgggagggctaaacagcctggaggctgagtctgcagaggaagggggacctgaaagagcccaggtacaggtgcccatcgtgttcgtgcacctcgctgatgtaggtggccaccagcccatcgggatcatgcaggcttctccggaaggcaccgctgtcgctgagttctaggacgaggctgtaccgcggcacaaacttcatcaccgtctcttgactaaagagcttaaaaatcatccttttaatccagggtctctcagataagaaatccagcatggaaaacccagggttagggcggatggtcgacatgcccacccagtaccccccagagctgctgggccggatgttgtctggaaatccaggcatgttctccacaaacagatcagccccgcccttcatcaggccagaaacgtagactcttcgtatcctggccatggttgtttctgccaccaggacaaagtcttctgcaggagacagctggactccattcgggaaccgcagctggtccaataaaacttttacttccctggtcacagtatcatactccagcaggcgcccgtcatctgtgccctccatcaccagaagcaggtagtctcgtctttgccatttgctgctagaatcggtgaaataaatcttcctcccatcctgagtgactgtaagatcattcacaaaggacatgttcttcccctcaatgggtgtctcggaggacagcagcagtttcacttcacgtttccagggatttacttcaaatagtcccttgtatgcatcggccacaaagagagtcccattgggccctgcacggatacccagggggtctcccacacacaggctcatcatctcgggttttgcaagggcccgaaccaaaccgggcaatggtctcctatttcacccatttttcaagttttacgacccggcccatctgctgtccccagtaaacatcacatcccccaatatgtgcctatggactccggtcccaacaagttgattttcaaacagcctttctgcctgtcgcagcttcgtatttggatgcagaacaccaagcaagagcgggggttctttgaagcctgagaggctgtggatctataggagattccagcagcatcatggctccaagcaggggaacggtgagagaaacagccagcatcaagaaggtcactcggaaaactctgccgctaaaggagctgccgtccttagcctccggggcctggccatcatcgtctgtgacgacctgcggccgcaggggccggcgctgtcgcagcccgtccgcctcgctcatggtacgggcgccagcctcacccgcagaaaccacctcgtgc

SEQ ID NO: 5179 - DNA, 631 bp, Homo sapiens
gtgacctttccgagttggctgcagatttgtggtgcgttctgagccgtctgtcctgcgccaagatgcttcaaagtattattaaaaacatatggatccccatgaagccctactacaccaaagtttaccaggagatttggataggaatggggctgatgggcttcatcgtttataaaatccgggctgctgataaaagaagtaaggctttgaaagcttcagcgcctgctcctggtcatcactaaccagatttacttggagtacatgtgaaagaaaacgtcagtctgcctgtaaatttcagcaagccgtgttagatgggggagcgtggaacgtcactgtacacttgtataagtaccgtttacttcatggcatgaataaatggatctgtgagatgcactgctacctggtactgctttcagtgtgttccccctcagcccctccggcgtgtcaggcatactctgagtagataatttgtcatgcagcgcatgcaatcagaatctcactgagccacccatcattgtgaaataattacctcagttgtacaggacttggtgatcaggatccaggcactcacttgtattctactgctcaataaacgtttattaaacttgatcctgctacttaaaaaaaaaaaaaa

SEQ ID NO: 5180 - DNA, 649 bp, Homo sapiens
aggcattttgtagattctgagttggaatgcaatgatgtggtcttgttttggcgtatacagcgcatgcttgctatcaccgcaaatactttaaggcaacaacttacaaatactgaagttaggcgattagagaaaaatgttaaagaggtattggaagattttgctgaagatggtgagaagaagattaaattgcttactggtaaacgcgttcaactggcggaagacctcactcggactcaacactacacaccaggccaccacatggcgccgcacccagcattgacacttcttttaccttgtctgggctctgacatccgtgccaggttgctcttcgtcatggagtcccttttactgagctctgctctggacgctttgtgccagggtgcctctccatcttcatccttcccacccgcttagcctctgcccgaccccagacagattcctttcctcacctggaagccagaccatggcctttgtggagataccctctttaccctggcctgtgcttcgccagcctgcaccaggccaccctcctgcacagatactctcctaagtactggcccaggctaccaacagcccatgtgaacccattgtaacccaggtcaggcattaacacctgcagtaggctaccatggtttccttccaaccccta

SEQ ID NO: 5181 - DNA, 744 bp, Homo sapiens
acggcagccatcgcgctttgcagttcggtctcctggtgtacggccaacgccaagtaggggattgctttccctccagtcgcagaccctatcagatttggatatgtccttcatatttgattggatttacagtggtttcagcagtgtgctacagtttttaggattatataagaaaactggtaaactggtatttcttggattggataatgcaggaaaaacaacattgctacacatgctaaaagatgacagacttgggacaacatgtcccaacattacatcccacttccgaagaactgaccattgctgggcatgacgtttacaacttttgatctgggtggacatgttcaagctcgaagagtgtggaaaaactaccttcctgctatcaatggcattgtatttctggtggattgtgcagaccacgaaaggctgttagagtcaaaagaagaacttgattcactaatgacagatgaaaccattgctaatgtgcctatactgattcttgggaataagatcgacagacctgaagccatcagtgaagagaggttgcgagagatgtttggtttatatggtcagacaacaggaaaggggagtatatctctgaaagaactgaatgcccgacccttagaagttttcatgtgtagtgtgctcaaaaagaccaaggttacggagaaggcttccgctggatggcacagtacattgattaacacaaactcacattggttccaggtctcaacgttcaggcttact

SEQ ID NO: 5182 - DNA, 477 bp, Homo sapiens
acagaactttgcccttaactagaagtttttgagcacatacttaaaaaatcagtagaaagtttgagagctcatttttacccaaatactaattttcatgttatttttgaacagatgcctttttggaaatcttaaaaaagcaaacatttcaaacagttggctaacacgcatgaactaacactcattcagtttttaaattacggatgatatccgtattaacattataatgactctatactacagattgacatggtacatcgtaacaagtccgaaggattcttccttgatgcatctcgacacatccttgaagcacctcaacatggactggagagaaggcacttggaagcaaatcagaatgtacactaaataaacagtcaacttttggggtgtggatggaaggggggtccattttaaaagtgcttttacattgaatttccctcccagattagatcagcaaataaatgaaatttattaaaagaa

SEQ ID NO: 5183 - DNA, 525 bp, Homo sapiens
cggatgacaaggattctttgcctaagcttaaggacctggcatttttcaagaaccagctggaaagcctgcagcggcgtgtagaagacgaagcaaacagtggagtgggccaggatggctcgctgttgtcctccccgttcctcaagggattcctggctggctatgtggtggccaaactgagggcatcagcagtattgggctttgctgtgggcacctgcactggcatctatgcggctcaggcatatgctgtgcccaacgtggagaagacattaagggactatttgcagttgctacgcaaggggcccgactagctctaggtgccatggaagaggcaggatgagcagctcagccttcaggtggagacactttatctggattccccagctgttatccatttgctatctccaactttcctgccaccttcatccttgcctcccttcctgcagattgtggacagtagttcctcagcctgcaccctggattccttcttccccttcctagctccatgggactcgccccaagactgtg

SEQ ID NO: 5184 - DNA, 589 bp, Homo sapiens
acagaattgaacatttgtagttgttggcagtgaacccagttgttggtgaatttaaagcttaaaatatgggaatgatttgctgctatatttcctttgagagagaaaggaggaagaaatagaacctaatagtgatcatgaattttagggaaagtaccgaagaaccatggggtcccctctggtttcttgtgttgaatgaggcaagggtaatcatctgattccgagctgaagacctctggtcctcttaaggagggagagtgcatttttagagcttttagcaaaatgtgaaaagctgatgtttgcgccttgctttgtgaatttggctttgttttacttatacattaactcatgtaatctcttaaatcttacaagcattgatccatttcaacaaaaaggtaaatttaaaatgcagactttgttatttgccaaagaagattcatgaaaaatttacgtccaattattttgcaaatagttaatttcatttggctttttaccatgttccttcctttctttttcccgcttccttaatgtaatttaaaccctggcaaacattctttaggaaaccaagaggaaagaaaggacaaatatcaaa

SEQ ID NO: 5185 - DNA, 586 bp, Homo sapiens
tttttttttttttttttttgcctttgtgtgcggtatttatttcaaatgttttttaaaacagcactgttatttctcaggacaagagcaaaaatcaccccctgcagaagcttgggaactatgtacagaactttacagaatagaggcaatactttagcttaagcctgtctgctgaccagagaatggaattctgcgtggactcaaggaacaaaaggaaactaggcagggaaggggaagaaaagtgcccatctgaatcaaacttcagctgccatcagggcacatcttgtggtggtcacagattgtaggctgttttttggaagattcgggttcaagcacaggattccatttgtctacttggctacaccccctggctgaggtgccatgaggtcaatgtcactcaagttcctggccagccaaactcccgcagcaaagagtcccaaatttagtatcaagttcctccggaagtcattcctatcagtggcaaagcggtagacgccccgaagccaatctcccacgttgtccggtatttcgggagtttcattagccgagccagcagcgctcaccgggacagtgctggaagccatagtgg

SEQ ID NO: 5186 - DNA, 330 bp, Homo sapiens
ggcttatgaacaaatgtgaagacatttcaaataaattgaccaaacaagttaccagtgcttactggaaatggaggtggatggaacatagaacaacccttccattctaaaccagagtttgtcactcaagccctatcagaaggttggtttgaattggctggcattggtacataaacatggacttaatggcattttggcagatgaaatgggcctaggaaaaactattcaagccattgcatttctggcatacctctatcaggagggtaataatggtcctcatttgatcgttgttccagcttcaactatagataactggttaagggaagttaattt

SEQ ID NO: 5187 - DNA, 1154 bp, Homo sapiens
actgaagcaaactagcccttgaaagatgagtaagaattcaccaaagaaaaaaaataattgagacaatttttttttaagtaaaatatttttataaagcttttaatgctactttctgacctacaggtgatgaagggagtatgccagcagatatagccacattactaaaaacatcaatgggcctgtgaaataagaactgtgaactctcaattgatgaggaaatatcaacttggtgcactcaaggacatttacattatgatgaccatggggtttatgaacatttataactttttataatttccatattacatttctcatagtatgggacaactttttgccactaactgaattctccaaatactcacacgtgaaatttcaaaaaagaagccacaaatatgtagttctgaagatgttgaataatcattttacaaagcagttttctgaatggggattagttggtgattgtttgtaacaaatatgctaatgctttagaaatgtcagtatttttgtaattatttctacctccaaatatatatatattgtctttcactggataatgtgtgtagatttttacatgtgccttatttgacaatgcttatgtcttgtttttgcttgtctcatttgaagttcttttttattatgttaaagaatgcagctgtatagattatatagctttcattttattgctatttgaagcagatgttcaccaatgtcaggcaaggaactcaacctggaatttaaaggtggcattccatatactaacatcccccaggtcctctcaagtacttctgctgaaacaaatttatttgggctagggcactaagttgttttccagtgaatagtaactaaagaagcccctaccttgctccatggattaattccttctgttcattttccaactgcactaattgtgcatattactctgcctaatcttgtgcatgttttcattgatttccctctcccggcttttgcttctcttgaaactgttgcccagtcacttctgctccaattctcttcctctctaaatagtagtttattactgccacatctccatgcatcagcaaaatgttggtgacatttttctagcctggcagaacagattacttaaagctatttcacttcaaagcagactgattgtgccttcatctaaaggcagc

SEQ ID NO: 5188 - DNA, 306 bp, Homo sapiens
tggatatccgctctgcagctggcctacgggttctagctgtcaacattcttggtcgcttcctactcaacagtgacaggaacattaggtatgtagccctgacatcactgcttcgactggtgcagtctgatcacagtgctgtgcagcggcatcggcccactgtggtggaatgtctacgggaaactgatgcctccctcagccggtgagcagtgatagaggggacaggagggcagggcagaggttcccagtgccctgtggccaagactcgagccagtttagagcagctggagtaaggggactaagggggac

SEQ ID NO: 5189 - DNA, 489 bp, Homo sapiens
aaaacttttttttttttttccaagtaaacatctgcatttattttaaatcgcatcctcggtgtgtctgccccttttctgtccagctgtcaggtggcccaataacgccttggactccgtccccttgtcagtgccactggctgttcctggctctagttcccaggggagcctcaaactggggcctagcccagaaagccaccggctaggcatcacatagcttctccagctcaaatagcccaaggttggcatgtctgccgacctccaggaataaccgcagtcaccgtgcccaggcaacacatcctcgtgctatggggagaagcctctgctgggtgacccaccagccaaccctgggccaatttaatttagataaatgctcaaagttcaaacggccacaggaaacccctgatgtaacacctgttgtgccggccagctgtgtctcaggagctgactgcagacacctggtctgggtccctcaagcccagcagagcttgt

SEQ ID NO: 5190 - DNA, 385 bp, Homo sapiens
tgccgcctcctcctgggctgggcgcggtgtctcgtcccctcgcggagcgctcctgccgccgccgccgccgcctcctcattcatcctcgtgcaccataggcggcacaggcaccaagatgtccaaccgagtggtctgccgagaagccagtcacgccgggagctggtacacagcctcaggaccgcagctgaatgcacagctagaaggttggctttcacaagtacagtctacaaaaagacctgctagagccattattgccccccatgcaggatatacgtactgtgggtcttgtgctgcccatgcttataaacaagtggatccgtctattacccggagaattttcatccttgggccttctcatcatgtgcccctctctcgatgtgcactt

SEQ ID NO: 5191 - DNA, 1327 bp, Homo sapiens
tttttttttttaacaaataaaattctttatttaaatttctcttgtggggaaaatatttttctttaaagcacacttaaaagtaatttgcatttacttcctgtaaagcatttccatttcacaattagcaaaactaaaaggctatgtctcttcatgcatttatttttgttagaaaaatgtcccatgggtgctatcaaaccgattttaaccatcatcaagcttaactttgcctctgttgacaacatgactacaaacatgaatcaaaaaggagttaaggaattttaagccataaggtttcaattatagcttaccaattatgtaattagctgacaaaaatcaagtctgatgtagaatagctgtcatctacttaactgcagataatcatggcattttcatttaagatgatctgaacttatgaaataaaggatccagttccaagaactcaataatctcttatgttttcttttgaagacttattttaaatattaactatttcggtgcctgaatggaaaaatataaacattagctcagagacaatggggtacctgtttggaatccagctggcagctataagcaccgttgaaaactctgacaggctttgtgccctttttattaaatggcctcacatcctgaatgcaggaatgtgttcgtttaaataaacattaatctttaatgttgaattctgaaaacacaaccataaatcatagttggtttttctgtgacaatgatctagtacattatttcctccacagcaaacctacctttccagaaggtggaaattgtatttgcaacaatcagggcaaaacccacacttgaaaagcattttacaatattatatctaagttgcacagaagaccccagtgatcactaggaaatctaccacagtccagtttttctaatccaagaaggtccaaacttcggggaataatgtgtccctcttctgctgctgctctgaaaaatattcgatcaaaacgaagtttacaagcagcagttattccaagattagagttcatttgtgtatcccatgtatactggcaatgtttaggtttgcccaaaaactcccagacatccacaatgttgttgggtaaaccaccacatctggtaacctctcgatcccttagatttgtatctcctgcaaatataactgtagctgactctggagcctcttgcattttctttaaaaccatttttaactgattcattcgttccgcagcatgccctctggtgctctccaaatgggatgtcataaggcaaagctcatttcctgacacattcacctgcagcaggacaaacagtcattaaaactgtccactgactcctcgttccgaat

SEQ ID NO: 5192 - DNA, 966 bp, Homo sapiens
caggtaggaatgcttgacccttttatttcgaagcaactcatgcactcttttcagcactcagaaggaactgtgagcttttatactactacagccccagtatctcagcggtaaccatggggaaaaaagtcttgttttccaaaggaaaatgagagttgggaggagccttaatataagcagtgaggccagccgggtggccccagaaagaactaggtgtcttgacacctaatccacacagcagggaaaggggctgggtgtgatgcacagtgcactgattttatttacagatcaaaagccacttaaataatctgcagacacaagtgctgtccagggcagaagcctggggtccaaatcagccttatccctcctcatgcccacagtcagcccaatgctgtctccgttccatgggccagcacaggcaggcgccactctgctgacatgaggacctggggtagctcagacatttgactacccaagcccagaaaggagctgggtccagcccttacggggaattcctttaattcccccaggccaggtgagtgctgactcagtgatgacaacagctgtagaagtaggggtttggcttctggcccagatccacgcccttgtcctctgtcatcacctggaaggcagccacactgacgtaatcctctgccactttctggaagagctcgtccacactctggcctgtcttgctggatgtttcaaagagctgagctttgatattgtctgcatagtcctggacgtcgtggaagtccacacgtcgacgctccggtcttcttccagcaggtcactcttggtgccacataagtagatttggcagccctcctctagcgtgcgcagttccttcacccagaactttgctcgctcaaagctgctgctgtctgtgaggtcatagcagacgatggcagccttggcaccccgatagtagattctactcatggcctcatagctgctcagagcctgctg

SEQ ID NO: 5193 - DNA, 3596 bp, Homo sapiens
ggtcggaggagcagatcacgcttgcgaaggcggtctcgatcacgcggtggtcgtagacgaaggagcagaagcaaagtaaggaagataaatttaaaggaagtctttctgaaggaatgaaagttgagcaggaatcttcgtctgatgataaccttgaagactttgatgtagaggaagaagatgaagaagccctaatagaacagagaagaatccaaaggcaggcaattgttcagaaatataaataccttgctgaagatagcaacatgtctgtgccatctgaaccaagcagcccccagagcagtacgagaacacgatcaccatctccagatgacattctggagcgagtagctgctgatgttaaagagtatgaacgggaaaatgttgatacatttgaggcctcagtgaaagccaagcataatctaatgacagttgaacagaataatggttcatctcagaagaagttgttggcacctgatatgtttacagaatctgatgatatgtttgctgcgtattttgatagtgctcgtcttcgggccgctggcattggaaaagatttcaaagagaatcccaacctcagagataactggaccgatgcagaaggctattatcgtgtgaacataggtgaagtcctagataaacgttacaatgtgtatggctacactgggcaaggtgtattcagtaatgttgtacgagccagagataatgcaagagccaaccaagaagtggctgtaaagatcatcagaaacaatgagctcatgcaaaagactggtttaaaagaattagagttcttgaaaaagcttaatgatgctgatcctgatgacaaatttcattgtctgagactcttcaggcacttctatcacaagcagcatctttgtctggtattcgagcctctcagcatgaacttacgagaggtgttaaaaaaatatggtaaagatgttggtcttcatattaaagctgtaagatcctatagtcagcagttgttcctggcattgaaactccttaaaagatgcaatatcctacatgcagatatcaagccagacaatatcctggttaatgaatccaaaactattttaaagctttgcgattttgggtcggcttcacatgttgcggataatgacataacaccttatcttgtcagtagattttatcgtgctcctgaaatcattataggtaaaagctatgactatggtatagatatgtggtctgtaggttgcaccttatacgaactctatactggaaaaattttattccctggcaaaaccaataaccatatgctgaagcttgcaatggatctcaaaggaaagatgccaaataagatgattcgaaaaggtgtgttcaaagatcagcattttgatcaaaatctcaacttcatgtacatagaagttgataaagtaacagagagggagaaagttactgttatgagcaccattaatccaactaaggacctgttggctgacttgattgggtgccagagacttcctgaagaccaacgtaagaaagtacaccagctaaaggacttgttggaccagattctgatgttggacccagctaaacgaattagcatcaaccaggccctacagcacgccttcatccaggaaaaaatttaaacaagatgaagaaactccaagggtttgagtaaatacaaagactgaagaaatttcacagcagtttattaatgtatataaacttataaatatttctccagcaaatttgaggaagcatgatatatttgaattaacaccaagggtgatatttcttttagagatgttagttaatctgttttgtgtcttacgtgaaatttcactgtagactgttttaaattgccaagactggcacaaaattacagtgctaatgtatatggttgcagttcacataaagacaaaagcatctgttatgaaatgagtagtaatattgggtggttgatttgttcttagcagacttggcttcattttggtcttgagataaaatggccagcataaatgctgtttatattcacgttttcctaggtgtgtgtgtgcaggccacagcagcatgcccttggtgtagtcagtgccgaaaggggtctgttccttcttgagcctgcctgcagggatggtctccttttaaagcaggttgtgtgcagcattcagtacactgaaggtaagctaaaccatcaacatctctggtgttttaagatgttattttattggaacaactgacaaatgagggatgttagctttgtggcagaattccctgcatgtgtgataactgatcttgttttattttttgggcattgcaactgtggcatagttacaatttctgtttgttcatcacatttaaaattggaagagaacgcgcttgatggatagagcgccttcagtgtactgtttcttattaactttactttttttaaatcaacttgctatagactttatatacattttgttaaatatagttcctagtgacatagaaacgatgcgtagttttcatttactaattacaaatgttgaggcctaattctgaaagtcctcatatttaaaggctagacaacgtaatgaaatttttaactatttgtatgtcattttgaaagtgtactgctttatggtaaaagtgtttttcatttgttcattgttttcattatttgtgatcatgttgtctttcaatacaggcataaaccttccactcttgaacaaagcagctgctttttaaaagcggtaattgcttctttaccttttatttcttttgtaaatgaagcttttctttaagaatgtgactttaaagtgttgtctattgcataaaacagttgacactcacttattgtaaagtgaagattgttctactgcatgtgaagtggaccatgcagatttctgtatgttctcagtatgcatcactagataataaagtcttttgtgaacaaggcatttgtagccatttttaaaagtttttgtcttcagtgctggtaagtcaggtaaaccataaatagttaaaagcaaccttttgtttttttcctgaaagtttttaattgaaagtattattagttaaagatgtaaacctagccaaaattaccagtttattaataattaggatcctaattatttcaaaaaatcctacaaatattgtcagctttcagtgtagtgagattattcctgtaggttatggggtataattcaggatttaactaatgtttctgctattttctcacttttccttttgatggtgcggaaagagaaaaaggaaaacggggcacaggccattcgacgccttctccaaggggtctgatttgctgagacaccagcttcaccttcttaacaaggcacctaattacaacaagcatgcacattttggtgcattcaagaatggaaaatcagaatagcagcattgattcttctggtgcagctcagtggaagatgatgacaaccagaagacatgagctaagggtaagggactgttctgaagaacctttccatttagtgatcaagatatggaagctgatttctgaaaatgctcagtgtgtactctaattatttatggtaccatttgaattgtaacttgcattttagcagtgcatgtttctaattgacttactgggaaactgaataaaatatgcctcttattatcaa

SEQ ID NO: 5194 - DNA, 444 bp, Homo sapiens
  misc_feature (1)...(444): n = a,t,c or g
ggaatgtgcctggcagctgatgttcctcttattgaaagtggaacagctgggtatcttggacaagtaactactatcaaaaagggtgtgaccgagtgttatgagtgtcatcctaagccgacccagagaacctttcctggctgtacaattcgtaacacaccttcagaacctatacattgcatcgtttgggcaaagtacttgttcaaccagttgtttggggaagaagatgctgatcaagaagtatctcctgacagagctgaccctgaagctgcctgggaaccaacggaagccgaagccagagcttagagcatctaatgaagatggtgacattaaacgtatttctactaaggaatgggctaaattcaactgggatattgatccatttgaaacttttttacccnggttttttnagaggatggacntgcagggtattctgttggncaatgg

SEQ ID NO: 5195 - DNA, 2113 bp, Homo sapiens
  misc_feature (1)...(2113): n = a,t,c or g
taaaagtcttcggtcgttagaagttgaatgggcacagcaactctaagactacagcacacgtcatttcttagctaagcggaccagcctccctgtcggcctggtgttctgtgggatccctctgggcactggtaatcccaagatctgtgcagccccgcctccaggccacatggggctgggcagctaccatttcccttttgcggatgggaggggtaacttgcacctctgacctatcacttccactgcaccccgtctcattcctccacctgccgtggacttggggtcagagactgctgtgtttgagctctgcagcccagggaccgaaaagttggtgtcaatgaattttgcttggtggatgaaatgtcagtggaagaagcagatgagaaactcttgagatcttggtcctgtgttttttctgccaaccaaaggccagggtcactgaaggccctggccccacagcaggtgctgagcaaagggaacagtgaggtgccccagctagctgcagagcccaccctgtgttgacacctcggccnctgctccctcccatcccttccccctttactcatagcacttcccccattggacacgtggtgcattttgcttgtttattatgttttctctccatcagaatgaaagctcctcgagggcagggactttggtctattgtctgtatttgccggtgcctaggattgtgcctgtatgcaacaggcactcaataaatatttttgctgtagactggacaggcatgagttagattctctggggcttctgcagagactggtttgggaaagtgggtgctagggaaaagctctgctccctgcaacctccccattttaatctttcagtattgaaaagtggagaggaaccggattcagtttgctggggacagaggcagtgggggtgtggaggtgctcagagcagccttttgggaaggttgtgggggaagctggattcccaactgtcagcctccaggcctgggatggacctaggatgctgagaaagggcatacactgctgagggagtcacctgccagtcaccagctcactgaggaaccagaagaatgtacagttcttggtttgaaggcacttggagaaggagaggaaggagggatgggagctgaatctcttcccgcccccatctctgccaggtcccaggccccctctgggcttctgtcccacacagacctgcctggaagccttcaaaggccgaggagccccggtcggggtgggggtccctgttctggagccatgggtttggagtgccagctccagcagaggcatctgagcagcggcctgaggtgctgtgtctgacatgtttgttggccatggaaggcctcgggccgtcctgagctcagatcttggctgccggctgctggggcggctgcttctgcagcagggccagggtgtcccgcttctcaatggagcgcagctgcttcttctttgcccgcttgagcttggcggggtttcggatcacttggacgacctctgccttccgctcattctccaggcggcgtttcaggttctcagcccggcgctgtttcttctcctggcggcgcctctccttctcctcctccaggtgacgggcaaagtccttggccagcttcctctcctgtcgttccttcatcttccgctgccacgatgtgcgcaggggcttgtcctgaagcatctgggagaatcttttcttggagcggtccttccacactcgccccgatttgggctctccttcgggattacaggaagctcctctttattcaacttcttggacgctggggcctgggatgaagaaccttttcgcttctttgccccgaagccgcctgtcaccgtctccccagctggaggtggcttgctcggctcatgctgaccccggggggagccaggtgccctgggtgtcagctccagtagtggctgagagggctccggaccgggagcttgctgaccggggtaaggctctggtgatcctgggactggcggtagctgatgctggggggcccccggggtcagctcctccttattctgggccaactccgaggccagtactccctactcctcccttacaaaaaacacccagggatttgtactcattttccaagttgaataaaatacatttttaaaatgat

SEQ ID NO: 5196 - DNA, 539 bp, Homo sapiens
catatggaagacaaagtggattaagagagaggactggcattgggtttgcccaatcctctgcagtttagccttagacatgagggccgaaccctaagcaaagtctggtaattgattatggtgttttaaaaggtattaatctttaggatgaagtccaaacaggatgaaaatttctacaaatgtttgtttcctatgtcatgtgtgagaaaaaaaaatgtgagtgttgcagcacattttgtttgcttagtttggcatcttcaatcaatttctcaattatttaggttgaaaatagcttttaataaatatttggaaggaaaaaactcccccttgggatggggggaagcaaaccccctctctaattttggtgaataagaattgctttcttagctctcagagtttttagggacattggaaataattcataggccatcagtttagaaaatatacattaaaaaaccttctgtcttgggtggcaaataatagtaaattgtttaaaagaaagttttcatctacaatgagtttcgagtggtggacctcatggc

SEQ ID NO: 5197 - DNA, 1218 bp, Homo sapiens
tgtggggtgttttgttttgagtagctttatattgctcttaggtctggagttggccatgtacctatgtatcctaagcattcacggcagtgagctcctttactaacattcatgttatggcaagagttgtcctctacattggaaagctaatcctaccttgtcagtttcaaccaactgagttttttctttaagaaaggtaaattttgtcagctagtttactatgttccttgaatataaacaggttataatactaccctgttcactttactaaatataagtacagtaatgatgcataattagaaaatgaggtattctaggtaaaatgtatgtttgccttgacatgtttttaaaagttatgatgtacctccctgcctttaaacagaatacttttttcttttttttggcctttctcagattagtcaaaaattctatagaatgactcacttcgaatactaagacacaggaggtttagcctgctttcttaccaaattcatggttacccagacttgtgttctcttgcggtcccttgggactgcctgttgattgatggaaagtgtctgcactgacacttttcgtcagtagtctgtagtttcgtggcctcttttgattataactggggtcaccaagaaggtttacttaattaaataccgcatttctaagagaagatactttgtgtaagaaaagatgccacatttagtggtttaacttttgtaacttcacttgatagtttttaagcaattagaatggagttagggaaagaacatatcatactgaacaaatgtcattctagtttagatagcatttctaagataactgatactaatacttgttttcttccctataacataaaaaacttcactgttaagtcatgtcccttgaaacatgatagttacatacacagttttctctccacacataaataacaccactaaagttgttttgtaaggttccaaactaatatggcatatatcaactctacagtttcaaataaatgactttttaattgtaaaagattagttgaaaaactgtatgaatgtgaagatcacatgcttagtcatttttatgttcattccactttgtatatcttttctatttattgacttctcatgttctagagagtaggacttttattccgtgtacctgatatatatacaattaaaatatctgtataattatgttttaatgaggtttatttcaccggatatttatggaatgccgttt

SEQ ID NO: 5198 - DNA, 339 bp, Homo sapiens
attgctccaacaaagatgtaggccattaaatttttaaaaccattttatacatgcacacatacatacaaggactcctctctcctgcaaaaattgttaccttaagtgtggttctctggttctaaggagggaagtgctaagtaagaaagacagggaggtggatattgtggttccccatcagacagaaaacacgggcacctgtttggtaatctttttcttacagtgttattgctaaattcagacagtcttcctaacccacacctgcttttaaaaagcttagctctaacatgaaactgtatgctttttgcttcttggtgttttgtataaaaaaaatcattataa

SEQ ID NO: 5199 - DNA, 525 bp, Homo sapiens
aaaaaatgattattctcagctataaaaaggcttacgggtatgtgtggcatttcaggattaagcccatggttttgatgactttcagaacgtttcatttgttagtcatattggccacactctgacagcttctgtgtcctctccagctccctgccgtggcctttaatgtgaacaacctgcccttcacagagcccatgctgtctgtctgggctcagttggtcgaacctccgctggaagcaagttagaaaagcacaaaataaagaaatcgactaaacaggcctttgcaggacaagtggacctggacctgctgcggtgccagcagttgaagctatacatcctgaaagcaggtcgggcgctgttctcccaccaggataaactgcggcagatcctgtctcagccagctgttcaggagactggaactgttcacacagaacccatggatacggagggctagctgtatatgtttattgctgtggaaacatgaaaacaatgatggagcagtggtatcacctgaccttggggacatgt

SEQ ID NO: 5200 - DNA, 2433 bp, Homo sapiens
atattttcacaagtgggtctcccttgtccgggactatggccaccgactcgtgggccctggcggtggacgagcaggaagctgcggctgagtcgttgagcaacttgcatcttaaggaagagaaaatcaaaccagataccaatggtgcctgttgtcaagaccaatgccaatgcagagaagacagatgaagaagagaaagaggacagagctgcccagtccttactcaacaagctgatcagaagcaaccttgttgataacacaaaccaagtggaagtcctgcagcgggatccaaactcccctctgtactcggtgaagtcttttgaagagcttcggctgaaaccacagcttctccaaggagtctatgccatgggtttcaatcgtccatccaagatacaagagaacgcattacccatgatgcttgctgaacccccacagaatctgattgcccagtctcagtctggcactggtaaaacagctgcctttgtcttagccatgctcagccgagtggaagccatcagacagataccccagttgtctgtgcctcttcccaacattatgaagctgggggcttcaaacaggaaaagtgattgaacaaatgggcaaattttacccagaactgaagcttgcctatgccgttcgaggcaataaattggaaagaggccagaagatcagtgagcagattgtcattggcaaccctgggacccgtgctggactggtgctccaagctcaagttcattgatcccaagaaaatcaaggtgtttgttctggatgaggctgatgtcatgatagccactcagggccaccaagatcagagcatccgcatccagaggatgctgcccaggaactgccagatgctgcttttctccgccacctttgaagactctgtgtggaagtttgcccagaaagtggtcccagacccaaatgttatcaaactgaagcgtgaggaagagaccctggataccatcaagcagtactatgtcctgtgcagcagcagagacgagaagttccaggccttgtgtaacctctacggggccatcaccattgctcaagccatgatcttctgccatactcgcaaaacagctagttggctggcagcagagctctcaaaagaaggccaccaggtggtcatgctgagtggggagatgatggtggaacagagggctgcagtgattgagcgcttccgagagggcaaagagaaggttttggtgaccaccaacgtgtgtgcccgcggcattgatgttgaacaagtgtctgtcgtcatcaactttgatcttcccgtggacaaggacgggaatcctgacaatgagacctacctgcaccggatcgggcgcacgggccgctttggcaagaggggcctggcagtgaacatggtggacagcaagcacagcatgaacatcctgaacagaatccaggagcattttaataagaagatagaaagattggacacagatgatttggacgagattgagaaaatagccaactgagaagctccaccagccactgatgccagccctggcactgcccctgcacaggagacaagtgcgttcagggcacaggccccgacatcaccccaaggacaacggcacaagtagagagaaactacctacctcacttcaaattatgtttggacttgacaaaaatgtatgcaaatgatggggggcaatagaagaaaaaatttgcattttggaaaattgggtcctttccccacttttttaaagccacattcccccatctttataataatctggtcacagtggtagtcgctggcccccaggaccccctcctgattttggctaggcatcgtggaaccagctccagcccctgaagaaacgatagatgtgcaggttgtgcggaagaggctgagtggaaaatggtgtgagccccaccgctgtgcatcgaatgagggaagtggcagcagagaggccagagctgccccctctctgtctcttcaatggacccttcacaagtgtttctcctgcccttggggctgtcttccttctcctgaaatccagagactttcttgctcatcccttctccctttcacttctgttctctgctgcagaaagcagacttgcatatccctgatgagcagctcggctacttttgtaaacttcagatttggagagaaacacgaaagtctgaatcctgaccccttgagagagagtgatctgggcgagggccgatgaaggggctgggcctggtcttgccttctcttctctcggttgctccctctgcctaggcccctggtactcagtcacggcagccaggagaccccaggtgagtttctgagcgcatacgtagttggttcttacccccaggtgtcacacggggccgagagctgagcaagaatttggaatggaagttatgaccaagggaattatgctgttcatttataatagtggacattatggagagctctgattcctacataatatg

SEQ ID NO: 5201 - DNA, 2308 bp, Homo sapiens
  misc_feature (1)...(2308): n = a,t,c or g
gcggggcttggacgggattgtggcggtcctctctcccaattcggaagctacagctacctccggacgctctcaagatggcgacctctctgggttccaacacctacaacaggcagaactgggaggatgcggacttccccattctgtgccagacatgtcttggagaaaacccatatatccgaatgaccaaagaaaagtatgggaaggaatgcaaaatctgtgccaggccattcacagtgtttcgctggtgccctggagtccgcatgcgtttcaagaagactgaagtgtgccaaacctgcagtaaattgaagaatgtctgtcagacctgcctcttagacctagagtatggcctgcccatccaggttcgtgacgcaggattgtcttttaaagatgacatgccaaagtcagatgtcaacaaagagtactatacacagaatatggagagagagatttctaactctgatggaacacggccagttggcatgctggggaaagccacatctaccagtgacatgctgctcaaactggcccggccaaacctactacaaaaggaatcgaccccacatttgctccatctgggtgaaaggagagtgtaagagaggagaggaatgncccatacagacatgagaagccctacagatcccagatgacccccttgctgatcagaatattaaagaccgttattacggaatcaatgatcctgtagctgacaagcttctaaagcgggcttcaacaatgcctcggctggacccaccagaggataaaactatcaccacactatatgttggtggtctaggtgataccattactgagacagatttaagaaatcatttctaccagttcggagagatccggacgatcactgttgtgcagagacagcagtgtgctttcatccagtttgccacacggcaggctgcagaagtggctgctgagaagtcctttaataagttgattgtaaatggccgcagactgaatgtgaaatggggaagatcccaggcagccagaggaaaagaaaaagagaaagatggaactacagactctgggatcaaactagaacctgttccaggattgccaggagctcttcctcctcctcctgcagcagaagaagaagcctctgccaactacttcaacttgcccccaagtggtcctccagctgtggtgaacattgctctgccaccgccccctggcattgctccacccccacccccaggttttgggccacacatgttccacccaatgggaccaccccctcctttcatgcgggctccaggaccaatccactatccttctcaggaccctcagaggatgggagctcatgctggaaaacacagcagcccctagcaccttgtcaccactctggggctctgtggaagaaagggcacttaaaactcccagtaaatcttggaataaatatatttttccttcccttgtagtttccatggtagctgaatgtgctcagatgtgagcagtcagagactgacagccatgctttcctatacttgttcaaaggatcgatggaccgtaaataagctgccattaacacatctggttactgctgtaacatgactaataaaaccgaacgcctgttccccttacccgtgtgggggacacgcagatgagtgaattggaatgtccagcagagttaccctcccaattatatgttcattttgtatattttttggtcgggggaaaaattgacctgcagtaaaaaaacctttgaccatttttatgtccattggatactttcctttttatcatcttaaaaaaagataactagtactaatcattgtagtgggcctaagtgtgatttaactcttggaagtcacaccctccgaaaggatgagtagggaacccaggcaccagcacagcccagatcttctctttcctctccctttcctcatttattcctaaaggaatctgaccattttacgtctctacggcccaaaaaaagacaaaaataaaaattcctttttattcctgtcaactggatggaaacacaaatttcatggagctgtgtaccatcgaagaaacctggtgtctggcatgaaattactgtaaagaacttcctgtaaaacacgttctttaacaaactgaaatgaaaagcattggagcgtctgaatgaaagacgtgacctcctgctgggactctgatggtcttcagcattcaccttcgtgtgtcttcagtgtctcattgtcatccctgcttctgtttggtcttagagtgtttggatataactgaattgtagatggtaaaggaaatttgatgtgttttttgtttttaaataattaaaacgggtcaatttttcaaaaaa

SEQ ID NO: 5202 - DNA, 472 bp, Homo sapiens
gctggggaagacagttctcccagcactcccacccctgggcacagcaggctggtactgggaggctgaacccctcttagagcctgaccttttcatctgccttctggttgtgtgaccatcactcaacagccatttcacagcccctgtaattatggcggcggggggctggggtggtggtggtgggaagggcttgtggagaggacacagtctttgtttaaaaactttgtcccgatccatccagaaaagagtaggtagcttgcatcctgacagcctggcaaagtcaagaaagttgaaggagaaacatacctttggagagggggttttctttaaaactagtgttaagaaatgcttagggattttttttttcttatttttcataactaaagctttcacccagagccggctctgtttgcactttgctgccgacattgcaaactttttggcagggtgggagactgagtctcattctgtcaac

SEQ ID NO: 5203 - DNA, 463 bp, Homo sapiens
  misc_feature (1)...(463): n = a,t,c or g
ggcagggaagcatggtccagccctgttatcccccaaaaggacacatacaaagctcagttcttgagctgtgcttatgcaatactatagtgatcagtaagctgaatgtatttgcttcacttctaaccttttttaaaagtgatcttgaggaatgctttgttgatcttgaattaataattcaaaaggggggtgggggaagatggggtatttctaagaaatgcagaatatttcagttttgaatattaaatctcttacaactacaaaccccttcatagtctccatccattcagaaaaacaaagccaaaggagaatttcttgtgggaaaaaaactaagggaagttccccacataaccagccgaaggagggaaaggctttccctgttcctcttcttcaagagggaaggccacagcaggccgttttgttcatgtttactgctacccggggttttttaaaaagttgacngggg

SEQ ID NO: 5204 - DNA, 790 bp, Homo sapiens
  misc_feature (1)...(790): n = a,t,c or g
ttttttttttctcctataacatgattgccttttatttattatgcaggttgttgatttacatagggagttggagatgctaaccaagcatggagttttcacatggtctatttctgctgagttcagggacttggagacagcctttaacttctggcaaaaagacaatttcacaaaggtgtttaaaaccatcctttggtttttgatcctgagtcagagacggacatgtgcttatgaaagaaggtagagtttcaacccttaggtaaccttaaaagagcaggaactatgttgtgtgtaagtcatgtgcagtatacaaacttgatattaaatgacaaattggaacaatctttctctaggaatgcctctctttcatagaggcatcacagtgagtctcttaaagccttgatctaggtgtgttacagatgggcttacagagtatgaatgcacgataagaaggaaattggatagggagtgaggatatgaaatttaaaagaaggaagaagagaaaacgagattttaagacaggaaatgaagctnnnnnnnnnnnnnnnnnnnnnnnnnnnnnnnnnnnncacgcgtgcgtgcgtgtgtgcacgtgcgtgtgtgtgtggttggcaggcctagtgatcctgttgtttagtgtctctgagatttgagttgtgcctttttactttgcataaagtagatacttggccatatgtagttccaaggagaagtcagagttccacctttggagtctttccttctgattcacgattttctttcaacaattttccacttaggaatccagtcgagc

SEQ ID NO: 5205 - DNA, 481 bp, Homo sapiens
  misc_feature (1)...(481): n = a,t,c or g
ggaaattagcagctttgacaaanaaaagtactgtttcatctgtcttccctatgagannnnnnnnnnnnnnnnnnnnnnnnnnnnnnnnnnnnnnnnnnnnnnnnnnnnnnnnnnnnnnnnnnnnnnnnnnnnnnnnnnnnnnnnnnnnnnnnnnnnnnnnnnnnnnnnnnnnnnnnnnnnnnnnnnnntagcccannnnnnnnnnnnnnnnnnnnnnnnnnnnnnnnnnnnnnnnnnnnnnnnnnnnnnnnnnnnnnnnnnnnnnnnttnaatatggacatttattagttcccaaataatgcttttataaatttcttatgcctgtctttaatctcttaatcctggttatcttcataaagctgaggggtatgccctcanctccaggaccactngtggataattggtggttaaactggtacaaatttgatttgtggaaacatggtggtggtttgaaccaattaagaaatccaggtggcncttg

SEQ ID NO: 5206 - DNA, 3788 bp, Homo sapiens
aaccaccggcgaggagcggggcgcgtggaagcgagccgcggtccgaggcccaaagaaaagcccaagcctcgcccccgccatcgcgcccgacgagacacctaggtccggggacgggtgtgtgccgcggaagtcaggtgcactgcgcagcactcccccggtaggtacacgctcctccacctacgagtgacctaattacaaggtgccagccgcgcccagaggtgggggtggttaatccaagcggccactcgctgcccgttcctgcccccaaagatgacggaaacccacacgattacagagccgcagcaccccagatgagccacggggtcgcaattctcgtttccgtgatcggactgccaggccccaggtgaggagctgagttcatcaccagagcggccttcccaggggaaccagttacaggctgccagtggccccggcttccatccggtctgcgcctgcgcgcggcccaagccctcgcctctcctggaatagtgctcagggattagtccggttcgccgctgtgccactgcgcatgctccagctccatccttcccttcccccaccaccccgccctccgggagccacgcccaaaaagtcaaggcgcttcagttaccagccggctacgtggcctgcgctttgacccccagtttgcgccccaactccggtcgtgcggccgcccggggagggctctgcagttgcgcagcttgctccccggcccttttcccctccgctccccgccgcctcctgacgccgggcgtgacgtcaccacgcccggcggccgccattacagagagccgagctctggagcctcagcgagcggaggaggaggcgcagggccgacggccgagtactgcggtgagagccagcgggccagcgccagcctgcaacagccgccagaagtacacgaggaaccggcggcggcgtgtgcgtgtaggcccgtgtgcgggcggcggcgcgggaggagcgcggagcggcagccggctggggcgggtggcatcatggacgagaaggtgttcaccaaggagctggaccagtggatcgagcagctgaacgagtgcaagcagctgtccgagtcccaggtcaagagcctctgcgagaaggctaaagaaatcctgacaaaagaatccaacgtgcaagaggttcgatgtccagttactgtctgtggagatgtgcatgggcaatttcatgatctcatggaactgtttagaattggtggcaaatcaccagatacaaattacttgtttatgggagattatgttgacagaggatattattcagttgaaacagtttacactgcttgtagctcttaaggttcgttaccgtgaacgcatcaccattcttcgagggaatcatgagagcagacagatcacacaagtttatggtttctatgatgaatgtttaagaaaatatggaaatgcaaatgtttggaaatattttacagatctttttgactatcttcctctcactgccttggtggatgggcagatcttctgtctacatggtggtctctcgccatctatagatacactggatcatatcagagcacttgatcgcctacaagaagttccccatgaggggtccaatgtgtgacttgctgtggtcagatccagatgaccgtggtggttggggtatatctcctcgaggagctgggttacacctttgggcaagatatttctgagacatttaatcatgccaatggcctcacgttggtgtctagagctcaccagctagtgatggagggatataactggtgccatgaccggaatgtagtaacgattttcagtgctccaaactattgttatcgttgtggtaacccaagctgcaatcatggaacttgacgatactctaaaatactctttcttgcagtttgacccagcacctcgtagaggcgaggccacatgttactcgtcgtaccccagactacttcctgtaatgaaattttaaacttgtacagtattgccatgaaccatatatcgacctaatggaaatgggaagagcaacagtaactccaaagtgtcagaaaatagttaacattcaaaaaacttgttttcacatggaccaaaagatgtgccatataaaaatacaaagcctcttgtcatcaacagccggtgaccactttagaatgaaccagttcattgcatggctgaagcgacattgttggtcaagaaaccagtttctgggcataggcgctatttgtagttacttttgctttctctgagagactgcagataataagatgtaaacattaacacctcgtgaatacaatttaacttccatttaggccatagctttactcagcatgactgtagataaggatagcagcaaacaatcattggagcttaatgaacatttttaaaaataattaccaaggcctcccttctacttgtgagttttgaaattgttctttttattttcagggatacccgtttaatttaattatatgatttgccctgcactcagtttattccctactcaaatctcagccccatgttgttctttgttattgtcagaacctggtgagttgttttgaacagaactgttttttccccttcctgtaaggacgatgtgactgcacaagagcactgcagtgtttttcataataaacttgtgaaactaagaactgagaaggtcaaattttaattgtatcaatgggcaagactggtgctgtttattaaaaaagttaaatcaattgagtaaattttagaatttgtagacttgtaggtaaaataaaaatcaagggcactacataacctctctggtaactccttgacattcttcagattaacttcaggatttatttgtatttcacatattacaatttgtcacattgttggtgtgcactttgtgggttcttcctgcatattaacttgtttgtaagaaaggaaatctgtgctgcttcagtaagacttaattgtaaaaccatataacttgagatttaagtctttgggttttgttttaataaaacagcatgttttcaggtagagcttaaactaaatgatgtgtttacttagtgcagtttctggttatgaatattatattgctatgtgtatattatatggactctttaaaatgattgacagattggcaaattcttaaatctttgtacattgttgagtcatatgttcttagagttaaatttgtctcagataagaaagtgttaaagcattagcctgtgtcaagttctttgagtgatactagtgaaaccaaatagaaaactattgttggatcatgatttagtcttatgtacattcacccgaagacaaaaatggtacttaaagtggcagtgttcaacatttaatgagtttttccccttttatccttcgaataggattagatgtttaaaaaaaagttcttctgtgggaactaatatttgatattttaacctaccagagtaaacaggaacacttaatcatacttgtgagtgtagtaaataaaagttttcttgctttgtgctgtgttgaatctggaaccaacagggaagttatagcatatcccctttctaaaatgcttgaggaacacatacataccgaatgtcttttctgatctaattgatagtatttttagtggcttgtggagttaattttccaaagcaaaaggccattagggtttctacatttcatttcatttcattcttttctttcacaagaaatacattctctgtgtgtctttttgttgctctgtcactctatgccctttctctccgactgaacaaatagcttatccatgtgcagtggttttaatacccaaacaatctagacaccaagcagctattttttccggtcctgtgatat

SEQ ID NO: 5207 - DNA, 659 bp, Homo sapiens
gactggggaagtccttctgcattaattacaataagtaatactcattgaaaactttccttatttacacacagttgaacagttattctaagaaaccattttcccaccctatttaatattgacagatttcttcagttagaaacaaaaactcaaaacacacgcaatcctaaagaactcatctatgtcccccttatctcccctcatcttatgtagtccctaaaacagggcttgctgccctttcttcttcttgccttttcagcagatgagtcaaggttgcagaggtggcagtcaaccatagagtcacagagtttgatttttttccatccatcaggtcgtagaagctgccactgagcctgacaagagttggtactcaaaaatgcagaatgaattagtttgaatgaggtgattaaggattaatgagtagtggttaaggaaacaaagaccattagtggatggggtaatattgctgtattactgatggaagcaggattctctaaaaaaactttctgcagccatttacttacatacattttaaagagttactacaagatattttaaaaatttaaacagttaatacaagaaaaatatgaagtgaatagttcatgacactaaactgaactgttcatgacacaaagtatcttagaaaacaaatctcggctggg

SEQ ID NO: 5208 - DNA, 1466 bp, Homo sapiens
ttcagttctactattatttatttttttaaatatttttgaaaaaatataatttttttacaatattttcaacttaaacactattcacactgaacacgtatggcagcttaacctacccaaatatgaagtttaagaagccaaaactgttctagctttgttaaaagttgtgctgcagactctcgtgatggttaacaaagcaaggaaaagcaccactcaaatcataatgttacagtatctttgttcagctgggattatgggttggtattggtcatatgttagactccatacaggcatagctatgatgcagtgaatcccttagaagttacaattctcaaattacatacttcctcagatgtaacattagaactcaatatttcctaacaataacataccagaaaaggctgggactgggcactcatctgctgactaacttgtagcctcagtaatatgacatacttgcctttaacaaattatctcaaattaactaacagaccttcagaaaatggagattctttttgatggggacataatcaaatttaagtctgagaaatatgcttaacagttggaactcaaattaaatgtactgattttaaagtttagacattaacaagtgatagattagcctcaaaaaaagacaatttggtaaggtttaggtcttttaatttggtgcttgttcacaacttgactggtgcttctttccttgctgtcttcacatcaagccatggggccaattctattttcagtaaatgtttgacagctttttacttagtaacagtctcagcacttttattaagcatgcaagactaacaaaaactttggcaatgcataagtgtaacacagtgacaagagagcttttacaattaagtcttctaatactgccttcacagtgtggaaattgtgctacatccaccaaaagagggccccgtctactcaaatatttccgtacttcaccccaggaacaaactcctttgcatttggattcagattgctcttgaccacaagatcttccagagaagagccatcactgataacaaggtcattaaactggtcttggatttggtccatagtttgtgggagatctcgagctggaataaaccattcatgctcttcttcctcttccagcatttcttggaaacagcgttcaataaattcttcttcccataactcctcttctatttgtctgttgaattcttcttcattttccatccacatgtactctgcaaatggattgtcatcttcatgagaatgaccgttaataatcacatcttcattgatgatgcttgggctagtactgctgcgacttggatctttcatggctgatgttggttgtcgtttttaacccaatgcacagcagcggggacggcagccaacgaatcctgtcggcctccgcggatctccaacaggcagcgccgctcccccgctcgacggtgccttcgcccgccgcctcccttctccagtccaaacaaaca

SEQ ID NO: 5209 - DNA, 385 bp, Homo sapiens
aaacaaaataaaacaaaagaggcctactacattatatttaagaaaactgtataatgtggaaaaatagaaaaccataatttatcatttatattttctcaatgtaaaatatttagcctttcactctaggttttatattataaaaacatgtatgctcagagacttaattagaattagctaacagacatgaaatataaattttttaaatactgcacaatgttacatatatttatatggatatgcagtacagatatttttattataataaatcaaaaataaagtgagtaaaaacatttcatcagaagttgtgctggaagaagctggcttttagttcaaacaggagaattacattattctaattgcatactcttactctaatctttttctt

SEQ ID NO: 5210 - DNA, 112 bp, Homo sapiens
ccgctgtctaggaaggattaccaagtgacatggtcagcaacacaaccccgttcttgtagctcccttgaaatgattcctttctatgcatctatttgccatgtcgtgtcgtgtt

SEQ ID NO: 5211 - DNA, 532 bp, Homo sapiens
gcaaaaccgtggaacctctggagtattacaggagatttctgaaagagaactgccgtcctgatggaagagaacttggtgaattcagaaccacaactgtcaacatcggttcaattagtaccgcagatggttctgctttagtgaagttgggaaatactacagtaatctgtggagttaaagcagtaagtctaaatatgtcctattgagatttgagttacaaagttagctttatttattagattgtaatatacacctgtaattctactcttgatttggtagttgggtgtcaatttttaatgtttaatttcccaagagctttcactatgagtgttagataatatgacccaagtttaatgactaagtgaacaattgtcaaatgtagcaaaatgaaacaacttttaaaatctgagtcaccattttaaaaaaattgttatatcatttgagacattaacagatttttggtgacatccttttagccagtgatgacatgtaatctgtgtaaatgtgtagaaaattgaaattgttgaaaaaaaaa

SEQ ID NO: 5212 - DNA, 537 bp, Homo sapiens
ggaaattgacgaacacgtgacgcggtcgggcggaccactgcagactgagcggtggaccgaattgggaccgctggcttataagcgatcatgtttctccagtattacctcaacgagcagggagatcgagtctatacgctgaagaaatttgacccgatgggacaacagacctgctcagcccatcctgctcggttctccccagatgacaaatactctcgacaccgaatcaccatcaagaaacgcttcaaggtgctcatgacccagcaaccgcgccctgtcctctgagggtcccttaaactgatgtcttttctgccacctgttaccccctcggagactccgtaaccaaactcttcggactgtgagccctgatgcctttttgccagccatactctttggcatccagtctctcgtggcgattgattatgcttgtgtgaggcaatcatggtggcatcacccataaagggaacacatttgacttttttttctcatattttaaattactacaagattattaaagataaaatgatttgaaaaactctt

SEQ ID NO: 5213 - DNA, 892 bp, Homo sapiens
taaaccaggatccacaccttctcgaccctcatcagccaaaagggcttcttccagtggctcagcatccaaatccgataaagatttagaaacgcaggtcatacagcttaatgaacaggtacattcattaaaacttgcccttgaaggcgtggaaaaggaaagggatttctactttgggaagttgagagagatcgagctactctgccaagaacacgggcaggaaaatgatgacctcgtgcagagactaatggacatcctgtatgcttcagaagaacacgagggccacacagaagagccggaagcagaggagcaagcccacgaacagcagcccccgcagcaggaagagtactgacccaccccggctgctcttgacacttccattgtgtgtgggaacgtttcttctggagaattggaacatgtgtggccccaagctcaacagaaaccagttgttcccaatctgccgttaccatcaacgcactgttgcatatgcccagccactgcgcttggttcccattttctttgccaaggtgtattagcggacggccctctggccacctacccgagagatcgtagggtcacatacatccaacttcaccacttggctgcttgagattggttctgctcttttcttcatttctttccagaacaactctttcccaccccaacaccactgccaccacccctctttttatcctggtgtgaaacaatgggtaaatttggatatatggtatttatattggcattttttcaacccagtgtcactagatgtcacacacatttgtgggtggctttggatggtttgcaagtctaaacctctggaacataaatttggtcaaataattggaacaaaggggaaacaggatacctggatatggaagccattaatgggcggggg

SEQ ID NO: 5214 - DNA, 1597 bp, Homo sapiens
gcggccgccgcagtcaagggcgacttgtggttggagtgagcaggctcctggcttccagggcagcaaaaacccccaagcactttctagaaggaatgtgtttcattctgactgtaaacacatttgtaaatgctgagaccaaaccccgacttatggatcctgagccacggccgtcactggccccgctaagcctcatcaccacacggccaggccagaccagcacccgcgggacgccagctccacccctgggccccgaggttcccacccgctgaggagccgggagctccgagaaacgcgccaggagctccaagaacgcaggagcagcccgcggtcggcagcaagtttgcatttctaaggtgaccacatctaataaaatgaaaaacgggtttactaaaacaggtccaaagacaacacggaagataagctacaaatccagcacacaaggcccacccacaccaggccccagcggcccgtggccaggacagggctgaggctccagtctcctccaaagcccagtcacacattttggtttttgcttcccctttcaggtttttaaaagctaaacctaggagcctggtgggtctgcctgtgctgggcagtgtgtccagcctgccgaggtcacgctctggtgcgcggtgccctcagtggcgccttgggtctcggcgcctgggcctcactcctgcgcgatgctcctcagcacgtacttgaccgtgtaagcaaaggctgcaaacccaactatcacaaacaagtctcccagggcgccacccaggagtccgtggtgccggttggcctgctggagccctgcgaggtttgggacggcccccggcgcatgccccgttgagcagctgaatcccgttctggacgaggtgcgtctccccgtctggaaccacgtctggcaaggggagagtctggggtctgctactgagttcgtcttgtgctttctgtttttgtttaatctcctccacgacttcaggaaataattcacaaaagactttatctttcaaattaaatgctaaactctgcactgccagttgtcttttcgtgaagtccgacgtctctatactgcccagggtggggcccttctccaccatgaagctcaggagcccagtcaggatggtggagacagaccaggccgggttccacgtgtccgggtggaaatccgtgatagaaagacacagcctggtgttgcacttaaacctcccgttgggagtgatcatatagatactgggaggtttgaaaggaaattctctgggaaaaattagttttccatgataatagccacccttcataaggggtcatctctgggcctcggacgacatagtgccactcgagaatattcgaagggaggggctcggcacagatgtaaggcaccgggtctttcttaatgcgaaggtagtcctgcttcagcctctgggttgccgtggtcggagccctcttactgctggtgctgctcatctctccctgtgctgcgcgtgggccgccgccgcgctcaggctcgccgtagtcgaggccggagcagggtgcggaaaagcggggcccgcgcccgaaacagccgcaccgccccgggattgggcccaccgaacccgccgcaggccgccgc

SEQ ID NO: 5215 - DNA, 1095 bp, Homo sapiens
cttcctccctttaacttatccattcacttaaaacattagctggtcatctggtaagcccgggacagtaagccgagtggtgttggagtcggtattgttggtaatggttgaggaagagaggccttcccgctgaggctggggtggggcggatcggtgttgcttgcctgcagagagggtggggagtgaatgtgcacccttgggtgggcctgcagccatccagctgaaagttacaaaaatgcttcatggaccgtggtttgttactatagtgttcctcatggcgagcagatggaaccgggagacatggagtccctggccagtgtgagtcctagcattgcaggaggggagaccctggcaggagagagcccgcctcaattgatgcctgcagattggaatttccagaggcttaggaggaggaagttctccaatgttctgtttccaggccttgctcaggaagccctgtattcaggaggctaccatttaaagtttgcagatgagcttatggggggcaatcttaaaaagtccacagcagatgccatccggctcgaggggccatcagctttgaataaatgcttgttccagagcccatgaaatgccagcaggcacccctcctttcctggggtaaaggttttcagatgctgcatcttctaaattgagcctccggtcatactagttttgtgcttggaaccttgcttcaagaagatccctaagctgtagaacattttaacgttgatgccacaacgcagattgatgccttgtagatggagcttgcagatggagccccgtgacctctcacctacccacctgtttgcctgccttcttgtgcgtttctcggagaagttcttagcctgatgaaataacttggggcgttgaagagctgtttaattttaaatgccttagactggggatatattagaggaagcagattgtcaaattaagggtgtcattgtgttgtgctaaacgctgggagggtacaagttggtcattcctaaatctgtgtgtgagaaatggcaggtctagtttgggcattgtgattgcattgcagattactaggagaagggaatggtgggtacaccggtagtgctctttaaaaaaaaaaaa

SEQ ID NO: 5216 - DNA, 494 bp, Homo sapiens
tttttttttgagctttataaagaacaatatttatttccatttacagcatcaaataccataaataaagctaaacattgtttgttttgctgtgtgcaaaatacagggttccgtgtggcactgtaaatgattaccaaaggtcacagacatgcgttgtgatgagatggggaggctagctaaagaggaggctgagaggggaggagggcactctttggttgacattctataaagggagggagactcttagagcagaagtgtgtcagccaagaagtgggtgtagcactggaaggctgaaatgaactggggggctgccttccagggtgccaatggcggccactgcgcaagaactttcggtgggagtgtctctccgaggggcttcctgctcttgccatgttgcctcctcctctctttgttgcttcaactctgcccgtctcttccgttgtttgctattggttttacagtgaatgaagtgaggcttgcagtaaaatttgccttcc

SEQ ID NO: 5217 - DNA, 664 bp, Homo sapiens
ggtgagggcgggcggagatgtagacccggtagtgttgtgccttgtggtgacaactggcggcagcgcgccgcgggcccgagacttagtctcgggccgccatggccagcgtccacgagagcctctacttcaatcccatgatgaccaatggggttgtgcacgccaatgtgttcggcatcaaggactgggtgacgccgtacaagatcgcggtgctggtgctgctgaacgagatgagccgcacaggcgagggcgccgtcagcctcatggagcggcggaggctcaaccagctgctcctgcccctgctgcagggcccagatattacactgtcaaaactttacaagttaattgaagagtcttgtccacagctggcaaattcagtgcagatcagaatcaaactgatggctgaaggcgagttgaaggatatggaacagttttttgatgacctttcagattctttctctggaactgaaccagaggttcacaaaacaagtgtagtaggtttgtttctgcgtcacatgatcttggcctacagtaagctttctttcagccaagtgtttaaactgtacactgcccttcagcagtacttccagaatggtgagaaaaagacagtggaggatgctgatatggaactgaccagtagagatgagggtgaaagaaaaatggaaaa

SEQ ID NO: 5218 - DNA, 1039 bp, Homo sapiens
ggcaggaactttacagtttataaagcttttgcataagtcacctctggttcttcccaaccatcttacgacgctttattactgtgatttcagagaagaaacaggcttacagaggttaagggcttgagaccactcaactggttttaagtggaatccagaccagaggtgccggctccacgtctactgccctttccacggtgccatgctgcctcccacaaaacatccacagtgcccttggccaatgaggggccgccatcggagggtcacaggaagccttttcacagtccctctgggggcatgagtggggagcagctcttctccccagagctttaaagccccatcgagggaaggggtgaggaactgacctcctgaaagtgccccgagtgtgtgtgtaccggggagagtggactcaatttttatttttgaaacctcatgcacagagttccttatattccccaggtcccacaagagtaccaggtgccatttcagaaccacctttctaaacctctgcccacccactgaaagcaacacggcccttcacagcctggcttccttcttttgacacacagcccttccgctccagtggagaatcgcccaaagatcatgaagggtaaatagtctcctctgaacccctggtctgggaaacccgtttcaaccccggggggagcccagtggccactggtgctgcccaggggctgctgtggggcagagataacacacagaggaagggtggggtggcaggagccctcccaggagcagggcttgcctgtaaacaatgagctgccgcctcgccaaggcaggaggtgattcatctcccccgctgctcagctcctgctggctgcgctcaccgggcaccaaaggactggggcagccctggccaggcgctgacgcctccccactctctgcacaggtcaggatctcaccccagcccttctggaaactggcttgacttcaaaagccttcctgggtgtgtccaaaaagtgatctggtctggggagtgctcaagtgcactcaagggagcacagctccaccatcacccgag

SEQ ID NO: 5219 - DNA, 1040 bp, Homo sapiens
acttcagagccttggaagtcaacactgtcacatgtcagctgaactgttccgaccatggccactgtgactcgttcaccaaacgctgtatctgtgaccctttttggatggagaatttcatcaaggtgcagctgagggatggagacagcaactgtgagtggagcgtggttatatgttatcattgctacctttgtcattgttgttgccttgggaatcctgtcttggactgtgatctgttgttgtaagaggcaaaaaggaaaacccaagaggaaaagcaagtacaagatcctggatgccacggatcaggaaagcctggagctgaagccaacctcccgagcaggcatcaaacagaaaggccttttgctaagtagcagcctgatgcactccgagtcagagctggacagcgatgatgccatctttacatggccagaccgagagaagggcaaactcctgcatggtcagaatggctctgtacccaacgggcagacccctctgaaggccagggagcccgcgggaggagatcctgtagccacctgggtctgtctcctcagggcagggcccagcacactgcccggccagtcctcctacctcccgagtctgcgggcagctgctgtcccagcatctgctggtcatttcgccctgacagtcccaaccagaacccctgggacttgaatccagagacgtcctccaggaacccctcaacgaagctgtgaatgaagaggtttcctctttaaacctgtctggtgggcccccagatatcctcacctcagggcctcctttttttgcaaactcctcccctcccccgagggcagacccagccagctgctaaagctctgcagcttccccagtgggacagtgttcattgtggcccagagtgctgcaaggtgaggcctgctgtggttgcccgcacacctgagtgcaaaaccaagcactgtgggcatggtgtttccctctctggggtagagtacgccctctcgctgggcaaagaggaagtggcacccctcccctcaccacagatgctgagatggtagcatagaaatgat

SEQ ID NO: 5220 - DNA, 537 bp, Homo sapiens
gaattaagagtgatggtgatggtgtgcacgtttcattaatccaaccaaaaataatgaaataaaatttgagccacagtataccactccttgggataaagttaaatatttttaaagatcacattttccatgaacgcctctagtagcaaaccattcttttgcacaccacaatgtttccctcagtgccctttctcaaatgggtacaatgttcccttgtgggccaaatttccctcccagggaggcaatttcagtgctaggatcattggattcagttcccaaaatagaatgtttcagtgagaccatgagaattccaggctcacaaagggagaggagagaacagggcaagacgtttggtttcatttgtcaccatttttaaaactctgtatgctagcacaccaaactcttgtctatatttacctttgtaccacagtattaatcgctattgttcatgtatcgtgctggaagtctgaactgactctagaggatgaattagcaagagggtattttaccaggtatgatctgacttcagttgtgccatgt

SEQ ID NO: 5221 - DNA, 817 bp, Homo sapiens
ccttcaagctggcgggagcaatggttcacataaagaaaggcgagctgacccaggaggagaaggagctactggaagtcatcgggaaaggtactgtccaagaagctggaacattattatccagcaagaatgttcgtgtcaactgtttggacgagaatggaatgactcctctaatgcatgcagcatataaaggaaaactcgatatgtgcaaattactactgcgacatggagccgatgtaaattgtcatcagcatgaacatggatacacagccctcatgtttgctgcactttctggtaataaagacatcacatgggtaatgttagaagctggtgctgagacagatgttgtcaactctgtggggaagaacagcagctcagatggcagcctttgtgggtcaacatgattgtgtgaccataatcaacaatttctttcctcgagagagactggattattacactaagccccagggactggataaagagccaaaactgcccccaaagttggcaggcccgctgcacaaaattatcaccacaacgaatcttcatcctgtcaagatcgtgatgcttgtaaatgagaatcctctgctgacagaagaagcagccctgaataaatgctacagagtgatggatttgatttgtgagaaatgtatgaagcaaagagacatgaatgaagtattggctatgaagatgcattacataagctgtatctttcagaaatgcattaacttcttaaaagatggagagaataaactggacaccttgatcaaaagggttctggatcccacttgcattctcccgtcccttacccaagccatcactg

SEQ ID NO: 5222 - DNA, 1297 bp, Homo sapiens
gtgctcacccggcccggtgccacccgggtccacagggatgcgaaggagcgggacaccatgaaggaggacggcggcgcggagttctcggctcgctccaggaagaggaaggcaaacgtgaccgtttttttgcaggatccagatgaagaaatggccaaaatcgacaggacggcgagggaccagtgtgggagccagccttgggacaataatgcagtctgtgcagacccctgctccctgatccccacacctgacaaagaagatgatgaccgggtttacccaaactcaacgtgcaagcctcggattattgcaccatccagaggctccccgctgcctgtactgagctgggcaaatagagaggaagtctggaaaatcatgttaaacaaggaaaagacatacttaagggatcagcactttcttgagcaacaccctcttctgcagccaaaaatgcgagcaattcttctggattggttaatggaggtgtgtgaagtctataaacttcacagggagaccttttacttggcacaagatttctttgaccggtatatggcgacacaagaaaatgttgtaaaaactcttttacagcttattgggatttcatctttatttattgcagccaaacttgaggaaatctatcctccaaagttgcaccagtttgcgtatgtgacagatggagcttgttcaggagatgaaattctcaccatggaattaatgattatgaaggcccttaagtggcgtttaagtcccctgactattgtgtcctggctgaatgtatacatgcaggttgcatatctaaatgacttacatgaagtgctactgccgcagtatccccagcaaatctttatacagattgcagagctgttggatctctgtgtcctggatgttgactgccttgaatttccttatggtatacttgctgcttcggccttgtatcatttctcgtcatctgaattgatgcaaaaggtttcagggtatcagtggtgcgacatagagaactgtgtcaagtggatggttccatttgccatggttataagggagacggggagctcaaaactgaagcacttcaggggcgtcgctgatgaagatgcacacaacatacagacccacagagacagcttggatttgctggacaaagcccgagcaaagaaagccatgttgtctgaacaaaatagggcttctcctctccccagtgggctcctcaccccgccacagagccgtaaagaagcagagcagccgggccggaaatggcgtgacccaccccatccatctccaccaaagacagttgcgcgcctgctccacgttc

SEQ ID NO: 5223 - DNA, 896 bp, Homo sapiens
atgggttgtagaagcgtgtgtttgagagaattcagagacatttgaaggctgctgtgtgcatgtttgggggtctgaaaagacagttgtgtgcatggatgtgtgcgtggggagaaagaacgtgggtaagatgtcccttcccagccctgagaccactggtcacagttggccacctccaacgggagaccttgtccttggcctagagtcctcccacccttggggggcttcctgcctgaggtcctcagaatcccactgcaatggacccagggcagcgcccaggaagccatgctggggcccccgccagccttattcccaaaagcaggggccagggagggggcgacttgcctgcccctgaagcccttgttcccattggccccagtttgcattctgcaggttttccattttagtgggttctgcttttatttcagagacagacatgtgtcttctctgtccgtttccaataggtaaagccatatcagttagactgcaatactttaaacacgagacaaaacaatccatatgtttagggaaccagaaaagtcccctgggtctgtcccttctttggggagcagggcctcgacagctccagctcccttgacctaccttcctccccgcaccccgcccccaccttgtgcccctgtgtccagcccccccagggggcctgtgtctgtgtctgtgcctgtgtctgtgatggggagccgcctcgcacccctgttgtctgcttgtctctttgtgtctgttatcctggggcaggatggtcattctcaaaaaccctggggtcctggggccagagacaggcagggcccagtccagggggccccagggttcccccagttcccagtgttgcgaagccccatttggacaaaagtgtttcagagaggtccccctctgccacttgc

SEQ ID NO: 5224 - DNA, 954 bp, Homo sapiens
ttttttttttttgctgtacaaggtctttttctttgttgtcatggttgattttgtacatttcagcatttgcatcatacaaaggggggagcaacagccatggcttttggtcaggttcaggggggctgagggggtgctcctcccctccccccaggcactgacacattgaaaggaagcagagcaacaatgacacagcacggatgtgggaaaggggatcccccacgcgggcaggatggtccatctcaccggggtctcaccaggactccccgctcccacccagggccagcacgagcacctcccgttttctccccagtgcagagcgtggggtgacaggagtgggactggagcaggggacatttggtgggaggcatgtcctcaggcctgggagagcccaggctgggccccagcctccctgtgcggtcaggggcctgtggaaccctagaggatggagcaggtggacagcaggggtgggcaaccctgccagctgggtactagggctattggggctggagggtctaccccactgtactctagccacaaggctgtggggtggctgctttgcccaccagctgtccccctgataggggatctgggctgcaatacttctgtatcctccctgttctctctctctctcttacacacacctgggatggtgtctcgacttcctgattccatctggaggagtaccctgcacagctttgcagttaaggacaccttctgggagcttctggatttggaggggaggacgtccatgtttggagaacctgacctgtcactggtgcccagcccagggcgatccacagccgcctttttgcttctctctggcagctcctcccaggcatgggagcctgggcccttccctgagagcacacacgctcacctcacctggtgcacgctcccttgaacctcattcttttttcacccatctacaaatgattgctccttcctattttgtca

SEQ ID NO: 5225 - DNA, 383 bp, Homo sapiens
  misc_feature (1)...(383): n = a,t,c or g
gaacacctactgcttcggccggaccgtggagacactgctgctccgctttggcaaggttctcttggccaacaccttctgcgtggaagcttacttgcagaatctcttcagcctctctcagctggacaagtatgctccagaaaacctagatgagcagattaagaaagtgtcccagcagatccttgagaagcgagcctatatctgtgcccaccctctggacaggacatgctgaggcaggggacagtgtcccctgctaccgcccgcccctacccatggcccgttgctggatgactgttactcttttttcagaaggtgttgggattatcacaggttaagccttttgntccccgtctgcacctgaagggttgtcncctgcctggagagcc

SEQ ID NO: 5226 - DNA, 1080 bp, Homo sapiens
  misc_feature (1)...(1080): n = a,t,c or g
ttttttttttttttaacagtacacagattgtgacattttatattctttgttaaatggttcctggtacatgttttaagtgcctctgcttctagtttaaatgaatgacccagacagagctttcaagctgtttcttagagaatgtgtggttgagcagaaatggctatccacacctgacacaggtccccacccacctcacaccctggaggcagcagcataagccccagtttccactatggtgtctcctcaatgaccagaatacccgccagttccaggggtcagcaattccattctctctctccggctcagttcagaagctgtgatggtcctgttagagagcactgcctgcaggtcaaaacctggaagaggctctcccaggccaggcgacaacccttcaggtgcagacggggaacaaaaggcttaacctgtgataatcccaacaccttctgaaaaaagagtaacagtcatccagcaacgggccatgggtaggggcgggcggtaagcaggggacactgtcccctgcctcagcatgtcctgtccagagggtgggcacagatataggctcgcttctcaaggatctgctgggacactttcttaatctgctcatctaggttttctggagcatacttgtccagctgagagaggctgaagagattctgcaagtaagcttccacgcagaaggtgttggccaagagaacctcgtggtcgtggttgcggagcccaatgcggatggagcggctggcccgcgacagcacggccgtcatgccatacaggttgatgaggatgttggccacccggcttcagtaccagctgctcctccatgatggtcttgccaaagcggagcagcagtgtctccacggtccggccgaagcagtaggtgttctcctcaaacttgttggcactgtccgcaagactggggtgcacaactccatggttgcctgtcagccccaggtccacagttcggcccagggagtccctgannccggccaacggtatccatgactgtgctcactttggcctgtttaagctcatggatcctggtagtcaggatgcggccgcatgctgcagacccgtcagggcgat

SEQ ID NO: 5227 - DNA, 407 bp, Homo sapiens
gctgattctggcacacagcgcttacaacagcagccactgagagctaaattgagacttcgtgaagggatgacagtatattaagaagcagttgactgtaaaaaatgttttttatgctgctagtctcatgactaatcagaatataaccactaaatatccttaaactaaataatagtgcaaatagtactaagttctaatgtaaagttttaataggaggtaggataaagattgtcatgaaaaatttttcaagtgatgttatagttttgtaaaataaaggcacagaaacaaatcatgttattgagtatttgcaagggagagattaattttagtgtgaactgacctcagatgtaggttcacaaccttgttgatcaataggaattaaccaagtagagctcaggaggattggtaag

SEQ ID NO: 5228 - DNA, 219 bp, Homo sapiens
gtacacattccaaaaagagattgaatacacttgcaatgaagggttcttgcttgagggagccaggagtcgggtttgtcttgccaatggaagttggagtggagccactcccgactgtgtgcctgtcagatgtgccaccccgccacaactggccaatggggtgacggaaggcctggactatggcttcatgaaggaagtaacattccactgtcatgagggcta

SEQ ID NO: 5229 - DNA, 381 bp, Homo sapiens
gggaaaattctcgcgttctgggttaatgccctgtcacccatgtcctcgtgactattaccaacctaatgcagggaaggccttctgcctggcctgtcccttttatggaactaccccattcgctggttccagatccatcacagaatgttcaagttttagttcaactttctcagcggcagaggaaagtgtggtgccccctgcctctcttgggacatattaaaaagaggcatgaaatcagcagtcaggttttccatgaatgcttctttaacccttgccacaatagtgggaacctgccagcaacttggggcgtggttatgtttgtctctgtccacttgggatattacagggtttaaagtgttgaaacaggacatcgatgagttgcag

SEQ ID NO: 5230 - DNA, 1504 bp, Homo sapiens
ggcacgagttcacctgtcagaaagatggtcgctggttccctgagagaatctcctgcagtcctaaaaaatgtcctctcccggaaaacataacacatatacttgttcatggggacgatttcagtgtgaataggcaagtttctgtgtcatgtgcagaagggtatacctttgagggagttaacatatcagtatgtcagcttgatggaacctgggagccaccattctccgatgaatcttgcagtccagtttcttgtgggaaacctgaaagtccagaacatggatttgtggttggcagtaaatacacctttgaaagcacaattatttatcagtgtgagcctggctatgaactagaggggaacagggaacgtgtctgccaggagaacagacagtggagtggaggggtggcaatatgcaaagagaccaggtgtgaaactccacttgaatttctcaatgggaaagctgacattgaaaacaggacgactggacccaacgtggtatattcctgcaacagaggctacagtcttgaagggccatctgaggcacactgcacagaaaatggaacctgggagccacccagtccctctctgcaaaccaaatccatgccctgttccttttgtgattcccgagaatgctctgctgtctgaaaaggagttttatgttgatcagaatgtgtccatcaaatgtagggaaggttttctgctgcagggccacggcatcattacctgcaaccccgacgagacgtggacacagacaagcgccaaatgtgaaaaaatctcatgtgggtccaccagctcacgtagaaaatgcaattgctcgaggcgtacattatcaatatggagacatgatcacctactcatgttacagtggatacatgttgggagggtttcctgaggagtgtttgtttagaaaatggaacatggacatcacctcctatttgcagagctgtctgtcgatttccatgtcagaatgggggcatctgccaacgcccaaatgcttgttcctgtccagagggctggatggggcgcctctgtgaagaaccaatctgcattcttccctgtctgaacggaggtcgctgtgtggccccttaccagtgtgactgcccgcctggctggacggggtctcgctgtcatacagctgtttgccagtctccctgcttaaatggtggaaaatgtgtaagaccaaaccgatgtcactgtctttcttcttggacgggacataactgttccaggaaaaggaggactgggttttaaccactgcacgaccatctggctctcccaaaagcaggatcatctctcctcggtagtgcctgggcatcctggaacttatgcaaagaaagtccaacatggtgctgggtcttgtttagtaaacttgttacttggggttactttttttattttgtgatatattttgttattccttgtgacatactttcttacatgtttccatttttaaatatgcctgtattttctatataaaaattatattaaatagatgctgctctaccctc

SEQ ID NO: 5231 - DNA, 539 bp, Homo sapiens
agcgcgtcttgggtctcccggctgccgctgctgccgccgccgcctcgggtcgtggagccaggagcgacgtcaccgccatggcaggcatcaaagctttgattagtttgtcctttggaggagcaatcggactgatgtttttaatgcttggatgtgcccttccaatatacaacaaatactggcccctctttgttctatttttttacatcctttcacctattccatactgcatagcaagaagattagtggatgatacagatgctatgagtaacgcttgtaaggaacttgccatctttcttacaacgggcattgtcgtgtcagcttttggactccctattgtatttgccagagcacatctgattgagtggggagcttgtgcacttgttctcacaggaaacacagtcatctttgcaactatactaggctttttcttggtctttggaagcaatgacgacttcagctggcagcagtggtgaaaagaaattactgaactattgtcaaatggacttcctgtcatttgtttggccattcacggacacagg

SEQ ID NO: 5232 - DNA, 313 bp, Homo sapiens
ggaagctgaagtccgggcagctgctgcccacaaagtcatagaacttggggagaacttgcccattgaagatagagagaccataattatgaatcaaattctgccttatataaagtgtcctgacgttcgtttgaatatcatctccaatttggattgtgtaaatgaagtgattggaatccgtcagctctctcagtctctccttcctgccatagtggagctggcagaagatgccaaaatactattgttcccaaagtgttagtaatggcaaatgatcctaattacttgcatagaatgaccactttattctgcattaatg

SEQ ID NO: 5233 - DNA, 640 bp, Homo sapiens
  misc_feature (1)...(640): n = a,t,c or g
ttttttttttttcgttatgctgcatttattatgagaatcaacagtcaacagttaatgattgactaactcttgttgttcactctggacattaacgaaaaagactggaatagggctacagcgctgcttttatgctacacgggttatgcttggactctgactcccagcagcaggtagattcaggaattcatggcagtgacattcaccatcatgggaaacaccttcccttttcttcaggattctctgtagtggaagagagcacccagtgttgggctgaaaacatctgaaagtagggagaagaacctaaaataatcagtatctcagagggctctaaggtgccaagaagtctcactggacatttaagtgccaacaaaggcatactttcggaatcgccaagtcaaaactttctaacttctgtctctctcagagacaagtgagactcaagagtctactgctttagtggcaactacagaaaactggtgttacccagaaaaacaggagcaattagaaatggttccaatatttcaaagctccgcaaacaggatgtgctttcctttgcccatttagggtttcttctctttcctttctctttgtttagtcttcgttctctttttcagtttccatcagatctnnccctcgtgcc

SEQ ID NO: 5234 - DNA, 1108 bp, Homo sapiens
tttttttttttctaagtatagattcttttattagacatgcaaagagaataatcacacaactaagttttccacaaacgtttatgtacacgccaatgtatgcatgagacatctttcaattaaaaatgtttaaactgatttttttttaaataccactataccaatgaggataagctgattttttaacttagattttatagctctagttttgcagttttggaaaatagcaggttttaaacaaaattaatatatgagctatttaaaatggtctttttagagtaagtcttacacataatggtcatttgctacttggattttcttgtccaattaatagtgacatttgacattgtatttagtctttccttccattcattaaacaaatcttactgtgcatgtagggagtatagaatgctacatttaatcttacgagatcatgctgtttaccaaattttatgatgaaattaatgctttcttcagtaggcagtcttacattgtaggcagactcctgtcaagttttgtctttcaaaatggtcctcattagcaagttaccaaaagtaaaaatagggcaataaagtaacagaattccttttaaacccatagtaagctcttctggcatgaatttatagccctcttctacccttccagccaaaggtcattccaaatgctatatgtggaatttgtctgaagggtaaggagtccaacaagaaaggaaaggctgaatcacttatacactgctcccaatgtgagaatagtggtaagtattgaaatgtctttttaaaattttaaccaccgtatttattggttcaaaaactagaatttatagtttcaggcagatttcaaccaaagagtcaccaaattaaatacacagggtagcttgtgaggcatagacacagcccatgtgttttcctctacattgtatattcatttctctttggcgatttgacattatagccattctctggaagtcctaaagcaaactagtattttatgtgccatattaagttaaaatttcttatgtgagataccactaatactggttttgatttaggccatccttcttgcctggatatgacaatggagcttgtttctatgattaagacctacccatggc

SEQ ID NO: 5235 - DNA, 895 bp, Homo sapiens
  misc_feature (1)...(895): n = a,t,c or g
cggaaacaatgtagattaggaagtttcatgaaaattaacttttggggctatggagaaacagttaagtatcttaagttactaaacatttccactgaatttttggagtgagccaaggttactataaaatactttggaagatgaattctctacctggagttagtttcgagagtaagcgtantttctaacagaaataactgcagattttaagctcataatttgcaaaaaaaatcttttattggcatgaaaataatgttgtaaatggcaccaaatattccacttaaatgcatatacagtattagagtcaaaaactattttatccctctttgctgtttttcccccttctgcccactttcctgggtgttgggggggcccgctgacaacagtcacaaatccagcgacctaggaaaaaaattgttaatatagaatgaaaaattatctttacaggactgaattttaagcccatctaaactcttctgccttagctatcactaatgatattcctctctggattttgtggtgagaagggcactatgagttccttaatttaaggaaaaaatgtaaacttaatcaatgtaatcaatgccatgcaaaattcattgcaagtcaagggggatgggagagatgcaatgccatacggtgatacggacctttaagaaagtacaatctttcctgaaattcaaacactatcatacttcaaaaggtcaaaacccattccggaatttggcttttttaagactttttctctcctgctcactggcagctgtgtgtcttaacagcattctttcaagtcctggtgtactctgctgacagcactttaaaactttaacagcacaatgataacttgtactacatacttgatctgaattactacagaaaaataattatgttgctttgc

SEQ ID NO: 5236 - DNA, 1703 bp, Homo sapiens
ttttttttttttcaagtttccactttataaggacataacccccattccatttacttcccccgccctccttcaacattcccacttgtattttccggctgtatttttaaaacatggtaaataacatttgcactccactttgtaaccataattaagtatgcccttaaacaataaaaaccataaacaacatttgtattttacgattatttaaatgttattcactgaacagccaagctttgtgctactatgggatttcgttttctgcggttccaagtcttgatccacgtcctgccacaggatcactgaagtagagcccattttcttacactctcgccattagttcaaaagcttgcagcattttatgtctggtacttggaggatgattttcctgtacagttttgcgtttttttcaccgaaaatttctgattattattgttttctcttgtgggatgaaatatgtaccttctatatcacagcccttaataccttcagcttcttattcattgaaatcttgcttacaatccagtccgaggattcccggtttactgattttctttttcctgcaaattttagccttctgttttgttttgaaataatgcatcctctgcgctttgtcacattctgaaattcgtcaggtgttttaggatgcacactttcttagatgttttcgagggtcttaactgcagttctgtttccggaacagcgtattctctttctagggattgtaggctcccggccgccccctgaggagctccgctagcagctaagagggcagccacgaagagcgcctgagcactctcgcgagactgtggggctcgccattggctgctccgccgcgccgcaacggaccctgggagtcggccatcatgctggccccggaggccgttagcttagtcatggctctaaatatgtacctgcaatcggatgttgaggatcaccgagcccgcgacgtagaagtacgggaagttcatgcgcagtgccaggccagctcgaagaaggcgagcagggtgcgggagagccccttgcagaagacgccgtacgaggttctccagcatttggctcaaggccccaagggcacatgtgacaagaaggcgccggctttttaaacattggaagttcttctgtgtcagttctgtgacagaacatttacttaacacatcatgaaggctagtttggatgtggaggggaatagactccatctatccatatgagctgctgcagaagaatattttgcctgctggaacctgctgtatctactcaagagtggaagttttcacagatgtgaactatgaagactttactttcaccataccagatgtagaggactcaagtcagagaccagatcagggaccccagagacctcctcctgaaggactcctacctagaccccctggtgatagtggtaaccaagatgatggtcctcagcagagaccaccaaaaccaggaggccatcaccgccatcctcccccacctccttttcaaaatcagcaacgaccaccccaacgaggacaccgtcaactctctctaccccgatttccttctgtcagcctgcaggaagcatcatcattcttccggagggacagaccagcaagacatccccaggagcaaccactctggtaatctagaattcagtggcagaaaataaataagaagataacttccttcagaaagccatgacattgaaataatgtggtcataactctttc

SEQ ID NO: 5237 - DNA, 937 bp, Homo sapiens
tttttttttttgtttttttgaaaaaccacagcagtcactttattcttaagtttgcactttacaaaaccacaagggagaagtccttgaaggggagacaggggtaggggattagggagtgggggatggtaaagaggggaagaggaagacccagaaacgaagtcccctccaaccccatctcggggaccaagcagagactaggcctcaggctagcccagcaggcgttcctgtgtcctggttgtacagagctaggccaaaagacctcaggggaagggccacggcctcctagagactgccgccatttgagggacagccacaggccaatgtttcctgtgcccaaagaaggaagtgggcctcccttcccctcccctaggccagataatcagcctgaggcaggggtgagggctacccatccagcagcttcaggatgctctcacgctccttcagagtcttccaggcctggtccttttctttcttggtgggagtccgcttcttctgccgggcagccatgatcttgcgaaaggcgtccatgacctcgttgtcagccatgcgcacccgctgcctcagctcctgccggctcacctcctcctttgccagcctcagcaggtcgtgcttcttggtgcggttgtgggcactaagtgccttcagctcagcctgccgtttgcgaagctcagcaaggacctcatcctcggagtcctctgcggggcggtcctcagactccaaaaggccctgggcaattagctcctccttgatgcggctctccagggacttagtatgcggcacactgaagggcttgttctgattgcgaggggaggtgcttgccccgtcagcccctgattctttcccagacatgtcaggaataggagaatcctccataggggaaataatattttcctccaccagggcctgcaggaggcgctgcgtcagggcaccaaagggg

SEQ ID NO: 5238 - DNA, 424 bp, Homo sapiens
  misc_feature (1)...(424): n = a,t,c or g
accnnnnnnnnnnnnnnnnnnnnnnnnnnnnnnnnnnnnnnnnnnnnnnnnnnnnnnnnnnnnnnnnnnnggcacgagaggcaggggaaatgactccctataaaggttgtgagagagctggttagccatacgcagaagaattaaactggaccnnnnnnnnnnnnnnnnnnnnnnnnnnnnnnnnnnnnnnnnnnnnnnnnnnnnnnnnnnnnnnnnnnnnnnnnnnnnnnnnnnnnnnncttaggaaataccattctggacactggccttgggaaagaatttatgactaagttctcaaaagcagttgtaacaaaaacaaaaattgacaagtgggatgtaattaaagagcttctgcacagcaaaataatcaacagagtaaacagacagcctacagaatgggagaaaatattcacaacctttgcat

SEQ ID NO: 5239 - DNA, 524 bp, Homo sapiens
  misc_feature (1)...(524): n = a,t,c or g
gaacctgacaannnnnnnnnnnnnnnnnnnnnnnnnnnnnnnnnnnnnnnnnnnnnnnnnnnnnnnnnnnnnncaaaaattgaaactggaccttttccttacaacttatatgaaaattanctcaagatggattaaggaacttaaatgtaaaaccctagaaaatgaaaaacactataaaaaccctataagaannnnnnnnnnnnnnnnnnnnnnnnnnnnnnnnnnnnnnnnnnnnnnnnnnnnnnnnnnnnnnnnnnnnnnnnnnnnnnnnnnnnnnnnnnnnnnnnnnnnnnnnnnnnnnnnnnnnnnnnnnnnnnnnnnnnnnnnnnnnnnnnnnnnnnnnnnnnnnnnnnnnnnnnnnnnnnnnnnnnnnnnnnnnnnnnnnnnnnnnnnnnnnnnnnnnnnnnnnnnnnnnnnnnnnnnnnnnnngantcanncagtcctgttaaagaaatgggcccaggacatgaacaaacannttncaagacgnaganattntntgggcaaccaannttaaaaatccc

SEQ ID NO: 5240 - DNA, 1144 bp, Homo sapiens
  misc_feature (1)...(1144): n = a,t,c or g
aactcagaaacaaatccatatattacagtgagctcattttcaacaaaggtgccaagaacatacattgggaaaaggacagtctcttcaaaaaatggtgctggaaaaactagatacctgtatgcagaagaatgaaacaagacccgtatcttttggccatatacaaaaatcaagtaaaaatggattaaagacttaaatctaagacctcaaattatgaaactgctaaaagaaagcgttggagaaactctccaggacattggagtgagcaaagatttcttgagtaataccccacaagcacaggcatccaaagccaaaatggacaaataggatcacatcaagttaaaaagcttctgcacagcaaaggaaacaatcaacaaagtgaagagacaacccatagaatgggaaagaatatttgcaaactatccatctgtattaggccattcttgaagtactataaagaaatacgtgagactggggtaatttataaagaagaggtttaattgggctcacagttttgcagggctgtacagggaaggcatgggtgctaacatctgatcagcttgtagggaggcgtcaggaagcttccaaccatttgtggaaggccaaaagggggataagtatctcacatggcaggtgcagggccaaagagagggggagggaggtgccacacacttaaccagatcttgtgagtactcaggtcttgtgagggttgcttgaggtcatggatacccatttaccctgatgtgttcatatacatttccatgactgtatcaaaatatctcatgtacccccataaacatatacacctatttgtacccacaaaaatttaaaaataatttcaatgtttgaagactcattattaaaataatagcagtttctataaatttaatatttcaataaaactcccaatatttattcttaacactggaaaaacttttccaaaatgcatatggcagaaatatgggcgttgatgaaaggacagcatcaattaatgagggatcctctcccttgatcaaaacaccttccaccaagacccacctttaacgctgaggcattacctctcaaagtgagatttgggcaggggactaatatccaaactgttattcaacatctggacagggtgtttcacaaccaggattntataagg

SEQ ID NO: 5241 - DNA, 545 bp, Homo sapiens
  misc_feature (1)...(545): n = a,t,c or g
tgtgccctggaaaggttctgcaggctccccccacttggtccctgtgctggangggaagcagagaaggggctggcagccctccaatctgcgggaccttcactgagccttcttggtcactctcttgctcttcagcatcacgtaggagatgaacagtcctgggatacacagaccagaaaggccacataagatctaagctcagggctgctgggaggccagggcatgacacagcagagccacccacacacagggctgtgaacctacccaaccatcctccagggaacctgcttatctccctagtcattcgtcaaggcatatgtctacctttaattatctaccttgcatgacaaaactttgccattccttatctatttttcttttggctcctctattcctgacacaacaagggtggacatatttcccacacgcttggttttgcagagtacctatatcagttaggtttttctgccagagaaacctctccaacactacattacatattgatatctcacatgtctttggattcagtttttctaagctgggtttgg

SEQ ID NO: 5242 - DNA, 890 bp, Homo sapiens
catttggctgaagtttagggcctgtcctagccaattatgttctatttgaaaggctgatgcttaacttggtctattgcaggtcactacaacaaacccaccctctcccccaaatacatatttgttaaaaatgctctttaaactaaggactcctccctttatatctcatcacagttttattttaaagaactatgatatccagtatttttccatgagagatattgatcgacttggtatccagaaggtcatggaacgaacatttgatctgctgattggcaagagacaaagaccaatccatttgagttttgatattgatgcatttgaccctacactggctccagccacaggaactcctgttgtcgggggactaacctatcgagaaggcatgtatattgctgaggaaatacacaatacagggttgctatcagcactggatcttgttgaagtcaatcctcagttggccacctcagaggaagaggcgaagactacagctaacctggcagtagatgtgattgcttcaagctttggtcagacaagagaaggagggcatattggtcctatgaccaacttcctactcccagttcaccagatgaatcagaaaatcaagcacgtgtgagaatttaggagacactgtgcactgacatgtttcacaacaggcattccagaattatgaggcattgaggggatagatgaatactaaatggttgtctgggtcaatactgccttaatgagaacatttacacattctcacaattgtaaagtttcccctctattttggtgaccaatactactgtaaatgtatttggtattttgcagttcacagggtattaatatgctacagtactatgtaaatttaaagaagtcataaacagcatttattaccttggtatatc

SEQ ID NO: 5243 - DNA, 713 bp, Homo sapiens
ttttttttttttttttccaggtacaacagcaggttcttttccaattcctcaaagcgctgcatggggtgggggcagagacagaagagaatgtaaacattgggttccaccccctggagctcaagggaagacccttacccagatagggactaactggaggggtggaagggaacaaggtgaaaggtatgggtcctggtgagacaaaagcaggggggcctgagaacacagagcaaggtgggtttggagggagcacagcagggtgcaggaagggagatgggggacatttcctattccagtgcatgtccccttaaataaactgggtacaggagcattatggaaggagaaccaaaggacagaagacaaagcgagcacccccaccccaggccaacgccatcctctgtacacaattacaacacaggtccagaatgagagccctggccaggaagtgggggagacagggagggctgaagacagggaaaaggaagccagctccacctcatggtaaggggagctatggagtgtaagaatctgaaactgctgactcccatcaccaggagtcacccctgggatgacaacgggccattcaggacagcacctaggaggggacccagagggaactggggcaggagcgacagagaccccagctgagcctcatgggagatgagaggctccagactcatttgcagctgcccatctgtcctgcccgtgtagggatc

SEQ ID NO: 5244 - DNA, 2048 bp, Homo sapiens
acgcagtcctttttgaaggccagtttccctctatcacataacctgtcacatacattagaattttttttttaattctttaggcttgaaaattaccagagtgttcataataaggatttggaaaaggagtctattcaaccaagcagatctctgcctttctttcgtctttactatgaattctgaataaaatggagaacacactctcaatatgtagaaaaataaaattttggcaaaacaataattactgtttttctgtatgtacttagcagtgaaatatttataggcaacagattttaagaagtcagttccatggctattaaaaaatgtttaagttaatgaaatttacagtgcatattaaaagcatgatacaaatggaaatttaaaattttgtattaggaagcccagtttgctaaaagtagcattaatatcattcacatcagattttaatttgttacacatttttgtagttcagcaaaggcccctatgatgaaaaacaattaaaaagtgttatgacaaaaataattatctgtgtaaaaagggggagacccaaaagatttttcatatggttatttaattcagttaaatagaactgttatgaatttgagaggaatgaagatattcaaacactaacagaaaatcattagccttatattagagcattcaaatgcttatgtcactcttcaatccatgtggcttcataaaaaccaaatttttgaacacaaaaaagtggcagagtttacattaccttttgtatgttcctaagtatgaaattgcatcaatttattatgaattaaatttgaaaagcatcacagatttaaaaacaaagtacaaaagagcctgattctttttaattccacaaatacctagcatctcaaagtaacatgtaaacaaacttctatgctgctcaatgaatccttccaatttcgataataaactaaatagtattggatctagtatatgactttcatgtgtaagttatggttctatccattactttaacaatattactgatgtaacagagaaaaattttcaactattgtatttatttaaaacaaactgacaagttcaagcacctgtcttcagaaaagccagcagcatttttttttttttaacatactcaaagtaagatttggcctaagcccttaatacctttctgaacagccatgcaactaaacaccctcaggagatgttacataagggagagaagaacatggagcaatttgcactttttcccctagataatattaacaaggtaaagcaaatccagatctttatgaatgaatggctgtcatgtttaatacacttggagctctataaaactagagccactatcatatatgtttatatagatatatatgtatttttaataaagtctctcacttgcttcaaaatttaaggatgatctttttcctggtcagtcatttcaagggaacaataaataaagtagaaaaggatgaactgttttgcatatttctgtggaagaacggaaaacatactttgagaggttcggaaaattcactgtacagaatgaacagcttatatacactatctgtgcaatttttcttggctggggtatttaaatgcaagagctcctccaaaataagaagccacattcattcttgtccaaatccctctgtctcttctattgcaaaaagaagtttttcctttagttgttcataactcttatatggtggtagatccaagcgattaaaacatgtatggcttcttggtaaccaagtgtctttgccaactttttcaatgcaaaacttttgaggcccattacttcccatgagctcagcaaatcctcctagaggtaaacggcaggttccagtgacgaactgcaatagtcgcattcttacttcattgtctgtctctttcacaaactgccaaaaccaaatgatttgcttgctgtttcttgtataatgtcgataaacagtatttctctgccaatctgccaagtcaacctcctgcatgccacacaacataacctctaattctttttcatcgaagtactgtagccactgaagaggaacaacttcattaaaaccatc

SEQ ID NO: 5245 - DNA, 1064 bp, Homo sapiens
  misc_feature (1)...(1064): n = a,t,c or g
ccaacaccagcggctgggggcgggggcggaccttgtgaggctcagttgacccgttacttgcaacctgaaaacaaatcatgtttttgacttaaattcttttctctgagagaacccaaggggcttggggtgggaagcagtctctccttgggattctgcggccgatgtgggatagaagaggtagcatcctggaagccagcctctctggggaacatgagcccccttcctcggggggctgccttgcgtcttagaggagggagagcagagagcacgcatccttggctcctggctctctgagcttcctgatacaggatctgagcatgtccctggggattctgagctgccaacagggccctgggtagtcacatcttgtactcccctttgctgtcccggaggtagtggcaggagttgggccagcccccactaagtggcaggggaagactcacgattgggaagctacctctttgggaatcttggatgtggtgatctcaagttcccacaggccacctccttctggccactcactgctggggacccagggcacctcccttctccatcctctctggattgtcagtaatgtcctggaacagaagcctgtaggatggccttgggcacggagaagccctggggtcagtgtcgtgcacggatggcggcagtgttgaacccaggaggctgaacccggcccaccacggaagatgagtgcatggcaaccgcctggccttcacgtcgctccacttggtaaccccaaggtctgggctgttctaggtattgcttcacgtgccccagcaagcccttaacaagagggcctgggttccctgaagaaccaatcccaggaaggggccttgatccctccgccttgctgagagtgaaccctcgtctctcctcaccctccatttcatttctgggaattggggcttagtttcgaacctttgggcaaggctgttcttactaatgcccaagcccctttacccctctccctattaggttacacaggggagaccagggggcttgggcagaaggattgttgncacatttncggattcanttttgntttggccaaantaggg

SEQ ID NO: 5246 - DNA, 602 bp, Homo sapiens
gcaaggcagcaggatggaggggtttgtaaaaatgccttccacctaccctgctgggcttgccgaggaggctctgagtgtgtgaaggggaagacaattatcgctaggctggagaatagaaagagcaccatcagtccagtgagttgcaagcctaatgctcacctgcagagacagaattcctgagtgaacgaacagagcagctcctcttccatctccagaaatgacctccaccttcaacccccgagaatgtaaactgtccaagcaagaagggcaaaactatggcttcttcctgcgaattgagaaggacaccgagggccacctgggtccgggttggtttgagaagtgtagcccagcagagaaggctggccttcaagatggagacagagttcttaggatcaatggtgtctttgtggacaaagaagaacatatgcaggttgtggatctggtcagaaagagtgggaattcagtgactttactagttctggatggggattcctatgagaaagcagtgaaaacacgggtggacttgaaagagttgggtcaaagtcagaaggacaaggtttgagtgataatatactttccctgtgatgaatggagggggccaa

SEQ ID NO: 5247 - DNA, 833 bp, Homo sapiens
  misc_feature (1)...(833): n = a,t,c or g
cgaagatggcggagtaaggcgtgccgctgcaaactggcctctgggccgggggcgagcagcccccgggaggccgagtgcatctgttggaccgtgcgaggagaagaaaaaaaatatcggccagaggagaggaactaaccgaacattcttcctccctaccttatagaggggagtggtcatctacactaaagcaaagtgttaggcgcgtccgtgcgaagagaccaccaaaggnggctttgtgttccttatcacaggaagaaaattttccttgacctttaggtgcttttatattcatctcaaaaacaaaattctgaactcaggacttggcaagtgtctctatgttgtctcctagagtgggtagtcctgcttcttttacccagttactttccctgtttttgaaatgtggctatcacttctctacacattacctccatgatttggaatggaaaaggccacttttctttttgttctgcctctcaaattcaacacagaggagctcctaggattccagttatcctgctaacatctccaggaagaaagaagcaactcacatgggtcttttgctgtttgcttaattataaagacatcattttgcaagcagaaggctgagtttcatttgaaacaggtgcttaggtggtggtatttgtgaatacttttcattccaagcaagaagactaaagaagtagcaagtatgaatgacttcagggtttaaaaaaaatgtcttccagtttcagccactaccatgataagcacagttgagactgcagcagtaaattccaaatatgtgtttctaatttgacgtgaaagatactaaaaatttatatttgtatatttaa

SEQ ID NO: 5248 - DNA, 1039 bp, Homo sapiens
  misc_feature (1)...(1039): n = a,t,c or g
aaacaattgttcaaaagctataaaacctgaatgaaagctgaagctgaatttataagccttgttgcatatgagccaaaagtgcaaaaagctctatataatgaactaacctgccactcgtataaatataaatatatataaatatattaaaatcagactgttctacaaaattgtgtatttgtatttttgtgtacgtacaattttctgctaagcagaaggaggatgtagtataggatgctgtgaggaagagatttggtttaatcctatttctttgttacttatttttgttaacatcaggatgcctgtctttgtcttatatgtgtatgacactgtttgggaaagctgcagtatctctcttcctgaggtccagaggccattaaaggaataaacatggggcttagaggtgtcttggccaccaaacacaggtaagccaacagagttcgggctcccgtacgtggtgtggtgggacctggggcctggagccacttgtactcctggggtgggactgagggagggaaagggctcccccacttcaggctggtcactgtatgttgacttccctctgggaagcaaaattccacttgtaaaaatcagcttccaagacaaaagatgatccgatgtcacttctgggtcaccaggaagggacacaggatctctctgaactttggaacagaccctcatattctggggccagaagtttgcccagaaagcagcaggtgggntttgcctgggctgtagagcccaggctcattggctgtccctgggcttcgtctccctcttccgagtagttgctgcctttcttcagatcaggttaccacaatgcctccccgctgctgacgcttcatcccccacacctccagcccccagttacctgggagcttctcagaacccactttgccggtgctaaaacacaagagagggtgaaagtggctgccagtaatggcccagaaaccaaccaccagagggccagggttgaaagacaagctcacgggtgtcaggggctgacgggccaaccatgtggcaggtcccaggccccacccac

SEQ ID NO: 5249 - DNA, 555 bp, Homo sapiens
cggcgcatctgtgagggagtcgctgtgatccggggccccggaacccgagctggagctgaagcgcaggctgcggggcgcggagtcgggagtgcaggcctgagtgttccttccagcatgtcggagggggagtcccagacagtacttagcagtggctcagacccaaaggtagaatcctcatcttcagctcctggcctgacatcagtgtcacctcctgtgacctccacaacctcagctgcttccccagaggaagaagaagaaagtgaagatgagtctgagattttggaagagtcgccctgtgggcgctggcagaagaggcgagaagaggtgaatcaacggaatgtaccaggtattgacagtgcatacctggccatggatacagaggaaggtgtagaggttgtgtggaatgaggtacagttctctgaacgcaagaactacaagctgcaggaaggaaaaggttcgtgctgtgtttgataatctgattcaattggagcatcttaacattgttaagtttcacaaatattggggctgacattaaagagaacaaggccagggtca

SEQ ID NO: 5250 - DNA, 630 bp, Homo sapiens
gagcgaaaatatcccaggagagaatactactttgcaataacaatggaaaggtcatttcaaggtcctgtattaataggaagttcacatggtggtgtcaacattgaagatgttgctgctgagactcctgaagcaataattaaagaacctattgatattgaagaaggcatcaaaaaggaacaagctctccagcttgcacagaagatgggatttccacctaatattgtggaatcagcagcagaaaacatggtcaagctttacagcctttttctgaaatacgatgcaaccatgatagaaataaatccaatggtggaagattcagatggagctgtattgtgtatggatgcaaagatcaattttgactctaattcagcctatcgccaaaagaaaatctttgatctacaggactggacccaggaagatgaaagggacaaagatgctgctaaggcaaatctcaactacattggcctcgatggaaatataggctgcctagtaaatggtgctggtttggctatggccacaatggatataataaaacttcatggagggactccagccaacttccttgatgttggtggtggtgctacagtccatcaagtaacagaagcatttaagcttatcacttcagattgg

SEQ ID NO: 5251 - DNA, 414 bp, Homo sapiens
gaggacggctcgcgtgagtccacgtgtaatcggcccgggcccagcactggcggagactgacgcagttcttctacctgctttcccaagggcgacactcggctccactccagttgggccgctggacgccctaggggcccggcagttgctaggcaacgccggaagccctcaggaacgtagttccacgtgcgacgtaagatggcggatccggatggggcggaccccaaagctggctcccaactccgctcaccccctcctatacagggctcttggttcacggtctcttggttcgtcctgctgcaagttgggaagaaagataataggaatgctaattccttcttgatgaaacgaccacaacacgctggagccggccttggaccctacgtttcaagattggcctgcttccagcgctgccag

SEQ ID NO: 5252 - DNA, 370 bp, Homo sapiens
accattccaatttgaaatggactgtgtacacgcttcatttagtacttttgtaaactgtgtttgtgatctgacagcagcctgtgaaattcataagaatcacataggatgtaaatctccatgatgtatgccaattacagaaattaggttggtctgtgtctttgttactaacaaaaatagctatagcagtggccttcagagatgtagagtctggaaaaacttgatcttaatgtcaggttctgggcactgcttttacagttatagccctgatgagagctatcagtaggggaaaataatttatgggaggaaatttaattttgctaaaagagataaaagtttatggctcataaaccctaatgtaggtttttatcct

SEQ ID NO: 5253 - DNA, 2476 bp, Homo sapiens
gcgtccgggcacccgatgagactgctggcgggctggctgtgctgagcctggcgtccgtgtggctggcgcggaggatgtggacgctgcggacgccgctcacccgctccctgtacgtgaaggagaaccaccagtggtatgtgtgcaacagagagaaattatgcgaatcactccaggctgtctttgttcagagttaccttgatcaaggaacacagatcttcttaaacaacagcattgagaaatcgggctggcctatttatccaattatatcattcttttgtgtcatctgtttttagcctgtttatgtctagaacatctatcaatgggttgctaggaagaggctcaatgtttgtgttttcaccagatcagtttcagagactgcttaaaattaatccagactggaaaacccacagacttcttgatttaggtgctggagatggagaagtcacaaaaatcatgagccctcattttgaagaaatctatgccactgagctttctgaaactatgatatggcagcttcagaaaaagaaatacagagtccttggtataaatgaatggcagaatacggggttccagtatgatgtcatcagctgcctgaacttgctggaccgctgtgatcagcccctgactttgttaaaagatatcagaagtgtcttggagccaactagaggcagggtcatccttgcccttgtcctcccctttcatccctatgtggaaaacgtaggtggcaagtgggagaaaccatcagaaattttggaaatcaaaggacagaactgggaagaacaagtgaatagtctgcctgaagttttcagaaaagctggttttgttatcgaagctttcacccagactacccatacctgtgtgaaggcgacatgtataatgactactacgttctggatgacgctgtctttgttctcaaaccagtataaacacgtggaggtcgaagtcttcagagtcccgccacctccgggatgtgcccttggaagagggtctgtgttcacaattacgtgaagggaggacccttggggaccgccattctaaatatcatgtaggaatttaaaaagccaaaatactaattatttctttgtagtgtgtaaaggaatgtttttaaaagacaaaaacccaactctttgtggatttttatcaactctttactcagagccactctccaatgcaggtcacactccaattatgatggaagatattttttatacttaattgcagtagggactcattcccagacaaagcaatagtcacgacttcatggaaccaatcaatggattgttttttgaagactggcaataaagctgtccattcaattccaaatactggttttaaggtatagccactgatattctttcatgtttagaaattctttctgttattattcaagaaaatgtttttaatcatgctaataaacttttttggagatgactttggcatcatgtttgaattcatataaagctcccctagcattttttattggtttggcttcaggagtacccaaatagtagcattatgagaatgacgcagacaatttgaataggggggaaggaaggcttcagacttgggggaaggggagattattgcaaattgcagtgaacactgagtcagtaaaaaaaaaaaacagaaacaaaaacccagcctcattcagatacagaacttcagggacccctccccccacccccccagttaatgctgctgtgaaaaatgcaaaataacctggttctgactttgtgatcactcatgtcccatacactgaactttgtttttttctggacaatctcaggttctcagaattgaaacattcagttttgtctactgacaaaatgcaactaaaaatgttttaattcaacttcttactctacacttatatacctctctcccagaggcttgggctcttccctgaaatccttaaaggagtttattatttgccaagaatatggtttgatgaagaccgtgtcagactcatgcattctggaatccgtgagtgcctccaaccataaacccagaaatgctgccatagaggaacccattagcaagatcaataaccatcgtggatattccaaagagcagagcatttaacccagaatctgaaatctcagtaataacagaaatgtcaatatgagattgtggttattaacaatatgttatcctcactactttatttcttttttcatccaggtgtttcattaagtattctcatttatatgctcatagaagtcatcagatcaacacattcactccaacacctgggtataaaggcgaattaaaacctgaagaattactttattattcattaagaactgcattcccacatcctcacaccaatatcttccactgttactgtgcagtcataataagagttgggttatgtgatttatgcaaaattgttattggtgtggtctaatggatttttttccagggaattccaagttaagtggaggtccaaataccttagcacccataggattggtaa

SEQ ID NO: 5254 - DNA, 2016 bp, Homo sapiens
  misc_feature (1)...(2016): n = a,t,c or g
atcgccagagtcggattcgccgccgcagcagccgccgcccccgggagccgccgggaccctcgcgtcgtcgccgccgccgccgcccagatccccgcaccatgccgtcggagaagaccttcaagcagcgccgcaccttcgaacaaagagtagaagatgtccgacttattcgagagcagcatccaaccaaaatcccggtgataatagaacgatacaagggtgagaagcagcttcctgttctggataaaacaaagttccttgtacctgaccatgtcaacatgagtgagctcatcaagataattagaaggcgcttacagctcaatgctaatcaggccttcttcctgttggtgaacggacacagcatggtcagcgtctccacaccaatctcagaggtgtatgagagtgagaaagatgaagatggattcctgtacatggtctatgcctcccaggagacgttcgggatgaaattgtcagtgtaaaaccagaaaaaatgcagctcttctagaattgtttaaacccttaccaaggaaaaaaaaggggtgttaccaactgagatcgatcagttcatccaatcacagatcatgaaacagtagtgttcccacctaggagtgttaggaagttgtgtttgtgtttcaagcagaaaaactgagctccaagtgagcacattcagctttggaaactatattatttaatgtaggctagcttgttttcaaattttaaaagtttaaaaataaaatactttgcattctaagttgccaataaaatagaccttcaagttattttaatgctcttttctcactaataggaacttgtaattccagcagtaatttaaaggctttcagagagaccctgagtcttctcttcaggttcacagaacccgccgcctttttgggtagaagttttctactcagctagagagatctccctaagaggatctttaggcctgagttgtgaagcgcaacccccgcaaaacggcatttgccatcacagttggcacaaacgcagggtaaacgggctgtgtgagaaaacggccctgactgtaaactgctgaaggtccctgactcctaagagaaccacacccaaagtcctcactcttgcaggggtagacatttctggtttggtttgttctctagataggtttacacacataaagacaccactcaaaaggaaacttgaataatttataattttgatcgagtttcttaaaagaccctgggagaaagagtggcatttcttctgtttcaggtttgggtctgagttcaaactagtgcctgtgttgttacggaaagcagcagtgtaccagtgtcactctgggagtacagcgggagaaacacaaaatagtataactgaaaacattaacattcagacacactcccttctggccttccggctttaaagctgtgggatgatccacgtttttgtttttttaatgttaaatgtgtaactcagtattactgaaaagggtacccacattttgaatagtagttatcactcttaggtcagacagccatcagaattctcccacaccaagtgcatgtcagttgtggagaaaacatagcaaaaagagccgtacgctctttacagatactaatgtcaagagttaaacctcctcaggttcaacctgtgataaaagactagtgcttcccagtacttgcatggggttcactatttatagttttcttgggagtatcacaggaaaatcacaattacaccactttagaccctatgtgtagcaggtcacaacttacccttgtgtgtttagatgtgtatgaaatacctgtatacgttagtgaaagctgtttactgtaacggggaaaaccccagattctttgcatctgggggccctctactgattgttaaaggagttcctgtcacctgctccccccaccccgcgcatgcggtctgttccacttgggctaaacttttaatatgtgtatttttacattatgtatattcttaactgggactgtcncgtttaggactgtattacatcatatctggacattattgttaactacc

SEQ ID NO: 5255 - DNA, 724 bp, Homo sapiens
gcgaccgccaaacaaaggtaccagtcgccgccgcgggaggaggaggagccggagcctctgcctcagcagccgctggacccgccgcccttcttccccatctctcccccgggcctgctggttttgggggggagaaggagagaggggactctggacgtgccagggtcagatctcgcctccgaggaaggtgcagctgaacctggtgttttagaggataccttggtcccagagtcatcatgaaggcccttgatgagcctccctatttgacagtgggcactgatgtgagtgctaaatacagaggagccttttgtgaagccaagatcaagacagcaaaaagacttgtcaaagtcaaggtgacatttagacatgattcttcaacagtggaagttcaggatgaccacataaagggcccacttaaaggtaggagctattgtggaagtgaagaatcttgatggtgcatatcaggaagctgttatcaataaactaacagatgcgagttggtacactgtagtttttgatgacggagatgagaagacactgagacgatcttcactgtgcctgaaaggagagaggcattttgctgaaagtgaaacattagaccagctcccactcaccaaccctgagcattttggcactccagtcataggaaagaaaacaaatagaggaagaagatctaatcatataccagaggaaggagaggagggagggagggagagggagagaggtg

SEQ ID NO: 5256 - DNA, 3467 bp, Homo sapiens
  misc_feature (1)...(3467): n = a,t,c or g
tgctggaagtccctcacccagagaccagtgctcccaacggcagagcagcgggggagataaagaactggtgacacgtggctgtacattcagcacagctgtggtgtccccaagtgccatgacccaggagccattcagagaggagctggcctatgaccggatgcccacgctggagcggggccggcaagaccccgccagctatgccccagacgcgaagccgagcgacctgcagctgtcgaagagactgcccccctgcttcagccacaagacgtgggtcttctctgtgctgatggggagctgcctcctggtgacctcggggttttcgctgtacctggggaacgtgttcccggctgagatggattacttgcgctgtgctgcaggctcttgcatcccctcggcaattgtgagcttcaccgtctccaggaggaacgccaatgtgattcccaactttcagatattgtttgtttccacgtttgctgtgaccactacgtgtttaatttggtttggatgcaaactagtcctgaacccatcagcaataaacatcaacttcaacctcatcctgctgctcctgctggagctgctcatggcggccacggtgatcatcgctgcacggtccagcgaggaggactgcaagaaaaagaagggctccatgtctgacagcgccaacattctggacgaagtgccatttcctgctcgggtcctgaaatcttactcagtcgtcgaggtaatcgcaggcatctctgccgtcctcggggggatcattgccctgaacgtggatgactcagtttcaggcccacacctctcagtgacgttcttttggatcctagtggcctgctttccaagtgccattgccagtcatgtggcagcagagtgtcccagcaagtgtctggtggaggtcctgattgccataagcagcctcacgtctccgctgctgttcacagcctctggatatctgtcattcagcatcatgagaatcgtggagatgtttaaggattacccgccagccataaaaccatcctacgatgtgctgctgctgctgctgctgctagtgctcctgctgcaggccgggcctcaacacgggcaccgccatccagtgcgtgcgcttcaaggtcagtgcaaggctgcagggtgcatcctgggacacccagaacggcccgcaggagcgcctggctggggaggtggccaggagccccctgaaggagttcgacaaggagaaagcctggagagccgtcgtggtgcaaatggcccagtgacccccagacgcggaaaccgggtggcagcgccagcctggccccaagcatggaaacgcacaacccctaatcgccctgagctactgcttctaacacctcttttcccttgtntgagggcaaaccaggctgcaggtggggttttcacttcctagggtagtttaattttaaaataggccaatnttggntagtctgtgcctcagtgagatcagtcagctccgagtggctcccgtgtcgtaacagcaggagcatggccgcaacttcccaggccgaggaagggcccccggctcggcctcttgagagccccacccctgaactggccccagctcctcttcctgcctctctcatggcttgggctggagtgggctctctggacctgaccagactgtgggtccctgcgtctcctgcccactctgaccgggcttcctccctccacgcttagggtctgtcccgggtactcagtcagcccagtgggatcttacccacttccctgcaaggtgcacctgccccaggctcaggctgcccagcggctcttcctggacagtgagagcagggctgggcgcctctgtcctggcccgggagccgcaggggcccctcctccagagcctgggcgcaagacacaggctgccgctgctctcccaggtgaaatccacaccagtccacgccgggtcgcctgccctgtctccctacttagacccagtcattctagagggatccaccgccacactggccggcccacgtcctgggtgctgtcatgcccagcttggagtgccacgtggccgctgcccacgtcccgggcactgtcatgcccagcttgggagtggccacatggccgctgcccacgtcccgggcactgtcatgcccagcttggagtgccacgtggccgctgctgtgacaggcagtgttcttgggggtggggctgcatccaaggctttgtaaaccggctggaccacgtctccctggccccagtgaccgggggaagctgagcccctccctcctgtgtttgctcccattactcaaaatgcaggacagatcaggtcagagcccaggaattctcacaggtttcacccagcgccctctacctcctagcaagtactttgtcttgatcctcactgagaaggccccagggcagcggtcttctccatctccgctgttttggggtcttagggtacagcccaggcggtcactgcccacctgccaggctgcagggcacagttgggtgtgagaataacactggctttgggtagtgccatggtcaggagtggggtttccctgcgtctcctcgtcccgagggcgcctgggtctcccagctgacggcagtaaatccacagtgagttggggcgactgtgaaactggaatgctgttactttgataattactttccagcaggtgttttccttcacaatggttttgtttctttccttctgatctgagaagacatgaacgttttctcttcaccgccgtggggtgtattgactggtcccccatgggctgctggaaaggcccggagatgcatctgtggcctggggccatcaagatcaaagaaccaggaggcctgggagatgcagctggatggggcggcctgcagaccctgccagggggtttgaggaccctcccaggtttcccacttcgggaacaggagtgactctggctgccaagataccttcatggtgttcatgacaagtggaatcattattttcaaccattgaagggggatgcaggcaagacaccttcccagctgctcctagaggggacaagccaggccctctctgcagtcctcggcagctccggaaggacacagtcaggggccgggcaaacactttggccacagccccaaacaagcgccaccgtgggagaggagaggctgctgtcactggtaccggatgcagaccccaccctgtctgcaggccacccccacctccctgcagctttgaggctggcggggtctgctcctgggaatggggtgggagccacagggacgacccggggcgggctgatgtcttcttgggggcagaccagagagctcaagtttcagagtcagaattaggcacttggagcgtttttgctggcttgcactttcttattttcttattttagagcgcttaaaaaatccggaaaaatggggtttaaaagaactgtctctttcagtctacatttttgtttaatacgcttgagcaataaacgctgacttgcagacgtgaaaaaaaaaaaaagaaaaaaagg

SEQ ID NO: 5257 - DNA, 151 bp, Homo sapiens
gggcgtggtgggagcaattacaggttaatatgaatatcaaagctgatcaaattatatagtttaaatatgtaccatttattcttattaaaattattatcaggttagtgcaaaagtaattgccgtttttgcatgttggattttgccattttat

SEQ ID NO: 5258 - DNA, 280 bp, Homo sapiens
tgtcgctggccttagcagactccacaggccacgctggctgcgaatggagccgaggactcgcgcggaggatagtgctaccagccggcgagatcggcgcctctcctgcagccccgtgctcgtctgaaagtggtgacgaaaggaagaacctcgaggagaaaagtgacataaatgttacagttcttattggaagtaaacaagtcagtgaaggtacagataatggtgatctcccttcttatgtgtctgcattcatagaaaaggaagttggaaatgaccttaaatc

SEQ ID NO: 5259 - DNA, 638 bp, Homo sapiens
  misc_feature (1)...(638): n = a,t,c or g
ggttatggcgtactgcagaaggcctttcccacactcctaccgtgaagcatttagaagctttaagacaggaaatcaatgcagcacgacctcagtgccctgtagggttcaacacactagcatttcctagtatgaagaggaaagacgttgtagatgaaaaacaaccatgggtatatctaaactgcggccatgtacatggctatcataactggggaaacaaagaagaacgtgatggaaaagatcgtgaatgtcctatgtgtaggtctgttggtccctatgttcctctgtggcttggatgtgaagctggattttatgtggacgccggccctccaacccatgcgtttagcccgtgtgggcatgtgtgttcagaaaagacaactgcctattggtcccagatcccacttcctcatggtactcatacttttcatgcagcctgtcccttttgtgcacatcagttgggctgggtgaacaaggctacatcagacttattttttcaagggacctctaggactaacagaccattgtctttgcagggantacattataaatttattaagctaagtgagttngggttttcggaacctgtttgttccacggtcacagttttttcntgctctgggnccatttggcattaaggatgg

SEQ ID NO: 5260 - DNA, 624 bp, Homo sapiens
gtggatctaattcaaaccagttgcaggtatgagtgggtaggctgtgacttatttaatgcatatcctgttttcagatggtgtctgagctaaaagaccattttttgagacacctacagggtgtagaaaagaagaaaattgaacagatggttctggactacatttcaaaactggttggtcttgctttttattctcctcatatgccccttcaccccactccccatatagttctgaaaatgtggtgcagggaacccatttatgtgtttttcaaattagatttttggagatctcccgttcttaaatcagtatttggtgctgtagattgagaaaagggaaataaggaccataaacaaagagcatttggtttggaaagtggtttattgcccttccttcaaatactgattatatacccatggatgcataggacaatgaatttagtatgcttgccaaatgttaatatctcatcttggcaacttccagctccatgtagatgatttctgtacatggaggtttatgcagacaggagagaacttgaacttcaaatcttaattagttccagtagcctaagtaggccagattctagctcacttgtattaatactaccatgtgaggctgagattggcagtt

SEQ ID NO: 5261 - DNA, 706 bp, Homo sapiens
ttttttttttttttttatgttttcaggttttttaatgactgacaaaatattcctaaatcaaccttttataaataaaaaaaaataaatatgtttcatctgaattcacaaagacaaaccctgctgcaaatactaagtacaaattattctgtactggacatggcaaatctgatttagtacaaattcagtttttaaaaggaccctctttccaaatagtgttcttatgtaacatttaatttttatgcctattatttcaatgacacacctagtttttgcttttctaagcactgttccctacatttttaaagcatattttatttcagagtgcaacagaaactagcttgtggcctattaagctactaggaagagcatcgtttatgccactgtatgccttcttaggccatttatcatttctctacacttgattgctcactggctattcaaaattggaatgtgatacagcagttctgtctgaacgtgtaccaacctgaaactcacatggctaaacaattatggctaaactatttttgttaccaattttaaatattgttaaagaattctcaaaggagtaaggttaatgagcaagattaaaatggcagcagcagatccaattgcgttttctttttcataagcctaaaagcatcgcggtgtgtttcagagctgcttcctctacaaattctgcatccacattgtcatgtccttcaaaagg

SEQ ID NO: 5262 - DNA, 422 bp, Homo sapiens
cgcattgctcccgccgggctgtagctgagcgcggagcccgtgggggccggtgagaactagtaagactgctgcagagtccggaggaagaagtcacctagaaaagtctgggacagggcatttgagttcctgagatctagttggtgagagacatgatgttctaccggttgctgtcgattgttggaagacaaagagccagcccaggatggcagaactggtcctctgcaagaaacagcgcgtcagctgccgaggcgcgttccatggccctgcccacccaggcacaggtggtcgtctgtggaggtggaatcacgggcacttctgtggcccatcaccaatccaaaatggggtggaaggatattgtccttttggagcagggcaggctggctgctggctctaccaggttctgtgctggcatcctgagcact

SEQ ID NO: 5263 - DNA, 741 bp, Homo sapiens
tcaatgatgtaatttaattatcctaaaaggaaatgacagattcttctgtaggaaaaaataaaaacatgaatatctcaaattataatggttaatctctaaaatatgcttaaagtaagatgtttctatgttatgtggttatgttatcaataatatttggttgatcttcacatattttatatgcatatatatatcaagaagttatatatatataactcaagaaactcaagttatatatatatgtcaagaaatgtatgattattttggagagaatgggcccaaatgtgaaaaagatataaaaaaaacaaaaaaaacaaaaaaaaaacactattttcccctacgaaatatactgtatatttcaaaagaagaaaagttaaaagatatttgaagattgcaggggcaaaacaaaaacctaccagggctcagcacttaagcacttttcccacatccagggtcaaagcagcagtaactacatggacttttaagtgcggtatgaaatgcaacattacgcttacaaacagtactgtcaaacctcaaatgctttctttcttcagatgctttttcgtgtacatgatactagtagacacttttctctttatatttactgatagtgaaaatcatacggcaataaaatattggatgtttgaagggcagtgggtcaccaattgggtttaaaaaactatggaatgtaaactggattgttatatctctatcctttttggcttttctctgtgtttttaatgt

SEQ ID NO: 5264 - DNA, 1794 bp, Homo sapiens
gactggccctgaggtgcagagttgggagcaggacacctcacctgagtttcattttttttcatgtccaaaccatgcacatactatagtccagaatcaaagcacttttgaaaagtggctgcatggccatcctccagggcccaggaagttgcattccaagggcctgtttacatggcagcagaatccatccccggcagtcagcccatagcttgggaccagtctgtgccctcctgcccagtccagtttactcctcttggttcctgaaggtggccaagtcattgtgttcccacaggcttctctaggctgggggcaggtgtggggctgtggaattccaaagcacaaaaggtgcagaggggattggccttcctgtgcctcaactcaccaaccaccctcctgccttccagttctgccaggtgctccatgctggggacaagtaggagactgccagggcccaaagaaatgggtgagcagtagagtcatctcggggcacttggcagtgtcaagcacctgccccttgcctccttgaccacactggggtgggtgggcccccagcacttcagaggcaggagcctttgggctgagcaagcactgaggaggtggatggaagggagcatctggagggggggagcttccttgagcagtgggcccaggcctggccctccacacttcattctctgacctttctctctcctcatttcggtgcatgtcctttctgcagctgcctttcagcacaggtggttccactgggggcagctaacgctgagtgacaaggatgggaagccacaggtgcattttactcaagtcttctctagtcaatgaggggcacccagtgcttctagggcaggctgggtggtggtcccctaggtatcagcctctcttactgtactctccgggaatgttaacctttctattttcagcctgtgccacctgtctaggcaagctggcttccccattggcccctgtgggtccacagcagccgtggctgcgccccagggccaccgcttctttcttgatcctctttccttaacagtgacttgggcttgagtctgggcaaggaaccttgcttttagcttcaccaccaaggagagaggttgacatgacctccccgccccctcaccaaggctgggaacagaggggatgtggtgagagccaggttcctctggccctctccaggggtgttttccactagtcactactgtcttctccttgtagctaatcaatcaatattcttcccttgcctgtgggcagtggagagtgctgctgggtgtacgctgcacctgcccactgagttgggggaaagaggataatcagtgagcactgttctgctcagagctcctgatctaccccaccccctaggatccaggactgggtcaaagctgcatgaaaccaggccctggcagcaacctgggaatggctggaggtgggagagaacctgacttctctttccctctccctcctccaacattactggaactctatcctgttaggatcttctgagcttgtttccctgctgggtgggacagaggacaaaggagaagggagggtctagaagaggcagcccttctttgtcctctggggtaaatgagcttgacctagagtaaatggagagaccaaaagcctctgatttttaatttccataaaatgttagaagtatatatatacatatatatatttctttaaatttttgagtctttgatatgtctaaaaatccattccctctgccctgaagcctgagtgagacacatgaagaaaactgtgtttcatttaaagatgttaattaaatgattgaaacttgaa

SEQ ID NO: 5265 - DNA, 1445 bp, Homo sapiens
agctctcaggatgtctattaggggctttgcttctacaccacagctttgtgctgggatgggtccttcccacgtggggtaatcaggatgctttgccttcctagctgtccagcagaaggagatcacacagagcccatccacgtccaccatcaccctggtgaccagcacacagtcatcgcccctggtcaccagctcggggtccatgagcacccttgtgtcctcagtcaacgctgacctgcccatcgccactgcctcagctgatgtcgccgctgatattgccaagtacactagcaaaatgatggatgcaataaaaggaacaatggacagaaatatacaacgatctttctaaaaaccactacttggaaagcacaattagctgaagattcgcaggctgaggatcgagatagagaagctccagtggctgcaccagcaagagctctccgaaatgaaacacaacttagagctgaccatggcggagatgcggcagagcctggagcaggagcgggaccggctcatcgccgaggtgaagaagcagctggagttggagaagcagcaggcggtggatgagaccaagaagaagcagtggtgcgccaactgcaagaaggaggccatcttttactgctgttggaacaccagctactgtgactacccctgccagcaagcccactggcctgagcacatgaagtcctgcacccagtcagctactgctcctcagcaggaagcggatgctgaggtgaacacagaaacactaaataagtcctcccaggggagctcctcgagcacacaatcagcaccttcagaaacggccagcgcctccaaagagaaggagacgtcagctgagaaaagcaaggagagtggctcgacccttgacctttctggctccagagagacgccctcctccattctcttaggctccaaccaaggctctgttagcaaaaggtgtgacaagcaacctgcctatgccccaaccaccacagaccaccagccgcaccccaactaccccgcccagaagtaccattcccggagtaataaatccagttggagcagcagtgatgagaagaggggatcgacacgttccgatcacaacaccagtaccagcacgaagagcctcctcccgaaagagtctcggctggacaccttctgggactagcagtgaatcgggacacaaaccacccaccccattgggagaaaaacccagacgccaggaaaagaagaaacaacaaaggcaggagaacagccactttcagacttgaaaatgacaaaaccctcagttgagccatgcacggcgcgggggctgctacactacaggacacccagcatcggctttgactgcagactgttcacccacacgagccctgtgcttttggtgtaaataatgtacaatttgtggatgtcattgaatctagaggactttcccctttttatatttgtattaactttaacttatt

SEQ ID NO: 5266 - DNA, 307 bp, Homo sapiens
ttttaacaacggctgtgctagacgaagtggttgaagcccaaagacttatttttgagctcgctgtaagactgagaaatcacgtagtccttcctgaaaccactaagaggaaaaatgtctgtgacactgcatacagatgtaggtgatattaaaattgaagtcttctgtgagaggacacccaaaacatgtgagaatttcttggctctttgtgccagtaattactacaatggctgtatatttcataggaatatcaagggtttcatggttcaaacaggagatccaacaggaactggaaagaggaggcaacagt

SEQ ID NO: 5267 - DNA, 379 bp, Homo sapiens
cccacgcgtccgggaaaacgacagcacgtgttctttttcactagtagaagtgacgttggtttcatgttgacaactttgaagccatttggaagtgtttcagtggagagcaaaatgaataacaaagcgggctcctttttctggaaccttagacaattcagtacattagtttcaacaagcagaactatgaggctatgttgtttgggactttgcaaaccaaaaatagttcattcaaactggaacattttaaataactttcataacagaatgcaatcaactgatatcattagatatctctttcaggatgcattcatttttaaatcagatgttggctttcaaacaaagggcataagcactctaacagcccttagaattgaaagac

SEQ ID NO: 5268 - DNA, 5307 bp, Homo sapiens
  misc_feature (1)...(5307): n = a,t,c or g
ccacgcgcggcgccgctcggtgcagaccatgaattacgtggggcagttagccggccaggtgtttgtcaccgtgaaggagctctacaaggggctgaatcccgccacactctcagggtgcattgacatcattgtcatccgccagcccaatggaaacctccaatgctcccctttccacgtccgctttgggaagatgggggtcctgcgctcccgagagaaagtggttgacatagaaatcaatggggaatctgtggatttgcatatgaaattgggagataatggagaagcattttttgttcaagaaacagataatgatcaggaagttatccctatgcacctggccacctcccccatcctgtcagaaggagcttcgagaatggaatgccagctgaaaaggggctctgtggacaggatgagaggcctggaccccagcacgccagcccaagtgatcgctcccagcgagacgccgtcaagcagctctgtagtaaagaagagaagaaaaaggaggagaaagtcacagctggacagcctgaagagagatgacaacatgaacacatctgaggatgaggacatgttccccatcgagatgagctcggatgaggccatggagctgctggagagcagcagaactcttcctaatgatatacctccattccaagatgatattcctgaggaaaacctctccctggctgtgatttaccctcagtcagcctcataccctaattcggatagagagtggtcacccactcccagtccttccggttcccgaccttcaacacctaaaagtgattcagaattggtcagcaagtccacggaaaggacagggcagaagaacccagaaatgctttggctgtggggagagctgccgcaggctgctaagtcttcttctccacacaagatgaaagagtccagcccattgagcagtagaaaaatttgtgataaaagtcactttcaggccattcacagcgaatcttcagacacttttagtgaccaatcgccaactctggtcggtggggcacttttggaccagaacaagcctcagacagaaatgcagtttgtgaatgaagaagacctggagaccttaggagcagcagcgccactcttgcccatgatcgaggagctcaaacccccctctgccagtgtagtccagacagcaaacaagacggattctccttccaggaaaagagataaacgaagccgacatcttggtgctgacggcgtctacttggatgacctcacagacatggatcctgaagtggcggccctgtattttcccaaaaacggagatccttccggactcgcaaaacatgcaagcgacaacggagcccggtcagccaaccagtccccgcagtcggtgggcagctcgggcgtggacagtggcgtggagagcacctcggacgggctgagggacctcccttccatcgccatctccctctgcgggggcctcagcgaccaccgggagatcacgaaagatgcattcctggagcaagctgtgtcatatcaacagtttgtggacaaccccgctattatcgatgaccccaatctcgtggtaaagattgggagtaaatattataactggacaacagcagcacccctcctcctggcaatgcaggccttccagaaacctttgccaaaggccactgtggaatctatcatgagggataaaatgcccaaaaagggaggaagatggtggttttcatggaggggaagaaacaccacaatcaaggaggaaagtaagccagagcagtgcttggctggcaaggcccatagcaccggagagcaaccgccgcagctcagcttggccaccagggtaaagcatgaatcatcctccagtgatgaggagcgcgcagctgccaagccatcaaacgcaggccacctccctcttctgcctaatgtcagctacaagaagactctccggctgacttccgagcagcttaaaagcttgaagttgaagaatggccccaacgacgtggttttcagtgtcaccacgcagtaccaaggcacgtgccgctgtgagggcaccatctatctgtggaactgggatgataaagtcatcatttctgatattgatgggacaattaccagatcagatactcttggccacattttgcccacccttgggaaggattggacccatcagggcatcgctaagctgtaccataaagtgagccagaatggatataaatttctctactgttctgcccgtgccatcgggatggcggacatgacgcggggctacctgcactgggtcaacgagaggggcacggtgctgccccaggggcccctgctgctgagtcccagcagcctcttctctgccctgcacagagaagtgattgaaaagaagccagaaaagtttaaagtccagtgtttgacagacatcaaaaacctgtttttccccaacacagaacccttttatgctgcttttggaaaccgaccagctgatgtgtattcatacaagcaagtaggagtgtctttgaatagaatatttaccgtcaaccctaaaggagagctggtacaggaacatgcaaagaccaacatctcttcgtatgtgagactctgtgaagtagtcgaccacgttttcccgttgctgaaaagaagccattcttcagactttccctgttcggataccttcagtaacttcaccttttggagagagccactgccaccttttgaaaaccaggacattcattctgcctcagcgtaaaatgtcccaagcagcctcttgccagcagtgcagagcctggttgtcacccattaaaggataggtctccccggagtgcacagctccacctgggagcctggcgcgtcatcattggcctgacagcagagagaattgagaagcatttctcccctgccccaccccggggctgacatttctaagcaagataggaagggagcactttctaggctaggagttgggtgcatttgtaccgtgaaaagcattcctcagttgtggcttaatgccagttacgacgctgcctttccggcctgctccagcaagtagctactggttcacgtgcagtttggggctgtgaaacctaggcagaaggcggctgtctgagggctgtccccgcctaggacagggtcaatcgaggaatgccagatgtgcacggtttttggcaaagtagggggcacatttccattatagcaatgttagtgccaccaccttctgaacacagtggggagggctgtgaaggctcatgtgacctggatctgaggtctctgatagaaatctggacgccaccgggtccaggcctggcctcagacttggccttgtggatgggccccttacagtatttgctgactagtctcatttttaggtgataagtttttctttaattcctttggttaaagatagtctatttcattggcatatctccccccagtttttgtggctcaaggctggaatatttatgccttaatatatctatggcagacatttaagaatgcgctttatctagctcatggtaactttgcaacgccttagattaaaatgacagtaaatattactaaggcagtattttgaatgagtttgacactgccggcttccttccatccagcgaggtggtgctgacagtgtggacttgagcacacttatgccaaatgataatgatactgacttctgttgggagctctccaaagaaactggttggttttaagaaaatagtttcaagaagttcaactatattcttttagatattatgtattgttttactctgattaggttactgtgataggcatttattcatattctttctataccactgtcattaatatattaaaaagatgtatgtgttagactatcgaaagggccttattctctctttctcatagactgaccttcttttggaatttctgagtcatttattttccttagctttttccactcaaattaagggcaagcgaaaaagtaataatttggcattctttaagcctacagaatgtgattctttcacttgtttattacactggctcgtggacagaacaatttgaaaagtgaaagaattattttggtaaaagattttgctttacttttcgaagcattatttttttaaagagtgttttactccaacgattgaaacattttcctatttaaatttcatcgttagaatcacaggaggcaaaaaatggaacggttgaatgaaattttactctttctgtgaaagaaaatccacagagttgttgcctccgttgtagttggtgggccccgttagcattggatgcctttgccaaatggttcatgtggacacacaaaggcaaacagatctgccatcgatcgcagatttctgtagaaacacggatgtgcatgtgcagattcccttttgcaggtattaaaaataattaaaaatagtcctgcnnnnnnnnnnnnnnnnnnnnnnnnnnnnnnnnnnnnnnnnnnnnnnnnnnnnnnnnnnnnnnnnnnnnnnnnnnnnnnnnnnnnnnnnnnnnntcctgccttaactaactcctctgcgcttgttcactagtaacctaaagaggctatattcattctttatgcaatgagggtatttttgagtgaattttaactgctctgaactaagtataagctcatgggcctgcaaaggttcagacggtttctcctttgcacccaggaggaactttggctgcgagaatggggggatgtatccctcatgcagttggcatccaggcagccctctgcagcagcacaccctgcaggcggagttttcagaggatgcaattttggatcccgaattttgatgtaccttaaacttccacatcactgcaccctgaaacagagcatgctttccagaaagtcacactctcagatctgtgtcaagttcaatgtgagccctggcaaggctggcatattaacacctgccttctggcttctgaaagtgagatttgtatatgggctgcactcacgcatatacgagttggtttatctttgtgtacatgactataacccagtgatgctgaggtcatgtgctggaatgctgtatttggaccacacatttcaaagttgccctatggaaatgaatcctacttagtgacaagtcatcaaatgtttgtcacatgtgatgaagacaaatatgtatacctggcatagagaaaaatatatacctggtacattggagaaaaataattacactttcaaagagaattccctttgcaattttatgtttggatcaccactgtaagcacactttatttgcatttgatctgtatttgtatatgctgatgcaatgataaaaatcactgtaatacttcattgtgttgtactggatgcaaagctagaaaatattgcaataaatgagaccgatgaaagac

SEQ ID NO: 5269 - DNA, 548 bp, Homo sapiens
tctaaggatacagcttgtctctggattttccagtcttaattttatattttattaatctattttaatgcttgcttttcccatttatagacgttgtagcagtaattgcaagaagttcttgagctgaattcctgttgtgacaacttcctataattacagtagataactttttcttttagtcgtatataacttttctataacttgtgatggacaagagatatgcttatccaataaaataagcttaaatattagatgctcttgggtcaaaatgtccttttaccaaattgacctttttatgagttctttgggtaaatactttaaagctttttatattttaaagaatacttgtaaaagcatatcacatcttaaaccagtggtgcacatgtggatttacagctcatggactctactgttcagctttaatttataaaacatatcacacatttaatgttatacagtatttacatatagtggaacataggggataactcagttttatgtaaaatttttgttaagtgttgtagcctgcccagagtgacttctattttttt

SEQ ID NO: 5270 - DNA, 712 bp, Homo sapiens
ttttttgaccttggacgtcatttatttccatccccggctccattacttgtaagggaattggggtggggacagacccagtgtcctgtactttctcttccacactttttacttcttttccccacgtttagtctgtaccatcccctcccccgcaaaaaaaaaacaacaacaaaaaaaacaaaaaacacccaaaacaaaaccacagtaacagattaaaacgggggggggggcattttattagagtacagggatatcagctttgggcagaagcagaaggcagcttcacgtaactcttcatggggggtagtggccgaatctttcggcccagccccagccccccttgcggtgccaccgcccactgttaggcctcttgcccagccagcggttgcgacctgccttgccaatgacccgtttgttatgatcaacgttggatactcggcctactgttgctacgcacgtttccagcacctgtgtggtctcggcccccagacttcctcatcttcactggtgtaatggtgtacttggtacgactcttccaggacacaaagttggcattaagggccacagaagtaagaactgggcggcaggggagcaacatcaaggcagagggctgttggaggaggccattgttcatcatctgggcggcggggaacagactcggggcaggggcggcgacggtcgggggcgccaggttcagatgacgagagcgcgggtc

SEQ ID NO: 5271 - DNA, 380 bp, Homo sapiens
gtagtattcagacatcctgttttaatttttattactgaaaaacatggaaattactttgcttacgtgcaaatgtttaactcacgtatcttaaccaaatatacactcttacttggacaagacgaaaactctgttataaagagttttactgcatctgtagatcggaaattcatctctttgatgtcattaagctctgatggttgtatatatgaaaccttgataccaatacgtccagctgacccagaaaaaaatcagagcttagttaaatcactgctgctcaaggctgttgtatctggtaacgctcgaaatggagttgcactcactgccctggatcaggatcacgtcgcagtcctaggaagtccactagcagcttctaagggaac

SEQ ID NO: 5272 - DNA, 337 bp, Homo sapiens
ggagaggaaggaagtggacaaaggccagaaggaaataccgatggacctaaccggtagtgaaagcaggaaattatagactggccaggtacagaaggcaggttggctggccagtgggtagaacaggaggtggaggataggcctgaggtgaaggatgagaacgcaggcgtattggaggtgaagcaggagacggatagtagtttagtggtaaaagaagcgaaggtgggtgaaccagaggtaaaggaagagaaggtaaaggaagaggtaatggactggtcagaagtgaaggaagagaaggataacttggagataaaacaggaggagaagtttgttggtcaat

SEQ ID NO: 5273 - DNA, 580 bp, Homo sapiens
  misc_feature (1)...(580): n = a,t,c or g
ccccgtaaggaaccactggtctatccaaaatgaccgtttgtgattagctggagttctaatactgttacatccccatttctgaacatttggatccagacgaacttcnatcatacttcagatggaaggctttaattttagcaaatatatcaactggtgatccatcaggcaaaagccatggccaacctttgaactgccatgcaggaccctgcacaaaaacggctacaacgcggtcccagtcttgaggcataagtttaaggggctggtctactactctataaggtactgtaacactaattgcagtgccccctggttgcatctggtcttttcttctttgtattagagtttcattttctcgttgacaaccttgtttcttcttttcatctgatgggacaaatttcaggtcctgtagaaggtcttttgcattaagcatggttattaaagaggtggtagctgcaggaattatgataatgggtgttcgagatcctttcttctgatttgggggaggtcttggcttgagaaactggtcttggtactgggctgggctgcaggagtctgagtcttccgggcagatgcaccctcc

SEQ ID NO: 5274 - DNA, 425 bp, Homo sapiens
gggcaaaaagaaattttattctttcacagaagtctgaggcaggcaggtccagagttcatgcaggagctcaataacatcagagattgggctctttttgttcttcttagcatatcgatgttttacgtgatgctgggcacctcggggacctaagatggctgttgtagctccatgcatcatgattaaaccagagacaggaagtgtacgatggaagaggccagaggtgatggcctcctcctctccttttgtcttattcctggagtgactccctcctcttatcagcagggatacaagcagtgcctggcagccttccctctctcctgtatgagccaaaagcaagactcatggcacccctccctggcaggaaaggggtggaatgggagcccctggggaaagggggcctgggacttgcagtgacagtgctgctc

SEQ ID NO: 5275 - DNA, 854 bp, Homo sapiens
ggaactctctcctgattggagaactgtctccagagcagcccagctttgagcccaccaagaataaagagctgacagatgagttccgggagctgcgggccacagtggagcggatggggctcatgaaggccaaccatgtcttcttcctgctgtacctgctgcacatcttgctgctggatggtgcagcctggctcaccctttgggtctttgggacgtcctttttgcccttcctcctctgtgcggtgctgctcagtgcagttcaggcccaggctggctggctgcagcatgactttgggcgacctgtcggtcttcagcacctcaaagtggaaccatctgctacatcattttgtgattggccacctgaagggggcccccgccagttggtggaaccacatgcacttccagcaccatgccaagcccaactgcttccgcaaagacccagacatcaacatgcatcccttcttctttgccttggggaagatcctctctgtggagcttgggaaacagaagaaaaaatatatgccgtacaaccaccagcacaaatacttcttcctaattgggcccccagccttgctgcctctctacttccagtggtatattttctattttgttatccagcgaaagaagtgggtggacttggcctggatcagcaaacaggaatacgatgaagccgggccttccattgtccaccgcaaatgcttctaaaacactttcctgctcctctctgtctctagcacacaactgtgaatgtcctgtggaattatgccttcagttcttttccaaatcattcctagccaaagctctgactcgttacctatgtgttttttaataaatctgaaataggctactggtaaaaa

SEQ ID NO: 5276 - DNA, 493 bp, Homo sapiens
  misc_feature (1)...(493): n = a,t,c or g
ctactactactattttatcggctctcgactttttttttagagtcatttgcttccccatcccaaattaactatgcaaattaattgttttgaagatgccatgcccaaatgtggaggtgactcagagcttggaaactcagaagctctaaggtgagcctccagacagggaaagtctgcaacatggtgactgagagggtagtagaaattcacttgctatttaactctctcttgagatttattcttggaggacagagcaaaagtccactctgaaagacagaaggagtcaatgaatgaggttattctggaggtttttcttttgtagatactggccttcccacttcctagtgaatgtctgtacccagacatcacactggatctcaaacccaagaagtcaaaaagaaaaattagctccctcccccagtcagtttttcttctggacctcacttagtgataaaatnactttttccccctgtcactcaacccacgancctagttc

SEQ ID NO: 5277 - DNA, 1921 bp, Homo sapiens
catggctccgcggctgtgcagcatctctgtgacggcgcggcggctgctggggggcccggggcctcgcgctggggacgttgcgtctgcagctgcggcgcgtttctattccaaggacaatgaaggcagctggttccgctccctctttgttcacaaagtggatccccggaaggatgcccactccaccctgctgtccaagaaggaaaccagcaacctctataagatccagtttcacaatgtaaagcctgaatacctggatgcctacaacagcctcacggaggctgtgctgcccaagcttcacctggatgaggactacccatgctcactcgtgggcaactggaacacgtggtatggggagcaggaccaggcagtgcacctgtggcgattctcagggtggctacccagccctcatgggactgcatgaacaagctcaaaaacaataaggagtacctgggagttccgaagggagcggagccagatgctgctgtccaggagaaaccagctgctcctcgagttcagcttctggaatgagccacagcccagaatgggtcccaacatctatgagctgaggacatacaagctcaagccaggaaccatgatcgagtgggggaacaactgggctcgggccatcaagtaccggcaggaagaaccaggaggcagtgggcggcttcttctcacagataggagagctctacgtggtgcaccatctctgggcctataaagacctgcagtctcgggaggagactccgaaacgctgcctggaggaagagaggctgggatgaaaatgtctactatacagtccccctggtgcgacacatggagtctaggatcatgatccccttgaagatctcgcctctgcagtgatgctgcctacacctccacctccttccccttctccctcaggcaaccccgacagacagtggcactcctggtcctgctgtcttggttttgtcttggctctgggaggactctgaggggcagtgctcagttcagacaagggggaactgaaggctgacaagttctgaggattacagctctgcccaggccctttctactttccctgcctgcctccctccccctgctagaagtagtttctgatttccctgaatgaaagatagtgatcttttaggccttcatatatcttctaaaattcctcatctcaaggccaccagtccccagttatcacccttggaaatcctctgtttagcttagttgcacaaaaggtagtatgtccagtggctagaggtggggtgggaagagaggaggccaggccaggccctcaggaattccctggtttccactgggccacccacttgctggacagtctgagccaagtccctcctgctggagaaaagcctggaactgccaaaacaaaaaaacaaatacaaacaaacctccgtcaccacggtcaggaggaggttcagacattctgcccagaggggctggggaaagggatgggagccaggaaagatttaggggcaggagacagacacgtaacaggaactcggaaggtagaacttagaattcagaacttgggtttcaattgtagaatttggaatctggaatacagaattgggaagaagaacagagatgacaaaagaccacttgaagagaggttcctaatactagacagatggagagtggcttggctgtttccccctgcatattggggttgaaaacttaaatgtgtagttccagtccttctatgcagagtctctcctgccctccctccttcctgcaggcaaatatacaagctagaccctgttccctcaccctgtatcctgtctcccctaattgacattctatcagcccaaccctcattctgcagggccacctggtgtgtggaggtggcgggaggggtcagtgactctggggtctcctcagtgacccccatacctcatcatgaacccttgggtagcttgat

SEQ ID NO: 5278 - DNA, 475 bp, Homo sapiens
gcatcactgacggctatgtccccattctcggcaacaagacactgccctctcggtgccaccagtgtgtgattgtcagcagctccagccacctgctgggcaccaagctgggccctgagatcgagcgggctgagtgtacaatccgcatgaatgatgcacccaccactggctactcagctgatgtgggcaacaagaccacctaccgcgtcgtggcccattccagtgtgttccgcgtgctgaggaggccccaggagtttgtcaaccggacccctgaaaccgtgttcatcttctgggggcccccgagcaagatgcagaagccccagggcagcctcgtgcgtgttgatccagcgagcgggcctgggtgttccccaacatggaaagcatatgccgtctctccccggccgcatgcgaaaatttttgacgaacctcttccgggggtgaagacggggcaaggacagggaagaaagttctcattcgg

SEQ ID NO: 5279 - DNA, 765 bp, Homo sapiens
  misc_feature (1)...(765): n = a,t,c or g
tatgaagtacatggtttacccgcagaccttcgcgctgaatgccgaccgctggtaccagtacttcaccaagaccgtgttcctgtcgggtctgccgccgcccccagcganccgagcccgagcccgaacccgaacctgaacctgcgctggacctcgcggcgctgcgtgcggtcgcctgcgaatgccntgctgcaggagcactttctacctgcggcgcagcnggcngttgcaccgttacgaggagagcgaggtcatatctttgcccttcctggatcagctggtgtcaaccctcgtgggcctcctcagcccacacaacccgggccctggccgctgccgccctcgattatagatgcccagttcatttttactgggtgcgtggtgaagaaattattcctcgtggtcatcgaagaggtcgaattgatgacttgcgataccagatagatgataaaccaaacaaccagattcgaatatccaagcaactcgcagagtttgtgccattggattattctgttcctatagaaatccccactataaaatgtaaaccagacaaacttccattattcaaacggcagtatgaaaaccacatatttgttggctcaaaaactgcagatccttgctgttacggtcacacccagtttcatctgttacctgacaaattaagaagggaaaggcttttgagacaaaactgtgctgatcagatagaagttgtttttagagctaatgctattgcaagcctttttgcttggactggagcacaagctatgtatc

SEQ ID NO: 5280 - DNA, 524 bp, Homo sapiens
  misc_feature (1)...(524): n = a,t,c or g
gcaagaaggtgaagtttggcatgaatgtaacctcctctganaaggtggacaaagcccagcgctatgccgacttcactctcctctccatcccgtatccaggctgtgaatttttcaaggaatataaagatcgggattacatggcagaagggctcatatttaactggaancaggactacgttgatgccccattgagcatccccgacttcctgactcactctctgaacattgactggagccagtatcagtgttgggatctggtgcaacaaacacaaaactacctgaagctgctgctttccttagttaacagtgatgatgacagcgggctgctggtacactgtatctcaggctggggatcggacccccctcttcatctccctcctgnggctttccttggggggnggtgggctcatccaaangtncctgnnncccangggggncccctacncanaggngggccaaaannngggtccccctccgggaaaagtttggaaaccggccananaagggggngggnntttctcctc

SEQ ID NO: 5281 - DNA, 1033 bp, Homo sapiens
tttttttttttttttttaacaagcaaggaatgttttattgtgtacattttctcaaaaaaaaaaaaaacccacaaaaacagaacccacaaataggagcaaagaacagttttctagcatctctgggatacacagggcaccatatcttatagaaacatagctagtacaagaacaaagtgtactaattaacattaccccttgcttccccagtcaaaaaaggctatagagaaaaacactttaaattgtactctaatacaaatttgttgcacaattaaacttcaacttactcaaagagttattgtattgtaaactgcagaaaatagaataggcattcaataaatctgctcacaattaacaattaagcaatagacacttgaataaatatagcatgtattacttatttgttaagccttacacttacgatgagcagatggtttatcactatatagtaacagattttttttacactttaggagataccatatccaataacggaagtagaagtactttaacgaaaactgattttagaaaaatatctccttgggtctgagctactatggtatttattacatatttgggtcagtttcaccagtttaaaaatataggtactaacaaactgaattctttcatgggagaacaaagtaatacattctagagcaatagtatttctttatatcctttaggtagcaggacagagctaggacatagtaaagagatttacgatgtaatgaataatttgtttctacctaatgctataggggtattgctatcatttgaactaagaaagaacaattttaaaacttgtttataatgaagaatcggcatttccttaccacatatatactagatgtaaatataaggatcttctctaatagtctgtattccttaatccctatctgtacaaattagcctgcatattcaggaatggaacaaccagtaaactgttacttgaagaactaatttaaatgatccatttaagagaaatgcagtcaaaataaggcaataaccatcagcctatctgtacttttcttctgtc

SEQ ID NO: 5282 - DNA, 1476 bp, Homo sapiens
tttttttttttgttgtcgcagctgttttaattcaatcccacgcccctgtccagcaggaaaccccttatagaaaacccaaatcctcatcttggagtttctccttcagccagggcagcacttgaaagaggttgatgtgaaagtctcgggcgtgagcagtgtacctgcttttgccgcttctggtttttgcagacatccactactccccagctgattacaccaacttgaatgaaacgacttctcttgtgaaactatcaaagggccgccagaatcacctctgcaagtattggggtcagcatagggactcactcctccagttacaaagggaacccgaggggtgaccacctctgagatgtccttgactttgtcatagcctggggcatattgagcatctctctcacagctgcctttcttatccccattcctgatgtagacctccttccgagtcagctttgtctcctcctcagacacaaacagagctttgatatcctgtgcagggagcagctcttccttttgttgctgggcaagtggtagttgggaggaagcctcaaagctcgagttgttccctcggtgcaggggagacaaatgggcctgatagtctggccatatttcagcttattcttgagcttgatcagggcaacgtcatagtcataaaattcaggaattcctgcttcttttttcccattaatgttgtagttggggtgaaataggactacttctatctccaggtcccgcttctcccctcctacgctgaccttgattgagtgttccttgtcatccacagtgaaacaatgtgctgctgtcagcacaaagtactcagacaccacagcccccatacagctctcgtgtccctttgaagggcgaatgactgagatcttggcctgccatggttgcttgtggtaatcggtacccttcctgtgttcccaaaccatgccacagagactcagagactggctttcatcgatcatttggtagaaaacatcttccaggttttccatatccttgactttgaacacatgttgctcattgtctttcttggaagccaaagcattgatgttcacttggttcaccaaaggcccgaccccaaacacatagacatccagataatcctcccttgggtttttgcgatccttgccaatgtatagcaagtcccggatctcatcaatgacagtaattgggtccccgcccatgttgtgcaatccatcagtcatgaggatgatgacatggcgggtgcggttccagccttcaggagggacgtcatctggccagctcataatgctgtacactgcctggagggccttcttggtgttagtccctgacttcaacttgtggtcttcataattgatttcattgagctgcttcgtgacccagtctgcattactgctgtctgcttcagacactttgacccaaattttggggtatgtggcatatgtcactagaccatatcttggcttcacaccataacttgccaccttctca

SEQ ID NO: 5283 - DNA, 59 bp, Homo sapiens
ctacctgtgttttaacgtggactatgtttatgccttggattagaacactggagtagctg

SEQ ID NO: 5284 - DNA, 453 bp, Homo sapiens
ttttttttttttttttctgaatgtcactagacaattaaacttttattgaagcgtaaattgtggtacagaaatacatttcaactgatttaagtccaacaccagtgaaaggagaaattatggcaccaaaactttccctcttctatcatacgatgatttagattatgattcaaactacatttctcttttctaggctttgtcccataaaaatttgtgcagtttttcaacattagaattcttaattctattggaaacaaaacaaaacaaaacaaaaacaaaaccaaaccagacctcaagtcaacaaatctattgggatattgtttacgaacaaagtccaccttaagcattggtcctcaaaacagagctcctcaaaatattaggtgctgtgctccatttacagaatcaaactgatcacactggattgaaaacttcctcaatgagattttcaatcaacaa

SEQ ID NO: 5285 - DNA, 1050 bp, Homo sapiens
  misc_feature (1)...(1050): n = a,t,c or g
agtaagtaaatggatgaaaacacactgattaaaactgctgcttttatccaacaagatggatgaatttcccaggaaagantacttgagttcaggcctgttcaagtcccaacctgtttgtggtttgaggttgctctctgcctcatagagcaaagtggaaaatttatcttctgggaggacagagttttcttctctgaaaaagtttcctacatagttggctttggcatttgcaaggaatgaaaggtcagggattgaggcctcatgagtctggatttctagctgaggttgagagaaaaggtagtgattgtaaccagaaaatccagagtgggtgtatttacctccagaactcatcacttaaaaaaaaattttttttgaactgacatgcttgaggctttttctttttttttttttgaaatggggnctngcccnntccccnaggnnggntngcanttgtnnatncanacctcanngncccctnaccccccnggccaaanaanccnncnngcnnaancctccccaannggnnagacaaaagggcatgcnacctgtgacgtttctagagatgannnnnnnnnnnnnnnnnnnnnnnnnnnnnnnnnnnnnnnnnnnnnnnnnnnnnnnnnnnnnnnnnnnnnnnnnnnnnnnnnnnnnnnnnnnnnaacttgtgcctggccagagctcatcactgttaactcagcctgggtttttcacagcagtcatggaaatagattcattaataatagtaacaaatatatagtctccctctcaaagaaaccttgagtggcagtggcataccaggatacacagtagggaatactggtagaattatggttgttaaagttcataaccaaacatcatacatgatgataaaagacaagataatggtcacatttatgcagtattaactgagagggcaaatttgtgcctgagaagctattgggaatgttctctctctttgcattactaggaattacatgggaaacacatgtagacagtcttcaggctattaagatttgtccacttaatctttacttatacatgaataaaaaaaaa

SEQ ID NO: 5286 - DNA, 977 bp, Homo sapiens
tggagatagcccaaggagaaaaggacctgaagcaacagctggcccaggctctgcaggagcattgggctctaatggaagagctaaatcgcagcaagaaggactttgaagcaatcattcaagccaagaacaaagaattagagcagaccaaggaagagaaggagaagatgcaagcacagaaggaagaagttcttagccacatgaatgatgtgctagagaatgagctccaatgtattatttgttcagaatacttcattgaggctgtcaccttgaactgtgcccacagtttctgctcctactgtatcaatgaatggatgaagcggaagatagaatgccccatttgtcggaaggacattaagtccaaaacatactctttggttctggacaattgcattaataagatggtaaataatctgagctcagaagtgaaagaacgacgaattgttctcattagggaacgaaaagcaaagagattgttctgaagaccgtgctctaagggcatttgaaagactgccaggtagtgcgagcctgagatggtctggaggattctctctagccgtgactccgctgctctgaaggtcaactgagaagtcttgtgggacagagacttgagttaggaagccctcagtcacttgccttccacggtggccagccctgctgccatcattggctgaagcaccaccaggattcacggcacccaactgcttcagggtacttcgtagactctgcctcactacatgtcgaaagagttatttgagttctcttctgtttttttttaatttgttgttgttgttactgttttgatacctcggaaacacctccgttgacagttgttttggataggttgggtgtaccccatggctgcctctgaaggcagtgtctattttgagaggatggcttacctcttctttgtgaaaatactatctcatttcctggaaataaaatgtaaaacctgaaaaaaaaaaaaaaaaaaaaaaaaa

SEQ ID NO: 5287 - DNA, 732 bp, Homo sapiens
gaagttttcatcttacataatttcagaaaggatttgaggtggctaagtgtgggtttattttaagattatacatcagacaagaccttttcttctttgagtcttaaagactcttaggataaggataagagaactctggcccaggtggcaggtggtaaagcccaagaactgcttctccttcaagtaacatgggctgaaaattcgaggtctgtaaccagttgagctgagttcctgggttgttagggcggctggcattggaaaccgactcctccctcctgcaggacattcctgggcccaggagagcctgtgggtggggctgggccacgtggggaactggcagcagtaccaaccttgggttctcgtgttctgtaccgaagctacctctccgtagctggagctcttggggcccagcagtcaggggtccaggctttggccgagggcagaaccttgccttttcctggccttgatttgcctcgcagtgaaatggggcagtggcccggagggagccagaactctgagtggcctgcgaggctgagaagaggacagatgggagggaagcagggaggagagccgcagttcttcccagtggccctggtcagcgtgagtgtgtctcgtcctccctatgagcactgaaagagtcctagaccacttgggctctgaagcaagaggggcaatgagcctcctctctagggctctcctacagagtagccccaaagacaaccctgggcaggaaat

SEQ ID NO: 5288 - DNA, 840 bp, Homo sapiens
tccttcaggatctctgccctcaaaatttattcctgttcagcttctcaatcagtgactgtgtgctaaattttaggctactgtatcttcaggccacctgaggcacatcctctctgaaacggctatggaaggttagggccactctggactggcacacatcctaaagcaccaaaagaccttcaacattttctgagagcaacagagtatttgccaataaatgatctctcatttttccaccttgactgccaatctaactaaaataattaataagtttactttccagccagtcctggaagtctgggttttacctgccaaaacctccatcaccatctaaattataggctgccaaatttgctgtttaacatttacagagaagctgatacaaacgcaggaaatgctgatttctttatggagggggagacgaggaggaggaggacatgacttttcttgcggtttcggtaccctctttttaaatcactggaggactgaggccttattaaggaagccaaaattatcggtgcagtgtggaaaggcttccgtgatcctctcgctgcacccttagaaacttcaccgtcttcaaactccatttccatggttctgttaattctcaaggagcagcaactcgactggttctcccaggagcaggaaaaacccttgtgacatgaaacatctcaggcctgaaaagaaagtgctctctcagatggactcttgcatgttaagactatgtcttcacatcatggtgcaaatcacatgtacccaatgactccggctttgacacaacacctttaccatcatcatgccatggatggcttccacaaaggcattaaacctgggtaaccagag

SEQ ID NO: 5289 - DNA, 463 bp, Homo sapiens
gagcactttaggaacctgctgtcagtggggcatccacccttcaaacaagatgtatcacctatagaaagaaatgagcagctttggataatgacgacagcaacccgaagacagggaaatttaggtaaaaaccaaacagttatgagttcttatagttaactgtccatctgctttgcttcttcttagccttgttgccatcacctggtccaaattgccaactgtctttcctggattattgcaacaccctttgtactgcttgccctgctcccacccctctcctcttacattctgttctttaagtggcaaagtgagtttttgttaccttgtgtcagactatgttgttcttctgctcaaaattctctgtgacttattttacatagagtaaaatccacttaatgtggctgacagagtcttacacggtgtgcttttcatcccccactacctctctaaatatatcttctatact

SEQ ID NO: 5290 - DNA, 1478 bp, Homo sapiens
ttttcctgctgtactaatgtattccatctttcaaaaagaaagacatgattttaatattacttaacaatatgttaaaaaagtagccaggcaggcctccgtgttaatacagtcgtacactctataacagacttgatggtgtgagtactgggtgggcttgtttttaactttctcgttctgcaagggatcttacacaagctggctacaagtcagggggatcaaacacaaacagcgcaacgtgtacactcggagacagtagattgtggagaacaaaggaggcctgccccgcccagcccgcctagggtgagacgcaggggcacaggagagctgagtgacggccgataccccggtgaggacacatgacaggacagggcgcaatgcagaggcaacggagccacgtggatgatgcaaactcctatctggccacggcccaggcctccgaggccgcggtggtgggaggacttggcgggaactactgttccaatccgacagcacagagctacaatcgaaggagtctcacgcacagactacacgcacacgagctaacggcgtgggccggagcatcaacttctcggtctggggtttcaggcagcaccagctccgcacagcccttggcaagcaccacggctctggggcgccagcgaggggcgtggctcttggggtggtgcagcctggcctgcctctcgcgtgtccctctccagggagtcctcattcagtgggcagcaaaggtggcttttttcaagctaaaattggaccagttgatagacagtctttgtcgggtctgtctagcagaatccaagcagaaccttttgaaatattccacttccctctctgtctcatccatatccacactgtctaggtcaatatctttaggtagaaagacatcatcaattgaattgttgactctgtctcctttcttcttcttatttttcttgttcttgccctttggctgaggggactctgccagcaccagcttgctgttctgctgatgctcaccgggagaggtgggctccataggggttgggtttgacttttcgtccttgatgtggttcagctgctttttgttattgttattactgttgacttttctctcctctcttttctgctctgtgatggacatgaggtcgaccaccttagcctttgactcagtctgggcccggggcttggactgcccctctgtggccttggggggctctgtgggcctcctcgctggctcgctgctggccttgctggtctgcctcagcttctgcttgccatttccttctttatggtgctgcatgatgtcgaagaaaaaagagagtggctcatgctgcttcccattcacctccttggggaggagaaatttggagtctctggtgtcgacggggtctgcagcatccccatcagcccctagccctggcctgggctctgagtggttcatatgcctggatggggagtgagaagaggtttctggttcttcagtttgctctagtgagccattg

SEQ ID NO: 5291 - DNA, 569 bp, Homo sapiens
ttttttttttttttgaaactaacattctttattttccttttattttttaaaggtcacctttacaaagtagcatttaaaaataaatccatctcacagctcaaagaaatttctgacagtactgccctcatgctggtcagccattatttactgtgtgtctgccacatgtcggcacatatatatagctcttcctctcctttcctgggagcaaacccttagcgtttcttccacgtaaactttctgcgggctccctcttggcctggcttcttccgttccctcacacgtggatcagtagtaagtagtccagcttgtctcatccactcgacctcgtcctcggtgacaaagctgcacaaggcttttgccattgccagtcgtattgctccagcctgcgctgacctcccgccccctgagactgtgcagggtcacgtcgtgctttcccagccggtcaacaaagtggaaagggaacatcagctgttctctgtcctgtgtgatcgggaagtaaagctggtaatcaattccatttacttttattcttccacttccatgtttataaacaattgcttctgcttttg

SEQ ID NO: 5292 - DNA, 828 bp, Homo sapiens
  misc_feature (1)...(828): n = a,t,c or g
gagagaaggaacagtggttaccagggttacagtgattacgatgggaatgattgactatgcttgctactgaacagctggcattatatatgaaactgctatatacaggactgtataaagacagtagaagattttagtaagcctacattaaataggagcagatcttgtggtataaaaaataaccttgtagttctccagatactaagcttgtatatgattatggtgggtgatttcagatatataagcagataagcacagattattgtcctttcaagttaagagtatataatctggacagaaaatttcacaaaattcaataaaattacaactgttgtctaaataagtgaaacacaaattcacttaatagcatcaagatttgaaatacttaagcatgaagtgacttttataatgactcgatccctagacatttgttacagatagttttatgcctaagaccaagatgtaaagtaccatctgcccttaaaaaaaaattggggctgtcaatttcctagttttcactcatggttaacacgcatttaaaattatttcatgagtctagtagttctttgatttatagcaggatcttgcttgcctcatttgtttccctggttatgttcttaggattctgactaagaggcaaaagagaaaagactcaagaaactgatcctgggggagatccgaggaccatcctggggcttaaccatgggtngaaacccccgttcttcttacttaaaaccattaccaaaaaatttagggcccggggtgttggttgggtnggggccacctgttaggtccctaggcttacttcggngagggcttgagggccaggtt

SEQ ID NO: 5293 - DNA, 261 bp, Homo sapiens
  misc_feature (1)...(261): n = a,t,c or g
gatgaatttgtctgttaatattgaatcaggttgatcattttgaccactgccttattattctaataatcagtgttttatggttttgtcctcaaaattagttttagannnnnnnnnnnnnnnnnnnnnnnnnnnnnnnnnnnnnnnnnnnnnnnnnnnnnnnnnnnnnnnnnnnnnnnnnnnnnnnnnnntgagatcacagctcactgcacctccagcctgggcaacaagagagatgagatcctgtctcaaaaaaaaaaaaaa

SEQ ID NO: 5294 - DNA, 817 bp, Homo sapiens
  misc_feature (1)...(817): n = a,t,c or g
cataacttcggcctgccgacattgtctcgcgctccctgtgggctaacccttttatgctcccgcctctccccctctccaggttcctgtcgacttataagcccctgtaagattcaacccaatgaggaaattactggtgtactaaaaataaacattagattgatgaaacacagtaaaataatttcaaacaggaaagaggtatgaatcttttgtacaaaaaaagtttgacatatatttaattcacatacaagcaggaagattaacttcataagagaattaacaaaagttgtattaattcaagacaagagactgcagagactaaaattgcttagtactgaaacttttgcttatataaactgtagtttatggagaaaataaagaannnnnnnnnnnnnnnnnnnnnnnnnnnnnnnnnnnnnnnnnnnnnnnnnnnnnnnnnnnnnnnnnnnnnnnnnnnnnnnnnnnnnttttccaggaaggctctttaattccccctgattacaaaggttttgtgtgaacataatttggtgtaataaaaaaaaatttacaccacaagagacaaacatactcttcagtgtgtgtggtcataatttgtttgaacgagcccttttaaacttctagatatcattgaaactcctatgttgattaaaaatcatcaaagatctttccagtgagaaggatgaaaatattactgagaatgaagtatcactatttcatgtatgtgcctgtatgtgcttatataacatgctgtaatacaaggtgacatttaggggctgagactgttaacatctgactgtaccttgctatttgtaacttacaa

SEQ ID NO: 5295 - DNA, 669 bp, Homo sapiens
  misc_feature (1)...(669): n = a,t,c or g
tggatttatttgtaggagaggctcctgagcgctaggtccgcactgtggtgactgaacccagaagtcggggagcagttgtcctccgctgcacagaggctactctggagctctgtgacgggcgcccagcgtgacccactcctgggccaggatacggaccgtcgtgcccatatctcctggctggtcgccctatcctcccgactctgcttaaaaccacgtggttcgatggctgccgcggccgcgctgaggctctccgctcagggcacagtgacttttgaagatgtggctgtgaactttacctgggaggaatggaatctccttagtgaggctcagagatgcctgtaccgtgatgtgacgctggagaacctggcacttatatcctccctggggatgacatttctccatgtttgtcaggccttggactctctacgtcaggtgatccnnnnnnnnnnnnnnnnnnnnnnnnnnnnnnnnnnnnnnnnnnnnnnnnnnnnnnnnnnnnnnttgcaggannnnnnnnnnnnnnnnnnnnnnnnnnnnnnnnnnnnnnnnnnnnnnnnnnnnnnnnnnnnttttccaggaaggctctttaattccccctgattacaaaggttttgtgtgaacataatttggtgtaataaaaaaaaatttacaccacaagagacaaacata

SEQ ID NO: 5296 - DNA, 541 bp, Homo sapiens
tttttttttgcagctgtaaataggaggacttttatttaattttttgctgacatactatgaggcaaaacaaaattgacaccatacaaaataactttataaaatatcattcacatcatattttatcagatttacagcattctgtgcatgttaggggttatgtaaggaggtgaaaaaacactatgccaaacttttagtattagtttatatacacacagtaagaaacaaaacaagtaactgttaggttttccatgaatttattgcaaaaatagtgcaaactacttcacctagtaagctgtaaaaacaaactagaaaggacccagctaagcttaaacacgacaatagatgctcagtttctcagcatttagctttcttcaccagttttatcttgacaatcaagaccactccccatctgttcagtttcgggtgagtgctgaggaatagagaaatgtgaagacgggctctctggagagaccagaggctcgggctgcctgatttcagcaacacatttaggatcatgctacttcctcaatcgcaatttttc

SEQ ID NO: 5297 - DNA, 1297 bp, Homo sapiens
agaggaccacgccacagaccctgtccaacctctgcctgaagatcaacgtcaagctgggaggcgtgaacaacatcctgctgccccagggcaggccgccggtgttccagcagcccgtcatctttctgggagcagacgtcactcacccccccgccggggatgggaagaagccctccattgccgccgtggtgggcagcatggacgcccaccccaatcgctactgcgccaccgtgcgcgtgcagcagcaccggcaggagatcatacaagacctggccgccatggtccgcgagctcctcatccagttctacaagtccacgcgcttcaagcccacccgcatcatcttctaccgcgacggtgtctctgaaggccagttccagcaggttctccaccacgagttgctggccatccgtgaggcctgtatcaagctagaaaaagactaccagcccgggatcaccttcatcgtggtgcagaagaggcaccacacccggctcttctgcactgacaagaacgagcgggttgggaaaagtggaaacattccagcaggcacgactgtggacacgaaaatcacccaccccaccgagttcgacttctacctgtgtagtcacgctgggcatccagggggacaagcaggccttcgcactatcacgtcctctgggacgacaatcgtttctcctctgatgagctgcagatcctaaccttaccagctgtgttcacacctacgtgcgctgcacacgctccgtgtccatcccagcgccagcatactacgctcacctggtggccttccgggccaggtaccacctggtggataaggaacatgacagtgctgaaggaagccatacctctgggcagagtaacgggcgagaccaccaagcactggccaaggcggtccaggttcaccaagacactctgcgcaccatgtactttgcttgacatgttttagtgtttagcgattgtgtaccgagtgggattcacgagaccagctacactcagaccaacagatggccagcccttccgtgacagccagcatcgaacatgagacgtcattgattttattagattctccgttttccagaatgccttccgtcccagatttcaaacttggattttgaactgcagacctgtatgagaacccaatgtcataggaaatatggtttgctaaaatctataagctgcttattaaaacagagtcccgtgtgtcctaaaaatctcctaaaaccagtctatgaactcagggctttaaaacatttttaatttatttggtcattcaatttacttgtttttaatacatgattctctatga

SEQ ID NO: 5298 - DNA, 168 bp, Homo sapiens
gtgcagctcagtgtcactgaggacagcttctgctgctgcgagctcagcgccggtggggctgtgccaccacccagtcctggcatctttcctccctcagtgaacatggtgatcaaggatcggccctcagatgggctgggcgtgccgtcctccagcagcggcatggcttcc

SEQ ID NO: 5299 - DNA, 453 bp, Homo sapiens
gttttttgtggcagtattggtgaaaaaatcttcaatgccgtggaataaacgtcagccaaagcttcagggtaaatctgcagagaccagagaaagcacacagctgagccctgcagatctcacagaagggaaacccacagatccctctaagctggaaagtccgtcattcacaggaactggtgacacagaaatagctcatgcaactgaggatttagagaataatggcagtaagaaagatggcgtgtgtggtcctcctccatcaaagaaaatgaagttatttggatttaaagaagatccatttgtatttattcctgaagatgacccattatttccacctattgagaaattttatgctttggatccttcattcccaagggatgaatttgttaactcggactacagaagggaagaaaaggcagctctacatggtttctaaggagttgcggaatgtgctgc

SEQ ID NO: 5300 - DNA, 438 bp, Homo sapiens
gtttgagcgtcagtaagcgagagaaaggacggcgaaaacgagcaaatgtcatgagctcacaacttcattcccttacacacttcagtgacatcagtgctttgacagggggaactgttcatcttgatgaggtgaggttgagatatggttgtagtaggatgtgactttcatgctttcagcaaaatgtatgtggggcttattaccatgaggaacttgggaagggatgctggctctcagaaccacagtgccattccatcacttctccatctgtctccaggatcagaatcctattaagaagcggaagaagatacctcagaaaggtcggaagaaaaaaggtcagtgaactgctgggacttaggtgatcaggtgcaaggtggggagtacaaattgagtctctttggatttgccattctgggtctcaccaagccctgtagtatctct

SEQ ID NO: 5301 - DNA, 788 bp, Homo sapiens
gcaccagttacttcatatgaaagtgggaaaccgtatcagttatttgtccactaagttggtaggtgctttttgtacaaaagcccaggagaatatgatctgtaaattctagttgagtgatgaagatggggctttgaattaatctacagtcttggaattaattctgcagcattttaaccagggaatttttcagtagtcataaatctatattttaatactgagtaaatgtcctcatttacccccaccaattttgtaaagcagatattaaccaaacttcaatagttataagacaaaaatttaatgaaaattggacagtatgtataatccagggctaaatagttacattggactggagtagaaatttaaaatacaatagatgctggagtaaatgttacatattatcatcatctgattcatcttcttccttcagagattccttagcatatttctctgcttcttctcttatatcttttggaacaatttcatgtcttccattagttaattcaccaacccagctgagttctagttcaaaagctttatccttaacttcgtcatgtactatgtaaattatttttgcaacttctttaacgatatcacggcaggtcatttctttcatctgaagcttctctatttccgtctttgcagcttgcctggctttgccgatggcacagccccaataaccgtatgaaacacctgatgggtcaatcatgtagagttgcgcaccgtcattcacactgtaagaccctaacatggaaactggcagccaaaagggtctaacagcactgtagagt

SEQ ID NO: 5302 - DNA, 1267 bp, Homo sapiens
  misc_feature (1)...(1267): n = a,t,c or g
aaaacttttttttttttttttttttttaggataattaaaactactttgaattttttatttatcaatctggtttctaatataattttagttaaatgaaagacattcacaaagaatattaggcatacgtacataatttccttctttcattctagtttacatgctgttgcttttagagagtgaaattttgtgttatttcacaggggatggaatcctgtttgactttacagaaagaatatttagcccagcttttcacagcactaacctctgcagtcaccacgctcactgaaaaaatttaaaaaacctgacaaaatagaacttagtaaaatctagaactgtttcttgggcctactgagaggaagttccctattttcacgccatctccgaaaggcggcatttgccgtaattaactgggacttgaaatggtgcaactgtcttggtagacttgtcttaaggcccaatttagctggaaaataaacttgtaaatgcgtgcnggtatattaatacatgtgtgcccatatttatttttattatctcctgccagtctttgctcaatgggagatgacagaccaacttctcaacgtgatttccccatttcattgaatgagatttatatgccacttatgaaaaaaaatactgctgtgaaagaaatgtactttaaagtttgcagcactaccatgcagggtacatggagaataggcatatagccactaggctacatgaacacgtcacgtttgtattttgtgttggcctatgtataagccaatctagcatgtttgagggccatgtgtgaagagtaggtaagggagctgtaagttacattccaggtgggaatttagggctttctgcacaaaaaattcctaatttctctgtccttttgctatgttgcatctccccagtgttgacaggttagtctgcatgattaataactgagcagctgtagagccatgccagtaagtctccaattcctgaacgtggccacatttgtcttttgatgtgactttcaaccacaagccacaaagtaagtctttcactaggctccgttgacttcagtctttatataagggtttcaaggtattttgcagtcaagaatcaatggcacctcgcaactgtcttatgaagtaggtaaaacagctccatcttaaatacgggacaaaagttcgaggacttgcccaaggtcacacagggagggtcccaccaaggcagggagagagaaaggggatgctgtcagctaattctcatggtccactcttaaccaaaacatcattta

SEQ ID NO: 5303 - DNA, 303 bp, Homo sapiens
ccgcgccggtccgaagcaaagctaaatgtaattttatgtactgttttaacagtataaacctatgggataaaggcccccaatcatcagaaggactactgaaaagaaaagaaagcaaacgtagatgtcaaattgtctaaacattcttaagtaccactgattttttttttctggactattatacaaagatgtctgtaaaaagtataccagtggcttttatgcatatacacgattaggctagattgtgaagtacatgggatttcatgagccagaggaggcattttggatccattgggccacatgtga

SEQ ID NO: 5304 - DNA, 746 bp, Homo sapiens
caattttttttttttttgcaaaaccatttttatgggctgataacgtatgagcttttccctttgcactgaatgatgttctctccgtctcatcggcagtatggggggcagctgtcccagtgtcaatgtttactcaagggtgttcttaggaggcgtgcgctctctactatgccttgatgttgcctaccttattgtggtatcgtggagtttaaaagatcaagttaggatgctgacttaggattattaatgaaagtgttgcaccagttttttcatgttgtaaaactaaagaatttcgctctgcagtttgaaaaactgtggccacagctgtgacttgcagcccacctgccacccaggacgggccctgcactttgaataggctttccattttgttttggaggttctcactttgaaccttcttgtttacagatttttttgtttgttttttgagaaaaaaaaatgtttactcttccatcatttaaaaaaaatgtaaaagacaaaaaaaaaatggaggatgatttaaaagatgctttctatctctgggaaaaaggagcagcatttggccatgttcttttgtttttctattcctgtcccaaatcaaagagcatggttctcaggaaaaccagttccccagtttaaaaaaaaaaaaaaaaattccttgtagtttcttagaggaaaaaaagaaaaaccccaacttttagcactgatactacatattgctctgttaaagaattttctctgccaaaaaaaaa

SEQ ID NO: 5305 - DNA, 1843 bp, Homo sapiens
cctgccccgcgcccagggatcctccagctcctttcgcccgcgccctccgttcgctccggacaccatggacaagttttggtggcacgcagcctggggactctgcctcgtgccgctgagcctggcgcagatcgatttgaatatgacctgccgctttgcaggtgtattccacgtggagaaaaatggtcgctacagcatctctcggacggaggccgctgacctctgcaaggctttcaatagcaccttgcccacaatggcccagatggagaaagctctgagcatcggatttgagacctgcaggtatgggttcatagaagggcacgtggtgattccccggatccaccccaactccatctgtgcagcaaacaacacaggggtgtacatcctcacatccaacacctcccagtatgacacatattgcttcaatgcttcagctccacctgaagaagattgtacatcagtcacagacctgcccaatgcctttgatggaccaattaccataactattgttaaccgtgatggcacccgctatgtccagaaaggagaatacagaacgaatcctgaagacatctaccccagcaaccctactgatgatgacgtgagcagcggctcctccagtgaaaggagcagcacttcaggaggttacatcttttacaccttttctactgtacaccccatcccagacgaagacagtccctggatcaccgacagcacagacagaatccctgctaccagagaccaagacacattccaccccagtgggggttcccataccactcatggatctgaatcagatggacactcacatgggagtcaagaaggtggagcaaacacaacctctggtcctataaggacaccccaaattccagaatggctgatcatcttggcatccctcttggccttggctttgattcttgcagtttgcattgcagtcaacagtcgaagaaggtgtgggcagaagaaaaagctagtgatcaacagtggcaatggagctgtggaggacagaaagccaagtggactcaacggagaggccagcaagtctcaggaaatggtgcatttggtgaacaaggagtcgtcagaaactccagaccagtttatgacagctgatgagacaaggaacctgcagaatgtggacatgaagattggggtgtaacacctacaccattatcttggaaagaaacaaccgttggaaacataaccattacagggagctgggacacttaacagatgcaatgtgctactgattgtttcattgcgaatcttttttagcataaaattttctactctttttgttttttgtgttttgttctttaaagtcaggtccaatttgtaaaaacagcattgctttctgaaattagggcccaattaataatcagcaagaatttgatcgttccagttcccacttggaggcctttcatccctcgggtgtgctatggatggcttctaacaaaaactacacatatgtattcctgatcgccaacctttcccccaccagctaaggacatttcccagggttaatagggcctggtccctgggaggaaatttgaatgggtccattttgcccttccatagcctaatccctgggcattgctttccactgaggttgggggttggggtgtactagttacacatcttcaacagaccccctctagaaatttttcagatgcttctgggagacacccaaagggtgaagctatttatctgtagtaaactatttatctgtgtttttgaaatattaaaccctggatcagtcctttgatcagtataattttttaaagttactttgtcagaggcacaaaagggtttaaactgattcataataaatatctgtacttcttcgatattc

SEQ ID NO: 5306 - DNA, 1496 bp, Homo sapiens
ccatgaagacaacttttatttttcttctttacatatttatttttaatatgccttacctagaataagagaaaacaaagatttgaaaagcaaagtatcccttttattataatttctttttacataaccttttcaacctatattcaggtaactacctgtctctcccatgaaaggagaagggtcctgcacattacaacaggcaaaaaaggcttttaagaaataaaatattttaaattgatccattacatttgttcaattttcttgagtacattggaaagtgggaaaaacacaaaaggagaaaaaaatggtatttcaaacaaccagactataataatcttagttagattggtagtacactcattatactttttccccaaacaggtacaaaggaggttcaagtgctctatgtggatgctagtctatacctcgatatttttattttactcccagtactcccacgggccatggccagtgtttgcctaaattctctgaagcatatcaaggagtctcagttacgcaaaacaaccttgggcaaccacaaagaagagggatgcacatctcccagaaatattaaatagctgtatctcaactacagtttcagaatttagaaccaccaattcaagatggaaatatgccagtgggaagagttattaaaaaggtaaccagaatttgactaagagcatgaaatgtagaactttaagattaaaagagctcccctggaaggacaatgaggcatatggagcagaagggaaagcagggaaacggctgagatagtttaattacaccaactctactatgcagcatccctttatcaaaaggaaaaatataaagtctataaaaaatattttagtattgcaaactgctgcaataatttattgtaggcaaatggtagctataaagagggtccttgaccccctaaaagaaaagaaaaagtacagcaagtttctaattagtagaactaactagttgtttttttgttgggagagcggtataggaaaggagaatacattttctcccatctcagaaagatttttaaaaatgcagtttgcttttgtgtaggtggctaaaatatctgatgactaaccactgcaaatgaaatttacggagacaaaggataagtgtgacaaaaaagctaagtgtggaatatagatgctagttagtcaaaaagtgtaaaagggacctgagaggaggacaacttttttgtagattcatctaatcaatcttgtattttcaaatctagtcaatataccaaagtcgactccaaaccatgttggcaggaaagcatattctacatcccttctatctttattccattttctatccccatattatggagaaatggcaaatctgcaacactctgaaaagaaacaatagcgcatttgagactggtgattgtaggtgtctcactctctgttccctggcatcccaaatgctgacactagttggtataaagtaagcctctttcagaaatgacattttgttactcctctttttgggaa

SEQ ID NO: 5307 - DNA, 2347 bp, Homo sapiens
gggccacaggagcgcttcgccagccgaggaaccggacgcggacaccgcgccccggagcctccagcccctcgcctgttgccgcgcgagtcccgggcccggagcgctaggagcgcgcggaaggagccatggctctggacgggataaggatgccagatggctgctacgcggacgggacgtgggaactgagtgtccatgtgacggacctgaaccgcgatgtcaccctgagagtgaccggcgaggtgcacattggaggcgtgatgcttaagctggtggagaaactcgatgtaaaaaaagattggtctgaccatgctctctggtgggaaaagaagagaacttggcttctgaagacacattggaccttagataagtatggtattcaggcagatgctaagcttcagttcacccctcagcacaaactgctccgcctgcagcttcccaacatgaagtatgtgaaggtgaaagtgaatttctctgatagagtcttcaaagctgtttctgacatctgtaagacttttaatatcagacaccccgaagaactttctctcttaaagaaacccagagatccaacaaagaaaaaaaagaagaagctagatgaccagtctgaagatgaggcacttgaattagaggggcctcttatcactcctggatcaggaagtatatattcaagcccaggactgtatagtaaaacaatgacccccacttatgatgctcatgatggaagccccttgtcaccaacttctgcttggtttggtgacagtgctttgtcagaaggcaatcctggtatacttgctgtcagtcaaccaatcacgtcaccagaaatcttggcaaaaatgttcaagcctcaagctcttcttgataaagcaaaaatcaaccaaggatggcttgattcctcaagatctctcatggaacaagatgtgaaggaaaatgaggccttgctgctccgattcaagtattacagcttttttgatttgaatccaaagtatgatgcaatcagaatcaatcagctttacgagcaggccaaatgggccattctcctggaagagattgaatgcacagaagaagaaatgatgatgtttgcagccctgcagtatcatatcaataagctgtcaatcatgacatcagagaatcatttgaacaacagtgacaaagaagttgatgaagttgatgctgccctttcagacctggagattactctggaagggggtaaaacgtcaacaattttgggtgacattacttccattcctgaacttgctgactacattaaagttttcaagccaaaaaagctgactctgaaaggttacaaacaatattggtgcaccttcaaagacacatccatttcttgttataagagcaaagaagaatccagtggcacaccagctcatcagatgaacctcaggggatgtgaagttaccccagatgtaaacatttcaggccaaaaatttaacattaaactcctgattccagttgcagaaggcatgaatgaaatctggcttcgttgtgacaatgaaaaacagtatgcacactgggatgggcagcctggcaggattaggcctccaaaggcaagaccatgggcgggacagttctttacaacttagaagttcagaatattctttcctttctgaagatgcagcatttaaacccagatcctcagttaataccagagcagatcacgactgatataactcctgaatgtttggtgtctccccgctatctaaaaaagtataagaacaagcagataacagcgagaatcttggaggcccatcagaatgtagctcagatgagtctaattgaagccaagatgagatttattcaagcttggcagtcactacctgaatttggcatcactcacttcattgcaaggttccaagggggcaaaaaagaagaacttattggaattgcatacaacagactgattcggatggatgccagcactggagatgcaattaaaacatggcgtttcagcaacatgaaacagtggaatgtcaactgggaaatcaaaatggtcaccgtagagtttgcagatgaagtacgattgtccttcatttgtactgaagtagattgcaaagtggttcatgaattcattggtggctacatatttctctcaacacgtgcaaaagaccaaaacgagagtttagatgaagagatgttctacaaacttaccagtggttgggtgtgaatagaaatactgtttaatgaaactccacggccataacaatatttaactttaaaagctgtttgttatatgctgcttaataaagtaagcttgaaatttatccttttatcctggaaaacttcttttgccttacccggacccgtttatttgtgcactaaacaggcacggcttttt

SEQ ID NO: 5308 - DNA, 1702 bp, Homo sapiens
atgcggtttttttaaaaatgcagtccatatacaattatagaaaaaacattagtcaagccacctaatataaccaatttcacagatagcactcatttaatataatgtccaaaaatttccaagtaagtgtctacgtatcagttagaataatgcccacaaggatctccaaactacaaaatatcagcaagtaaatgaaaatcacacatttctctttgaaagactgaagcttgactatgagttaaaaggcaacaactatgaactaactttctttaaaatgacttaaactgcccaatctagagcaatacatgtttcctagctatacatgcaaactggactgtgtggtaaaaatgactcagttacttaaaaaaagcagaaaagatccaaaataaccagagctcaagctaagctggtgaaaccacagagacactgaagcccagcaactcccaagaagctgaggattaagattaaaaataaactctggatactgaatcctatatcaacactctgaatttatatttattgttagtaatttctattattcttttctttgggtaaaaaaaaatgttttaaaaagaaccaatgttttggaataagcaatgtaactctgatcattctgctatgtgactaccaaaaaggctgttgttcttttagccctaccacttggtaagatagaaagctctccacacacaaggcccagagaaggctgatatcacaagtcagtgtgagttacactcttctcatgcaatggagctactaaaatacatacatttggtcttacaaaaaaattacaaaactaacaaatctttttctccagaattataaaagatagaatctatgaatcagtactaatgtgatcacagaaaaatagcaaactgaagtcaaaaagcacaggctgcccatcatagagtccccagtctatttaatattttcgacctgctctgaggatggagggtgtcaacaccttagaataccatgatgggctttaaaactgggtaaagaatcatccctagggttagggcaaatgtaacttcacttattgcttacacacaggaaaaaatctgtttccttttccaagatattcttttaaggattacttgacagtggttcttttaaaggtatcaaaagatgtcctaaaaaaaaaaaaaaaaaccctctttggaattctctcggaattccagaaagattatctggcaattcattcctccaccccatcaaaatttttcctttgaaaaattacaactggcaactcacataagatttaatcaacttacttaaaataagggagggcttctcaataatgtttccccactagaaaactaagaaattcagtgatactcagtgccagtaattaagtggtacatatcataaaaattcaaactttggacgcaggtgcgtcacacccagaaaagattttatacatttataagcttgtgctttcacactttataagcaacacaggttagtttccacttcagttttcatttttagtgagtaccgtgcatgttgcatgagggacgggtcatcaaacagtctctcttaccgcagacttcaggtgtttcgtcagagccgaaaaagaaacagccttctctttttctctatgaagattctctccactttgggaaaacaatcttctatgcaatgaaggtcttgtggaactatgtaaacaaatcatacaactgaatagaattttagaggtcaatcagga

SEQ ID NO: 5309 - DNA, 683 bp, Homo sapiens
  misc_feature (1)...(683): n = a,t,c or g
aagaggaagagaaaaaaaacaaaaaacagaaaccaatcggtaatctgatccaccacttttcaaagcactactataaaantcgtcttgttagagatacgacatagttcaggtttcgggcactgatcttcctccacttttgtgcatttatctttgttaggatcaaagcacaagctcaccatcaatgagcctggacaaaaagggaagctgactctcactgcattccttaaactgatatgtatatggggggggttaggaggcttaataaactttagtctgttattttgtttctgtttatacaaagaaaaaaaattcagctttcatgtttctgattccagattggaaaatatttttatatggtctgttgtattttgttgaaatgaaaatactgtgtattactttattttacaggcccacaattgattatgaagtcaccctgtgattctctttgccccacatgaccaccgagcattattacgtaattagagggttatccttttgttgtgaaaggaaggaggggactgaaatctcccaaagtgcaaattggagagtgtttaatctttgttctgttgaataacatcggtgtaattacaaagtcaactccaagaatgtgtatttacaatatttgccatgttaagtgctggtaattatatggttatatgtgccatgtaaaatatagtgatatc

SEQ ID NO: 5310 - DNA, 428 bp, Homo sapiens
gtttctgtcctttacaggacattaggaaacagttgtgtaattacacaaggtggacctttatcttgcctgacatgctgggaatcttcaccccaccagggcaaatttccaaatagctcattttattctaggtctttcaaactttcatgtgacatatttccctttcccattgttgctgatttccaaatcgctgtcagcaattttttcctctctccttgcctattcttcactcatttggtggcaaagttcatagaactaggggacttggaagatgctttgaaaatattgttacaaaggcactgctaaaatgattcacagggagaggccagttggaagaaggatcctaaggatgtgacactggttttcaacaacatgcttagagaactcatgaagtggattgggtgtcaacccagtgaacatgtttttattta

SEQ ID NO: 5311 - DNA, 401 bp, Homo sapiens
agcggctctggcggtcgtggcggtcggagatccgagagctctgcttctctgaaaagcgtgtggctttctggacttggtctacacctgacagtcactggaatgctactccaggccttagaagaaagtgaaactaattttaaaggccccttattctttctgttacctgcctgctgaagtgaaaataaatctccctgctcctttattctaaactgattttactttcccatctcaaaaacgtgtgcagggagcaggagccctcctacccgagccccagctgtattgggaaaccctcctaagtcagagtgatggggtcagggaatctaggcaagcctgtatgggccccaatccaacagggaggggtatcagtccaattacaggtagggaggtatgggaaggaaggg

SEQ ID NO: 5312 - DNA, 620 bp, Homo sapiens
agtgatatatctactctatcaggcagaatgacttagagaaatttctcaaacctgagttaggaaaaaatacatagtggactcctaagtcccttaacatctgctcataaattaagtcaaccattacattgagggattaaaccagggaccagaatatcaaatgtctacacatgtcagccaaagaagagatgcagagggttgggtggggctggaagcagataggaggggtctccagggactataggagtacaatcaacttgagtaatcacctgcttttttccccaaaccctgtgtggaatgcagccagctagctggtttaaaccagttcatgacagacctcagcaatttacagatggatcccagtgtactttcctcattaccatgctagtatcttcaccctgggagatgctatagcttcattaccataacatgtgacctgtgtgctgaaataacgactcactgcatctgcacaactgcaacccctttccatgcaacgacataccctcttccctctctatcaccccataaaaccctcctgtcactttcctgctttggagactatgcccggtgctttatttgtgacaagtaataaaactattgctcaaagcctgcaaaaaaaaaaa

SEQ ID NO: 5313 - DNA, 5547 bp, Homo sapiens
  misc_feature (1)...(5547): n = a,t,c or g
gcgcgaccgtcccgggggtggggccgggcgcagcggcgagaggaggcgaaggtggctgcggtagcagcagcgcggcagcctcggacccagcccggagcgcagggcggccgctgcagggtccccgctcccctccccgtgcgtccgcccatggccgccgccgggcagcctgtgcttgctctacctgtcggcggggctcctgtcccggctcggcgcagccttcaacttggacactcgggaggacaacgtgatccggaaatatggagaccccggggaacctcttcggcttctcgctggcccatgcactggcaactgcagcccgaggacaagcggctgttgctcgtgggggccccgcgcggagaagcgcttccactgcagagagccaacagaacgggagggctgtacagctgcgacatcacccgcccgggggccatgcacggcggatcgagtttgataacgatgctgaccccacgtcagaaagcaaggaagatcagtggatgggggtcaccgtccagagccaaggtccagggggcaaggtcgtgacatgtgctcaccgatatgaaaaaaggcagcatgttaatacgaagcaggaatcccgagacatctttgggcggtgttatgtcctgagtcagaatctcaggattgaagacgatatggatgggggagattggagcttttgtgatgggcgattgagaggccatgagaaatttggctcttgccagcaaggtgtagcagctacttttactaaagactttcattacattgtatttggagccccgggtacttataactggaaagggattgttcgtgtagagcaaaagaataacactttttttgacatgaacatctttgaagatgggccttatgaagttggtggagagactgagcatgatgaaagtctcgttcctgttcctgctaacagttacttaggtttttctttggactcagggaaaggtattgtttctaaagatgagatcacttttgtatctggtgctcccagagccaatcacagtggagccgtggttttgctgaagagagacatgaagtctgcacatctcctccctgagcacatattcgatggagaaggtctggcctcttcatttggctatgatgtggcggtggtggacctcaacaaggatgggtggcaagatatagttattggagccccacagtattttgatagagatggagaagttggaggtgcagtgtatgtctacatgaaccagcaaggcagatggaataatgtgaagccaattcgtcttaatggaaccaaagattctatgtttggcattgcagtaaaaaatattggagatattaatcaagatggctacccagatattgcagttggagctccgtatgatgacttgggaaaggtttttatctatcatggatctgcaaatggaataaataccaaaccaacacaggttctcaagggtatatcaccttattttggatattcaattgctggaaacatggaccttgatcgaaattcctaccctgatgttgctgttggttccctctcagattcagtaactattctcagatcccggcctgtgattaatattcagaaaaccatcacagtaactcctaacagaattgacctccgccagaaaacagcgtgtggggcgcctagtgggatatgcctccaggttaaatcctgttttgaatatactgctaaccccgctggttataatccttcaatatcaattgtgggcacacttgaagctgaaaaagaaagaagaaaatctgggctatcctcaagagttcagtttcgaaaccaaggttctgagcccaaatatactcaagaactaactctgaagaggcagaaacagaaagtgtgcatggaggaaaccctgtggctacaggataatatcagagataaactgcgtcccattcccataactgcctcagtggagatccaagagccaagctctcgtaggcgagtgaattcacttccagaagttcttccaattctgaattcagatgaacccaagacagctcatattgatgttcacttcttaaaagagggatgtggagacgacaatgtatgtaacagcaaccttaaactagaatataaattttgcacccgagaaggaaatcaagacaaattttcttatttaccaattcaaaaaggtgtaccagaactagttctaaaagatcagaaggatattgctttagaaataacagtgacaaacagcccttccaacccaaggaatcccacaaaagatggcgatgacgcccatgaggctaaactgattgcaacgtttccagacactttaacctattctgcatatagagaactgagggctttccctgagaaacagttgagttgtgttgccaaccagaatggctcgcaagctgactgtgagctcggaaatccttttaaacgaaattcaaatgtcactttttatttggttttaagtacaactgaagtcacctttgacaccccagatctggatattaatctgaagttagaaacaacaagcaatcaagataatttggctccaattacagctaaagcaaaagtggttattgaactgcttttatcggtctcgggagttgctaaaccttcccaggtgtattttggaggtacagttgttggcgagcaagctatgaaatctgaagatgaagtgggaagtttaatagagtatgaattcagggtaataaacttaggtaaacctcttacaaacctcggcacagcaaccttgaacattcagtggccaaaagaaattagcaatgggaaatggttgctttatttggtgaaagtagaatccaaaggattggaaaaggtaacttgtgagccacaaaaggagataaactccctgaacctaacggagtctcacaactcaagaaagaaacgggaaattactgaaaaacagatagatgataacagaaaattttctttatttgctgaaagaaaataccagactcttaactgtagcgtgaacgtgaactgtgtgaacatcagatgcccgctgcgggggctggacagcaaggcgtctcttattttgcgctcgaggttatggaacagcacatttctagaggaatattccaaactgaactacttggacattctcatgcgagccttcattgatgtgactgctgctgccgaaaatatcaggctgccaaatgcaggcactcaggttcgagtgactgtgtttccctcaaagactgtagctcagtattcgggagtaccttggtggatcatcctagtggctattctcgctgggatcttgatgcttgctttattagtgtttatactatggaagtgtggtttcttcaagagaaataagaaagatcattatgatgccacatatcacaaggctgagatccatgctcagccatctgataaagagaggcttacttctgatgcatagtattgatctacttctgtaattgtgtggattctttaaacgctctaggtacgatgacagtgttccccgataccatgctgtaaggatccggaaagaagagcgagagatcaaagatgaaaagtatattgataaccttgaaaaaaaacagtggatcacaaagtggaacagaaatgaaagctactcatagcgggggcctaaaaaaaaaaaatgcttcacagtacccaaactgctttttccaactcagaaattcaatttggatttaaaagcctgctcaatccctgaggactgatttcagagtgactacacacagtacgaacctacagttttaactgtggatattgttacgtagcctaaggtcctgttttgcacagccaaatttaaaactgttggaatggatttttctttaactgccgtaatttaactttctgggttgctttatttttggcgtggctgacttacatcatgtgttggggaagggcctgcccagttgcactcaggtgacatcctccagatagtgtagctgaggaggcactacattcactgcactacaaagtggccgtccaaacctcggcctgctgcgcagacgtccatcacgttagctgtcccacatcacaagactatgccattggggtagttgtgtttcaacggaaagtgctgtcttaaactaaatgtgcaatagaaggtgatgttgccatcctaccgtcttttcctgtttcctagctgtgtgaatacctgctcacgtcaaatgcatacaagtttcattctccctttcactaaaacacacaggtgcaacagacttgaatgctagttatacttatttgtatatggtatttattttttcttttctttacaaaccattttgttattgactaacaggccaaagagtctccagtttacccttcaggttgggtttaatcaatcaggaattaggagcatggggagggtcatcactttggacctaaattatttactgcaaaaagaaaatctttataaatgtaccagagagagttgttttaataacttatctataaactataacctctccttcatgacagcctccaccccacaacccaaaaggtttaagaaatagaattataactgtaaagatgtttatttcaggcattggatattttttactttagaagcctgcataatgtttctggatttcatactgtaacattcaggaattcttggagaaaatgggtttattcactgaactctagtggcggtttactcactgctgcaaatactgtatattcaggacttgaaagaaatggtgaatgcctatggtggatccaaactgatccagtataagactactgaatctgctaccaaaacagttaatcagtgagtcgatgttctattttttgttttgtttcctcccctatctgtattcccaaaaattactttggggctaatttaacaagaactttaaattgtgttttaattgtaaaaatggcagggggtggaattattactctatacattcaacagagactgaatagatatgaaagctgattttttttaattaccatgcttcacaatgttaagttatatggggagcaacagcaaacaggtgctaatttgttttggatatagtataagcagtgtctgtgttttgaaagaatagaacacagtttgtagtgccactgttgttttgggggggcttttttcttttcggaaatcttaaaccttaagatactaaggacgttgttttggtcgtactttggaattcttagtcactaaaatatatcttgtttacaaaaatttctgtaaaacaggttataacagtgtttaaagtctcagtttcttgcttggggaaccctgtgtccctaatgtgtttagattgctagattgctaaggagctgatactttgacagtgtttttagacctgtgttactaaaaaaaagatgaatgtccctgaaaaggggtgntgggagggtggttcaacaaagaaacaaagatgttatggtgtttagatttatggttgttaaaaatgtcatctcaagtcaagtcactggtctgtttgcatttgatacatttttgtactaactagcattgtaaaattatttcatgattagaaattacctgtggatatttgtataaaagtgtgaaataaattttttataaaagtgttcattgtttcgtaacacagcattgtatatgtgaagcaaac

SEQ ID NO: 5314 - DNA, 1361 bp, Homo sapiens
tcctgctcatggcgctgctgcccatcttcttcggcgccctgctgccgtacgctgcgcccgcggaagaatgcttcagacatgcctgaaacaatcaccagccgggatgccgcccgcttccccatcatcgccagctgcacactcttggggctctacctctttttcaaaatattctcccaggagtacatcaacctcctgctgtccatgtatttcttcgtgctgggaatcctggccctgtcccacaccatcagccccttcatgaataagttttttccagccagctttccaaatcgacagtaccagctgctcttcacacagggttctggggaaaacaaggaagagatcatcaattatgaatttgacaccaaggacctggtgtgcctgggcctgagcagcatcgttggcgtctggtacctgctgaggaagcactggattgccaacaacctttttggcctggccttctcccttaatggagtagagctcctgcacctcaacaatgtcagcactggctgcatcctgctgggcggactcttcatctacgatgtcttctgggtatttggcaccaatgtgatggtgacagtggccaagtccttcgaggcaccaataaaattggtgtttccccaggatctgctggagaaaggcctcgaagcaaacaactttgccatgctgggacttggagatgtcgtcattccagggatcttcattgccttgctggctgcgctttgacatcagcttgaagaagaatacccacacctacttctacaccagctttgcagcctacatcttcggcctgggccttaccatcttcatcatgcacatcttcaagcatgctcagcctgccctcctatacctggtccccgcctgcatcggttttcctgtcctggtggcgctggccaagggagaagtgacagagatgtttcagttatgaggagtcaaatcctaaggatccagcggcagtgacagaatccaaagagggaacagaggcatcagcatcgaaggggctggagaagaaagagaaatgatgcggctggtgcccgagcctctcagggccagaccagacagatgggggctgggcccacacaggcgtgcaccggtagagggcacaggaggccaagggcagctccaggacagggcagggggcagcaggatacctccagccaggcctctgtggcctctgtttccttctccctttcttggccctcctctgctcctccccacaccctgcaggcaaaagaaacccccagcttcccccctccccgggagccaggtgggaaaagtgggtgtgatttttagattttgtattgtggactgattttgcctcacattaaaaactcatcccatggccagggcgggccactgtgaac

SEQ ID NO: 5315 - DNA, 3336 bp, Homo sapiens
ctgagactggacctgaggagacctcagcctcggtgctcgggccgccccgcctctgccggaaagtccgcgccgccgctgccgccaccgtccgcagcccgagcgccccggagccgcaggccgccgccgcgcagagacgccgcggctgcgactaggcgcgcccagccgcacgtggcggacccgcccccaggcccgcagtgtcctggaccccgcaggcctccgctctcctgtcctcggccccgtccccagggccgcgatgagcttcctgagccgacagcagccgccgccaccccgccgcgccggggcggcctgcaccttgcggcagaagctgatcttctcgccctgcagcgactgtgaggaggaggaagaagaggaggaggaggagggcagcggccacagcaccggggaggactcggcctttcaagagcccgactcgccgctgccgcccgcgcggagccccacggagcccgggcccgagcgccgccgctcgcccgggccggcccccggcagccccggcgagctggaggaggacctgttgctgcccggcgcctgcccgggcgcggacgaggcgggcggtggggcggagggcgactcgtgggaggaggagggcttcggctcctcgtcgccggtcaagtcgccggcggccccctacttcctgggtagctctttctcgccggtgcgctgcggcggcccaggagatgcgtcgccgcggggttgcggggcgcgccgggcgggcgaaggccgccgctcgccgcggccggaccacccgggcaccccgccacacaagaccttccgcaagctgcgactcttcgacaccccgcacacgcccaagagtttgctctccaaagctcggggaattgattccagctctgttaaactccggggtagttctctcttcatggatacagaaaaatcaggaaaaagggaatttgatgtgcgacagactcctcaagtgaatattaatccttttactccggattctttgttgcttcattcctcaggacagtgtcgtcgtagaaagagaacgtattggaatgattcctgtggtgaagacatggaagccagtgattatgagcttgaagatgaaacaagacctgctaagagaattacaattactgaaagcaatatgaagtcccggtatacaacagaatttcatgagctagagaaaatcggctctggagaatttggttctgtatttaagtgtgtgaagaggctggatggatgcatttatgccattaagcgatcaaaaaagccattggcggggctctgttgatgagcagaacgctttgagagaagtatatgctcatgcagtgcttggacagcattctcatgtagttcgatatttctctgcgtgggcagaagatgatcatatgcttatacagaatgaatattgtaatggtggaagtttagctgatgctataagtgaaaactacagaatcatgagttactttaaagaagcagagttgaaggatctccttttgcaagttggccgaggcttgaggtatattcattcaatgtctttggttcacatggatataaaacctagtaatattttcatatctcgaacctcaatcccaaatgctgcctctgaagaaggagacgaagatgattgggcatccaacaaagttatgtttaaaataggtgatcttgggcatgtaacaaggatctccagtccacaagttgaagagggcgatagtcgttttcttgcaaatgaagttttacaggagaattatacccatctaccaaaagcagatatttttgcgcttgccctcacagtggtatgtgctgctggtgctgaacctcttccgagaaatggagatcaatggcatgaaatcagacagggtagattacctcggataccacaagtgctttcccaagaatttacagagttgctaaaagttatgattcatccagatccagagagaagaccttcagcaatggcactggtaaagcattcagtattgctgtccgcttctagaaagagtgcagaacaattacgaatagaattgaatgccgaaaagttcaaaaattcacttttacaaaaagaactcaagaaagcacagatggcaaaagctgcagctgaggaaagagcactcttcactgaccggatggccactaggtccaccacccagagtaatagaacatctcgacttattggaaagaaaatgaaccgctctgtcagccttactatatactgagctactcctttccacctccccctgaacactgtgacaagaggagctaggttgaaatcactgatagaatccagtttgcaattactttctcgattggtgtcagtagttttactgattaggacttttattgtgaattacagttgaaagctgtattttgatgattgctatgtcaggctttcatctaatcttaccagtctgtcttctgtaggatgtgtcactgttggatgttacaccagcctttccagggttaaccactgtggtggtgtgctgcttatagtttgctgttgcattgtaataaaaggtgtctttccctgtagtgacctgtaaaaagtactcaagggctttattacagacataccctccctttgaaaagggacatgctaaaagactcattactactcagccttcaatgtacctgtgtgtccatcttatatttcttttttttttaattgtgaattagacttgtatatcccactgggagcactttgtaggcattgcatgaaccatgggatgatgattctgtggaggtattgccttgtgaatttgctgctattttagttttgtctttgctgtaaacttgtagcattaaacaatcattgttgttaataggtcttctttttgaaacaattatgtgaaatgtatagctgcttttgatggaaagcagctatttgcctttttttttttcctttgaactttgaagctagtgcattggaaaaatgcaccctttccctcctttggaatgctgtattaatgtagtataataattactggttttgtaacttgttctggtaatgtccttcccggactctttttaaatgtctccccctaagttttatacttgattgtattattagtctgtttttaaatgttttgcccggtttttctcttcaatatttgtgtatataaaccgatcttcgtgatactgtacatagctgtttgaaatgccagaatgacttctgacattccaagtttttcacaaaatatattttatctgtgattagccatttgactaataatactggctaacagatgttgaaaaaaattgtctgttttctcattaattttggtctaaaacatgtttgcacttgtctttgacttgtgttttattaacattgattggcatattaaaagtcactctgagctt

SEQ ID NO: 5316 - DNA, 1079 bp, Homo sapiens
  misc_feature (1)...(1079): n = a,t,c or g
gccattttggatggtgaaccctgaagtcggtgtctgctgcgttcacggcaggattcggttaggaggaacagcacagcatgctgggctctggatttaaagctgagcgcttaagagtgaatttgagattagtcataaatcgccttaaactattggagaaaaagaaaacggaactggcccagaaagcaaggaaggagattgctgactatctggctgctgggaaagatgaacgagctcggatccgtgtggagcacattatccgggaagactacctcgtggaggccatggagatcctggagctgtactgtgacctgctgcctggctcggtttggccttatccagtctatgaaggaactagattctggtctggctgaatctgtgtctacattgatctgggctgctcctcgactccagtcagaagtggctgagttgaaaatagttgctgatcagctctgtgccaagtatagcaaggaatatggcaagctatgtaggaccaaccagattggaactgtgaatgacaggctaatgcacaagctgagtgtggaagcccacccaaaatcctggtggagagatacctgattgaaattgcaaagaattacaacgtaccctatgaacctgactctgtgggtcatggcagaagctcctcctggggtagagacagatcttattgatgttggattcacagatgatgtgaagaaaggaggccctggaagaggagggagtggtggcttcacagcaccagttggtggacctgatggaacggtgccaatgcccatgcccatgcccatgccatctgcaaatacgcctttctcatatccactgccaaagggaccatcagatttcaatggactgccaatggggacttatcaggcctttcccaatattcatccacctcagataccagcaacttcccccattcgtattgaatctgttagatggacatttaattgcttgattaaggaatattcttctttcttgcacagatttgtttgggtccnggggncccaaggccagaaggcnttttgcaaagtttcctttccagacctgcagataacttttgacaacttttgttcctaccagag

SEQ ID NO: 5317 - DNA, 1053 bp, Homo sapiens
caggaaactaggaggttctcactgcccgagcagaggccctacacccaccgaggcatggggctccctgggctgttctgcttggccgtgctggctgccagcagctttctccaaggcacgggaggaagaaattacccctgtggtctccattgcctacaaagtcctggaagttttccccaaaggccgctgggtgctcataacctgctgtgcaccccagccaccaccgcccatcacctattccctctgtggaaccaagaacatcaaggtggccaagaaggtggtgaagacccacgagccggcctccttcaacctcaacgtcacactcaagtccagtccagacctgctcacctacttctgccgggcgtcctccacctcaggtgcccatgtggacagtgccagggttacagatgcactgggagctgtggtccagacagaggggcaggccccagggtggagatgatctgccaggcgtcctcgggcagcccacctatcaccaacagcctgatcgggaaggatgggcaggtccacctgcagcagagaccatgccacaggcagcctgccaacttctccttcctgccgagccagacatcggactggttctggtgccaggctgcaaacaacgccaatgtccagcacagcgccctcacagtggtgcccccaggtggtgaccagaagatggaggactggcagggtcccctggagagccccatccttgccttgccgctctacaggagcacccgccgtctgagtgaagaggagtttggggggttcaggatagggaatggggaggtcagaggacgcaaagcagcagccatgtagaatgaaccgtccagagagccaagcacggcagaggactgcaggccatcagcgtgcactgttcgtatttggagttcatgcaaaatgagtgtgttttagctgctcttgccacaaaaaaaaaaaaacaaaaaaaaaagggtaactatgagagatggtggatatgttaaactcgtcgctataggaacctttgtgctatctatattatctatatgaatcccatcatatcaggttgtctacctt

SEQ ID NO: 5318 - DNA, 2098 bp, Homo sapiens
ttgacggccgcagcaatttttttttttttttttttttttgcacaagggataaatagaactttattttaaataaacatttgcactctgtacacagccccagcagaagcagggctcagtcgtcagctgtcttgcgcacatcaaagctgccacagggtcctcgcagcagctctgccagtagcgcaagcagctgcccgtgctcctcctgtacgctggggggaagtgcagccagctcgctgcgcaggctccgctccaccatgcggcccagggcccgccgcagctccttcagcagccgcacggtacgcgagtcaccctccagccgcagcaggtcactgtcgctcagtgagatggtggcccggcgcccgtcatcacggatgtgcacgtccccgtcggtcagcagcagcacagctagcgggtgcacctgagaggagtcccggacgaagacgctgccattggacttgactgccatgaaatacgtcagccatcggctccgtaaccgtgtggcctccctgttaatggtcgacttgtgcagcaggatgttgcctgatttggtcctatatgtgacgctgttgggcttgaacttcccctgccgggtgaccttgccctgcctcacctggatgaggttggggtagaggccggccatcagcacgcccttcaccagctcctcctcctcactgtactcgttgcactgggcggaggccagggtgcagtccgagggcttccccaccaggaaggcctcataaatgttctctgagaactgcttgatgagtccgtggatgaagcgcaggcctgggtgcgtacagcacggttttcctccaggtaattctcccgggagctgcggtcctgccaacgcagcacctcctcccagccggcgacagcccgcacaaaggccaggtggtcactgccgctgtcatggctcaacagtgctttcaccttgtccacctctgcccggttctgtaggctgctgctgaaggggtcccgggtgaggcaggaaacgaccaccagtagtgggtgcaggcaacggaagatggcagccaacacaatggccttggcccaaacgggggtcggtggagatgtgagccaggcgctgccccagggtagtcaggtactcccgctggtccagcaccccgatctcctggagcaagatcacagcctcgtccactgccttgatgtttggactgtccacagccttggacaggaactccaccgccgtcttctcaggcatgtggattttcgcttgcagcaccaggttctcaagaggtgtgcgcaggatctctggcacttggaaagggaccattttctccagccggcttcgagggaacaagtggtaggcaaagccggactggcagcggcccgcccggccccggcgctggatcacattggctcttgatacccacactgtctccaggcaggacaccttggtcttcaggtcatagcgttcttccttgtgcagcccactgtccaccacatgcacgatgtcattgattgtgatggaagtctcagcaatgttggtggccaagacaatcttgcgcaccccaactggaggctgctggaatatggccttctgatccatcatggggatgttggagtgcactggcaggatgaggtacttgctctcgtgcatgcccagggcctcctggaggcgctgctgcactcctttgatctcctgccacccaggcaggaagcacaggatcccacctggttccccgcgagcatcgatgtgcagaaccagatcagtcacaaggtccaaatcgagtgcgcattcatcctcagactcatggtgccggtgccggtgcaggtactggtgcttgcccaacttggccaggatgtcctctaggtagtgctccttgactgggtacatgaagccaggcaccttgatgacggggcagccaccaaagtatcgggagaagcgctcattgtcccctgtggcactcatgagcaccagccgcagggccgggttgagccgctgcaggcccttgagcaggatcagcagaaagtctgtgttcacgtcccgctcatgcacctcatccacgatgacgtggtcacgccctccaggctggggcttgctctgcagttacgcagcaggatacccacagcctcg

SEQ ID NO: 5319 - DNA, 1061 bp, Homo sapiens
ttttttttttttttccaacgtatacactttattttaaaatatgccactggcacttgggaaaaatgtaatttatttgcactgcttccattcttctactgtagtgttaggacttaacataagcatcactcttctatttcctatttacattcttttggaatattactacaaatacaatatacaatttaaaaaaacttatggggaaacacagcttatgtttttttctcctctttacaggcttctcagtatcattcgacttcaatggaaatttatatggacattttctgtacatatcttaaaaggcagagattacactgataaagcctaaagaatcctgcacaaatacaatacagaaaacagaaagtacagacgatgttatttggggtacaaatataaacaatacagtaccatttgagtaactgagcaacataatacccatactttatagaaataaaactgcaaacctggagaatgctctgacaaatattaaacattatatacacaatgaggtaaatgtaccttggtctcttgagaggtaatttaagtttaaagcaattgacattttgaagcatctccttaacatatgaagaaatatcaaacaccctattccgttggcacaacgtgaaaaaggggtatcaaaacatggttcatgatattcagttcacaaatcttgttaaaaaataaaaacaaattcactgaagttccttttaagttgtaataaacaggttgaatgttattaaccatatttttagaagtttacatttacaaacaagattgcataatgggattgaaaagtttaatgtactgacaatcatcttaatgtcctagaagtccagcactcttgagagggcccatgggtattccagtaatccaaaacagagacaagaagctgcagtacatgtccaaagataatccttagtatctcaaaatatctgagctggcattttctgccaaagtgttaacagaaccattatttggaatcactaccatttggagccagaacactgccatggtcaagaaacagttgacttacgattcttccagtgcaagaataaaaataagct

SEQ ID NO: 5320 - DNA, 5409 bp, Homo sapiens
  misc_feature (1)...(5409): n = a,t,c or g
ccagcacatcctcagccgcacagacactcggcgaggtggaggtgagggcgggcgccagcgaactcggagaggggctcgctcactcccaggcgatcccagccgccaccgccgccgcaccagcagcagcaacagcagcagcagcttccttcctcagactcccctcgagaggctggccaagcgggtgtagccgttgggggaggctcccgccgggggaacccggcgaggacaagagcagggcgaccgccttccactcgggctgtccggcggcggctgcctccgcccgtgtgtccgtcaagggtgccgcgggatgtgtgtcagtttacgcctctgagatcacacagctgcctgggggccgtgtgatgcccaaggaagtcttggttttaattattattattatcattattgttacgcttggctttcgggaaatactcgtgatatttgtaggataaaggaaatgacactttgaggaactggagagaacatatatgcgttttgtttttaagaggaaaaccgtgttctcttcccggcttgttccctctttgctgatttcaggagctactctcctcctggtgaggtggaaattccagcaagaatagaggtgaagacaagccaccaggactcaggagggaaacgctgaccattagaaacctctgcataagacgttgtaaggaggaaaataaaagagagaaaaacacaaagatttaaacaagaaacctacgaacccagctctggaaagagccaccttctccaaaatggatatgtttcctctcacctgggttttcttagccctctacttttcaagacaccaagtgagaggccaaccagacccaccgtgcggaggtcgtttgaattccaaagatgctgggctatatcacctctcccggttacccccagggactacccctcccaccagaactgcgagtggattgtttacgcccccgaacccaaccagaagattgtcctcaacttcaaccctcactttgaaatcgagaagcacgactgcaagtatgactttatcgagattcgggatggggacagtgaatccgcagacctcctgggcaaacactgtgggaacatcgccccgcccaccatcatctcctcgggctccatgctctacatcaagttcacctccgactacgcccggcagggggcaggcttctctctgcgctacgagatcttcaagacaggctctgaagattgctcaaaaaacttcacaagccccaacgggaccatcgaatctcctgggtttcctgagaagtatccacacaacttggactgcacctttaccatcctggccaaacccaagatggagatcatcctgcagttcctgatctttgacctggagcatgaccctttgcaggtgggagagggggactgcaagtacgattggctggacatctgggatggcattccacatgttggccccctgattggcaagtactgtgggaccaaaacaccctctgaacttcgttcatcgacggggatcctctccctgacctttcacacggacatggcggtggccaaggatggcttctctgcgcgttactacctggtccaccaagagccactagagaactttcagtgcaatgttcctctgggcatggagtctggccggattgctaatgaacagatcagtgcctcatctacctactctgatgggaggtggacccctcaacaaagccggctccatggtgatgacaatggctggacccccaacttggattccaacaaggagtatctccaggtggacctgcgctttttaaccatgctcacggccatcgcaacacagggagcgatttccagggaaacacagaatggctactacgtcaaatcctacaagctggaagtcagcactaatggagaggactggatggtgtaccggcatggcaaaaaccacaaggtatttcaagccaacaacgatgcaactgaggtggttctgaacaagctccacgctccactgctgacaaggtttgttagaatccgccctcagacctggcactcaggtatcgccctccggctggagctcttcggctgccgggtcacagatgctccctgctccaacatgctggggatgctctcaggcctcattgcagactcccagatctccgcctcttccacccaggaatacctctggagccccagtgcagcccgcctggtcagcagccgctcgggctggttccctcgaatccctcaggcccagcccggtgaggagtggcttcaggtagatctgggaacacccaagacagtgaaaggtgtcatcatccagggagccccgcggaggagacagtatccactgctgtggaagccagagcatttgtgcgcaagttcaaagtctcctacagcctaaacggcaaggactgggaatacattcaggaccccaggacccagcagccaaagctgttcgaagggaacatgcactatgacacccctgacatccgaaggtttgaccccattccggcacagtatgtgcgggtatacccggagaggtggtcgccggcggggattgggatgcggctggaggtgctgggctgtgactggacagactccaagcccacggtaaaaacgctgggacccactgtgaagagcgaagagacaaccaccccctaccccaccgaagaggaggccacagagtgtggggagaactgcagctttgaggatgacaaagatttgcagctcccttcgggattcaattgcaacttcgatttcctcgaggagccctgtggttggatgtatgaccatgccaagtggctccggaccacctgggccagcagctccagcccaaacgaccggacgtttccagatgacaggaatttcttgcggctgcagagtgacagccagagagagggccagtatgcccggctcatcagcccccctgtccacctgccccgaagcccggtgtgcatggagttccagtaccaggccacgggcggccgcggggtggcgctgcaggtggtgcgggaagccagccaggagagcaagttgctgtgggtcatccgtgaggaccagggcggcgagtggaagcacgggcggatcatcctgcccagctacgacatggagtaccagattgtgttcgagggagtgatagggaaaggacgttccggagagattgccattgatgacattcggataagcactgatgtcccactggagaactgcatggaacccatctcggcttttgcagtggnacatcccagaaatacatgagagagaaggatatgaagatgaaattgatgatgaatacgaggtggactggagcaattcttcttctgcaacctcagggtctgggcgccccctcgaccgacaaagaaaagagctggctgtacaccctgggatcccatcctcatcaccatcatcgccatgagctcactgggcgtcctcctgggggccacctgtgcaggcctcctgctctactgcacctgttcctactcgggcctgagctcccgaaggctgcaccacactggagaactacaacttcgagctctacgatggccttaagcacaaggtcaagatgaaccaccaaaagtgctgctccgaggcatgacggattgcacctgaatcctatctgacgtttcattccagcaagaggggctggggaagattacattttttttcctttggaaactgaatgccataatctcgatcaaaccgatccagaataccgaagatcggcacaggacagaaaagcgagtcgcaggaggaagggagatgcagccgccacaggggatgattaccctcctaggaccgcggtggcctaagtcattgcaggaacggggctgtgttctctgctgggacaaaacaggagctcatctctttggggtcacagttctattttgtttgtgagtttgnnnnnnnnnnnnnnnnnnnnnnnnnnnnnctcccncctttgggtctgtgaggcaactcaaagagggcagaagaggagaatgacttttccaggaataggaagtgggagcatgatcattattctccgctttctctttctaatcaacacttgaaaaggcaaagtgtcttttcagcctttccatctttacaaataaaactcaaaaaagccgtccagcttatcccatcctctgattgtcttctgacttaagggatttactgtggtgtaggttctgccagccaaccctacaagctgccatttccagtcctagcatttaagtaggatgttgttgcctttaacttttcttatccaggggaaaattgccattttagggtcagcatgaacagctctttcttgtatgcgatttaaaacaaactggaaaggaaacttcacacgtcaaaatccatagaagcgcctggacgaggcttaaagtgctttgtgagtgaataggagccattcgctaattctagacccacagtgtctggtggtggggcttcccttgtggggcttctggtggtggttttgccttttcttttccctcctccatgttcttctaaaacatatacatatatacatacacacatacacatattcttcaggtctctaagcccctggaagcagcattgtgtgatattctcagaggcaggggaaaatagagggaaaaatagagactattggtatgttctccccatcagcgagttattgtaactggtcaccactggacgggaaggagaacagaggagagggaaagagaagcccaacctctgtgatcatatgagggccaaggctgagcagtgtagacagagaccctttgaaatgcatttgtctctcaaatagactagtaaacaccgacttctcctttgggttacaaacaccatttcaacctttcgggagagtcagagctaggatgtacaagaactgattctaaccagaagtccgcaagtactgtggacaagaatgcttaaccatgctgcttcagccttgagagacctaggttcttacacatatgcacacacgcatacacacatgcacgcacacacacatacacacatgcacgcacgcacgcatgcacaccaatttatgtttttattaagtgccttgaaaaaatgaagaaaaatgtattttccctttatgtaaaaattagtgaatatcttatgaattaaggcattcctctttccctaaccccgatggctccattcccaagtaccccaactcactgctgatcctattaaaggaatgagtcctgctacccgagtggtagtcatagccctagatgactctcaactactcttcaaagggaggcatcaggaatagaatgaaactgtgtgaaggataagattgttcgcatcaagatccaaatcttgatttcatattaacgcctaaggattgcctgtgtgctggaaatatatttgaaactcaaccagtatggcccagcctattgcatatcattgtcagaccatttttgctggctgtgggtcacccacgattttcatttggtctttntacccggggtggaagggggnaggggt

SEQ ID NO: 5321 - DNA, 832 bp, Homo sapiens
atttcttccattttaaaaacttgggctcattaaatctaggtaggaaagggcgggtgtggcaggttttaatagaacaggtcaagataaggctttatttctatagaaatgatgctttgacaatagtttggcttggtgtaaggctcacaaaagaaaatcacatgtaccatgtgtgggttaagcggtttgattcacactgaaccaggccagcccagttgccctctgctgtgtccacccgtggagtggagctgtgtcacagccatcacactggtaaactgctgtagctggtttaccaggctttctcttgccctgacagtacaggtgaagcctgtaaataaatcttctgctatctttgtgaacttaaccaaatcccagttaccttatttaaatggcaatagatctgttttcccttaaactagaaaccttaattacctgtattcctacctccagctcaacccatatatttgcacctttccagtaagcaggtttgtatttccatctctccccttcccctaagattctgaattagttctccagaccttgccaagcacattctccctggaaagcaaggaatatcacagacccacaagaagagtaaatgcccaggagtgaatgaagcggcttgtccttgacttggaaataaaagcaaagctgtgaaaagccaggtcgctacgattttgttggcagcaggactagccacagagtagggaagttttgggccaggccctaggttttcccagaatgccttggggatgccaccaagaaccttaagaactccctcttacattttccatcggttgcaagcatggcttttgcaactgataggtgctctgac

SEQ ID NO: 5322 - DNA, 527 bp, Homo sapiens
tttttttttttttttttccaaggttcacggggtttattagggagtcgggagggagaaaacccaggagtccccagggccatccacattgctccccggcatgtgacgatccagcctggctttctctggtcctttctggacagaggctggccaagcaggcagcagcctcaaggggagtgggtaggagctgggggccttctggcagccctactcagaggatgatctggttggtgaagcttcggctcagctccttgtgtggcagaacaatcgagttcaggatgagcacctcggcagggatccggactcggcagcccaggatggtgatagcaggcagcagcttcccgtccttgaagaggctctcactgtccatgcgggctcggggatcgttggggttagggtcactggggggtaccctccacgcgggcccagcgtcccacggtgctcccccagcccacgatgctatgcagaacacacgtgtgctcctgcaaagtggctccatggaggacgatgctctcccggagccgcacacc

SEQ ID NO: 5323 - DNA, 475 bp, Homo sapiens
tcctagtaccttccagctctaaaaaaatttgaaatagcataataaaagacaaaatgaaaacgaaattttaattgtaatattttctgtcacagcagcatatgtatatttgaaatactggtaacaattttaaggtagcattctgtggtattaatatttattaatatgctcatgaacttctaagtgccacaccagacatatagactctttactttaaaagagcatatatttaaggcattgaaatggatacagctatattcattctcaattgtcttaggctattatatggaaagatatgtgtcaattataggtaggtaggtaggtaggtagattttctggaaacacagaagtacttgacggagagttaggcctgtattctataaatctattaatggtagcaaagtgcataagacagggatttctttgagatgaaaggagtgctgaagaagagcattggaattaatacttggatgtggta

SEQ ID NO: 5324 - DNA, 307 bp, Homo sapiens
tgcggatccagctgcaagaccgtgtaaataagctccaggaggaagcccaggaggctgatgcctgccaggaggagctggcactgaaggtggaacagttgaaggctgagctggtggtcttcaaggggctcatgagtaacaacctgtcggagctggacaccaagatccaggagaaagccatgaaggtggatatggacatctgccgccgcatcgacatcaccgccaagctctgcgatgtggctcagcagcgcaactgcgaggacatgatccagatgttccagaagctggtcccatccatgggggggcggaa

SEQ ID NO: 5325 - DNA, 1159 bp, Homo sapiens
tttttttttttttttaaataaactttatttttagagcagttttaagttcatagcaaaattgattagaaggtacagagatgtcccatacacctcctactcccacacatgcacagccttccccattatcaatagcccccaacagagagatacatttgttaacaactgacgaacctacatatcattatcacccaaagtccacagtttatattattccttctggagaattttcaaatacagaaattcctctaccaggaataaactagcaatttcctctcggctttctataaatttaattattatttcagaaattagcctatctttacaggagaaaatgttataaaccatgaaaagactatcaaatacacaaggaagtgaatgttatataaaaaatgtaccatctcctaaacaactacctgcattcccttcttgttggtaagttataattgtgatagttctgatcatctgtttaattaatttgctaatgaagcctctcacattctttacaactagaaaaattcagttttcaaaaattaaggctctggtatattacatatatcagcttcactcaactcttttatttagtccaaaagaaaaagaagaaaatgtcatttaaaaaataacatactcagctgcttgtttgtagtgcttcaaatctttctttaaatttttgttctcattttccaaaagcataatctgggtgtagacatctggaacattcccaacagttctaagttcagtcactcctttctgtattaactcataccattcagactgaaagcaatcaagagttctggtcattcccattttgatcaagaaattgcagagaaagtcttctattacttcaggtactgcatgctttgaaggaagaactgttttccgttccaaaatttcagtatctgtagcctgttcttgggccatctgaattgcttttgccagatcttcttcaccttctgggatgctaaaattgtcatctggtatctcttcatattcatagtcatcttcagatgcttcagttatggtgacctgttccaggtagtagcgccctcagcgccaccgcgtccgccgtgtccctcgcgtccccggctgccgtcaaacccatgcccaacgcctcttccaggacctcacggcggagctgggcatccctcgctgagcagccatc

SEQ ID NO: 5326 - DNA, 998 bp, Homo sapiens
tttttgctttttaatgttcttatttatttaaatatgaaaaaacatttcatctcttcccagttcatctgaaaggaggtcccctgggtaaacataggaaagcagttctgcaggctcatgaaggatgctcggctggaggtcggggggagcatggctgctttccccagcatagcccccatgttccccaccctctttgtgccccggatctgcgatcctgagtccagaagagctcagcaggaagtgggaactgagaagctgttgggagccaggagggccctggaccctctgttctctgccccagggcttcagccaccctgcaagcccctccggacaaggcaacgtcagcccaggtagaaaacttaagagtccctcctagaaaaccagtgatgtgctggccctttcagggacacaggccccttcagcttcaccggagatgagaaggtgccacccgcaacagggctgctggtcacagctcagtgcgcgatgccttggccacaatcaccagcttggacagctcagctttgaatgccccgggcctgtgagccactgctgttttggtcacttcaaattcctcagttttcagagggacatcactttccctttcaaatgcggctttagagtaggccatggcgtactcaatctcagcgccccgcacctctgccttgaactgtgtgaagtacagataggacttcccctggggcctccagatggtgcaggtgaagtgctggtggtcttcgctggtccccagactcatctgccattgctcattggtccctccttgagaggcgtaagtgaacatacacgtatatttgtcccccgggcccacgttatgggagaaggaatgcacgacgccgccgggccgcacgtcaaacgccaccgtcgtgggctcggacaccgcctccgccggcctcagcgccacggcccctaggagcagcgcggcccgacgaagtcgcgccgacgccgttccacccatccgctgagagccgcatgttggcggccgc

SEQ ID NO: 5327 - DNA, 481 bp, Homo sapiens
  misc_feature (1)...(481): n = a,t,c or g
ggtgnnnnnnttggaatcgttgncnnnnnnnnnnnnnnnnnnnnnnnnnnnnnnnnnnnnnnnnnnnnnnnnnnnnnnnnnnggcacgaggcaatgtgggaaagccttcagagctgcctcagtccttcgaatgcatggtaggactcaccctgaagataaaccctatgagtgtaagcaatgagggaaagccttcagatctgcctcacacctttgaatgcatggtaggacacacaatcaagagaaaccatgaatgtaaagaatgtgggaaacccttcaggtctgcccagaaccttcgaattcagtaaaggacacaagcacacataagaatgcattctggatagctgnnnnnnnnnnnnnnnnnnnnnnnnnnnnnnnnnnnnnnnnnnnnnnnnnnnnnnnnnnnnnnnnnnnnnnnnnnnnnnnnnnnnnnnnnnnnnnnnnnntggacagtctgctcctcagtggggtccctgatctcaaa

SEQ ID NO: 5328 - DNA, 1059 bp, Homo sapiens
ggcggctccactagggggtatgttttctgggcagccacccggtccccctcaggccccgccgggccttcgcgggccaagcttcgcttcttcaggcagctccaggcgctcctagaccttccagcagtactttggtggacgagttggagtcatctttcgaggcttgctttgcatctctggtgagtcaggactatgtcaatggcaccgatcaggaagaaattcgaaccggtgttgatcagtgtatccagaagtttctggatattgcaagacagacagaatgttttttcttacaaaaaagattgcagttatctgtccagaaaccagagcaagttatcaaagaggatgtgtcagaactaaggaatgaattacagcggaaagatgcactagtccagaagcacttgacaaagctgaggcattggcagcaggtgctggaggacatcaacgtgcagcacaaaaagcccgccgacatccctcagggctccttggcctacctggagcaggcatctgccaacatccctgcacctctgaagccaacgtgagcaaagggcagaggcagttggcctatgagtgggctgatgcgtgaggttggccacacattccttcctgtggacttgacattttggaagaactctttgccagataatgagttcattttagttttatgctcccattgaaaaattttccactatttttataagctgttaatttcttgagtactttataacatgtctgtagcttggataaaccaagtaagtattttttttttgtctttagcgaagtttagactgtgaatatgatgacacagattcttttttatggtggctttgcttgttttaaatttttgcatgacttttcatctttttatgtgtgtttcctgtagtttgatccgaaggaaaagagtatagtagcctgagaatcaggagatgggagttttagtcgtaggccttatgataattaccccgcggtggtgtgtagaaaagtatgtaaatttgctctgttttaagactttgaactacctcaagaagaggaatctaatacaatatttgtaatgttaaaaaaaaa

SEQ ID NO: 5329 - DNA, 500 bp, Homo sapiens
  misc_feature (1)...(500): n = a,t,c or g
tcctgccccagggtggcaggggaggggtagggtaaaaggcatgtgctgcaacactgaagacagaaagaagaagcctctggacactgccagagatgggggttgacgctctggcctaatttcccccctcgcttcccccagtagccaacttggagtagcttgtagtggggttggggtaggccccctgggctctgaccttttctgaattttttgatcttttccttttgctttttgaatagagactccatggagttggtcatggaatgggctgggctcctgggctgaacatggaccacgcagttgcgacaggaggccaggggaaaaacccctgctcacttgtttgccctcaggcagccaaagcactttaacccctgcatagggagcagagggcggtacggctttcctggattgtttcactgtgaattcctaggttttttcgatgccacgcantgttgttgcttttgtgtatggaaacaagtgtgggatgggtctttgcctttctg

SEQ ID NO: 5330 - DNA, 1851 bp, Homo sapiens
ttggtataaatataaatatggtattttgaaacagaactgcatcggacacatggtaaaaactcaatgttagctatttttatttctatactttgattatgatatgattctacaattattttcctgtacaccatacttcaaaaatggtaacctctctgggttaccaatcaagtaactaattttttaaagtaatcatcaaaaaaggaagttatatactctttattatattataccctaaaagtttatgaaatgtgtctcatggattaaccatttaccctcatgtgtgaaatctcaactcaggattttagggctggaagggatgtgacagacgatcttgccaagcccggcccttcttctacaaggacgtcttcagagatctggaggaggaaagggccttgccctgagttcgctgagccagaacaataggacttcttctgtagttgtgaaacttgtcagttgttgaagtcaggttaatgtcatctggctggctttttaaaagggtgtgaagtgagaacatgaataattgtcacttgattagagacctagactcagagttaggttactccatgtatgaagtaaccccatatagttacttcatacatggagtaaccatatagttactccatgtatgaaaaattgcaagactgttgactgtcattctttggtttagtgggtggagccagctgtcctcattagataaaggttgtttattcaacccaagtataaatggaaaaaaaagatgcgccctctgtcactgagggttgactgactggagagctcaagtgcagcaaagagaagtgtcagagcatgagcgccaagtccagaaccatagggattattggagctcctttctcaaagggacagccacgaggaggggtggaagaaggccctacagtattgagaaaggctggtctgcttgagaaacttaaagaacaagagtgtgatgtgaaggattatggggacctgccctttgctgacatccctaatgacagtccctttcaaattgtgaagaatccaaggtctgtgggaaaagcaagcgagcagctggctggcaaggtggcagaagtcaagaagaacggaagaatcagcctggtgctgggcggagacacagtttggcaattggaagcatctctggccatgccagggtccaccctgatcttggagtcatctgggtggatgctcacactgatatcaacactccactgacaaccacaagtggaaacttgcatggacaacctgtatctttcctcctgaaggaactaaaagggaaagattcccgatgtgccaggattctcctgggtgactccctgtatatctgccaaggatattgtgtatattggcttgagagacgtggaccctggggaacactacattttgaaaactctaggcattaaatacttttcaatgactgaagtggacagactaggaattggcaaggtgatggaagaaacactcagctatctactaggaagaaagaaaaggccaattcatctaagttttgatgttgacggactggacccatctttcacaccagctactggcacaccagtcgtgggaggtctgacatacagagaaggtctctacatcacagaagaaatctacaaaacagggctactctcaggattagatataatggaagtgaacccatccctgggggaatgacaccagaagaagtaactcgaacagtgaacacagcagttgcaataaccttgggcttgtttcggacttgctcgggagggtaatcacaaggcctattgactaccttaaacccaccttagtaaatgttggaacattccggtagtagatcctcctggtaattggcataattaagaaaggccaatcatttttcttaag

SEQ ID NO: 5331 - DNA, 1326 bp, Homo sapiens
ttttttatttttaaaaatactattttatttttactcacatatgaaaaaaatggctgtactatcatgtttacatacatactaacattggaaacagaataacgaattgtatttaaattttatgaagaacacacaaacattaaaacactgattggttacagaaagcagagtttgaggaaaaaacattagctataattttcattttcattaaagagcagcaccctctgagaataatcaaactgattagtaatattcatctatactgcaaaataatatgtacaaaggaaagttagtgattgtactgattttattacttttaccaagccattttatgttcctcactccaatgcaaagaaataaaacataatctgaagaaaaaatatgtccttattattattcccaataaaaagtttggctttattcctgcaagccctggggccatattgttacaattggcagcacttaacggctccaagttggatcaatgttcccagtttgattctgatcccactgaatagaatctctcatccatatctggtgaccagactaaccccatgggagctgtgatagcctgaacccatttctgtggtatccctagatctcactaaataagaaagaccctacacccagaaaatatagcaactgatctatctataaattacatctatatgctagctctttagtataagttggaaaaaggggccctttcttgagcacatggataaaagtattattgtagtctaaagattgctggattgatattgtgttgttataatgaagataaggtacacactgaaacccactgtcagattaagaaacttccacaacttgtctcagttcttcaaacaatggagcaagttccttttctaggctgacaattagtcctgtaattgggcactgcctgcctgggcctatgaaactcaccaccaaaggtaaacgattaaattgaacccacctggtaggtgttaatagtaaacagatgatacttttatttttggaaagtccaagtttgcttccttggtctgttgcaagggcaaaagtggataagaaaccaggtcgcaaagcatgctctggagcattgtcatttgccactttaataacaggtactccatctctatctgacacaacaatggcatggagcccttcaacacttggtaactttttatacaagaatcgctttaggtcatccgccatgatgaacccccttctctcgcaggatcaatctccacgcctggggtttctgggctgcctggttctctccgctgtcacttcagggacagctttaaagacaggttcctcctcaagccaccgtcacatgattcatgaccc

SEQ ID NO: 5332 - DNA, 864 bp, Homo sapiens
  misc_feature (1)...(864): n = a,t,c or g
cgacatttgacatagcttcagatgcatttgccacattcaaggatttacttacaagacataaattgctcagtgcagaatttttggaacagcattatgatagatttttcagtgaatatgagaagttacttcattcagaaaattatgtgacaaaaagacagtcactgaagcttctcggtgaactactactagatagacacaacttcacaattatgacaaaatacatcagtaaacctgagaacctcaaattaatgatgaacctgctgcgagacaaaagtcgcaacatccagtttgaggcctttcacgtttttaaggtgtttgtagccaatcctaacaagacgcagcccatcctagacatcctcctcaagaaccaggccaaactcatagagttcctcagcaagtttcagaacgacaggacggaggatgagcagtttaacgacgagaagacctatttagttaaacagatcagggatttgaagagaccagctcagcaagaagcttaatctccaataaacatctatgttaaatccaaattcagcatttgctgttagctattcagcatcaggcactcttattgattcatgaggaacattactgctaatctgctgttaagtgaacggtttttcattttacccttttgtttttcagtatcaatttattcgcatgtcaactttagctgcccccaaactcccattttggatagctcccctctgatttcagataaagctctgcgtcatcttccttcagcgaaggtgcgcgacctgaaggtgcgcgatctgacgcagggatgccaggtgtgcacttgccacactgcactcagatcgccaacaaagatgggtgcaaanacataggtctaatctgatatcg

SEQ ID NO: 5333 - DNA, 420 bp, Homo sapiens
  misc_feature (1)...(420): n = a,t,c or g
gacaaaagagccaaggcgctggaccagtccgacaacgatatgtccgccgtgtaccgagcctacatacactaagctgtcgacaccccgccctcacccctccaatcccccctctgaccccctcttcctcacatggggtcgggggcctgggagttcattctggaccagcccacctatctccatttccttttatacagactttgagacttgccatcagcacagcacacagcagcacccttcccctgaggccggtggggaggggacaagtgtcagcaggattggcgtgtgggaaagctcttgagctgggcactggccccccggacgaggtggctgtgtgnnnnnnnnnnnnnnnnnnnnnnnnnnnnnnnnnnnnnnnnnngncncttccccccaggatagaagctgccaaaaacctgntgtctg

SEQ ID NO: 5334 - DNA, 476 bp, Homo sapiens
atttaaagaaaggaattgatattagctagtgattactaaacagcacaattctgtaactaaaggaaaaagaaactcactaccatttagtagtctacaaccttagcagccttgtcaaaaatcaattctattatttttgcagtatagtggtatctattcaattttgagaaactataactgcttcacaaacacttacatcaagctaatcagtatttgagccatccataaacagactatgtagaaaagccaaacatctcattagctactttggagttctccccttatttttaataaatgtctgtcattaatgacgtcactactgaagaccatgaaaaaagtatatagttgacccttgaacaacatggggtttgaacttgcacagggtctactttattacacaggattttaaccaaatgcagatcaaaaatacagtactgacaagatgcagaacctgtgtttatgtgaaatctctgtataca

SEQ ID NO: 5335 - DNA, 339 bp, Homo sapiens
aaacaatatactaaacagctttccacagaccatttcatgtaatcatttaaagcatccctaagaaaattactattatcctcattctagagatgaaaattgagactcagaaagattaagtaccatgtgcatggtcacacaggagagtcaggtcagaatttgagaccaagctctagagtcagagctcttcccccactgtcccacctgccgaaaaattccaatcagaaaaagctaacaatgtactgccctttccataagttacaataaaatagtcagtaaaagtgatccctctaactataaacaaattgatttaatcaaaaagagcttttaaccaaggaaaaa

SEQ ID NO: 5336 - DNA, 464 bp, Homo sapiens
ggaaattacttcaaactgaggtgtttggccccaggatctacagggctctaggaagtagcttatgagagcatgggcagtgcagcctcctcctctctgcttgggtgtatgtagccccctttataaagtgcctggcctgtgagcagggctccaacttttatcataggatgtaaaatgatgtaaaatttcattttgaatccccatctccaagcatggcaagatgacactgagatgccagggaatctgaaaacttctcagtcacctcccagatgagcggagccaatgactctcccctgcccagacagagacctccacccacactcaggcagagaggccctccctaggcaggtccctacaaactgagcacaaaggcaggactcctggcactcggagtcaagagtgtgggcaccctgagccaagcactgtcctagaactctttgctgggtctttatggcggtcaccagggc

SEQ ID NO: 5337 - DNA, 571 bp, Homo sapiens
taccacctgaagaagttgaaagaaagattgataaatcaacgggagataagactttattagaaggtaacacctgcaaggtaccccacatagttggggccactcttttttctgtcccttatgagttacagaacagggagtctgctggagacacaaagccagcagtaaggtccctttagcctgtctcctgttctctgaagctccctgccgaggctccctcacgcccagaggacacatctccccttcttctctagatgttaatgtagggcctcagatgtggcatgtcaacactcccatgggggaatttatgaccatagagatagtagaaacctaaatattttcagaaaaaaaattttttttgcaggatttccaatttatctttgaaaagacagtacaatcatgtttgaatgtctgatggaaagtgtcttatttttaggtttgcaataattgttactttcttattctccattcttatggtaggatggactattgagaaacagttggaaatttattctcctcaaatgagattttgaaagggatttatgggccataaaacttaggaatttcatagaaa

SEQ ID NO: 5338 - DNA, 198 bp, Homo sapiens
gagtaggcctggaacacagaagaccccttaaagcacactacaatgccctgtgattaaagtcaattgaaaactacaacaacccaattcgggcacagctgccaatggcccaattccttcaggaaggaaagtttgggtcattgccccatataaagaatcaagaccaactgagttgcttgctgaaagctaagggaatacaga

SEQ ID NO: 5339 - DNA, 518 bp, Homo sapiens
  misc_feature (1)...(518): n = a,t,c or g
ctccggtgagttttgtggcgggaagcttctgcgctggtgcttagtaaccgactttcctccggactcctgcacgacctgctcctacagccggcgatccactcccggctgttcccccggagggtccagaggcctttaagaaggagaaggcagctctgtttctctgcagaggagtagggtcctttcagccatgaagcatgttttgaacctctacctgttaggtgtggtactgaccctactctccatcttcgttagagtgatggagtccctagagggcttactagagagcccatcgcctgggacctcctggaccaccagaagccaactagccaacacagagcccaccaagggccttccagaccatccatccagaagcatgtgataagacctccttccatactggccatattttggaacactgacctagacatgtccagatgggagtcccattcctagcagacaagctgagcaccgttgtaaccagagaactattactangccttgaagaacctgctaactgg

SEQ ID NO: 5340 - DNA, 785 bp, Homo sapiens
  misc_feature (1)...(785): n = a,t,c or g
gtgatggaaagacaggggcatcctgggacagacaacatcatggcccaaaagtgttcgaagggggctgcagcggagatccgagagcagggggatggggcagaggacgaggagtgggatgactgagggacgtggctgcctctgggggcaccagcaccttctgtagcattgtggaacatttcttccatgaacttctactctggagctggagagaacagtctgccaagtcttacctggttcttccccatagccaccttggaatactctttgaacaagctctgctaaaaccaaacccatgaccactgtgttggtggtggggcctcatgctgtggctcagggagggcccctccctgcatgtgagtctagccttcctagacattacatgatgaccctttaaaaaaaaattagagatgggntctcanngtgttgccaggctnatctcnanctcntggactcaggggatcnaccaacctccnantcccaagggtgttgggattacaangcgtgagcnancgcaccagcctcatgttgaccctggccctggatagcagctttgtttgtagaggcaggtggtgggagagaccctaggacagcctgagagtaactggacctggtattggtgcggagtggggaatatcccttgtctaaatgcagagcagctgagagaagttagcggggctcttcctccgttctcattgtttcctgctttccttccccacccaccccttcctcagcactctgtgttgtagcctgtactatcctgcttcaagcctccgtgtcccttgtac

SEQ ID NO: 5341 - DNA, 1582 bp, Homo sapiens
aataaaattatatatgtccttgggaaatattatgacagttgactttaagatcaaaaggaaaggaagacctgaaagtcatttgaacattttaggaaaagaatattggagagaaaaaggtattaaatatatagaaataggtttttaacctaacaaggtctgcctcttatgacgagaatgcaacagcttggtaaatcataaaagaaacatttaagctaataggattttcgtactgtctctatagctgtagctttaaaattcaacgtatataattggcatggaaacttaatttgcagtcttttcaagcctttaggatagtgtgatgtgtaaccaaacaacctcaaatgtgaatgccttgattttatttttatggtgactttaggctacagcatttcctatacccagagctaaacactggaataatactgacatcatttaatttaacataagcaattatgtttaaggagtaatttgtgtcatgtacatatttgattgattttttttcttctacataattttatttgaacaaatgtagacagtttatatgtcgcctttttctgttcaaatttgcatggcctattaagttggctggagagtgttttatgtggaaatattttcaagataatgttccttaggaagaaaataacattcttgggttgagggaaggaatgccatacactactgtctcttcagatctgaaatactccagtttagagccaggaaatttcacaggtcacaccgatttttagcattaaaaactaaggaatatacttagcacttacttaatcttttcagttttccagtttacgtctcaggaatgaagtgtagtctatggttgacaatggagttttgtgatcctgcttattgtaactgacaactgttttcaactccaagagctaaactattgggcagttcatgttaagttagagtgagggtgtaggtagtgtcagtgagtggctcttgtgcctgctgtagacattagggcctgcactaggggccatgtgctgtcaagattcaggaacatggctttaacaagcagatcttgtatcaaggcagaggtgatgccatgccatacttttaggaagtctgagatgataaatatttcaaggtcagtgaagtctatcaatcattctccccttcctcatcagcaatggtagatagaaatgtcctaaacttttctaaatcctagtgatgaggatgtgctgatattcaacatagtccttaaagtgaaaactgagttgttgctgacctccacaaaagaatatggaaaaaagccttgctgtacacctagttgtacagccactctggcccaattccatttcctgtccctctgtggttctgactggagaccccagtgtgggggaggtcttaccatttaatataggaatgatatcaataactaatgctatgtacttggaaaatccaaataaggaagttttagggtgggtgcatactttggtttctcaaattttcgttgtcagaacaaatgggaaggagaatattatttagactaatccagatttgctttctatgaaaatctaatgtctgggattatcttccttttctccatgggcctaaggaaatt

SEQ ID NO: 5342 - DNA, 1732 bp, Homo sapiens
tttttttttttttcacagacagatgtggggccttttattatttggggttcctctatatggaacacgggacctccccaccccaagcctagtgcctctggcaccccataaccagtacacaagtccctgaagagtcccctttaaaatcactaatataaaaaaggagcgaaggagggaaggccgaccgcccacaggctgggcagctcctggtcggcagcagggcccagggaaggacagagggggcgttggcttcggccgcaggaaggcacaggcgttcccagccccggggccctcccccgagccgggaggcggctcccacacgcctggactgcagactgtgtcgagctagtggttatagtttatagtctgcaggcaaggccaggccggtggtgctgagtgggtggcctctgaagtggggagaggggacacatcaggatgctggggaaacccggggctgtcccgaggcaggaacaagcgaaagctgccttcctggcttggcaatgggtggggcccagggagtccatcccgagcccatggctggcacaggcaggggccacacagttctgcccggagcagatgaacgatggtggctgggaggagaggggacaggaggacgaggctgcctctctgctccaaggaaggcacttgcagctggggtggcctggtgtggtgtggtaggaggcgaggcttggcagacgaggagggaggggagcacggcaagggggaccgagtccctgcctcatgcaaacatggtcagctgcaaccacttaaacaagtcaaaggtcacaactccatccagatctgtgtccagagttttgaaaaatcggaacatggtctctagccgcaccaggcagcaaacgaaattgtcaaagtcgaccgccaggtcgggctccgagtagcgggtgatgatgagctcgtacagcttcttgttgagcttgaagcctgccgactcaatggccatccgcatctcgtaggcactcatgctgcccgacttgtccaggtcaaacttccggaagatggacaggtaattccggatgcggttccacaggatgttgaactccaccaggcccagcttcccattgccatcacgatccatgaggttcacccatgctgcggcacgactcttagctgaagcccttggtccgcaggtctttgtgtttgctgatgatcctattgaggattgtccgcaactccttcacgctgatctccatgtcctcccctgccagctgcctgaagagggccttgaagttctcgtcaatctcctcttctgagagcacttgctcatcggggagattggcctggatctggtcatccagctccacagtcccagcactcttctctgagaagaagcgcagcacgaagtcgccctccttgttgggctcgaaggtggagggcaccaccacatactccccgggtggcaggcggaagcgggtgctgacctctcgcaggttgatgaactgctctgagcgcgcccgagacgcattggccaggaagaagtcacgcttcaagtgtacggccggctggcccaccagctccggagggacctcgtagaccgcgaagccaatagtctccatgtcgcggccgaagcggcgctcgcggcgacggtgcttctgcataagggcgagcacgaagctgcagcctgactcgcggtccccgtagtcgtccgggtcatccgtctcatccagccggatcttgaactgagggttcacccagaaggtggctgcggacgcgtggg

SEQ ID NO: 5343 - DNA, 466 bp, Homo sapiens
cggggttgtggtgaggaaggggtgatggcatgcggagttctttatcttcagtgagaatgtgcctgcccgcctgagagccagcttccgcgttggaggcacgtgttcagagagctgctgagcgccaccctctacccggctgacagacaacacagacctgtgccgaaggctaatttgtggcttttacgaccctaccccaccccctgttttcaggggtttagactacatttgaaatccaaacttggagtatataacttcttattgagcccaactgctttttttttttttttttgcttctctgccccttttccatttcttttgtatttgttttctgtgagagcactgaaatggcggccctggaatctacaatttggctctccactgagcaccttatcttgccaccttagccttaagaatgaatatgaagaaaaatacacagccacctctgtccagggcagtaagaagggct

SEQ ID NO: 5344 - DNA, 1450 bp, Homo sapiens
aaaaaagcaaaagaataaagaatatatacaaaagggacctggaatctgtaaggtgattccaaaaacgaaataagtagaaaatccatggtgaaacctgaacattctacctctgctttggagaagggctatcatacaacattcagtcagctgaagatggattggtagaggtgtgtctatacataaacttcagtcatttttgcttgtgcagaatcatcccaatcttcccaagactgaatgggcagtcctgtggctttcttccttttccatattcccaacaaggctacgtgaagttcaactcttgatgagccgcttacaacagcagttccttgcttcttagatttttccttcattttctttgacttaatttcctcaagagtttttattccaaaattcaaacattcaccttgctttatattgactgcaggtttccggacagaagtcactcgtaatccattgtgaacttcaggagttggttgcagggtaggtgttttggtttcatcaccttcctcagaaaactgatcatcatcatcttcatcatcatctgcagcattaattacaactggtggatgcgtggggctaggaacattttcggaactttctactttcataacgctccgcagctgaggggaaggattggactggacagacaatttgttctgctgaactgaaagttggctagccttcacttcctcttctggtgactcaggcacagtgggcaacacagttttgctcggaggtaggaaaaggccatcaacatatcgtcctctattgtgatggaaagcgcagtttaatttttgacatcctgttggctgattttcccaataacaaggaatttccactgcgttttttatcaatctccatgtgccgaaacctgcacacctgtcgaaaacagcgcccttcttgccataatgtgcaaacagtttcatttcctattgcagcttcacagtgacggaatgggcagctgtcgcctttggtacatgtggaatagaaaaaaaaatagcagtcttctccttgattaggcatgctgggtagattcttagatcagaagtggcttcttgaaacaagccactgcttcctcaaagcaaggaccaggctccaagtcctcgtgaaatgggtttaatcttccaaatgacaacttgatcacagaaattgtctttaaactgtaatcattagctggttgctctgaacaggaacatctgtgtcttcactgagttccaatctattacgcctgtaggtcgaaccaacactcaatccatgaattaataataatgaggcagaaaaaaatttcctcctcacattgccaagaaaacctctcagccacaattcaaacacagcatgtgtttttaaaacatctcccaactactgggagattaagtccattcaaataacctttgtcagactggagacagctagggttagttatctcctcaaaaacaaaacaaaacaaaac

SEQ ID NO: 5345 - DNA, 1007 bp, Homo sapiens
ttttttttgttttcaatgttgatgtttttattaaggctttggaagagtcttattattttacataataattttcccaactacttttatggaatacctcaaaagaaagaaaatttcttttacattatagaactgatgatactgccctaattgagccaaacatagaaaactttggaaaaaactttctataaaacactgtttcaatataattttattagcagttattacatcaaaattcacatttagaggatccagaggactgtcttagaaaattctaaagcatatttaattaggttttaacagtaagggagaacttaatataacacagcccttaaaaagtcaagactactactgaaaattaagtgcagttctatcaagaactagaaatgaactgcacgcgtagtgtcacttaaagcaaagcttcatgaaaatataatacacttctatgaatgtatcagtggcaaacatcattggcttccaaaaaactgacactaaaggaatttccaatcaaaacacaagcacagtggctttcattcaatatagagctatgataagtctatcaagagaccctgaatccttacgtacttgtaatatgattttatgctgtgacactagtacaaaacacatcaactctaatgcatagatgacgacacatgataacacgataccaaggaaagcctttttctatatcagaaaatgccaagttctccagtactgtgtaggctcgtcattgctgatccagtgaaattctacgtcctccagcttgagcagtattataggattcacaaatcttacatttcatgcctaatatatgaaactgaacagtggatcggtccattacagtcattgcagagaatatccacagtcatgttctgatattctgatggcataggagtctgtgctacttcatcatccagctgtctccaatacctggtcatatctaaagcagagtgcatacataatggacatctgtagcctctatgtaaaagatgtccacatggcaagacatg

SEQ ID NO: 5346 - DNA, 2687 bp, Homo sapiens
ttttttttttttttttgactttcctacatcagttttatttaaaacacaaacaagtatttctctttctgtaagggcaaatggttcaaataatgcggaacacgaaacattgactaatacaagtgctttaaatatgaaacaaaattattttttaaaaaagcaaaagaataaagaatatatacaaaagggacctggaatctgtaaggtgattccaaaaacgaaataagtagaaaatccatggtgaaacctgaacattctacctctgctttggagaagggctatcatacaacattcagtcagctgaagatggattggtagaggtgtgtctatacataaacttcagtcatttttgcttgtgcagaatcatcccaatcttcccaagactgaatgggcagtcctgtggctttcttccttttccatattcccaacaaggctacgtggaagttcaactcttgatgagccgcttacaacagcagttccttaggagccaacatgacaggtgggtcagatttccctatgagaaacaaaactggccacctacagcaaaatatcaaaatgggtaagtccttccttcctcttcctcctgattatatacaacatatctcctttcaagactattatttccatcatgcttattccttcacaaatctaaaccttgaggtgatatgaaggaaaccaacatcaagaaaagaaaactcaattcagaaatgaagaaaactggcaggtatacaatacacccccagagcatctcaatatccctggcacagtacaattcagtgtactgctacagcccatagataaatattggcagcttgaataagctcattttttccctcaggtggttaaaggccaccaaacaaatactgggcaacaggggtttgttgggagagttagaaataaaaaattaaccaaattttgtccctgtgttaattcaatgccagcaaggaggcaagtactgaagaagaaaagggacaattttcatactaaaaaagaattcctctaatcatgtcaccatctcatataatgaatccagggaatcccagaaatagaaaattagtttccaggggacccctgaggcactttaaagccttttaaaaaattacagtaataataaattagatattgctcttcagaggctaacagagcagcagaagcatcaagatcaggtccaaagagttatgcccacatttacaggcttcctggagctgctcagcccctcttttaaagcttagttgaatcctttaaaataccctttaaaaagacatacaatttaacacagactgagtgggtatttttgtttagtggtagcataaaatttggtccttaatggtagcagctgtcttcatccatttcaaactcaggtaatattaagtacatcaagacaatacataaagaatacaacaaagaagaaaaaagccaaaactgacaaacacctcaaggagtcactaagttcgcttgcaccctttcacttgatctccctctcagtctcttttttgtggagagaagggtatgacagaacttttttctcaaaagatgataaacaatggcatcaaatggacaaaatggttataaagtaactttaaaaatctgaccccaaggaatccaggacacatacagataattcagaggtatacttctgatttggggcaaattctagactaaagaaatgatcatctcaggtaaatgttacaatagatgaaactaagtccagttttttggcgattttttttttaaagtgtcctcactaccaccttcagctatcaatcatttctgatagctcaagcagaaggtcatcttcatctttcccaggatccaggtcaatctcagcttccaatttgcctcctgaaatctcccatattagtttctcaaaatcatcctccacagagagtgggggctttcctgttgaggcagagctgagtcggcgagttttcatgctcatttgggatgaggaagggccagacacctccgggggtgaggaatctgaagaggactgggttggaggcagcacaagactgtctctaggattttctgcttcaggcacagtgactgatttgtcctcagagacaagcgggacaacagccacagctgcctttttggctgggggttcctgtaggacactgctggagctgagtggcttcacagcggcaatgacagcagcgtgcatctccactgccttacgttttggggccaatttgggggatgacacaactttaaccacagatggcttcacgttcactttgggtttagctttaccccttttttccaaggtctgtgctgcacatttcacattcaataatgagtctccaatccctgaggtttctacctccaccttctgggatgactttgtgggaagccgcttggtcaggtgccgtgtgattcctggcacagcagtgagcactggtttctctgccacttgggtattgcaagaggctacatctccccgaagaggtgtcaagactgatttttccctctcctgctgtttctgcatgtgcttctctctcatggtctcacatctcttgacttgaattttagtgatgtcaactcctgtggtctcacctgaagcctctttagcttctgttctaatactgctctgagaatcaacttcatttccttcctgaaggttcttctcttctttcatccctgttcttttggtgattcgcagcagccgccttgcccctggagtggcctcg

SEQ ID NO: 5347 - DNA, 554 bp, Homo sapiens
ggctaaatgattggttacgcttttatttggctctaagaggtttccatggaaacagcctgagagacagaaaaggcagcattatcatctttatccatgatgccatctgataaaactgcacattgattcattcatgctattcagagcagatgtattacttctgataagcctggacaaagggaggcatgagttttatcccgtcacgctttgaatttcctgtcttcccctgtttgaaaccttaaattaaaatcctgataaaacctcctctgaacatttccctcaggagcctctagctgaagtaatgcttcaataatcagaaggcatatgaaggaaacggtgaagccccaaatgggagctccactgccaagttcttaaaattatatggcaccacgcttcctgtagctgaagaaattgttctgaagagtatttacaattccattatatcagatctcagccaggcaagaaatgtcatcataagtgtttattatatacagttgaagcaggtggcatcatccatcatttttcttcctcttgatgtctagatcagttgtgtgtgt

SEQ ID NO: 5348 - DNA, 502 bp, Homo sapiens
cttcgcgagcgtctgggcgggtggtaggaacaatggcgctgtcttaagtggcacagtggagcagctctgaagatgcaaagatacacgaaaaaaacttccagaacatctgggagaatatttaatggaaaatcgcttggttaaaacctgacacttttaacagtgaacagcgttctgagtgtggacgagtagccagtgaagataatgaatgtcgaatgtgactgactagcagcttcattttgaatgagggtcgctgtctgcccattgatagaggccagattgtcttggaagttccaaagttgcaacgatttctggctagtgccacgaggtttacttgactgttgtgtgaaaagctgataagaaaaccatccagaaaaaagctcttcgttttacaaacatgaaaataaaacatgtaattttggattatgttcctttttgttattacttttaaataggtcctgaaataacatggggagcattaaatggaaaatccactaaaaaaaaa

SEQ ID NO: 5349 - DNA, 1490 bp, Homo sapiens
gttttgtgtttggaaagatcatgatgcgagcatgttgttgaagaaagaaagcagaagaaactaacaattgtgatgggggaggagagacagcttggcaacattccttttaaagttaagttagcataaagaaaacaatatttagtaaatgaaatagattttcaaggtaggaaaagtagtactcaagaatgtatttttggatacaaaaattcagttacacaatcagtagcattccaaattagttatgagtatttatacaattacaaaaatggattcatgttttaacaaagtattttaaaagctcaaacattttaaaacaggcacaatattctaaagggcatatgcattcaccatgggcttttgaatgtcctcactcccaacttcacaatcaaaatctacagaagcggcaaaagatcagagttcagagggctattttttttttccctttccttacttaaggttgcaaacacattgacagaggcaaaataaacacgtttcatagcagaaagaccaaaaaattgaatgtaaaccatagctctcccttgggagattacacaaatacaaggttcatctgtacttagaacaaggctcataacttcttgtagcatggacattcaacaggcacagagcaacaacattcacccaaataccagctgcaatttgtcctttaaggatgcctcacaaggatattatgtccaggtagctagtccatttatatcggggaccagttgtccttttgttgtttgtggctgtttattaaatgtagtggcacaactttgttgtgaatatgtaccatcatttgctacaatctagacagatcatcctgtctacaaaaaatcattttctacatttctaagaccattatcagtttatctgctcctgctagaaaaggacatactttttgtcaatttacattaacaaaggctctgctactccccatttactcgctgcaatgaaaactggtaagccaagggtaaagcttaagtatcagggactatgaatttagggtagaagtgaaaataaccaaagtggaactaaatcccctattctggagtgcaactgagatcaagtaaacttcgctggactttcttcttaactataaaactattaaccagaaggtaaagtcacacaattttacctcccaacaaacttttaaaataaaaatttccaaaaaatttagatgtctaggttttgttatatcttaccaagagttacacagacataaatttgtatttaacttcagttaaacatctattcactttttaaaaatgctgtctgcaaataaactactggacatcttaagcttactaaaaaaaacttaagatttttaaattaaaaaaaaaaaactaggacaaaaatctagcaaatggtttcacgtacctttaaacactgattcttaaaaatttatatgctgaaaatgaggtttgagaatacgtattttaaaccatttataatcctaccgtcgactctagtcagaagttatctgagcaaag

SEQ ID NO: 5350 - DNA, 1029 bp, Homo sapiens
  misc_feature (1)...(1029): n = a,t,c or g
attcggcacaggcgtccgctgcagtccgccggcgagggagttacgcacgtcctgattctcctggagtctccagcccgcccagtggccgcagtcacccaggtccagaggcggcggtatcacaggctctccgacatgtctatgctggctgaacgtcggcggaagcagaagtgggctgtggatcctcagaacactgcctggagtaatgacgattccaagtttggccagcggatgctagagaagatggggtggtctaaaggaaagggtttaggggctcaggagcaaggagccacagatcatattaaagttcaagtgaaaaataaccacctgggactcggagctaccatcaataatgaagacaactggattgcccatcaggatgattttaaccagcttctggccgaactgaacacttgccatgggagggaaaccacagattcctcggacaagaaggaaaagaaatcttttagccttgaggaaaagtccaaaatctccaaaaaccgtgttcactatatganattcacaaaagggaaggatctgtcatctcggagcaaaacagatcttgactgcatttttgggaaaagacagagtaagaagactcccgagggcgatgcangtccctccactccagaaggagaaccgaaaccacgacaaccagctgccttcaccatccaggagtactttgccaagcggatggcagcactgaagaacaagccccaggttccagttccagggtctgacatttctgagacgcaggtggaacgtaaaagggggaagaaaagaaataaagaggccacaggtaaagatgtggaaagttacctccagcctaaggcaagaggcacacggagggaaagcccgagacgcgaggccaagcgagcgagtggccaagaagaagagcgcgccacagaaagagcagctcagaggcccctgctgggaccagagttccaaggcctctgctcaggatgcaggggacccatntgcagccgccttnagggccgggactttcaccctgaagcccaaaaagaggagagg

SEQ ID NO: 5351 - DNA, 981 bp, Homo sapiens
tttttttttttttctttgcaactcacttttattgtttctttataaacttcctctcccatggaggaatatattgttatagtcattagcttatctctttttttaaaactctatgctaacagcaatggagccaagaggaggaaaacataagctacgatagaaaggcacttagaacctgttaaaatactgacgtcctggaatgtgcaacaacacaccaatgacaaccacaaaaagtacaccggccctgccgagcctggtccgtcaccgagtcgcatgctgagctcgtcggccttccagtgccctgttcctccgctctgctcaagtcgcaaacccatgaccccgccaggacttaagggcctggggccctcacaggggtggggggtgctcagggcctgggtggggcccgaagaaaggagaccagctccctcctaccttgctcatagccccttcgaggggcagagccagtgtggctgggccctgtcagggctggagtccaaagcccagtggcaaggtgggccgggtcagggtgacccctctgggacagaagggcagtccgggagagggtggggtcagcagagctgccagaggacctgcagggccactaaggaccccaaggctgtccgggcagctgccctcgttttacagatggggaggtggaagggcctggcccactcaagaggccctggtgacagggcaggcctagaagccagaactcccagctgccaggtgggagagggaacagggagaggccccagatggggggtgcatggctgcgtccatccctcagggcgtcctgggatgggactggggcacaaggccctccagcaccacccttaagtggtctctggcccctgccagggtccctctgagtggcacagaacctgggggggcccactgggtgttaggggtggggaagtgcctctgagaaagcggcccagcagggaaaagccagaggaagcaacgtgtcatgggtccagcaccctc

SEQ ID NO: 5352 - DNA, 1280 bp, Homo sapiens
  misc_feature (1)...(1280): n = a,t,c or g
taaatttgcagaacttcaaattggctattcctcttgcaaatgaacccttaaagtacagtgttatttaagaatcttccagaggcagtcaacagacttatacactaagggcatttttggtttttagcttgttcaaaaacagaggccagcacagatgacattttagatacactctaaattgagaatggtgtctagtggaacatgtttatttaagccagtagattccttatctagaaagcaggtgagctagcccttagagaaggctgtcccggggcccgcagaggtgcccttactgaggtgacagcctcacagggtctggtaccaggggttgtgccctcagcagtgacagcagcttaggtgtcaggcagttgctgagtggctggtccatgtctatagagttaacacactggaccgaggaaaagtcagatttcattttctaccctggatgtacttgaagaaaaagaattatttttgcatatgaaagaggccagaacccacaggaaaaacttcaaaacttgacatttgccagaatgtttaaaatttgttcagaaaaggttaaagcaacaagtttagcctttgtgcatgaagacgcctggcctgctagacgcgttgcccgtccctgcgtggtgctgtcccatgtcacttgaactgatagaggggcctgtgcaatctcctaaggcctgtgtttctgccatatattttattataaattacaatccactcatccacctgccctccaccaggagtggggcaccccataaggggtttaggccactttggcagaggatggaggtcaaaaaccactcccagataagtttggttttcaacatttagtaacttgtctcagggcagagggcagggcagggggaccgaggggcagcagataggagagcactgagcccggatagttctcagcctgggcaagtggctctgaagctgccttcagacaaggctagtctaggggcaagagtgcgagctggctgacaataagaacgtggccacctgcccagctttcacacctcccccgatttcagccctttcctaaaacccagacctgcggtccaggggcaggcattgggctgtgcnacttcggagctcactgcccacacacagcatgcctttgggtgccatctctttgcccaagcctgggaagccttggcaggtggggaaattgccgctgccctgggtgggattgggcacttgagattgcatccatttcagcaggattnacagaggcagaatttcctttttaaagcacatttttccattttagggaaaggaag

SEQ ID NO: 5353 - DNA, 471 bp, Homo sapiens
ttttttttttttttaaggagcaatgacatttcctagaagttactctaagaatttccctagagggtcgggtatcatctcagccagatctttctcatccttcaaggccctgtttggtacagcttgctaggaagctgttccagactgcagcagccctctctggggtctctctaccacttcccaggcactcagaacttgtgcctcagtagactgttttgtggcactgtcccattctctgattctccatgtgagctggttttatcccatccagcatgggctgtgaaatcctaaaggttcaaaccccagccactcttcacctatatttcccccaaatgggctagcacgggaaagggcccaaagtaggtgctcagtgctgatgagagagtagaatttaaaataccccagggaggcattgtgagttactacggaggccatgaaatgctgccacctcccaagctgattaaagagtgatac

SEQ ID NO: 5354 - DNA, 633 bp, Homo sapiens
tttttttttaacaggaaaaaattatttaatagtataacaaaatgcaaaataaagtacccaagttacaaaacataaattcctttggttcatgatcacaccactatttttaccttccacatagctacagacatcacaccctcaaagtgaagtcaaactgtccccctcatactgaagatgtcatgccaaaaccatcacataccccactgttcagtgaaactgttggcaacttacatggaacagagctgtggggtaggaaaaaggggaaagggttgcgttaaaaaaaatggggagactctacacatgcagaacaagttagtgggagggagtgctctgctgggtcaacacgccatgaaccacacccctattcgtgctacatgaggctgagtccttgctacaaccacacagaaatacagacaatcaagtgaacctgagcacccccagggataacagaagaaaaatacagagaagcagaggagagaaagaatggcagcaagaggcagatcacagaataccagggaacacctagtccaaaccctgttttacagatggggaaagtgagacctggagtagtgaagtgtcttgccaaaatacatagtttatgggagcattagaactccatgcttccttttaatg

SEQ ID NO: 5355 - DNA, 607 bp, Homo sapiens
ccttgggttcaatcctccaggacctgtgtctgatgcctgcatgtgggtacctgggctccatcaggttctagatcggcctccgccctccactttcagggctccaggcccagcttctcatgtctgtggggagggtctccagagccttggtctgtggctgagctgtggaacttgaaggcctctctgcatcttgtcactcgtggcccctgcaccttgggtcatgacctgctttatgtggcaaccctgtgacagctgctaagtcctagaaaacacgtaacaggacgtgaggtgccctctgcgcccgtgtgggcgttgcggggagacccggggccccaggacgtgaggtgccctctgcgccgtgcgggcgcgtgcggggagacccgggccacatgcgagcggggccccgagacattctgcactcgggaattgcggggattatcaaatcccgcttcagtgggaaacgtgagcgaaacccaaggtgagtggccgcagcctttcgtcacgtgctctcccgcatgtcctaagtgagggctcaggctgagctgccgttgccgagagccttgtgtctgcttcgggtgtctgcactgtgagtggctccgtgctagcgtcc

SEQ ID NO: 5356 - DNA, 722 bp, Homo sapiens
tttttttttcgctacaaatcaaaaggctttattccttatataaacccacacttagaaaaaataaatagttaataaattataggcaaaccagttggtctcagccacgcctcccactgaggtccagggcagccgctgcagcagcagacgagcgggaaggtgtggccacagcttggctcaagggcgtggtctggactggggacgaagggacagaggaggaaggcaaggtctgggtgagggcagggatgggggctaaaggtgggttcctgaggcgtgcccaggctctggcccgggcagcaggggtgaggcaggggctcagctcctcctgggcctgggtgatgcggcgtgcgaagcggctgcgatcccgagcaagctgctcccaggggcccctggcgggcggcctgggccggccctgcccagacagccaggaaatggacagtgaccttctcggagaagcgcacctttctggcctttaggggagtctcagggtccggatcatgagtaggggtttctgggcgcttgagccgcctttgcagtcggaggggcagcctaggaggagcccagggaggcggtggcttctctccaggtacatagatggccactcggaaggggcagggctcagcttctccccagtcctcagcagcttcctcttcctctgtctcttttccaggtcgatatccccagcccctgaagtggccctctggtccgggtgggagggatgtggg

SEQ ID NO: 5357 - DNA, 154 bp, Homo sapiens
taaaagaagaaatgatgagtcctatacaaaatgttaggaacacattctcaaagtccagccataacttgactatcacttgggtgaaataagtttgttacctttccacagtacccaatatttccaatattactcatctgttgtagcactttcttac

SEQ ID NO: 5358 - DNA, 598 bp, Homo sapiens
tttttttttgggtgaataaaggaggatatttattttaaggtacgcactggctcagtggattcacatctaaaaagctgagacttgaacaaagacagagtggggtttttataagtgggcttacaaaagcaaaacaaaagcagttaatcatatagtgcataacctgtggccttgcatagctggtggccttgtagctgtgtcaaaaaaaagaactggctaaatacagacatttgtaaaacatagtcatgccttctgcgtctttggttatgcgttacagtagaagaatttgtctttctccccctcctctctcttttttttcccttcaaccttgttctggaatttaaaaagtgtcttagagcccattactttagccttggcttctcaaacaacattatcttataactgtccttgaagtgagcttgctaggccgaggaaaacttgtttctttttctttttaacctttaccacaattctgtgggccaaagggatcaggagacagacatagagcagtagaaaacctgagacagagaaaagaagaatgagagagactcataacagatggtaaagtagaggaggggtgagggatttgccaagaggtgac

SEQ ID NO: 5359 - DNA, 707 bp, Homo sapiens
cgagtggctgccccacaaaatgcctgcttctctgcggaatcctactgttcttcacatgctctctaataccatcttttcatatccactttctcttccatgttgaaaaattaaattgacaggctggattctgcaaagatctttggacatttaagtatcttcgaccggcgcgaaaagaggcggcctgaccttggaagtgggacggggtcctgcagcgggtccttccggcgggtgacattcagccggcggttcggggcgacggactctccattccagaaccatggcccaatttgtccgtaaccttgtggagaagaccccggcgctggtgaacgctgctgtgacttactcgaagcctcgattggccacattttggtactacgccaaggttgagctggttcctcccacccctgctgagatccctagagctattcagagcctgaaaaaaatagtcaatagtgctcagactggtagcttcaaacagctcacagttaaggaagctgtgctgaatggtttggtggccactgaggtgttgatgtggttttatgtcggagagattataggcaagcggggcatcattggctatgatgtttgaagaccaatctttaacatctgattatatttgatttattatttgagtgttgttggaccatgtgtgatcagactgctatctgaataaaataagatttgtcaaaactcaaaaaaaaaaaaaa

SEQ ID NO: 5360 - DNA, 237 bp, Homo sapiens
acagagataaggagcgttacatgaaggaactggaacagtatcagaaaacagaggcctacaaggtcttcagtaggaaaacccaggaccgtcagaaaggcaaatctcataggcaagatgcagcccggcagccactcatgatcatgagaaagaaacagaggtaaaggaacggtctgtttttgacatccctatatttacagaggaattcttgaaccatagcaaaggtgattactgaagttt

SEQ ID NO: 5361 - DNA, 1063 bp, Homo sapiens
tctatggcttctccttaacttattgattaattttttgaagttatagatatgttctcctattttaaaagcaaaaataacaattgacattccttgagcaaaatatactgctgtgaatttgcaaacaagaaatctgagccaaaacttgacattgtgggttacattgccagaaatgttggtcaagtttgcccttagatgtctacaactagctggcataggttgccatcttaacaagtaatctaaaagtcccattcggttctacattattaactttttttttctatatcctgatgaccagtaaattagagccacactggttaagtttgactcgtctctaaaacgtttttgttaattggacaccaagaggaagaatctgaaaaaaaaatgcatgttggtaagtaaaagtatctcacggtacaaattaagaatgactttcttcaaaatatctgaataggtgcagttttagtttaacatgcaaacaaccattgttgctacctatcctgaatcaagccttgagcctaaatcaaagcaaaccaataccattgataagaagaagataaaaacaaaatattttggagtgttttccaacttaaagtatgaagacatactcagttcttggaacttagtattaaaccttttttatgccatttcataagaattccgatatatacttgatgattgccaaggggatgaaaggaaacaacagagatggttgatctgatcttagctcactttccaataacagaaggagttgtttacagatgaatagtatcacatcattatcaatttccacatgaaaaaggtggagctttctagaaaaaccaacctctaaggcattaggaatttagctgaaaccagcagaattgaaaactctggcaataaaacatggactcaaccatatcccttctggcaatttccttctcagagaggggagtgggaataaaatgttgccttccccacttctcaccaccaccgccatcatgacgctcatactggcttttccctgtttgtagaggaaaaggtgggctggttttagtactctgaaggacaaaaacaagcaaacaaa

SEQ ID NO: 5362 - DNA, 557 bp, Homo sapiens
tttttttcattccaagagcagccgaaaccagctcactcatttatttgactgagaacattaagaaggacaacaaaattaaacattctttaataaaattcctatagaaagctcagtcatagggcaaatactcagttctctttcccatatcaccgaggattgagagctcccaatattctttggagaataagcagtagttttgctggatgttgccaggactcagagagatcacccatttacacattcaaaccagtagttcctattgcacatattaacattacttgcccctagcaccctaaatatatggtacctcaacaaataacttaaagatttccgtgtggcgtgaaaccatttcaatttgaactaatatccttgaaaaaaatcacattattacaagttttaataaatacagtaagaagagctgggcatttttctaaaatactgaatttcagatctggagtttattccataaataggtttcttttcatttgcttgctttcttggatacatttgctcaagtattattctctatgaagtgaactctttcatagatgtcgagc

SEQ ID NO: 5363 - DNA, 593 bp, Homo sapiens
  misc_feature (1)...(593): n = a,t,c or g
ttctgacgagccacacgtttgcttcttccctgtgttcccagctggagggacatgagtgtccctgggccgtcgtctccggacggggccctgacacggccaccctactgcctggagccggggagccgacgcctggtttaagtgacacttctccagatgaagggttaatagaggacttgactatagaagacaaagcagtggagcaactggcagaaggattgctttctcattatttgccagatctgcagagatcaaaacaagccctccaggaactcacaaccaagttgtattgttagacacactggaacaagagatttcaaaatttaaagaatgtcattctatgttggatattaatgctttgtttgctgaggctaaacactatcatgccaagttggtgaatataagaaaagagatgctgatgcttcatgaaaaacatcaagttaaaaaaaagagcacttaaactgcagcagaagaggcaaaaagaagagttggaaagggagcagcaacgagagaaggagtttgaaagagaagagcagttaactgccagaccagccaaaaggatgtgaaaagttgtgtttgtgtganttcttctcctg

SEQ ID NO: 5364 - DNA, 399 bp, Homo sapiens
  misc_feature (1)...(399): n = a,t,c or g
ctactgaagagctgcaaggactcaaagtggcctctgaagctcctttggaacacaaaccccaagtagaagcctcgtcacctcggctgaatcctgcagtaacctgtgctgggaagggaacaccactgactcctcctgcgtgtgcgtgcagctctctgcaggtggaggttgagagattgcagggtctggtgttaaagtgtctggctgaacaacagaagcctacagcaagaaaacctccagatttttacccaacttgcagaagttgaacaagaaattagaaggagggcagcaggttggggatgcattccaaaaggaactcagacagcataggaagagatggaaatggatccaaagcctgacttanattcagattcctggtgcctcctgggaacagactctgta

SEQ ID NO: 5365 - DNA, 330 bp, Homo sapiens
acggtccagcatcgtgagcaattgttctgttgactccatgtctgcagctctacaggatgaacggtgttcctctcaggccctggcagtccctgaatccactggggcattggaaaagacagagcacgcttcagggataggagatcatagtcaacatggccctgggtggacactcttgaagccatctctaatcaagtgtttagctgtctcatcgtctgtgagcaatgaagagatttctcaagagcatatcattatagaagcagctgacagtgggtcgtgggaagttgggacttcgtgttcaagcagctcccatgacaacttccaaagccttcc

SEQ ID NO: 5366 - DNA, 863 bp, Homo sapiens
tttttcagattgcattattttaatttgccaattaaaagtatgactgggacactgtaaaatgtactatttttaatgggtgtgcatgtcaggattttctttagaaatacactggtctggtctaatttatttaagcaggagcactttaaagtatcccaccctaccccattccacccccagtggacagaaaggaaattgactgacttgaggggatgcagacatctgggttattccaacagaccagtggttaggaggagggggtgggtagcattatggcctcggcaggcccccccaccctgagcctctgaaagctgactttatctgtaagagggaggtcaggctcgccttctcaatagcgtgtatttggatgagatgagtttcttctggagtacacttaggcagagcagggctggcttagggctggagcctcagcgtttcacaacttctcaccttctcttccatgtcagtcagaatggcatccagctttgccaccacctgccgtgcattgtccaggctgaagcacattgggggcttaaacttcaggatgttcctcccagggccatcagtgctcagcaaaacgtagttctccttcagccttgataccaagtaggcagcctcttcagttgctggtgtccttgtggcctcatctttgatcagatccacaccaatgaagagcccaacacccctgacatccccgacgatgggatgtttgattttttgctgcccgaggagctgcatcaggaagctgcctacactggtggcatgatcctggggctgctccttctccaagacattcaggacggccagccccacagcgcaggacactgggctgcccccaaacgtgttgaagtactcaacggcggtgg

SEQ ID NO: 5367 - DNA, 745 bp, Homo sapiens
ttcactgtaaaatgtactatttttaatgggtgtgcatgtcaggattttctttagaaatacactggtctggtctaatttatttaagcaggagcactttaaagtatcccaccctaccccattccacccccagtggacagaaaggaaattgactgacttgaggggatgcagacatctgggttattccaacagaccagtggttaggaggagggggtgggtagcattatggcctcggcaggcccccccaccctgagcctctgaaagctgactttatctgtaagagggaggtcaggctcgccttctcaatagcgtgtatttggatgagatgagtttcttctgtaaagagaaaaagatgttaaaacctcattgtctaaggcccctcatctgagaagtcttgtctgaccctctagcccagcaggaccaaggtgtggtgcctggtcccagcctgtcctctgctcccctggggctgcagttggcccagttgcctgcctccattagatacggagttgctctggggctgagatgcccatctcaagtgcattctgtcggaagggttctctgctggaaggcctttggttttagttgggattccatgagctttagcccaaaggtggcctcctatactagcatattttgtttctcagcaaatggacctgatccaccatttgatgtttgtcgcagtgaaggtgttatgcagtcactgccctgagtttgtcctactggcctgaccactgtcccctgtgccgaa

SEQ ID NO: 5368 - DNA, 478 bp, Homo sapiens
  misc_feature (1)...(478): n = a,t,c or g
gtcaaccgggccacagtgaaggcccttatcagccacctgtactgtgttcagtgcttctcagacacgaaccagatgaacgtgcacaacctggcaattgtgtttgggcccacgctcttccagacagatgggcaggactacaaggctggccgtgtggtggaagacctcattaaccactatgtggtggtgtttagtgtggatgaggaagagctcaggaagcagcgggaggagatcactgccattgtgaagatgcgcgtggctggcactgccagtgggacccagcatgccggtgacttcatctgcacagtgtatctggaagagatgaaggcagagacttnaaggtcccagcatncatgactgctgangactcacctggaaatctgatngcggancgtnngnntcangnanaangantattggacctgttntatgtcnnntaanngnngagnnnantnnnttnntttngnnnnaangtntacta

SEQ ID NO: 5369 - DNA, 1582 bp, Homo sapiens
tttttcagacatgatttgtcagcctttattaatcaagagtaaagccgagccctagggtttccttaacaacaacaaaaagaacatcaaccttgtttatggcaaacagtgacttaattcttaatgactgttcattatatgtttaacaccacagagcaagaattgatcacgtttcaatcacttattcttctgagattaaaatacaagatttaaaacgagattaaagataaaattcactccaagtaatttaaaaagataattccacaatgaaagacagtttcaagacactgtatataggaacctcaggaccgaaaagaagaccttaaaacattttttaccttttgagggtagcacaataatgctgaattagatttattttattacagtgagcttaaaaaaacaacacggaatctaccctttgctcaaggtgggctaaatgggttttacgcaaacccctccatgaggttagtgacagttcttgtccttttttttttgtttttttttttttagagtgtaaggatagcccctgcagtgtgttaaaggaacctatgggaaggctgcttcccataaaatagacaatagaatcattgaggaacgtcagcagtcaagacaggaggaacaagaggtcattgtagtgaaaaaccaaaacaacttgtatcttggcaagattggtttacaagttcatgacaagaacaaaaattccaacatcagccaactgaaaataaaagataaaagatgacattcatggatctttttatttttctctgtgcaaaatgctcttctttctgaattagagggtagcttgtacactgtgacatgacatgaaatgctgtgtgcccagggtgctgctgggtgccaacagcactctcactgaatacgatatcactgtgtgcagagaaaacgggcaatcagaggataaacataacctctcctggctggagaaccatttcttgcgactttgctgctgaattcactcattaaactgctcaaaggaaaagctctaccctgatttctgagagtctacagcaatatatgtaacacaattatatatgaagactattgactaacaggacaatagcacatgaacctttccttcagagaattcaaccaagagaagagagtgggtggcataagctgggggccaaaaggaaggctctcaggaatattctctaccatccaaaatcaacagcaaagccagaaaaggggcatgagctctaattcattgaagagaacaccacaaaacagttaacaaagggatctctttccaacacatgctcctctccatgaggctcaaccgtcagtgcagggcttgcctgatgtggacaatgtggatacctcagccctgagttgaacttggcatgccacctttgattccccatgctgcaaaaagaattggaacgctgtcaggtcctggcaccgtggtaatggctatatcctatttcactcacacacgtccttttaaagtctcccttcctcaagctattaaatagaaccctctagggatcctgtatgcagtgagggtctgaactgatgatccatatgtcaatcagtagttggaggaggatgacttttttttttttttttt

SEQ ID NO: 5370 - DNA, 422 bp, Homo sapiens
  misc_feature (1)...(422): n = a,t,c or g
ggcacgagctggaagaannnnnnnnnnnnnnnnnnnnnnnnnnnnnnnnnnnnnnnnnnnnnnnnnnnnnnnnnnnnnnnnnnnnnnnnnnnnnnnnnnnnnnnnnnnnannnnnnnnanttnnnacccccccccctntnnngggnnnnnnccccccnnatttttnnacccccctcggnttgctaaggaacttttcctttcctantaaaantaccaaaggcaacagttagaagacactgcaaaaccatttgtgttgaacagtcagaatctgccccaccctcaccttcataaatggaacggccctcccagggttgcctttgatgatctctcccatatccacgagtacacacacctggagtcactgtgtgtcatggttaataagaaatgtggccttnncacgaatacctgcgtttaaatctctg

SEQ ID NO: 5371 - DNA, 607 bp, Homo sapiens
ctttttttttttggcggggcaggggttggcgggggcagtcctttgaactaagattctctcaggaaccactgcaggaaatgaagtgattcagaactcaccaattatgaactaaccttcaatgccagaggctttaacagtttctaataaaaattcagttcagatctcaagttcagataagtctgaaaaaacacttcaaggtcatctgaacgaacatattctaccagtactttatataattgtatttacctgttcctaaaactttccgtgaaagaaatgttgaattttcttcagaaatagttttgagcaaaatgtcaaaacaattctcccatgctcagtgtacttttgactatactctgaaaatatttcttcttgttttcctgcacttacctgttagtgtgctcacactcctgtattatggaacatgttcagtaactcatacacatgtaacacagaagtctgctttcagttcacttggaccaacgtggtttaactcttgctgcttattaaatgctttgcaagctaatgtaagtacactaacattttataaatgtgatgaaaacttactcatgttggccactttacaaagtagtctatcagtcctcaaata

SEQ ID NO: 5372 - DNA, 310 bp, Homo sapiens
tccttatccaactctctatttctccctttccttctaacagtcaaaaagaatcctgtacacattccactgggtacaaccagtaacccaagtatctgcattgctgtgttttctactgctcttcaaacccttgaagtctctggctaaggtcctggataccactggcttcaaactagatctatagcattatagtgcactgaggacagtgtgaagaccttgagcttcactgtagttcaaatcctgagataagtctgaaaaattattgatcccctgggttgacttctacattaacctggtttttgaggcttgatcg

SEQ ID NO: 5373 - DNA, 648 bp, Homo sapiens
aaaaagcatatatttatgttatattttttctaaatacacaaaatatctttagtaaaggtctaacaagcaataaaacaacaaaataataaacaaaacaaagaatagaaccaaagagctatatgaattaaaaagcaggcagtctctaaataaggactgatacatacagtcattgaatatgaggaagaatgttactaaacaaattagtctagattcaaatgtaaatgcctttttctaagtttatagacataattaaagactgaaacaattaagacctttttttttttgggtttttattccacagtaaatcaagctacagcctattctacctatctttagggcagtgtcttttatgaaatttttttcagaataactctatgaacaaaagagcccaggttgttagcaccattaaaatgtgtgtactacataaaaacaactagacattttccatggctctacatgacacattttcaagtttgtggtataagcatttacaattcacaccatatgtggtgttcaccttttatcttgtgtcctgctcaccaatgacattttacttacacgtacttgttcagtaataaatctggtacccaggaaagacaacataagtatgaaatctatacactgaagttagccaaaagtgagcatgtg

SEQ ID NO: 5374 - DNA, 766 bp, Homo sapiens
gaatatatgcagaagatcctagcaataacttcatgcctgtggcaggcccattagtgcacctctctactcctcgagcagacccttccaccaggattgaaactggagtacggcaaggagacggaagtttccgtgcattatgaccccatgattgcgaagctggtcgtgtgggcagcagatcgccaggcggcattgacaaaactgaggtacagccttcgtcagtacaatattgttggactgcccaccaacattgacttcttactcaacctgtctggccacccagagtttgaagctgggaacgtgcacactgatttcatccctcaacaccacaaacagttgttgctcagtcggaaggctgcagccaaagagtctttatggccagggcagcccctgggtctcatcctcaaggagaaagccatgaccgacactttcactcttcaggcacatgatcaattctctccattttcgtctagcagtggaagaagactgaatatctcgtataccagaaacatgactcttaaagatggtaaaaacagttttcgtctcctcggataatcaaccatttccatactcatgtaatctaggcatactctggagttattacaggtttggttccagaccactacaataaaatgtagccatagctgtaacgtataaccatgatgggtcttatagcatgcagattgaagaaaactttccaagtccttgggtaatctttacagccgagggagactgcacttacctgaaatgttccgttaatgggagttgc

SEQ ID NO: 5375 - DNA, 902 bp, Homo sapiens
gatctctcaagattcagtagggaacagcaataggagtgaaacatccacatctgataacacagaaacttaccaagagaatacaagttcttctggtcatcctacttttaagtgtcccctgtgtcaagaatcaaattttaccagacagcgtttactggatcactgtaacagtaatcacctatttcagatagttcctgtgacatgtcctatttgtgtgtctcttccttggggagatcctagccagattaccagaaatttcgttagtcatctaaatcagagacatcaatttgattatggagaatttgtgaatcttcagctagatgaagaaacccaataccaaactgctgttgaagaatcttttcaagtaaacatctgaaggctgtagacatctctgcatctttgtacctgcaagtgccatctttaagggggaaactacatgaagtcaccgttacagtaacttgatgtgtatattaataaaagtaattcagtcattttagtttttgattgaaaataaaggtagggcttctaaaaacttcatcatcttgataagttaaaaaatgaaagttatgacattagctttaaaggtgtaaaaaagatgtttcactaatgtaacggtgaaagagaatccctgttgtactttatctttttgtaatattatttttgaatttttcattattatgttgcttttgaaatttgatgcattcctcccatttactttattattgtacacatttaacacacagtagcaaattttgaacgatgtgattgatataacctaacaaatctgagccagttattattagagttgcagaatagaaacttgaagtgctaaatggaataatccaaaggaaattttttaaatgcaggttctagctgaaaaattcaactataagagaattgtattt

SEQ ID NO: 5376 - DNA, 268 bp, Homo sapiens
atatcggcacaggcttcctcttctctactccttgtgcaaacccatctctggatagctagaaaaggaacttcagaatggactatatgtgatgaccacctgtatgcactctaggctcttatctgtctctattttatgtggtgactatatctcagaagtactaccccttctgagtagtactattatttcctatgccaattttttttaagtctctgatgctgccctttttaaatttttgtcttattttttaggcctctttagtattaggggg

SEQ ID NO: 5377 - DNA, 568 bp, Homo sapiens
  misc_feature (1)...(568): n = a,t,c or g
tttttttttgaatgagttatgatatagttattttttattgtgtaagcccttattagttcctccctcatcccatcttaaaatattcaacaatagatagtggctcaaaaatttttttttaaaaaaacagactgccatgaaaaccaaatcttttcttcctgtaatagtggcttcctagtgttatttctcattaatgggagtatccgtggacttaactgtatattgcattttagttctggtcgtgtaataatttaatgacttcacacataaaaaactaatcttgtcttgagttttaaaaagttactagcacccatggttaaggaaggaaaactgtagctcacttcttcaatacatttgtttcttttcaattcatgaaatcagagaatatggaagaaacaggatgacagtcaccaagagtggttgaaactacaaactatcacggcaattgaaaataccccattaaagatatatttatatacagaaatgggagccatgccaataaaattttagnatttaaaaagntacctggttaagggcnggttccatagntgggtttaccaancgcccttta

SEQ ID NO: 5378 - DNA, 599 bp, Homo sapiens
gcggggcgggtgctgcttgctgcaggctctggggagtcgccatgcctacaacacagcagtcccctcaggatgagcaggaaaagctcttggatgaagccatacaggctgtgaaggtccagtcattccaaatgaagagatgcctggacaaaaacaagcttatggatgctctaaaacatgcttctaatatgcttggtgaactccggacttctatgttatcaccaaagagttactatgaactttatatggccatttctgatgaactgcactacttggaggtctacctgacagatgagtttgctaaaggaaggaaagtggcagatctctacgaacttgtacagtatgctggaaacattatcccaaggctttaccttttgatcacagttggagttgtatatgtcaagtcatttcctcagtccaggaaggatattttgaaagatttggtagaaatgtgccgtggtgtgcaacatcccttgaggggtctgtttcttcgaaattaccttcttcagtgtaccagaaatatcttacctgatgaaggagagccaacagatgaagaaacaactggtgacatcagtgattccatggattttgtactgctcaac

SEQ ID NO: 5379 - DNA, 384 bp, Homo sapiens
acggtgcaggtggtggatgggatggttgcatccttaacaaagggggaccggggccgagttacttgcaaggcagccaataagagggtcatggatgtgatcaactcagccaggacccgccagcagatgctgcatgcccagaccttccacagcaactctcttttgacccaggaagatgcagcagctgctggggatcgcagaccagcccctgacacctggatttatccgctgattcagatgaagcccttcgagattcaaatcgatgagattgtcactgagaccctgttgactgaggcggagcgcggggcaaaggtctacctcaccactggctatttcaacctgacccaggcctacatggacctggtcttgggcactcgggctgagtac

SEQ ID NO: 5380 - DNA, 726 bp, Homo sapiens
tttttttttagggaacaaatttattttgatttttctgaaaatatcaggaactatgaaaaaacaagctcgatttctggccgtaccaaaagcaaaatacaagtaaaaataacatttgaaaaccaagtttaacctcagagaatcatgttttaaaatacaaagtttaacattctttcctctatggagctaaacaagttttctaaaccataagactgcagtttttttatttttttaactgacgtaattttttaaaagaaaaaacaaaaggggaataaaaagcacttcctaccctggaatcccgtcatttataaaataacatgctcaaatgtcagtgaaaataaacagttgataaacctgaaaacaagtcttttaatgagttcaggttacaaccgaacacaggattttgtaactgggaaagaacagcttgtgtaacaaccgattcttaccaaatacaaataaatataaaagacaacttaaaaacaaactgtataatcaaaatctttccgtaaaatagcagctttcacaaagtaaaaacaatttagttccacagagttgtatgctctgtaggcatatggccaattttcttccgagtccttttgtcttgcactatcaaaatagaatctttgtcttggagcaagtctgctgaagaaggcaccaaaatcctatcctccggattcccctaactgatattaataatcctcttatcaatcattgcaaggtaacttcaat

SEQ ID NO: 5381 - DNA, 628 bp, Homo sapiens
ccgcacgaactcaaacaccggctcccgcatgtctgcaagaagagtgaggggtacggggtggtctgctggcctgcgccccctcaggctgaggcctgcccaccagggacctgccgcagccttcccctaacaaagcttctccctggcagggcaggcgaggcctgggagctcaggcccacccagtgccccagccccatggcccttacccagaagctggtggaagatgtaggtgacggagtcatcccagcggcactggaagaaggacaagccggctggagtcatggtttcttggtgtttcttgtagaaatcaaaagtgcggaaggtccgctgggccagctgatagctatgagaagatagagagcgtatgagagtgtggagtggggcaccagagcccctcaccccgccaccccaacaggtaaccctgagaggcccctgggagtctgctagcaccctatcctgctcttctgccagtctcaaggctgaggtcaagagagaactgagcaagagtgaccgttccaggggagctggcctgaggcggggtttatgtgtgggtggtgtagattaccagggtgaggggcgtgcgtcctcagagaagtcaatcggctggtcctgcttgaagagcaggaaggca

SEQ ID NO: 5382 - DNA, 396 bp, Homo sapiens
caaacattcaaatgtggccccattagaatgtttgaacatgatacatacatttcatggtttgttttcaactctgtctcagcagagtgacgctttctcaaattgaaattaattaaaaaaaaaatgtcaaagacctacactgactgaagaaagatggcctcatttggtatcattgttaatagaataccaactatgtgaaaatcttttttataatatagaccaaaaagtgactgaggcaggtctcaatcaatgagaggtttattttgccaaggttgaggatgtgccaaggaaaaccataaatcacaagagcatctgtgacctatgagttttctaaagaggatttcgtgaacttgaatatttaaaggggaaaacgtaagcaggagaggggacaaaaagagg

SEQ ID NO: 5383 - DNA, 535 bp, Homo sapiens
ctgaaaatagctgcctggtttcactccccggttttacgcctcttgagaagcagagtgatgcctagaatgagccctggactgggagggcacgtcccaggtttgaatcggggcctttgttccttttctgctgtatgactttggtcagatttctccttctgagaagtggagccaattaagcgatctccgatatgctgtaatctctgaaacatttcctcatatgtttctagcaacttccaacctgaggtctgatagacccagggttactttgcaagctaactgacatatcagtctcattgtctggtaaatctaattttaaccacttaatacttattttaggcttcacaaattattttaaaagaaaagataggggcataacaagaagaaagcttcggttacaatttccccgaaatgcctgggatctgggattcctgcttcctggctgtgtggcagagaagatgaggatggccctggagtcagacgggactagggtccaagccccagcttcttccacttgttaacaatgttctcagcctca

SEQ ID NO: 5384 - DNA, 1451 bp, Homo sapiens
gtatatttgaggaaagacaaacaaagaaacaaaattaaaatggaattggaggccgaacgctgcacagctgccctctctctcacccagtaaatgcagaaagctcttaggacagacagaaaacctgccatggggctgcttccctccctcgcagggctggcggaggctccgcatcgcctctctcctaggatacagaaaccatggcaacgaaagtagaatgtaaaactcgcagcagatatcagtgggaagggctgggggagggggcacccagctgcctttcctccctcacaggagccaccaccagccacctctcaggagaagccagaggccctggccaaagataggaggaagaaagagaactctccatagaatgtaatttatagatgcgtgtatatgtatatatatctatttatatgtaaataggcatatatgaagatatatatatatagtctactttttaaactctgcagggatttggttaagttgttgagctgatttcttccatgttttagaaaatgaggcctgtttggggaaggtaccctgggtgatgtttttgctagacattagctgtagctgacagcataaggagagtcgcatcagagcttttcacagccccccgaaacccccagcctgggttttgatgggcagcagtaatcatgatagtgtgaaccccgcgaaggcctcaggattatggttaacctggagaggagcaggccatggaggcaggtgccaggtcagtattgagtcacagtagaggccccacaaggacctgcttgggtgagaccacctctcccctctcagcagcgctggtgggctctttgtcctgggtgcccaggagccctccagccccctgcccacagaagggaaggcctgcagagggggccaggatctacctaaccatttccccacccctaagtccctcagtgggctttgccttataggtgccacagggcacagctccatcattgccactggtttttcctaagtcatgcaccaaggacttcagaaagttcttcctccgagtcagtcagtggtgccgggaccccagggcagcctcctcgactcctgaagaaaaggcagtgcccgtggctgcctctgtcttcactcgctgttgatgtgaccgccaggcctcctctcgtaccttggacaaaggatacacctgaaccagaatagttttcttaccctcacattgaaatgaggattttgcttaaaacagcacttgccgccagtgggaggaggggaggttttatttattcccacagtttctcctgggccttctggaatgaccatgttttcctgtggcggtgggtgtgtcattgcgcccgccgtcttccaaagccttacttccccaagctgccagccaggaggtgataacccaccctcccagagtttctctcggctctttttttaaaagtcccccaacaaataggattcttgctgggaaaggaagttcg

SEQ ID NO: 5385 - DNA, 476 bp, Homo sapiens
ggtcaagatcacaaccctgcatccatgtgtgtccgtgggtaccgtaagggctactgggggaagaacctgtaagcagggtgtgaggagcacccaggctgggtagggactgcatgccccatgccacagttgaaggagggagagaacacgctgtgaaaacacagaagctcccagagaagccttctcagcttttatctctggagtagagcagactatgttgagctaacacagacctgctgaatcagcttctttctgagctgccagaagtacagaagttggagcctccaccaccttccagatctgtttctcctcagtgtaatccacctatgggttcttcctgcccactgcacagacaaaaccaattcactgagaccatgacattgcaataaagagtttaatagacatgaagccagccataccatgtgggagacagagttattactcatctcaatctccctgaaaattcggagactaggggg

SEQ ID NO: 5386 - DNA, 1099 bp, Homo sapiens
  misc_feature (1)...(1099): n = a,t,c or g
ctgggcccggccctctggcgctaccatggcgtttggcaagagtcaccgggatccctacgcgacctccgtgggccacctcatagaaaaggctacatttgctggagttcagactgaagattggggccagttcatgcacatctgtgacataattaacactacccaggatgggccaaaagatgcagtgaaagctttgaagaaaaggatttccaaaaactacaatcataaagaaatccaacttaccttgtcacttattgacatgtgtgtgcagaactgtggtccaagtttccagtctctgattgtgaagaaggaatttgttaaagagaatttagttaagctactgaatcccagatacaacttgccattagacattcagaatagaatcttgaatttcattaagacttggtcacagggcttcccaggaggtgtggatgtaagcgaagtcaaagaagtatacctcgacctggttaagaaaggcgttcagtttcctccctcagaagcagaggctgaaacagcaagacaagagactgctcaaatctcatcaaatcctccaacatctgtccctactgcaccagctctttcttctgtaattgctccaaagaacttcgactgttacattggtcccagaacagattggaaaactgcacagtgaattggatatggtgaaaatgaatgtgcgagtgatgtccgccatattgatgggagnatactcctgggtctgaaaaccatgaagacatagagcttctgcagaaactctataaaacaggtcgggagatgcaggagaggatcatggacctgcttgtggtggtggagaacgaagatgtaactgttgagctaattcaggtgaatgaggatttgaataatgctatccttggatatgagaggtttactagaaaccaacaaaggattttggagcaaaataagaaccagaaggaagccaccaatactaccagtgagccttctgccccatctcaagatctcctcgacctaagtcccagtccccggatcctagggccactctgggagaactcaacaccatgaataatcaactttcaggcttaagtaaataaacactcaggtcttttcagaccagcagaagaaa

SEQ ID NO: 5387 - DNA, 536 bp, Homo sapiens
agacagctatggatcaagcagtgggtacagtcagcaggcgagtttggggccaacctcagatgagtttggccaacagcctactggccccacttcctttaccaatcagatttaacagagtagcatttgcattcttctgcagtcgcctcaccatcttccatttcagtggcagaagaattttttaagggtttcaatcaattattaatgcagagagtattgaatgtaaatcagagctctctagtcttcattaaggcagcaagtcctgggttgtgaaaaatgatacttagagatgaggcgacatgaggagatatattattcatcatagatggctaattggagagtaccttgttatatatacagatactttcatggtcattttgtatgtatgttaaagtagtagaagtattttgtagcttaaagtctctagtatgtaatatgcataaagtaaatcaaatagcgttgagttttcttatgcattttgatgtgaaagatgttataataatttctagaagacaatttggtggtatcacaacatgctg

SEQ ID NO: 5388 - DNA, 948 bp, Homo sapiens
ttttttttttttttaactttttttctcttttattgccaagtttaaatttacaaggaagttccagttttcatttccaccctcgtgttcagtacccacgaagcatgagtcatgctgggcgaaagcaggttacttccctagagcggtcccgaggcctcagaggcatcgaggttttctaaccctcggttctcactgggacaaaaattatttacatatttttagctcaaggaaacataaggaactcgtacagtgtaggccccaatgtcaaagttgactaacattaaatgcttcagatttatttattgcatctagacaagaagatcaaaatcagttcaccccacgcctttttaaaaaacggtgcatctcagagaccttagaggaatctagcgcgtctggcagggctgcgcttcttcacctgccccttaggttgcttgtgaacgcaagtgtctgggttgtgggaggctgccaaggctccgggagagggactgggctgggacagcggcagaggaggggctgctcacggaggcccctcctcccaatcccacgcgatggtgaaggctggcccttcctgcctgggggagcgcctcagctggccccatctgacctgctgggacaggtaccttgcacgtccagaaagggacgagcacacctccacaacaatattcaaagccaaggtttgggagttcctgcggccagccctgctccctgacttggcaaacccagccggaggtgcacaggggaagggtggaccagggcctgggccataactctaagtgctctctgcagggacttggggggcgggccggatgggtctgtgggggctgacctcagacctctgaggctatgacctgagtgtcagaagccacagcccccactgtgggccttcccacactcctggctcttcctctggatgccaggggcccagcgtgtcctgtctggactggcctgtct

SEQ ID NO: 5389 - DNA, 273 bp, Homo sapiens
gcatatttgtgaattccccaaattgctttttttaaattgatttctaatttcatttcattgttatggggaacatactttgtatggtttcaatgttttaaaattaattgagacttgttttatgacttagcatatggtctgtgttgaagaaggctccatgtacacttgagaataatatgtatactgtggttgttgggtggattttctatgtatgtttaggtgatatggttttatagtgttgtttaagtcttctattttcttctttttctgcccagc

SEQ ID NO: 5390 - DNA, 750 bp, Homo sapiens
gtattgttaaaaaatgcataccaaatgaagactgcctatcatcatatcaaatatgccaattctaaaaagagcttaacattagaatagtatatggtagaattactagttcagaattggcatagattctggtgttaaaatagactggatctgtattatctgagggttagtaactaatgcttagccaggcctgcttcacagagttgctaccagggagtattctttggataagcaaaatgctagcagcatgtgttttaagctctgttaaggggtgaaagatgtaattattgacagattaaatagataacttcgtaaccaccagggggcagattcaatacatcacagaatggctgaggaagatccttgggttgtgaagagagtagaaaccctagggagcagtgcttttgggtcctagaacctgttgagtttctaatgaatatttgtagaatctcataaaacagtttaaatacaagcttaagtggcttatgaatcctgtgaagctcatttatggactagtgtaaaacaatgtgaagctctactaagttctgtccttaatcataaataatagccccttgaggactagcctgttctctggtcaccttaccagttgggttgcacattgtgtggtcgtccaaataactcaatcttgcgagtgccaggagatagtctttcaatcatgccatagatttcatctggtttatgactggtggaacgaacctaggaaataaaaactagctgctttttaagttaaaa

SEQ ID NO: 5391 - DNA, 1504 bp, Homo sapiens
gcgcctgcggcgccgcgggcgggtcgcctcccctcctgtagcccacacccttcttaaagcggcggcgggaagatgaggcttcgggagccgctcctgagccggagcgccgcgatgccaggcgcgtccctacagcgggcctgccgcctgctcgtggccgtctgcgctctggcaccttggcgtcaccctcgtttactacctggctggccgcgacctgagccgcctgccccaactggtcggagtctccacaccgctgcagggcgggtcgaacagtgccgccgccatcgggcagtcctccggggacctccggaccggaggggcccggccgccgcctcctctaggcgcctcctcccagccgcgcccgggtggcgactccagcccagtcgtggattctggccctggccccgctagcaacttgacctcggtcccagtgccccacaccaccgcactgtcgctgcccgcctgccctgaggagtccccgctgcttgtgggccccatgctgattgagtttaacatgcctgtggacctggagctcgtggcaaagcagaacccaaatgtgaagatgggcggccgctatgcccccagggactgcgtctctcctcacaaggtggccatcatcattccattccgcaaccggcaggagcacctcaagtactggctatattatttgcacccagtcctgcagcgccagcagctggactatggcatctatggcatctatgttatcaaccaggcgggagacactatattcaatcgtgctaagctcctcaatgttggctttcaagaagccttgaaggactatgactacacctgctttgtgtttagtgacgtggacctcattccaatgaatgaccataatgcgtacaggtgtttttcacagccacggcacatttccgttgcaatggataagtttggattcagcctaccttatgttcagtattttggaggtgtctctgctctaagtaaacaacagtttctaaccatcaatggatttcctaataattattggggctggggaggagaagatgatgacatttttaacagattagtttttagaggcatgtctatatctcgcccaaatgctgtggtcgggaggtgtcgcatgatccgccactcaagagacaagaaaaatgaacccaatcctcagaggtttgaccgaattgcacacacaaaggagacaatgctctctgatggtttgaactcactcacctaccaggtgctggatgtacagagatacccattgtatacccaaatcacagtggacatcgggacacccgagctagcgttttggtacacggataagaagacctgaaattagccagggacctctgctgtgtgtctctctgcccaatctgctgggctggtccctctgcatttttaccagtctgaagtgacaggtccccttcttcgctcatcattcaagaatggcttttccagatgaccaggacgagttgggatattttgcccccaacttgggctcggcatgtgaattcttagctctgcaagg

SEQ ID NO: 5392 - DNA, 1896 bp, Homo sapiens
cagggagggcaagggtttccttttggcgcttccctttggaccccggagtgaaaaactctaacgtccagatcagtggagagaaacgcagatttaggaccctgaggagtctttttcacccgtttcccgtcactcgctcaggcgcgccgagggcagtccttgtggggtcctcgtggccagccaagatggttgcccccgcagtgaaggttgcccgaggatggtcgggcctgggcgttgggcgtgcggcgggctgtcttgcagcttccagggctaactcaggtgagatggagccgctatagtcctgaattcaaggatcccttgattgacaaggaatattatcgcaagccagtggaggagctaactgaggaggagaaatatgttcgggagctcaagaagactcagctcatcaaagcttgctccagcagggaaaacaagttctgtgtttgaagacccagtcatcagtaaattcaccaacatgatgatgataggaggaaacaaagtactggccagatccctcatgattcagactctgggaagctgtgaaaaggaagcagtttgagaagtaccatgccggcttctgcagaggaacaggcaaccatcgaacgcaacccctacaccatcttccatcaagcactgaaaaactgtgagcctatgattgggctgggtacccttccttcaagggaggccgtttctaccaggtccctgtacccctaccccgaccggcgtcgccgcttcctagccatgaagtggatgatcactgagtgccgggataaaaagcaccagcggacactgatgccggagaagctgtcacacaagctgctggaggctttccataaccagggccccgtgatcaagaggaagcatgacttgcacaagatggcagaggccaaccgtgccctggcccactaccgctggtggtagagtctccaggaggagcccagggccctctgccgcaagaaacagtgtgagctactgccacgctgaaaactacctgtgggttaaggatgtagttcctttgtaagggtgggcaggcctcgtaagaaagatgtagcagcatattcactatccgttaatccttctttctttgaggctggaacttgctctctctgcccctatttccttgtaaagagggagcacattgacttgggaatttcctccaggaaactcagggctgttttctcttcccttaggttggggcggacctttggacatataaaggaagcagttttagtatcagaaaagatttattagaaaattctcacgctgaactggtgtagcatgtggtgcagcattcagtgaaactggctggaggaaataggcttgtttccagagttgtccttatacaaaatgtataaaaagcagtttctggtgtgacttgtgctctgcctccaccccttgacatcccaaaatatcccaccagtggctatgcttacccattttacagatgggtaaactgaggcaccaaggtagtagttgcactaatggttacacagtgcagtggctcttgggagttgcccttctctgcctggccgtggtgggttgtggtggggaaaggggctcagggcaggaccacggcataagtgggaaacatctcaccaggagatgggaaagtctagaagggaagacactcaaagtctggaagggaaaagtctttgggtgaggcagagactccactgccagctttagaggtgggtagaagaaaggccagtgctggtgaggaagccctgatctggaggcctagtcggagacttcgctgtagtaatacttgtgggcagctggcgttgtcttccagccggccgcccggaactcaatgatctccagcagcagcagctgggccagggagctgaggccagttgggagcaggaagccatcccggatcagcacaaagagctcatccat

SEQ ID NO: 5393 - DNA, 977 bp, Homo sapiens
ttttttgtttttatgcaaaattcaaactgtatataattcacatttatgcttctaaacaaatagaagctcacatctgtactacttttacaatttacaaagtgcttttatatacattttctcatttgctattcatgacagacacgtgagacaaatattcttattttacagatggaaatagacccagacattattcagtactttaaccactaatagtggaaccctgagactttagatctgcaaaggggtttaataatgcaaatatcacatatatttccatttttaacaccatatttaagttttccattttcttaatagaaaatgataaaaaatgttttccccaatataataatacaaatggaaaatattatagacagtcatatactaacccaatgaccaagattcaccagaagcaaaacctatttggaggggtcctatattgttacatatatacagggcaccagcaccagaaccacatttagactaatactttttatttctaattaaaagaaaacaatgcagggcactcctgcagcctgcaagtctaactgtacatacgtatgtgtcagactatgcaggtggccaagaagaatgcaaagagatattttatccaaatttggagtttagggcctgattgtcctagcttaagcccataggaacctgacaactcgttcatacctctcatctttagtcatagtttctccttctccatccccttttctccgtaactaccctgtgccatttagactggaaattctaacaggtagctttttctttctgaattatctttactactgtataatttttattttcagaatattccttatttctacatctcgaagacatttctttatagtagatgggggagctagagctgccatcctcagtcagggtccgagtcagggtccgaggagagctgctgctccatagtctcgcacatggcatcctgcagggacgtaagatgaccccggggactcatc

SEQ ID NO: 5394 - DNA, 718 bp, Homo sapiens
  misc_feature (1)...(718): n = a,t,c or g
acgtgttcagtcttaaaaaagcagaaagtccagagtatgtccctatgtatactcaaagaagtttccagaaaatagttcacaaccctgatgtgattacctatgacactgaatttttctttggggcttccggctcccctgtgtttgattcaaaaggttcattggtggccatgcatgctgctggctttgcttatacttaccaaaatgagactcgtagtatcattgagtttggctctaccatggaatccatcctccttgatattaagcaaagacataaaccatggtatgaagaagtatttgtaaatcagcaggatgtagaaatgatgagtgatgaggacttgtgagaattcagtctactggatttaagggaatggcttatggagttgttatttcataggcattgaaaatggttttctaaactccaaaatggtcatcttatcaataataataatattgaccatttcctatctgccaggcatttttctaagcacatgaagaaattagtcctaacaacactatgagatggactataacttgcccaaannnnnnnnnnnnnnnnnnnnnnnnnnnnnnnnnnnnnnntggnnnnnnnnnnnnnnnnnnnnnnnnnnnnnnnnnnnnnnnnnnnnnnnnnnnnnnnnnnnnnnnnnnnnnnnnnnnnnnnnnnnnngcagctggggattacagggcaaacgncaccacacccagcttaaattttttt

SEQ ID NO: 5395 - DNA, 662 bp, Homo sapiens
cagagagaggggaccaagcctggcctgggggtgggggacctggatgtgtagcaaggatgggagaagcgaaatctgcaggtgctgggggcacctgcacactcacagctgcacaaactgcctcactgttacttcatcaatcacagcttcaaatgtctcaatcagcagaagattgtaaattcgatctttcagggaaattaatctattctgaaaggcaataacatgaagcaaggcaaaggaggcactgatggtttagtatactacataagggatttttttgttctattattaagaaaatctagacctgaaatgttttctcaactcttattgtactgtgtatatttatattgttgtcgtggcggctgtttttaaagggaaagtgttggttctattaatttgttaagtgtccatccaggtgggcctacctgattccacatatataagtacatatctgcttataaagcgctgtaaatggcagcaaggctgtttttggagaagagtttgggttttcctaccatccctttgaatgctacacatccgtctattttaacccaagtagttcatatttcagatatatttgctcctttcatctcctctcactactgcagagtccagtaatacctaggcatagggattctgtcctgtgtcaaatgggcttaaaataa

SEQ ID NO: 5396 - DNA, 671 bp, Homo sapiens
  misc_feature (1)...(671): n = a,t,c or g
aacaactattttttggtttggttgtaatatattgtactttattaagattgccaaaaactgttaaaatttaaaaaaaatttaaatcatgtgtatacaattttttgccagataaaaatgtagtcatttttatttgaaagatgtgctttttgtttttgtatatttgtaaacttatagagaaccttttccacacacctcctccttcctgttctctttgaaccattcatcacctctgccttcctcctatccccagcccaataaattaaaacaattaactgagcaaattaattaggcttcagtctggggccatctgcagcntcatcgtaggccctactccagttaaatcaaacattggttgaacacatcagcctctgaaaaggtagctctgactcttgtctttccatggccagagtgggtcgtcaacctcgtgtggagctgagaccaaggtctgtgggctctaggcagcccggcagcagcccccagaggaactgctcccacctctccttctctttccctgaaaagccttgaagggggttgagggtacaggcaaccttgtgttctctgtgccctcagggactgggcagagcaagaggccatcagaaggacgaggtgctgttggcaattgcagctgcgtggtgcgtggtttatagactggggtgccatgtgtacttctt

SEQ ID NO: 5397 - DNA, 1661 bp, Homo sapiens
gacagtgtctgcctggttggcagcgggggccatcacctgtggcctctgagaccgccccatttacaggaatctgcactgggtctcagtgaatgaacgtatggtagatttttattttcttggcactaaagattagcttttttaaaaaaacatcccataaaacagtagaaactcagttcccttctcaggggcacacacatccaaggcaccgtggactgtgtttccatcctggcctagaggagcagtaaaagatagcatttggtttgacatggccttagtgagtcctgcctttcctagcatgcacacaacatcctctctttgagtttgggttctccccagccccttggcctctgaggctgagggtggcttcctcccatcctcccatctcagtggttccatggcgctcccttcggcacgtgcggtttccgcccctcccttcctggggtgtggaaaggcagccagacctctttttcagaagttgttggttccctgatttttgtcttgagcaggcaccatccctgtccccttgcttgcaggtagaattggcacagagttaaggttccataataaactgttaggtgctcttgaagaagatgtcatggcattgcctcagcaccccagcaagagcattgcatctttgctgaatccagatgggttagcagagggcaaattggaggattcctttgaggaaatgttctcaattgagcaattcagtccctctccccaaagactagacgtgacctggcagattagcaggatcctcttggccttcttttttggggatggtgggagtgaagggggtgaatcttaaaagcttatcaacaaagctcctgttctgcaggcatcaggaaagttgagtgtaagatggaaaaagcaaacagcctatttacaagtggaaacacattggttctgatcactcctaacttgctgggtgatcatacatacatcaacatgaaggtgtgacatcagaatcatgagcaccatggctgcagttgtgtgatccaaggctagttggcttggtagctgttggcagcagtttcccttggtcagaggcctccttgctatctatcgctgctctcttcttgtcatccttaaacattcagtcatgttcccaggtctgaggggagcaatggccagaccagtttcagtatctctggcaacagaaacaaggattgaaatggtggtagttaagagtgcagacacatctggggtgcaacgtctgcatcatcctggtggctagccagtgcggggaggccctgccctgggataccagttgtgacaataaagggatggccctcctggcttcagcatcctgcaggtagagcagcctcattccttcacaagatggaaggcaggtgaggatgtcaggatgagatgggaccaggtagccgaggacagtgaggcatgtctgagccacttgaggggcagctgaacagaaggatgtctgtgtgcatcaaccgagcagattgtgcgcacactcgtttccgaactgcctctccccaaagaatgtgaggcattgtcaccttgttacagctatgtgaagcagactgtcacaacttttcctggttggcagcgggggccatcacctgtggcctctgagaccgccccatttacaggaatctgcactgggtctcagtgaatgaacgtatggtagatttttattt

SEQ ID NO: 5398 - DNA, 372 bp, Homo sapiens
gcccagagaccaatttgatcccgcctcctatatcatagggccagaggaagatcttccaaggaagatggaatacttggaatttgtttgtcatgcaccttctgagtatttcaagtcacggtcatcaccatttcccacagttcccaccagaccagagaagggctacatatggactcatgttgggcctactcctgcaataacaattaaggaatcagttgccaaccatttgtagttcacaaattaaaactgggtttccagggcctggtgtggtggctcacgcctgtagccccagctattgcaccactgctctccaagctggggcaatggagtcagattctctttcttaaaaaaccacaaaaaaactggatttccagt

SEQ ID NO: 5399 - DNA, 636 bp, Homo sapiens
gcatctgtggcacatccactgagggcatgactcacacccaagcagttaacctactgaaaaatgcatctggctccattgaaatgcaggtggttgctggaggagacgtgagtttggtcacaggtcatcagcaggagcctgcaagttccagtctttctttcactgggctgacgtcaagcagtatatttcaggatgatttaggacctcctcaatgtaagtctattacactagagcgaggaccagatggcttaggcttcagtatagttgggaggatatgggcagccctcatgggagacttacccatttatgttaaaacagtgttttgcaaaggggagcagcctctggaagacggacgtctgaaaaggggcgatcagatcattgctgtcaatgggcagagtctagaaggagtcacccatgaagaagctgttgccatccttaaacggacaaaaggcactgtcactttgatggttctctcttgaattggctgccagaattgaaccaacccaacccctagctcacctcctactgtaaagagaatgcactggtcctgacaatttttatgctgtgttcagccgggtcttcaaaactgtaggggggaaataacacttaagtttctttttctcatctagaaatgctttc

SEQ ID NO: 5400 - DNA, 604 bp, Homo sapiens
tttcggttggttacgacaaggcaaaacctttaataacatgagtgcttattacattagctgcttcggggctctgacatctttgatttctggtcatgtttttctaacacataaagatgaatgcctccctcagggccacctgggcggtggttggtttcctgaggatttgtgtgggtagacaatggggacaactatgagcgcgcctgatggagattcggaaatcccccctgggccaccacctgtgacttttagtaaagtcctcttccaaggagggaagaatgtggaggtccttccagtaaagaaggaagaaaggaaaacatctggcacagatacacagagagaggaatgacattaagggattggcttgaaaagttagagaggatggaggggttaggacttggagggtgaggggaaaatgtgggagagggctgagtccatttggtttcattctttgtaaaaagtaataccatcacaaggaccatgccatgcaacctcagagacatctctgtacacttcccccaaggctgtgctgggcgtggggcagaggtcagaggtcagttcagacgggcgtggtgcgcctgttggctggattattatgcagtgactc

SEQ ID NO: 5401 - DNA, 363 bp, Homo sapiens
atcaccttatctctgatgctggtttctaattcaggaaagagccaaccaggtcatattgggagtaaagagcccctaggtattagtatcatttttgttctttttaaaacaaggtgctctgtggcctataattacatttagcttaaagtcttttgacttttttttttttttttccagtaaaggttaatgtggaccatgtgcaaagcaagatttcaattgagcagaagcttttagtttagcatgtttgtggtttggctggcccaaaggacactagagagtttacccatgcacttttagcttgaaacattaatttatccatgcatgtctgcatgtgaggacaaggcagatgcaaagcatgttctgccc

SEQ ID NO: 5402 - DNA, 421 bp, Homo sapiens
aaaatcctttcatagttctattagaaataagtagtaaattttgatatattgtacatacacacgtgtgtgtgtgtgtgtatttgtgtgcctctggtcaactctaaggatgacagacactgtgtaacaacacctgcgtcaactcttttaatttatatacaaagcaaagaacaacattaatggagatgcacaatgattattcaaacaagctatatatatgtacaaaggcaaacagacacataacagtctctgcagactgattgtatatagtaagaaaagatcaaaagactttaaaacctaaatgacttttgacatacaaactcttcttgagaatgtttgttgtaaatggtttcaaaaatacaaattatagccaatcaaaacattgctttggttggtgcatttaagtatccaactcaaaaagcat

SEQ ID NO: 5403 - DNA, 1229 bp, Homo sapiens
gtcttttaacaatcttgaaacaaacagagttattctagagaaaagtagtttggagcatgccacctgaaaaaagcacagctaacgatacgtgctcgtcagctggctattcaggaggatatttaccctcaggaaatagatgcatccagcaactatactccccaagatcctgcaagaaatgaaatccacagtgataaggcacctgtcttatacctacatgaccagctgtcagaacttctaaaagagtttccttatggcattgaggctgtgaatacacgtgaaggttctgtgggccagcaaactacataccagacctcagaagatcaaactgctgataaaaccagttctgactccaaagacccagcagatcaaatacaaattacaatattaagctcagagcaaatgaaagaaatatttcctgacaggatgatcaaccctatgtagtagacaaggtggcagaacctcagaaagaagagcccatcacagaagtagatagccagtgtgacctgcaggcacctgcagctggacaaagtcgtgattctgtgatactggactctgagaaagatgatatccactgctgtgcattgggctggctctccatggtttacgaaggagtaccccagtgtcagtgtaattccatcaagaactcatcttcagaggaagagaaacaaaaagagcagtgttctcctttggataccaacagttgtaaacaaggagagagaacttctgatagagatgtcactgttgttcaatttaagagccttgtaaataatccaaagactcctccagatgggaaaagtcattttcctgaactacaagacgacagtagaaaagatacacccaaaacaaaacataaaagcttaccaaggacagaacaagaattagttgctggtcagttttcatctaaatgtgataaactaaatcccttgcaaaatcacaaaagaaaaaaattgaggtttcacgaggtaacctttcactccagtaataaaatgacagcatcttatgaacaagcttctcaggaaacccgacagaagaaacatgtaacacagaactcacgtccactaaaaacaaaaacagcttttttgccaaataaagatgtgtataagaagcatagttctttgggacagtcattatcaccagaaaagataaaattgaaactcaaatcagttagcttcaaacaaaaacgaaagttagaccaagggaaccgtattagatatggaagtaaaaaaaaa

SEQ ID NO: 5404 - DNA, 216 bp, Homo sapiens
ttgcataacgaaagagtaacctagcatgtattatattttacagtgaaccatctaaaattaccttaatattcgtggcaggaacaggcccagacgaaggcaagccagagccttctttgacttgtgagccagaattgtgcaaataaggattagaaaagtattggtagaaacccagttttaagtttgtatgaagttagcaacattgtttcaaaataaatc

SEQ ID NO: 5405 - DNA, 1020 bp, Homo sapiens
  misc_feature (1)...(1020): n = a,t,c or g
tcaccacttatgcaaatcaaggatcagaaaactggaggttagccatctccattatttccttttgcacattgggtacagtgggtggcattagtatgcactagctgcaaagtcacagcaccttatggaaataagtatgtttattataataaaaaaaagttaagctgcatctctgtagattatttactttgcagactgtaaagctgccctatcttttccagcagaatttactcttccattcttaattcttttttgaaatatcttaaataatttaacattcctttataacttcttaacagtgtcaaaactggggtagaagggattttattttttcccaaaagggttccatctttgctatctgttgatcagccttagaaaatctaagtatgatcaataaattttaatggttgatggcatcctgtgtcagctggagtagttggttgtgaatattaaaacctagtactattttccctcagtaacatgtaattgctacattttttataagaaggtatggttagaaaaaaatgtgaaagatcacttaaaccaaagccagttacaaggagtaatctctcctgttggtttaccttcacctcaggaactacaaggaatattacaatacatagtggaatagttgtctgtgacatttctaccagttgtttcagtaggcatattgggtcttgggcatttcttgggcactgtgggttctgctgtattatttgtgatgtcttattgtttgtgagcttttgttttttttttaaagaaaaaacaaaaactaagtgggactatgtatgtagatgtgtgtcagtaccaaaaagttattttctcaaatccctaaatttctgatttccattcaagtcttttaaactctttcctgctgaatagctaagaacttttattttccactttcctatattcctanaaagtgtgacaatgcgtttcaggtgacaggattgcaactttttgctgaagctttgnctgtaaccnatgcctgtcagtttgttgaanctggcttcntagatnacg

SEQ ID NO: 5406 - DNA, 577 bp, Homo sapiens
tttttttgagagttgaaaacaagattgacgtaaccctttattgcaaattctaaagtaaaaagatgtacagtacaaagtaaaattgaaatttcatactataaacttccaatccacttacacattctcatttctcaagcatttctgccatttccgcataaacagaacagggaacaagtcgaggaggtgagggaaggagatacagcaagggggaaaaaattgtcttggaataatcacaaaccccagaagcaagtgaaaggaaagacattttctcgacctgctgtcctggtgatgagaagcgggggtggttggagcagtgcagtttaaaatggctctcagaatagcagcatttatggtaccatttcagcttccttaagtccaataatactttgcccttccctaggcgcctttgcctctgtatctcaaaacggtttacaaaacatttattaatcctcacaacacccctgtgaggtaggtcagtatgtcctttagagtcgagaactgaggcagaggtcaagcaaacctgccctgggccacagagcagcagatgaagggcctagacctgggatccagaagctag

SEQ ID NO: 5407 - DNA, 1012 bp, Homo sapiens
tttttttgaggcaagaagtttctttaattcaatggggagggaaggtggacaattcttggcaattgccaaaaatttgtaaaaatgtacaaatggggctaattgttggcctagcatcagtgctgagatgaccacctcaagtttggccagttgtgctgaggcttttgtgttatcctttatcagggacatcctagctaagcgagggaagacagcagcatcccactgtgctccatcacgtcagatgatgggcatccattcagaaggtgggacaaactttcactgctgggtcactcagtcgatcccaagggcctcgcagaggggtgacatccggcaccacagtctgtccagaagcgtctcatgcaaaaatccatctttccgagcctttttaagaattttactgtcttctttacttattttaagtttgtggtcttggaagctctgaaatttctttacataattgatttcacattgttttacatttcctttgtcttcttctggaatgtcatcttttttcttggtttctctttcagcacaggatctaatcttgatcatttcttcttctcctgctgttttactttttgcttctatgtcccctgcttcattgcatctaataaagcagctatttgaggccaacaaagccattttcccattttgaaagactggttcccattgttctcttggtccaattgcatctgaacgcccaacaacaagtccatctgaatttataccaagatattttccatagccagacttcagggcgattctggaatcagataatttgacaggccgtaaactgctctggaggactagggccctcatcaacttctttgtgtggagctcccagggtaaaaagaccattgtcgagtgcatgtatataggttccctcatccatttcaatggctatggttcctgaaatttcaccaaagtttgttactgtccaccagattccaacatatcaagctgggtttcttcatcttcttctctttttcttttcttatctttgttctttttcttc

SEQ ID NO: 5408 - DNA, 1041 bp, Homo sapiens
tttttttttcagttttgccaattttattgaaccaataaaattcctactaataacaatgaaataaatttctgcaagtataaatgtgatacagtttaacaaaacccattgttctgtacctataaatagattttcaaaatgtcataaaaagtgcagttatgaattgttaacatgttaatacacagttcctttatttcagatgtgtttgtcttgactcactaacagttccttctgcatctgtccaaataatgttaccctccctccaaagaaaaaaagagtcattaaagcactagaatattacacataaactgatccatttaggtcagctttagtcagaactgtaaaatcagcaaacataagaaaaacaaaacctagtaatacatacaaaagctttcatgggttctagaaccttcttaactgctgattcatgtggagggcattaagagttgaaaaggcttatatggttaactaccttagactatatctacagcagggtctggtttgccagaacaagtttaaagtggctgtttattaagtttgctattttcagaattgaaactataagaccgccatttgacactgaaacttgcgtgaatcctaaattgcatcaattatctatttgataaaagcttattctaatttaaaaccttatagagtaagagactgatatatatagcagtcttaaagatcacgtcatctgccttacattagtccagtcacgtgcttcgtaaaaaaaaaaaaaaaaattacagtaacaaagcacaggactacaaaggcaaaacatcacagcttctgattacattgaataaaaagtaccaagaaacgcaaatgataattctgtattaatactgatgaattaaagagctataacagacatttcacagcatgctacatatatcgctcacaacttaaggataaatgtctaacattgaaagtcaagaagttggcaatctgatttcatgtgcaattcagctacagtcttaatatatacattcattatgtagctgtcctgcaaaaccaggattttttaaaaacgagttttca

SEQ ID NO: 5409 - DNA, 579 bp, Homo sapiens
ttgattgctccagggcccacaacggcagtgtcctacatgtcggtgaaatgtgtggatgcccgtaagaaccatcacaagacaaaatggttcgtgccttggggacccaatcattgtgacaagatccgagacattgaagaggcaattccaagggaaattgaagccaatgacatcgtgttttctgttcacattcccctcccccacatggagatgagtccttggttccaattcatgctgtttatcctgcagctggacattgccttcaagctaaacaaccaaatcagagaaaatgcagaagtctccatgggacgtttccctggcttaccgtgatgacgcgtttgctgagtggactgaaatggcccatgaaagagtaccacggaaactcaaatgcaccttcacatctcccaagactccagagcatggagggccggttactatgaatgtgatgtccttcctttcatggaaatttgggtctgttggccataagttttaccttttaaacatccggctgctgtgaatgagaagaagaaaattcaatgtggggaatttggggaggataaggatatccgggttggtggggat

SEQ ID NO: 5410 - DNA, 521 bp, Homo sapiens
accgccaaggggatatacactgcaaaaaggtcatctatttacagaagagtgatttaaagacattatggttttctttacagatgtaagaacagcaactgttcactttttaaaaactctacatctcaaccctccactattattatagtccactgaattgcctgtatcaaaggcagttttttgtttgtttttttcccatttgactctccaaatgaacttccatcatttcttcatcatctgtgggctggctctcctgaaaagtctcagggaataagtcacaggagggcaggtttttgacctgctactaaaaattaaaccacaaaaactagagatccctctcctgcaccctgttcccctcactttgtgcagttcagtcatcactatccgacagggtctcgtactgtgctgagagcagtggggcagggctctcgctcccagatcctgttctgttggtgaggagctgcttggttcaccgcagagggagcacatgcaatcggtgttggtggagtactgctgagcatccg

SEQ ID NO: 5411 - DNA, 536 bp, Homo sapiens
ttttttttttttagtttggctacatttttattcgagcatggtcattttcaaaagaaattacaaattgaaaattcaataatacttttacaaagacaattcaggaaagatttttgtcatggtatcatacattgtatttaacagtccctctttttagctaaaaaacaagatgaagaaagtggaattttcagtcgaaaatacagtgttttcacaagatcgtatcaaaagttcccaaatttggaatttccagtaattggaaaaaaacaaaaataaaataataaaattgaaaaatcccatctcacaattaatgttccaaaacacaataaatgctcttctctttacgtaaaatttgcccaaatgatcaacgtcatgttccttttttactaaaatatatctatatattgaagaactataatactgtacactacagtatgaaataaataaaattaggaaatataaaatgagccacataaataaaatgttatttgacctaaaattaaatgaatgcaaaaaaaatttttttgttgcaaaaacagttt

SEQ ID NO: 5412 - DNA, 564 bp, Homo sapiens
aaagaggtcagggtgtggcgatttttgccaatgactgcgatttccagaaggcacagcagaaggtttcccacagccttatgggaattactgtgcaggagaggaagggagcccagggtttcatatggtggctgacattctcaggggtaacagccataatgacattagtcctgaatgcctttaggcagaaagtggtgagaattctttgaataatattaggcagatcaggtggtggtcttgccagaagtggggcaaaaattctgaggatctcttttggcccctgataatgaatgcagtatcatgctagaaatctctgtattcggtattgtgcacagcctgaattgttacctacttgtgtgtgccttgaattttccaggaaagactgtgaggtctcctatcactgtatcattgtgttttttgcattgtactttcttgctctacatgactatcatacgtgttatggattgaactgtctccactccccaaattcatatgcctcaatcctcagtacctcaccatgtgaccttatttgaagatagggttttttcaccttacttggagagagga

SEQ ID NO: 5413 - DNA, 469 bp, Homo sapiens
  misc_feature (1)...(469): n = a,t,c or g
tttttttttttttttttttacttttaaactgtttacttcctttcctgggatcccactccactcccctctataagcccgatgaactttgttacagttctcagccttgattatagagctgtatggatccatattttaaaaattcaaaccagctcatgctctgattaaaaaaaaaaaaaaaacaaacttttgtgccactttcagagtgtgagaccgcctgggacgcatgctttggaatttctggagcatttgagaagttgatgggcagctaggaaattctgtgctggaactatgacaagttctgggcagcccatctgccctgggggaggggcaggtttcggagagtttctgtgggcctggggcantcccctttcccagggcaaggctctgcacctttcagcactttgtagcctgtgttcacagctgaacgagcacttggtttttgaagaaatacntgggttgggagggcccg

SEQ ID NO: 5414 - DNA, 1760 bp, Homo sapiens
cgacctcaagatacaactggcaactgaggaaaaggcctcaattcaacaagagctaacaagcttgggagtttatttcggaatctttaaaagactcttctgcttacccacaatctgggatccactgcaggaaaacaaaaaaggaaaacttcatttaaaagaagcaagaagtaaaatgggacaaattgggaatgtttaagtctctgaaactctgcactgaaaagaaaataagattgataacttaagcttaacattctgaggcataaagaaacattaactttggagtattcatcttgactactgaaatacaagtttagaagacaagtggtttcattctggtcacagatgcacagcttttctttaaatttataatcctatgggttggactcgttgactgtattttttaaaggttgctcgtcagttaactgagccttggaattcatggattttctaaagactaacaaatgaaaatattttcctgttgaagaacccagcggaaattttacagcaacaaatttcatgtttcttttgggtatttctgagaaaaaggaaatatttataaaaccatccaaagatccagataatttgcaaataaattggaggttatagaggttataatctgaatcccaaaggagactgcagctgatgaaagtgcttccaaactgaaaattggacgtgcctttacgatggtaagcgttaacagctcccactggcttctataatgactcctttaagtacactttgtatgggtgcatgttcagcatggtgtttgtgcttgggttagtatccaattgtgttgccatatacattttcatctgcgtcctcaaagtccgaaatgaaactacaacttacatgattaacttggcaatgtcagacttgctttttgtttttactttacccttcaggattttttacttcacaacacggaattggccatttggagatttactttgtaagatttctgtgatgctgttttataccaacatgtacggaagcattctgttcttaacctgtattagtgtagatcgatttctggcaattgtctacccatttaagtcaaagactctaagaaccaaaagaaatgcaaagattgtttgcactggcgtgtggttaactgtgatcggaggaagtgcacccgccgtttttgttcagtctacccactctcagggtaacaatgcctcagaaggcctgctttgaaaattttccagaagccacatggaaaacatatctctcaaggattgtaattttcatcgaaatagtgggattttttattcctctaattttaaatgtaacttgttctagtatggtgctaaaaactttaaccaaaccagttacattaagtagaagcaaaataaacaaaactaaggttttaaaaatgatttttgtacatttgatcatattctgtttctgttttgttccttacaatatcaatcttattttatattctcttgtgagaaccacaaacatttgttaattgctcagtagtggcagcagtaaggacaatgtacccaatcactctctgtattgctgtttccaactgttgttttgaccctatagtttactactttacatcggacacaattcagaattcaataaaaatgaaaaactggtctgtcaggagaagtgacttcagattctctgaagttcatggtgcagagaattttattcagcataacctacagaccttaaaaagtaagatatttgacaatgaatctgctgcctgaaataaaaccattaggactcactgggacagaactttcaag

SEQ ID NO: 5415 - DNA, 4793 bp, Homo sapiens
  misc_feature (1)...(4793): n = a,t,c or g
tggcgatacattcacacaggaacagctatgccatgtttacgaattccggttttgaaaaaactttcgttgacagttacacaaagggtcacttcctccccagcgacacatgggcctctcaaaggagaggagggagtaagtcccacggtagggccagtggttgctccctgggttttggaatcatttctgcggagctttcaaggccagaccctggggcttagggtcgagactttatagcagtgacagccagacccagccaagatggctgcgaccgtgaaaccctggggcggcgatccgggtgcgcatcatgagctgagagcgctggcctgttgccccggtggaaggagtagaggccgtaggtgaggggcngccgccgtggccaggcaacctatgggtacccaccgggttctcgcgggcaagtcaagctgggaggaccaaggccgggcagccgggagcacccaaggcaggaaaatgaggtggctgcttctctattatgctctgtgcttctccctgtcaaaggcttcagcccacaccgtggagctaaacaatatgtttggccagatccagtcgcctggttatccagactcctatcccagtgattcagaggtgacttggaatatcactgtcccagatgggtttcggatcaagctttacttcatgcacttcaacttggaatcctcctacctttgtgaatatgactatgtgaaggtagaaactgaggaccaggtgctgggcaaccttctgtggcagggagaccacagacacagagcagactcccggccagggaggtggtcctctcccctgggctccttcatgtccatcactttccggtcagatttctccaatgaggagcgttttcacaggctttgatgcccactacatggctgtggatgtggacgagtgcaaggagagggaggacgaggagctgtcctgtgaccactactgccacaactacattggcggctactactgctcctgccgcttcggctacatcctccacacagacaacaggacctgccgagtggagtgcagtgacaacctcttcactcaaaggactggggtgatcaccagccctgacttcccaaacccttaccccaagagctctgaatgcctgtataccatcgagctggaggagggtttcatggtcaacctgcagtttgaggacatatttgacattgaggaccatcctgaggtgccctgcccctatgactacatcaagatcaaagttggtccaaaagttttggggcctttctgtggagagaaagccccagaacccatcagcacccagagccacagtgtcctgatcctgttccatagtgacaactcgggagagaaccggggctggaggctctcatacagggctgcaggaaatgagtgcccagagctacagcctcctgtccatgggaaaatcgagccctcccaagccaagtatttcttcaaagaccaagtgctcgtcagctgtgacacaggctacaaagtgctgaaggataatgtggagatggacacattccagattgagtgtctgaaggatgggacgtggagtaacaagattcccacctgtaaaattgtagactgtagagccccaggagagctggaacacgggctgatcaccttctctacaaggaacaacctcaccacatacaagtctgagatcaaatactcctgtcaggagccctattacaagatgctcaacaataacacaggtatatatacctgttctgcccaaggagtctggatgaataaagtattggggagaagcctacccacctgccttccagtgtgtgggctccccaagttctcccggaagctgatggccaggatcttcaatggacgcccagcccagaaaggcaccactccctggattgccatgctgtcacacctgaatgggcagcccttctgcggaggctcccttctaggctccagctggatcgtgaccgccgcacactgcctccaccagtcactcgatccgaaagatccgaccctacgtgattcagacttgctcagcccttctgacttcaaaatcatcctgggcaagcattggaggctccggtcagatgaaaatgaacagcatctcggcgtaaaacacaccactctccaccccaagtatgatcccaacacattcgagaatgacgtggctctggtggagctgttggagagcccagtgctgaatgccttcgtgatgcccatctgtctgcctgagggaccccagcaggaaggagccatggtcatcgtcagcggctggggaaagcagttcttgcaaaggttcccagagaccctgatggagattgaaatcccgattgttgaccacagcacctgccagaaggcttatgccccgctgaagaagaaagtgaccagggacatgatctgtgctggggagaaggaagggggaaaggacgcctgttcgggtgactctggaggccccatggtgaccctgaatagagaaagaggccagtggtacctggtgggcactgtgtcctggggtgatgactgtgggaagaaggaccgctacggagtatactcttacatccaccacaacaaggactggatccagagggtcaccggagtgaggaactgaatttggctcctcagccccagcaccaccagctgtgggcagtcagtagcagaggacgatcctccgatgaaagcagccatttctcctttccttcctcccatcccccctccttcggcctatccattactgggcaatagagcaggtatcttcacccccttttcactctctttaaagagatggagcaagagagtggtcagaacacaggccgaatccaggctctatcacttactagttttcagttctgggcaggtgacttcatctcttcgaacttcagtttcttcataagatggaaatgctataccttacctacctcgtaaaagtctgatgaggaaaagattaactaatagatgcatagcacttaacagagtgcatagcatacactgttttcaataaatgcaccttagcagaaggtcgatgtgtctaccaggcagacgaagctctcttacaaacccctgcctgggtcttagcattgatcagtgacacacctctcccctcaaccttgaccatctccatctgcccttaaatgctgtatgcttttttgccaccgtgcaacttgcccaacatcaatcttcaccctcatccctaaaaaagtaaaacagacaaggttctgagtcctgtggtatgtcccctagcaaatgtagctaggaacatgcactagatgccagattgcgggagggcctgagagaagcagggacaggagggagcctggggattgtggtttgggaaggcagacacctggttctagaactagctctgcccttagccccctgtatgaccctatgcaagtcctcctccctcatctcaaagggtcctccaagctctgacgatctaagatacaataaagccattttccccctgataagatgaggtaaagccaatgtaaccaaaaggcaaaaattacaatcggttcaaaggaactttgatgcagacaaaatgctgctgctgctgctcctgaaatacccacccctttccactacgggtgggttcccaagaacatggaacaggcaaagtgtgagccaaaggatccttccttattcctaagcagagcatctgctctgggccctggcctccttcccttcttgggaaactgggctgcatgaaggtgggccctggtagtttgtaccccaaggcccctatactcttccttcctatgtccacagctgaccccaagcagccgttccccgactcctcacccctgagcctcaccctgaactccctcatcttgcaaggccataagtgttttccaagcaaaatgcctctcccatcctctctcaggaagcttctagagactttatgccctccagagctccaagatataagccctccaagggatcagaagctccaagttcctgtcttctgttttatagaaattgatcttccctgggggactttaactcttgacctgtatgcagctgttggagtaattccaggtctcttgaaaaaaaagaggaagataatggagaatgagaacatatatatatatatattaagccccaggctgaatacccagggacagcaattcacagcctgcctctggttctataaacaagtcattctacctctttgtgccctgctgtttattctgtaaggggaaggtggcaatgggacccagctccatcagacacttgtcaagctagcagaaactccattttcaatgccaaagaagaactgtaatgctgttttggaatcatcccaaggcatcccaaaacaccatatcttcccatttcaagcactgcctgggcacaccccaacatcccaggctgtggtggctcctgtgggaactacctagatgaagagagtatcatttataccttctaggagctcctattgggagacatgaaacatatgtaattgactaccatgtaatagaacaaaccctgccaagtgctgctttggaaagtcatggaggtaaaagaaagaccattctggtatgaaggttttgggggaggagatatcaatcaagaaggcttcccagaagaggtgactggaccagagccttgtccacaggtaagacggaggaggccttccacatggagggagaacaataagtaaaatgtccacctcaagatgtcctttattataccagcctccctccccacaaaaacacatgtccagtggactcctttttctgggatcagaaccaacaccaaaaagagcttttctccttaaagtttagaattctaaaccaggacttgaaatggcctccaaggtttgtgcacaaata

SEQ ID NO: 5416 - DNA, 971 bp, Homo sapiens
tgccctactgcatgccctgccactgaaggaggacttggaggagtgggtcaccattgggcgcctcttcagcttcctgtaccagagcagccctgaccaggttatagatgtggctcccgagcttctgcgtatctgcagcctcattctggctgacaacaagatcccaccagacaccaaggccgcactgttgctgctcctgacgttcctggccaaacagcacaccgacagctttcaagcagctctgggctcactgcctgttgacaaggctcaggagctccaggctgtactgggcctctcctagactgcaggctgcagccagtccagagagaatagagcctgcccaggccttaagaccacctctcagcccagttcagttctgccttaccaaagattctgagactcatacccatttggagccagccccacttgctgccttacagggctgtccctgaggctggatctgttacaaatgagtcatgacatcatactgtaataaaagcagcttgttttctgcttgaacaatagctctgagagcaagaaggctggaaatgcacattcagaaatgaggtaagcaggacccagtgaggcacgacgtggtttactagaagtggccggtttcctggcagctttgtaaatggactctaacctcagtggaatctgggccccggctggatcaggaggcgaccatatggcttttcttgtttcacgtgaagaatctgttgcgctgagagcaccaggagcaggtagaagacccgggcagccatcctgcgggggctgagaggtgacaccaggctgctgaagtcgggctccctgttagcctgcagctccagtgccactgccctgtgcactgcttccagtgagagcagctcgagctctgggggcagcaccaaaggcatctccatgggcacctcagggagttcaggcaccacgggcaatgcaggagcttctggcgcctccacctcaggccaggccca

SEQ ID NO: 5417 - DNA, 538 bp, Homo sapiens
tgttcctgaacacccagatgtgcatctctgtaactgtggcaaggagtgcaattcttacacagagttcaaagcccatctgaccagccacatccataaccatcttcctacccagggacatagcggcagccatgggccaagtcacagcaaagaaaggaagtggaagtgctcaatgtgcccccaagcttttatctctccttccaaacttcatgtctactttatgggtcacatgggtatgaagccccacaagtgtgatttctgtagcaaggcttttagtgatcccagcaacctgcggacccacctcaagatacatacaggtcagaagaactacaggtgtaccttgtgtgacaagtctttcacccagaaggctcacctgggagtcccacatggttatccacactggggaggaagaatcttaaagtgtgattacttgttgacaagttgttttatggcgggagcagggaccttcaaggcaggcacgtgcttcattccacaattcaaggaacggccagattcaaagtgttccccagtgttggattaa

SEQ ID NO: 5418 - DNA, 544 bp, Homo sapiens
tatcattgataggactaaactgtcttcaacttactaactggagtttctttacccagcagttcagagcagtgagaactacagaaggcgaggaggagacagagagcaggtaacggggctttaccgtgacagcagtgcgttcccctgctccacactcccactgactcagtcttgccaatgccactatcaaggtccttgcaaaaatctggttttcttttgtctggaaagggctggttttctcctctgaaactgaaccccaactgttggccctatttaaatctcaggtcttggatttcttacttacataagcaggggcttaggtaatagagtgggttgtgcctgtggagcctcccaatcagctctcaacctcctctgttggcagggtccccggcagcacacggccacagcgctccttcctctcaagggtggtccgggcagccctacccctgcagctgctcctcctgctgctgctgctcctggcctgcttgctgccctcctccgaagaagactacagctgcactcaggacaacaacttttgcccggtcct

SEQ ID NO: 5419 - DNA, 498 bp, Homo sapiens
  misc_feature (1)...(498): n = a,t,c or g
tggaatgattttttaaaacataaaataaatagaaagtcatattatgttcttaaataggaagcctcaatatcataacaatgtcaatcaattcttcccaacttgatccaaagactcaatgcaataccattcaaaatcccagtatcattttttgcggaaatcaataaactgactgtaaaaccaatatggaaaggcattattataagtcttttggggacctgccatactttatactaagaattattataaagcaaccacaatcaggacaaataatcaagtggattactggcactagaggagagagccgaactgagagtctagaaactgagcctggtgcatatactggacactttaattatttcaccccaagcaaggcactggagatcacagggaggaaaaaatggcacctactccagttaaataggctggggaacaatccagttatcnggttatccatatgggccaaaaaattaaagtgggattccctaccnaaaaagtcct

SEQ ID NO: 5420 - DNA, 1145 bp, Homo sapiens
tttttttttaatgacttttggtttttgtctttgtttttaatcatggtcccaaaggcagaaggcagtattttatctactaagtcacacagcttgtgagaggaaaggatgtctgtgtcaggcatgttaacttcaaacaaaatctgagatcggctttttccattgacattcttagcacagcacccaaagaagtataatctagccacagtgtggctataatgaggcacggcttattgcagctggaaatcaattatcctcacgctgaggtggggattctagtgttcctttgactctgtggatactccccaaatggtgtctgtcattcctgtgccacgacctcagcttgcatcctatcagtcttggggaaggaaaagggagtacagactagtgttaacaagaatctaaagggtacccaagattttacacgtagtctaatatttgagaactgagggctatctaaatacctggaagcactttcttggaatgctaagacggagcagcgagattttctagcctcgggggctgggagagggaagtttggttggttggttggttggttattatttactgggagttaatactgagagagtatatgcaaaggctgagggcacccatgcccatcttcacagaacaagacccctaaacagcctacctgacatacaaagaaactgcaagttatactgtaagaacacatgttaaggaccgaggaaagtctgctaaggtgctacgtctaaactaagttaacttgtcatgtttaacctccctgatcagtcatcatccagggcctctgtcttgatttcgttggctccttgtcgggccaatgccaagatagtgtggttgactgctgccatttccacagctaatgagatggggtcttggtggtcactatggctcgtactgtcatcctagaactagtgtgaagctgtcctccccgcgcagctcaatgtgttaaacaataaagctgtgaaggaagctggcattgcaggatgtacgtcaggcactgaagatggtgttacaaataaggggtatgtttctcacctgtcatcttcaggggaactccgtatcaaagagctttggaaagggtaagtccttgtttggatcagatcctcctctcttcttctaccttctctgcttcccacgtgccgaat

SEQ ID NO: 5421 - DNA, 369 bp, Homo sapiens
tctctagagtaatttgaagctcttggctcaacatttattgcccccttcctttgctcctcatgtcccagaatgccaccctcccagatggggacagagtgctactggtactggtgggaggggtaggtgctgtgtccgtcgtactcatcggtggtgaggcagcgcagcatgaaatggcccaggtcatgtttggagatgacccttgagggccctcgtccatccagggtcactgtgtacgccccagttagtggctggtctcctatgtgtggcggcatcacagccacgtacttcaggcctgattcccgcagcaccttgtgcatccggatgtggtcatcagtcacagcctgaagtcgtgggggcaccttggtaagg

SEQ ID NO: 5422 - DNA, 306 bp, Homo sapiens
  misc_feature (1)...(306): n = a,t,c or g
aaatatgaggtctcacaacgttgcccaatctagattcaaatttcaggnctcaagcaatccccccacctcagcttnctangnagctagggctacagctgtgcaccattgcgtccggcttgtgtctttgtttttggtaaagttttaaaagtttttaaaaataaaaactttttagttttaaaagttgctaaaaataaaaactttttagttttaaaagttgcacacagtannnnnnnnnnnnnnnnnnnnnnnnnnnnnnnnnnnnncacccaaacaacttccaatcctttaaggccattcatgggaagg

SEQ ID NO: 5423 - DNA, 673 bp, Homo sapiens
cggacgcgtggggccaagttcaaagaaccctagcacaaatttgctttgggattttcttttctggaaaaaaaaaataaaagaaatagtacattgaaaacaaatgaattctcaactcctacggttcatgtagagtttagagaaaatttccatcattgtcatcattgaactgtgaacctgggaagccagatcatgattaacactgacatcaagtttcaagttgcagatcaatgcacccagtgttcagatgaggcaaacttctccgtgacaactgtgctgtgctctgtcacattacatttcctgcagactctaagatctacggagtagagaacaatgacctcattttattttctatgttagttatttatttcaaaattaacattttagttgatttttgtctgataagtctatgttttgcactgctaactatgatgagggtttaaaaaaatgcttcttcagggtcctttcactgaggacctatgcagtctacttaatgctgtgaattacatttttcaaatgtttaattttttaaagaaaattaatattctatttttgttaggcttctctagaaatgcagcttttatttattaccccatttctttcaagtccttggaaaataacatattaagggtacaagaaattaacacatgatggaaaagtcattgtgaacgccaat

SEQ ID NO: 5424 - DNA, 642 bp, Homo sapiens
tttttttttttttttttttgcatttcaaatattttaatagttttatttcgcaaagagaagcctaagaatttttttaaaaacatttccagagagaacactttataccataaaataaacttgtataatttgggaggacaaatcatctcaaatgtatatttttgaattatgtgccaattttataattagtacaaaaatgacagctgaaatattttaaaaatgtaaaaaccagtccaggcaacataactataccatcttgctgtaaaagtacttatatcgaattccgcacaaaatatttttgcaatatgctaaatttagttcttcaagtcactcttcactgccggctggcttttccattttctgttgtctccatcccattttcctctttaagatgttgatatagttcagctctgttattaacagagttcaaacgtccagcaaattcctgatgttttctggaattggcagtattgattctattactccacaaggataataacgacactggcccttttgatttttccacttgtggagtctcatccatttcaacaaggggttttttgtttggaggttctggggaatcaggcgaatcttttataatctcagcttcagccaattcttcttttccacgctctaagattcctt

SEQ ID NO: 5425 - DNA, 861 bp, Homo sapiens
ttttttttttccttcacttgttaacaagcaaattttaataacgccttttatttctatacaaagcaatgtaactttctgaaaaaaaaaatggctatacagaaccctttaaacataagagtacagagtttcaaatggcaacaagaagttaagaaacatagggcactgtgtcgttatgggtgaatcctagtcgtcctgcagcccaaggtccaagctagtttactccataaccttaagtaaataaccgcggttcctatgaatacctttccaaaaccatttattataaaaactcactctttatccattatcagtattaacgtatcaaagtgagaaagaacatgggagagaaaaatgacaattaatgcagcgtgaacattttcatcctgaataccagtaaggactctagatgatatatggtgcccacttcatgtgcctcaaaagattttaattttcagaacatttaaacgattaaagagaaatcatcctcttaactaggtattttaaagcttatcaaactgtaggtttacatttgacaaagtcttatggaccaccaaatacgtagaaataggaattccaaatatttcagttcgttgaatatacaaaaccaaataaggcgcaaggacctgaagaataaacacaaagctagtctacaatgtttgagttaacgtgatttaggacccttctattttgttctgcaagataatttacatagttctctctgctatatgtgtccacatctattcagattgttacagatcttttcattctggaacttagaacattataggccatacaaacttccaaactccattgttgctataatctgattcgaaatggaaaaaaaaaaatcttcaaagaaacttc

SEQ ID NO: 5426 - DNA, 326 bp, Homo sapiens
cattgagaatccttgggacagccaagaatttttcttcaaggaaggaaaaaggagatgtaaaaaacaaatcccaacggaatccaccaagattaacagttcatatacctatgtttgactaaactacatctcagtggattactgtaacatttcctcccttcagcttccccattaattttccttccttgccttgttctttccattttccaaaaaccaaaagaaaaaaattccaaacacacacctagatgacctttcattacttatgttcctataggcagaagctaaggaactcacacctaaatggtataaaagcggcacgagcgcacgag

SEQ ID NO: 5427 - DNA, 751 bp, Homo sapiens
ttaagatgtggagcattaaggcattttcagaggcgcccccccctgtgtccctcagccctggtccctcacctgacatctctgggggcagtggctctaatggatttttgcaggttgtgtcggactgggcagtgcctggagctgcctccaccagaccttggttctcacacctgcagaggaaaaaaagatgatgaccttttcacgccctggcccaccagtgtcccgactccactgggcaggcggggaggctgaaagtggtgagtcgagtccgtggtgtcaaggataggcgctgggggttgttagcagctgaggcttctcagagggtggaaggagcttgggtggggctgcactcacctggtgtggggctggcagcgggcgctgggggaggaggtattctggaagtgccctgccttgcaggggacgcagtgggttgttacccttcccaacttcatctttgagctcggcgttagtgcccaggcgggcagtcagaatgtagctcgcagtgtgtacactcgagggcccaggcagcacagaacattcccggctggcagcggcactgggtcttccgtttgcttgtgcagggggcaatctccttgaggcccatcactgggtcacaggggcggcacagctggcagatggtcaggtagttccagtgctcgttgtaggaattctcggcacatgtggcacaaactgtgtcccggatgcggctacatttagctgagacataggtgcctggcgggcagcgggagcagca

SEQ ID NO: 5428 - DNA, 681 bp, Homo sapiens
tttttttttttttttttaggttctgccagaccaccttttattacatcagaaaagcaacactaggcactagatcttgcaaaatatgttctgaccaactctaaactgtctgaagttataaccatatcagtaaggtttttaatgaacaaaaaagttaaatacaaactttcatatgcaaaatagattattgtataactggcaacctcagagccaagtactaaattttcttccacaaatttcagtggggatggagtggggagatgttagtcttaatgagtagaaaacttaatttagacttaatatatagaaaacaaaaactctgaggaaaaatagctttaaattgaatagtatcttttgaaataaacagctcaggccagcccctacaattctgaggtttatactcaaccagatctgggatgaaaatgaagatttagggtttacagttacttcaaatccatgaatccagtttgaagactaagccaagtcaccacatttccagaaggggaagtctctttaaggtgaccacaacactcttcggaagatgcttggataatcagagtcccttgggcacagttccactgttcacggcactgtgccaacgctgtagtgtcagacttcctctgaaaggcaacaggagccctatcccacagcattttcatttctcccagcattttttgagcctca

SEQ ID NO: 5429 - DNA, 537 bp, Homo sapiens
ctgctcgcgatgcattcttggcgctgggcggccgcggcggctgctttcgaaaagcgccggcactccgcgattctgatccggcctttagtctctgttagcggctcaggtccgcagtggaggccacatcaactcggcgccttgggaaccgctcgagcctaccagattccagagtcattaaaaagtatcacatggcagagattgggaaaaggcaattcaggacagttcttagatgctgcaaaggctctccaggtatggccactgatagaaaagaggacatgttggcatggtcatgcaggaggaggactccacacagacccaaaagaagggttaaaagatgttgatactcggaaaatcataaaagcaatgctttcttatgtgtggcccaaagacaggccagatctacgagctagagttgccatttcgctgggatttttgggtggtgcaaaggccatgaatattgtggttcccttcatgtttaaatatgctgtagacagcctcaaccagatgtcgggaaacatgctgaacctgagtgatgca

SEQ ID NO: 5430 - DNA, 395 bp, Homo sapiens
gctggccaatcagagtatccgagggacgggcatagtggctcgttaaacagcacggaaagcggaagtactaattcggccccctctcattggcttgaacaagtcaggtgaccagagactaccgccaatgatggagatctggctggtgaggaatcatttgttttggagtcggagccaagactgaattcccggggatttctggcgcgatcgcgtccaagtgtctggtgtgtaaggctcttcagtctgccctgaagctcagagggcttcgacagtacagatgctagaggcctctgcgagcaaaggcggcgctggcccaggggttcaggttcctgcgagcgttggcccatggcgcttccggatgcgctgtccggatccccgccggacacttctgcccccgc

SEQ ID NO: 5431 - DNA, 430 bp, Homo sapiens
tgccacttaaaatatcttatatttctagatttccaggtctatgtggaaatcatcacacttgggccaataaatgggttagttcagatgtgctgagaaaagtaaatagtgtaccctaaatatcttgcatgtacatttatctatttctctgtttaatgccacttaattttgtaagaaatgagaaatgaaaccctatgtatcagtggaaaaatccttcttgcttcagatttcccaactttattctggaggagaaaaaaatctgtatttctcattaacagagatagaaaaaggtgatgtacttacgatggtcacattcatattgggcattggatctatttaagcctagaagtataacagataatcagttccttaagtgtaaatatgttcttaaatgtttggcctttttatctgttattcaaatgtattagtaatt

SEQ ID NO: 5432 - DNA, 353 bp, Homo sapiens
  misc_feature (1)...(353): n = a,t,c or g
attcacaggcatgatcccactactgaccagcacagaagttttgacccactctgtttccaacctgggccagttcacccctccttaggcaacctggtggtaccatgctccccagtggccaccatattgatgccaaacagtatagataccccatcagtatagctcactatagccccgaattcctgggcttaagtaatcatcccacctcaagccntcttcagtagctgggaccacagacatgtgccaccacatctggcctcatctagtttaaatatagcctgagtgggttttgttgttgtcgttgttgtttgagacagggtctcactctgttgcctggggaatccacagctcactac

SEQ ID NO: 5433 - DNA, 495 bp, Homo sapiens
gaccttgtttggccttaagaacattttttccccatctgaagacttattttcatttttaaagcacaaaatcacaatgaaggaagaatggcataaattcatccagcttcttacagaattccaaatgcggaatgtagattttttatatagtaatcttgagtttattctaccattaccagttgataccattccagaaactaaaaacttttgtggcccatcagtaactgtggatgccagtgcagcaacaaaaagtatgaattgtcttgctaggaaacactctgaaagagaacagccattgaaaaagtcccagaaaaagaaacaaaagaaaacattggtaatattagatgatagtgatctatttgacacctgacttggactttcctgatcaatctattagcctgtcctctgtatcatcttcctcaaatgcagaagaaagcaaaaccggagacgaagaaagcaaagccagagaccaagggaaacaatccagagacaaagaaa

SEQ ID NO: 5434 - DNA, 3862 bp, Homo sapiens
  misc_feature (1)...(3862): n = a,t,c or g
cgaggcgctagggggaacgctggcctctgaaactagctctgggaccggggtctgcggccggcccctagctggccccgtctcccatccccagaagggtattcactggggattctgagctttggctactccagtttcccacgacacgatgttccctttctacagctgctggaggactggactgctactactactcctggctgtggcagtgagagaatcctggcagacagaagaaaaaacttgcgacttggtaggagaaaagggtaaagagtcagagaaagagttggctctagtgaagaggctgaaaccactgtttaataaaagctttgagagcactgtgggccagggttcagacacatacatctacatcttcagggtgtgccgggaagctgggcaaccacacttctggggcaggcctggtgcaaatcaacaaaagtaatgggaaggagacagtggtagggagactcaacgagactcacatcttcaacggaagtaattggatcatgctgatctataaagggggtgatgaatatgacaaccactgtggcaaggagcagcgtcgtgcagtggtgatgatctcctgcaatcgacacaccctagcggacaattttaaccctgtgtctgaggagcgtggcaaagtccaagattgtttctacctctttgagatggatagcagcctggcctgttcaccagagatctcccacctcagtgtgggttccatcttacttgtcacgtttgcatcactggttgctgtttatgttgttggggggttcctataccagcgactggtagtgggagccaaaggaatggagcaggtttccccacttagccttctggcaggatcttggcaacctggtagcagatggctgtgactttgtctgccgttctaaacctcgaaatgtgcctgcagcatatcgtggtgtgggggatgaccagctgggggaggagtcagaagaaagggatgaccatttattaccaatgtagattgcactttatatgtccagcctcttcctcagtcccccaaaccaaagctacacagccagatttctcaagcagtctcaactccagtccctcatctcacccttactattgctcttgctttccagtttgcttttgatttgcatcttctcactagtaaaactgccttccctttgttccttattttctgttttttctctagagaggtacagttgtaagtcagagttaatataatagggcctgtgaaaacagaggcttttgcattgtctcttgacatcagaagttacaataggcatatgggcaaaatggtgtagcaggctcactggccgtttgttttttaaacacattttcacaagtttttgagacactggatttctttaattaaaaaaaaaatgccaagaaacattatttatacagggttgattgctttcatgttgttattctgtaccctatagtagcctccatgaggaatctggtatttcttgctgcttggaactactttgcagtgattacttggttgcagtccaagtactctcgtttagtctgagcctggagatgttctagacttgcttctcccacctctgagattaggacaggaaaaatgtgaaatttcccaattacaggattatacggtaccatcacatcatttgtggaaattggggtgactgtatagctgggattgggctaaggactgtggtcttatctgtccacatacagccaaaatggcctatccagaaatccagttcgttggaaaggaaaattggtactccctgttgccacagggggttccagaaaagggaagtcactttacccttgcggtggtgggatcctgatgtctttcatccatttgtagtaaaagctggtaaagcttttcttactcctggttccctaccagtatttctaaacatgtcgcactttctcccacaggcatgtgggttttgacctttttttcaatcttctagaaagggaacgcgaagcagaagtgggacatcgagggctctgcctgtcctctgcgctgggtgtggaatgctgctgcacctgtcccttctgctgggctcagggaagtgtcttccttgccccacatttctgtgggggaaaggtttttaatcctctgatgcttccatcttcctgtttaggccatgtgccccagaaacctgggactgatctttctttaatagtgaancccctggggccactgaagagtaacatggctccactggacacaaaagagggatggaatcaacaggcagggggccttttataagccttaggaaaagaaaatgaaactatttcatctttggacttttcaatactattggagtgatttttttctttctaaacagggaaaataatgttacaaaagcatcttttttgttatttgtttgcatccctcccccacaccctggtgttttaaaatgaagaaaaaaaaccatcaccttttgtacaaaaactcttaatgattaaaaaacaaacaaaacatattggccttgtcatttgtgtgaaagtgggcaaagactggaatagagtaagacaactgaaaccaattttcatccttttactgaggaaaaaaatatttaatatttttgttatataaggaatagtgcctaaggaaggtacttatactcctgacctcagccccacacactctggttttataaagctataggacagagcagagatggaactgaaaaacagggtagaaaataacataaattggaggggaacagtgggatgcagaaagaatgacaacagccacatgtgccccagtcaaatacttttagtccctgcagcagaagatgccaaccaagtctctatactggctggggatcctgccatggatgcaggagaaaaaattcaatcacaagggagtaagtgacaacaaaaagaaaaaactctgagccacagctacactgggaggggggaggaccagattttgctacttctgtcacacaagctagaaaaaccctacctctcccattgggcaggccaacctgacattccacccagttccttgccttaccatactatgtattccctcctcttggagaattaagaccctgggctaaatgctccactccagggtaagggctgagcagtcctagtcctcctagaactgccctcttttaataaagattggattaaggtacgtgaaatggtgagaactgtaaagattttaaaaaataaagtagaacccagagaaaatgtcaaaacgtgccgccatgtagcaccagcaaccaattcttgcacttctcttccctgtctcagtaatcccctacagaaggttacatgattggaacaactctttcttccctgcaaagtctgctggtaccaggttataacctggacagtggagagtgtctgccttaggctggtttgtgcaagagggccaccttaggtctccttgaggacatttatcttggcgcagatcttgaggcagggcccagcttgatgttcatggcactcataagatgttcttctttaagtaataaaagggcctgtccatcaatctcctgtgagcgaaattcctctgcaatctcttggcagccttggagagaagcaataaactcgtacacctcctctacactccaacggctgggattactggacaggaacacagggttgatgccatgtaattccggtgtaggtggagctgtattgggattccccaggtcacgttctccatgcccagctcttactgataaaggcccaggagatgttggagagagtgcttcatcataactggaattatctgaaccccggctagagtcttcttgaccccggtggcacttgccctgaatcttggcacgggcaatgtcagaggagctgcggcggggtccacgcctgcgaacgcgagcatagttggcttcttgaaactctttcatttttt

SEQ ID NO: 5435 - DNA, 938 bp, Homo sapiens
gcttgctggtcacctcagccatctccctcattttatggtagaggaaactcaggtacagagtggtagagtgatttttacagggaagaaccagaccaggcctggagccactacaaagtccaggccaagaagcacaggaagcccctgtagcaagctccaatgggctttcactaataaagatggaagtgcgtgtccagaacgaccaacgtattacatctgagagcagaggctttatttacaatgacattcaaacaggatttagcaaaggatgcctcttcctgctcgcatcttagcagcatgggttgtacttcataaacagaaaagagaaatatcctgggagcaggaagtgaactcttttctcagataatgttctctaaatcccaacacgttccatgctcccggctcttagcaggtagttggtggacacttggttatagcagctgggtgccagatgcctgcatctcactgaggaatgtgttcagggaagatgtcaacactggccgggaaaaacatcaggctttcacctcactcatggcctccataaggcgagcgctgtttgtgactgctgtcgtcaggaaaatgaacctgtagcctttctctctgcccaggaaccggagggctgagatctcagagaatgtacaaccacccaagaacaccaccaagatgaggcgcagggactcactggaagccttgtcttccttagtcatatctgtgaatgcaaagtcactgcagttgagcagccgtaccacctcatcaaggccctgccagcttcgccgctctagcacctgctcaatgattcggcagctcaggggcacataagcaccaccgaagacgtaagccatgtctcggggcactttcagatcatactcgccgtccacacgtgggatcaaattcagctttttgctgatggcacgaaaattgctcctcttggccagagaacc

SEQ ID NO: 5436 - DNA, 1017 bp, Homo sapiens
tttttttttttttttttattgtaaacaaatttaatttaccaaatgatagactggtaaaaaatgtgcctatcaccaagggctgatacctttcctgtggcccaggccctctgctctttaaaaatggggcacaaatacaggcaggtaagagacagacagctctcatcctgcactcttggctttctgagagatatgaccccaaggtcctggagtctagctgctgcttcctcctctgggaaatagaggagtgatattggtagtacctagggcatagcactgctgggacaattcagtgatttggggactgatctccatatcaagatgacctgatcctgtctgtgtgcgggacagtggctagcacggagcccttgttaggcccgcctaccatctgacccttctcaaaccttcccgtctgaggacatctgcatgcacacttgtccctccaatgctgtctcactctggatggccctgacacctgagaggccagacagccaagtggtttctaggacctttgtgattctaggcctgggttcctgtttcatttctgcctctgatggccgagtggccttgaggaagcaacatctttccaggcctcctttgacccacttcactagttcatggggccatctgaggatccaacccggtgtcaggcacttcgctcgggcctgacagaggacagaagcgctccgtagcagaggctttcgttctttaatagtcgctctgagcatcttgtctgcctccatccagctctcactttccctgtctggctctaattctggttgacccagagggcatagctgaggctcggaggtcaggaaccgtggactccaggaggcagttttgagggtccttcaggcttggccacggcaggataccaccattccatctcagaggcatgaggagtccctaggccccgacttggtgacccttgccctgtgtgccccctcaacagtgggccaggccctcctgtgtgtgtctgctgggggagcaggagccgggtgtgggggcatgggaaggcgg

SEQ ID NO: 5437 - DNA, 2089 bp, Homo sapiens
  misc_feature (1)...(2089): n = a,t,c or g
tgttattggtacttttgaaatatttgtatgcatttgttacctttaaacatttggaagaagcacagaaaaatagatttagttaacccagggaaacatcaatttttttagtagttccaattttatatcacagttttattttcttatgaaatcaaaaaatgcattgatactcattaatgcaaattcattatttaacatcaatatcagagtaatcttcaaggtctgaaatgagaaacatactgactttttaaaattttaacagtgtacttcttaggctttcattaccagctctgaagaactttttggaataattccatattccatagtgtgtggtttatgagttgtgggtttcatcactaacccagtaaccataagaaaagnnnnnnnnnnnnnnnnnnnnnnnnnnnnnnnnnnnnnnnnnnnnnnnnnttcgtaggccagtagcaatgttgtgttcacagtctaatttccaaaagaccatcaataaaaaagagagcatgtttaaattgaaatggaacttagagaacttgagcttacttacgtacttcaatgccaccggtaacttaggttttaccaccaaatgctgttaacattaaatcattttgaaaatcttggatgaaaggtgctatgtaaatggaaatacaaaggattcttactaacatacaaaaataatgcacaacagaaatatctaaaaccttttccgtagactttgaaacatctctctctgtcataactccctggattcaagtagcacattggtaataggtatcagagcagtctagagacaattgcatgtcaaaaaatgtacattcatttttaggtggataaaagtaaacatagaaattatgttatggctaaatacagttagtgggtaacttagatttatattagctagcatctaatttgcacaactagaacacatcccagaacaattactgaaaagctgaaatttaatgggtggtgatgtagcccaatgagggcgaatgacattccagcttgacctctccagaacacttaatatcctaaaatacagaacatgctgggttaagtgcattagtgcttcaagcagaaaatgctgaaaacaacgtgtaaagtactgaatctgagtaggctgaccctgagaaggggacaattaaagagacaaccaagggaacacattgagactacaaaaatatgaataatctcaattatattcatcacacttttttcataccatttcaagaaacgactagacagtagtaaccacatgaatattttactttctccagtataccttgagaagcaaactttgtaggaagccactcttctcccctaaacaacttctgccaaacaataataaagccaactggaaacgaatcggagccattttcattttcctaaccggggcctgacatgctttaaattatctggctgtattctaaatcaacacctaacccctcaaggaaactgaagaatcaatatacagggtaatagctttggctcagagctccaataatgtgcttcagatctgtccatgtggaaatgctttcatccaaatttttaaattggtggttaccaaagagttcacaaaacaggtttgtatgtagcacctttcatgcaaggcatgcaaaaagcctattttaaaatcactgtgcatattatagagttgtagccacctcacaatgaagtactacagcctgtgctgtcttaatggtttatgtcaggaaatgaaaaagatactgtaccaaatctggaattacaatggggagtaataatgtatactaaatgacttttgtattttaagttactttttgtgagtggtgaatttttgtgtttttcttttcagctacacttagtcctgagatgtattttttctttaagtcttgaatgaatacaaaaggagcccattttataatataaaccttgatgtacatgttgagatatttggacaatgaaaatgccttaaaaggaatgcatatggataaagttgcacttataacacccttcaacaaaatctaattttaaattgtctttttcttttctattaagggttttctttttcagtgtctaccattgtacttataactgttattaaataccaaatcaaataaaa

SEQ ID NO: 5438 - DNA, 341 bp, Homo sapiens
ttttttttaatccaggtcacattttaacaaagtttattatgaaacaaatgaaatttgaactctaaaatggtactccttggcttcctcaagtcacaatgaactttatattttctttgtccttaaggactaagatagttgttttatttcagccgaatcacagagataaccactcctgcaggcccccacagctggcccaaaggggctcgtactttctgacctgggctgtgttagggactgattgagaaatgcagggctcccaaattttaaattgcctttatttaaaaacacaaactacagaaaatgggttaagagtatacgcatttcatcaaacacatataggg

SEQ ID NO: 5439 - DNA, 336 bp, Homo sapiens
ggttaacctgaatcatttttatcatatcacttaggtaaaacataaaactgggtatatatataaaaaaaaaaccacttctttttgcttttattcttatacctaaccttaaaatcaaactgtttccaaagtagataaatgtaaaaaccgtgacattccacctgactgtgttaactgaaaatggtgggtggtgctttgctgactgcactgcaggatgtggtgtggcaaaggcacagactcagcagagtagatctggatggtcttaggccccgatgctcctactggtgatgaaaatggaaacccaaagccaaacatccttctagagaactggcgaacccc

SEQ ID NO: 5440 - DNA, 87 bp, Homo sapiens
tggaggtggacctgagtgaaccacccaactggtcagctaactttgatgtcccaatggaaacaacccacggtgctccattggattttg

SEQ ID NO: 5441 - DNA, 348 bp, Homo sapiens
  misc_feature (1)...(348): n = a,t,c or g
cataatttccagtgacttgttgatgtgaaatcagacacggcaccttcagttttgtactattggctttgaatcaagcaggctcaaatctagtggaacagtcagtttaactttttaacagatcttatttttttttttnanggnaaaanggggggggctntacngcagncgggangaacctnaaatatanatncttngccctcnaaattttagnangggngtagggngagtaggccnttttnaattncngaagggctaagggtttttatncngnnaacaaaangnnantttngctttccccnnngcnananaggnngnnnctttnnnnnananannanngcnnatttaccg

SEQ ID NO: 5442 - DNA, 162 bp, Homo sapiens
gtgcggttgtcccgtatgtccactcactctcactatgtattttgcagatgagctgacctctcccattcctgcaacctccctttcccagtcaaagcatttttggtggtttctgctgctggttgataacaaaacacacaagagtcaagaatttttttttttttt

SEQ ID NO: 5443 - DNA, 569 bp, Homo sapiens
gtaaactctgagactcaacagcagctaaataaaataaaccttcctgctggaattttggcaacaggtgaaaaacagacagatccatcaacaccacaacaggagtcttcgaaaccgttgggaggaattcagccttcttctcagaccatccagcctaaaatggagactgatgctgcccaggcggctgtgcagagtgcatttgcagttctgttgactcagttaataaaggctcagcagtcaaagcagaaagatgtgctactagccgagagggaaaatggatcgggacatgaagcgtcattacaactcaggccacctccagaacctagcactccggtgtcgggacaagatgacctcatccagcatcaagatatgaggatcttggagctaacgccagaaccagaccggcctcgaattctgcctcctgaccaacgacctcccgagcctcctgaaccaccaccagtcactgaggaagatctagattatcggacagaaaaccagcatgtacccaccaccagttcttcattaactgaccctcatgccggagtgaaggcagccctgttacagctgcttgc

SEQ ID NO: 5444 - DNA, 853 bp, Homo sapiens
  misc_feature (1)...(853): n = a,t,c or g
cgggctgggggaggggagcgtggggccgacagttttgggggtgaaaaggcaaaaggcgggtgaaaggctgcctcccgagactctccttgcttggaattctgcccactctgcggagttagcagtcacgacctccagcacaggatgtggttaccacagattgtcccacctacacagcaggcttcaggacttgctgaagggaggagtcatatatccggcccttccacagcccaacttcaaaagcttacttcctttagctgtccattggcaccatacagcctccaagtctctgacttgtgcttggcagcaacatgaagatcattttgagctgaaatatgctaataccgtgatgcgctttgattacgtctggcttcgagaccactgccgctcagcatcgtgctacaactctaagactcaccagcgcagctgggatactgccagtgtggatttatgtatcaagccaaagaccattcgtctgggatgagaccacactctttttcacttggccagatggtcatgtgactaaaatatggatttgaattggctggtgaaaaacagctatgaagggcagaaacaaaaagtcatccagcctagaatactatgggaatgctggaaatctaccagcaagcccaagttccatcggtaggtttgccagagcttcttaggaaaccaacgaggggacttgaggagttttctggcaaacttttctggntctatggggatttgcnttcgtgggaaantgttccctnccacttcaggagcacacagggagnttgggcaggaagggttccagctttnattcggnggaaccctttttggggggaggttttgggntttttcactttcagactttttt

SEQ ID NO: 5445 - DNA, 405 bp, Homo sapiens
ctccaactacaagagccaaatactgatcgacaacttattgaaacttctccagttctacaaaaacttactgagtttgaagaagcaattggagtaatttttactcatgttcgacttctggcaagggcattcacattgagaactgtgggatttaaccatctgaccctaggccacaatcagagaatggaattcctaggtgactccataatgcaacgtggtagccacagagtacttattcattcatttcccagatcatcatgaaggacacttaactttgttgcgaacgtcgtttggtgaataatagaactccaggccaagctagcggaggagctgggcatgcaggagtacgccataaccaaccgacaagaccaagaggcctgtggggcttcgcaccaagaccttgggcgg

SEQ ID NO: 5446 - DNA, 247 bp, Homo sapiens
ttaagtttcttcttctccctcattacctcacagtcttcattttgaatattaagtttggggatatctgaagtaattgaaattgagggttttaagatctaagtgaaaagctttacttgggtcaaaaggcagatttccaacaaatttcttttcttattccatctagtatctgtacatgttttgaaattaagggtatatacaaatgtgaattatgaggggtttttttctttgttgtgtttttttttttttt

SEQ ID NO: 5447 - DNA, 278 bp, Homo sapiens
  misc_feature (1)...(278): n = a,t,c or g
ggggactgccggtttaaataaccaaatgctaaaagaactggcatagaagtaaatgggctgctgctttatttttaggctgttctttttagagagcaatgacagttatttccaagtttgtcattagaaaataatannnnnnnnnnnnnnnnnnnnnnnnnnnnnnnnnnnnnnnnnnnnnnnnnnnnnnnnnnnnnnnnnnnnnnnnnnnnttantattataaatttgttcttaaagtgtatttttgataagaaagccgttttgtttttccttctgttaa

SEQ ID NO: 5448 - DNA, 588 bp, Homo sapiens
aattcggcactagggcttcccctcccccggcgtcctctggggctccgagccggcgggaccatgttcaccagcaccggctccagtgggctctacaaggcgcctctgtcgaagagccttctgctggtccccagtgccatctccctactgctcgccctcctcctgcctcactgccagaagctctttgtgtatgaccttcacgcagtcaagaacgacttccagatttggaggttgatatgtggaagaataatttgccttgatttgaaagatactttctgcagtagtctgcttatttataattttaggatatttgaaagaagatatggaagcagaaaatttgcatcctttttgctgggttcctgggttttgtcagccttatttgactttctcctcattgaagctatgcagtatttctttggcatcactgcagctagtaatttgccttctggattcctggcacctgtgtttgctctgtttgtaccattttactgctccataccaagagtccaagtggcacaaattctgggtccgttgtccatcacaaacaagacattgatttatatattgggactgcagcttttcacctctggt

SEQ ID NO: 5449 - DNA, 500 bp, Homo sapiens
ttttttttaacgtaaacacaaagtctcatttatttttgtctgaagcacacaggagctcactcagcacaataacagtaagcgaatcatacaaatattgagaaaaaatgttcctatgaatacatacatgtatattcttaagagtagcgatcaggagtttaacaacaaatgtaaagtggttttctctaaagaatgctttctgacaggcttttgggttggaaatggacaggtaaatcactgtcacataacaggtaagctaagaataacttctgttacccaagtcatttgaaccctgtggactgtgaaagccctcttggaatttacatttaattccatcattggtctggttgacttccacatttcactaaatttggacaagatccacaaagtaactcctcaactctcagtctttcacactcaggtctgtgggaaggaaaggcagtgagaccaggtgtgaacacatgcacggagaccattgttagggtttttctaacagtatcctt

SEQ ID NO: 5450 - DNA, 426 bp, Homo sapiens
  misc_feature (1)...(426): n = a,t,c or g
ttttttttttaacagtggagtaattttattcacatagggttgcgattaaaaggttaactcattcaaacacatttttgctatgctaacattcctttgcctcttattcttacaaataaacccccatcacagagcagaaatgttagaaattatatcacaaatggagcacaataagtatttttaaaaccttttaaaatatggcttataattttacacagcaagttacctattaatatgttacatattaacagatctatttggacaatcagatttccttgagattaaggatggagttggcatttttcctttaagaaggcattttaaggccgggcatggtgggctcatgccctgtaaatcccaatactggggagggccgagggcagggcaggatccacaagggtcagggagttcngaggaccaggcctggac

SEQ ID NO: 5451 - DNA, 688 bp, Homo sapiens
attgctgcttttatagatcaaaactacttgaatcatcaggaatttcatatttttcatattgtgtgacaacttataattttgtttcaaattgtgatttcattgattttactaactggaaggaagaagaataaaattggcatatttaggttttttgtagaagaaagatacaagtgaaaattaggagtggattggagaaattggggggaaatagaagagtacggagaaaggaagagattgaaaatgttaccagagttctttaaagctcacattttatagtatcactgctacaaactatttaatgaaatgtggcatcgggtgaaaagaggcatttgtttgatccttgaacgaattaatctcacgtacttccctgtttgtggtttgagcctttcactggatgtgagctacttgagagcagggtttatgccttcatcagcgtgacccctgtgcctgcagcctcataggtgttaatctgtaattttaaattttgacaaaagcattttcacagccctgccacataagatctagtttttatttctagagtgctgctatgaataattactatagctgctgtccatcttgcccatccattaaggtaccttctcacaaacatttctaatctactggctggagtgcagtgggtgcagtctgtaggctcactgcaggcctcaaactcctaggctcaggcgtt

SEQ ID NO: 5452 - DNA, 499 bp, Homo sapiens
ggtttaaaagagcgttagtttaataattcacacacctgcaggatcaattatagcaaatgaaaaagcaagctacataaaaggaaattgacttgtaaacacagctcaagcaaatataagtgggttttattatttttatgctcagaatgcaagaaagctttgcgccagaaccgttaaacattcatgaactcactaaaaagaaacagaaaatgcccttagaagacgggcggggcgagggggaagacctatgaacatgtttatagaattaatgtctgtactgtagcatacacaggtaattagaaaatattctcaatgcatttaagatattttcactaaagggtttgagattatccaattagctgtactcgaaagtggcaaatacttgaagatcattgatttaatttaaaattctgagtgctgagttcagtttcctactgaatataaccagtgccctgggctctgcatggcagttgacttgccaatatctcaattaaagtgacta

SEQ ID NO: 5453 - DNA, 669 bp, Homo sapiens
ttttttttttttttttttcgtttaaataaatttatttcttgtagctttgctctgtttagattatgtggtttttgttcagttatgagaacaatctttaaaggatggtggattgttggctagcttaatgaatggaataggaaagtggaaatgtaaaacgtcaggaaacatacattcagagctagatcagtttgttcactgagcctaaactggctaataatccattaaacacaatctcctcagaaaaagcacgaagattctaactgatacacagggtttcctcattcaaataaaagtagatagaccaactaacctagaagctagctgaaatacaaagaagaaatccccattagaatatcccagtttcaagataaaatgcatgcatttaaatgcggtccatctggttgaaagttggcacaagttactaaattcttccccaaaagagaaagcacaaatgaagactggggaggagtctcactttatgatcttgctctcaaattgcttagcactcctccacttgcgaatgcacttgagacagtaggtgtggttgcagttggagaggatcccgaagcggcgctcactggggttggctttctcatagaccacctccattgcgattccacacaccatgtccttgctgcgctgcacggcaaaagagagactcctgttctt

SEQ ID NO: 5454 - DNA, 522 bp, Homo sapiens
tggggcctggcacgggtggcccagccgcgactgagacagcctccggagacgcttctcaccctgagaccaaagcacgggggcaccacagacgtgggggagccgctctggcctgagcccctaggggtggaacacttcttgcgggagatgggacagttttatgaggctgagagctgtcttgtggaggcagggaggctgccggcaggccagaggcgttttgcccacttcccaggcttggcctcggagctgctgctgacagggctgcctctggagcctaatcgatgggagcacgcctgaacatgcccgtccgctgggtcacagggctcctgaaggagctgcatgtccgactggagagacggtcaaggctggtggttctgtcaacccgtcggggtgccaggcacgggccaagtccacactcctcaacaaccatggtttgggctgcggtttgccacagggaagagctgcggtcctcgagggggcccttcatgcaagctcatcacagtggctgagggcttcagcaaggga

SEQ ID NO: 5455 - DNA, 796 bp, Homo sapiens
aggaagtgattcgaatgatgttagagatcatcaactcctgcctgacaaattcccttcaccacaacccaaacttggtatacgccctgctttacaaacgcgatctctttgaacaatttcgaactcatccttcatttcaggatataatgcaaaatattgatctggtcatctccttctttagctcaaggttgctgcaagctggagctgagctgtcagtggaacgggtcctggaaatcattaagcaaggcgtcgttgcgctgcccaaagacagactgaaggatcctgtgctccaacgctgtcagccgctggccgatcgtcaggtggacagagtccttgcatgccaggcctttgtgtatgcagcttctgggttctcacagtttcatggcttgtctgtcagaaatttccagaattgaaattcaaatatgtggaagaggagcagcccgaggagttttttatcccctatgtctggtctcttgtctacaactcagcagtcggcctgtactggaatccacaggacatccagctgttcaccatggattccgactgagggcaggatgctctcccacccggacccctccagccaagcagcccttcaagttcttttatttctgggtaacagaagtagacagacaggttacttggtgtatcttctgttaaagaggattgcacgagtgtgttttcctcacacactttgatttggagaattggtgctagttggcaatagataactcagcgtagatagtattgcaaaaaggggaggaaatacacaacaataataaatgtaaaaacctgctaaaaa

SEQ ID NO: 5456 - DNA, 858 bp, Homo sapiens
tttttttttttttcaactttacaaaatttgttttatatctgttagaaaatgtacagacataagtattttcagttgacaaagcatcaaacccagttctgcctagtgataagtttcaccctagagtatgtatgtaacgttttagcttatccatcctttcttggagcgcctccatttccattgaaagccaggctggagcaggacccttttggagtagtgactcagttgcttccaaagcccctgctattgtatgcagcgctgacctgtactcttcttcccaggggaactcctgacgagctctttttgcataaggctgtaaagatgacctctttgcttcttctacagtcacattagcaaagggttcccagaaaatacctttttcctgtttcacacgttccactttggcagcttcagtttcatctacaaacccagtcttctccagaaaggatacaactttgttcttagtttcttcagaactgagacactgtggaactatctcttcatgatttgttccctcagcgaactgagtaaacgcctccaaggtatgttgttctagcagccaactcctgtcagctagcagtaaggcaaacatacaggacaggttgggcagaattctgtcctggatagcttcaggtataaaaagttttcctaaagaagatacaaaatccaacattgccaaacgaacatagtcaggaagctctaatttaagtagcgaggtctgcaaagttactgcctgaagtatcagtttaggatctagagtttgaatgaaaaatcccaacagtggaagtaaaaggctgaatgtctgttgaacataaggttgatctgctacctgtttaatgtttaaaaaagcccaaagctgac

SEQ ID NO: 5457 - DNA, 478 bp, Homo sapiens
gtggtagccataaagtgtgtagccaagaaaagtctgaacaaggcatcggtggagaacctcctcacggagattgagatcctcaagggcattcgacatccccacattgtgcagctgaaagactttcagtgggacagtgacaatatctacctcatcatggagttttgcgcagggggcgacctgtctcgcttcatccatacccgcaggattctgcctgagaaggtggcgcgtgtcttcatgcagcaattagctagcgccctgcaattcctgcatgaacggaatatctctcacctggatctgaagccacagaacattctactgagctccttggagaagccccacctaaaactggcagactttgggtttcgcacaacacatgtccccgtgggattgagaagcacgtgctccgtgggctcccccctctacatggcccccgagatggtgtgccagcggagttatgacgcccgcgtggacctctggt

SEQ ID NO: 5458 - DNA, 567 bp, Homo sapiens
gcctttttatgaatctgtcatctcaaatccttttgtcgctgagtctgaagggacctatgacacctatcaagcatgttcccagtggaaagctttgcagaagtattgctgagaactggaaaattggcagaggctaaaaataaaggagaagtatttccaacaactgaagttctcttgcaactagcaagtgaagccttgccaaatgacatgaccttggctcttgcttaccttcttgccttaccacaagtgttagatgctaaccggtgctttgaaaagcagtccccctctgcattatctctccagctggcagcgtattactatagcctccagatctatgcccgattggccccatgtttcagggacaagtgccatcctctttacagggctgatcccaaagaactaatcaagatggtcaccaggcatgtgactcgacatgagcacgaagcctggcctgaagaccttatttcactgaccaagcagttacactgctacaatgaacgtctcctggatttcactcaggcgcagatccttcagggccttcggaagggtgtggacgtgcagcggtttact

SEQ ID NO: 5459 - DNA, 1645 bp, Homo sapiens
ttttattctttctgccaggtacatcagatccatcaggtctgagctgtgttgactaccactacttttcccttcgtctcaattatgtcttggaagaagtctttgcggatccccggagaccttcgggtagcaactgtcaccttgatgctggcgatcctgagctcctcactggctgagggcagagactctcccgaggatttcgtgtaccagtttaagggcctgtgctacttcaccaacgggacggagcgcgtgcggggtgtgaccagacacatctataaccgagaggagtacgtgcgcttcgacagcgacgtgggggtgtaccgggcagtgacgccgcaggggcggcctgttgccgagtactggaacagccagaaggaagtcctggagggggcccgggcgtcggtggacagggtgtgcagacacaactacgaggtggcgtaccgcgggatcctgcagaggagagtggagcccacagtgaccatctccccatccaggacagaggccctcaaccaccacaacctgctgatctgctcggtgacagatttctatccaagccagatcaaagtccggtggtttcggaatgatcaggaggagacagccggcgttgtgtccacccccctcattaggaatggtgactggactttccagatcctggtgatgctggaaatgactccccagcgtggagatgtctacacctgccacgtggagcaccccagcctccagagccccatcaccgtggagtggcgggctcagtctgaatctgcccagagcaagatgctgagtggcgttggaggcttcgtgctggggctgatcttccttgggctgggccttatcatccgtcaaaggagtcagaaagggcttctgcactgactcctgagactattttaactgggattggttatcacttttctgtaacgcctgcttgtccctgcccagaattcccaactgcctgtgtcagcttgtccccctgagatcaaagtcctacagtggctgtcacgcagccaccaggtcatctcctttcatccccacctcgaggctgatggctgtgaccctgcttcctgcacttacccagagcctctgcctgtgcacggccagctgcgtctactgaggccccaaggggtttctgtttctattctctcctcagactgctcaagagaagcacatgaaaaccattacctgactttagagcttttttacataattaaacatgatcctgagttatctgtattctgaactttcttaattgagaagaggcaagaaatcactgcagaatgaaggaacatcccttgaggtgacccagccaacctgtggccagaaggagggttgtaccttgaaaagacactgaaagcattttggtgtgtgaagtaagggtgggcagaggaggtagaaaatcaattcaattgtcgcatcattcatggttctttaatattgatgctcagtgcattggccttagaatatcccagcctctcttctggtttgctgagtgctgtgtaagtaagcatggtggaattgtttggggacatatatagtgatccttggtcactggtgtttcaaacattctggaaagtcacatcgatcaagaatattttttatttttaagaaagcataaccagcaataaaaatactatttttgagtctaaaaaaaaaa

SEQ ID NO: 5460 - DNA, 544 bp, Homo sapiens
  misc_feature (1)...(544): n = a,t,c or g
cagcctgggccattagctcctgatgtcatcgatttgggtgaggggacagggaagtcagaggaagctggccagtggntctcacgaagacttacagcagcggagtggtgcctgattcctagtacagctgctcccactgagtctccagggatctgtggttcaggaccccctgcaaccccctcccagacccctgtactggtgggaggagaggacctagaggaaaggtgctgggcagataagcagccgagggaggccctgggtttagcttatcagtcttctgggccctcctgccccaggaagggcagcgaggaccatggtgttgcccctgtcatcgttatcgtcctggccatgagcttgcaggactgggagggccggagtcagccaggcagacggcagcacagcatttgcctgttggcaggctggccttggtggcttcccaaaggcaatcgctccacgcagaacaaaactcacttttttggggggtgaagcaccttggttcatttgtttagttcgttaattccagcagtctgtttttaaagggaaacat

SEQ ID NO: 5461 - DNA, 443 bp, Homo sapiens
  misc_feature (1)...(443): n = a,t,c or g
ccctttccagggcctgttgtctgcgtggcccagatgaaggacatggtaacggaattattcgaccctctggtacagggggaagtgcagcaccgggtggcggcggctccagacgaggacttggacggtgagctctgagacggtgctgcagtgaccggaggacggggcgggcgcccaggggaaattggcttggggagcccgtgtagagtggcagacttggacaaagtgagcctcgaggaaagaagaattgcatctaaaaatttttggcgggctaggcgaagtnnnnnnnnnnnnnnnnnnnnnnnnnnnnnnnnnnnnnnnnnnnnnnnnnnnnnnnnnnnnnnnnnnnnnnnnnnnnnnnnnnnnnnnnnnnnnnnnnnnnnnnnnnnnattatttttaaaataatttaaaaaataaaaattgttggcatttatcaaaaaaaaaa

SEQ ID NO: 5462 - DNA, 868 bp, Homo sapiens
ttttttttttttttttttcaagaataacttgttttattaccatgatttgtgaaaagcaacagggtagacagttcaaggaaggacacagacagtgccctgttttaggttccaaatttcttctttttaatgggtggtgggagctgagcaatgatgtcatccagaggccgttctactgccacgagtgttctttcatccaaaagatccatgaagagtagaggcttatatatcttagaaattttaaaagcatgagctgtgcgcctccggatgacatctgattcattcgtgggaggaaatggattgtagagtaaggttttgtcatttggaaggggcaatgacttgtcaatgatgcagaacatgtaggcatcatggagaaggatgtgcatcggtctcttgggatgaaaactgatgtgtgtgataggagtatccctttggagccaaaggtggtgaaagccctgcttctggacagtccggctccaatctgtatactgtttgtctgggatgctgtactcaaatacctgctggtccgaatgagcgatgacaaggttgttggtattgggggcaatagccatagcagtcactgggaaattgtaagcaggcaccgtgcagtgaagctttagctgttttacgttgtagacatggactccagcactggtacctgatgcagctagccaattcccatctggactgactgccaaaagacacatggcctccactgttcctgactgaggctggaaagcatgcaggtgcttgaagcttcctcctgacagctgaacaatatgcagagctccttgatttgatgctacaaagagctttgttgaatcttcagaaaacaaaatctgaagggcagagcgaaggaatgctggcattt

SEQ ID NO: 5463 - DNA, 696 bp, Homo sapiens
ttgagaaagaaacaaaatgtcccaataatttaatggcagagctagaagagagcatttacagctaatttgggactctccaacagaacacttttcctggatgcacagacattcataatactggtaactctcatcaacagctctggcatgtacacgtggccacggtacccttcgtacaacacgggaagagaacaacaggacgcccaagaggcatctggacagcacacagcaaacagaaaggctgaacgcccccccatggaaccccattaaaaaacaatgtttgtctattacaaagtcacgttttccgtttttccgctttataaagtcagcgatgctggagggtgtctagcggaatccgtcctccaggaatgagtgcaaaaggagagcgcacggctcagggacgtcccttcagtgagcaatggaaggactggctggaggcctcccatccatttcggacaaacacacacatacagaaaaggattattgccagcttgtgtactctcacaatgtgatttttgtatttcgaaagcttgaattgtcccctgagtgtgagagacagagggggagcgtccgatcagcggccgctgctgttcaccaggccatgaaactcctcccaggccttgatgctgtcggtgtgagttttgtattccataatggtgttgggaggtaggttaagcactcgccgaagtgtgtcccggc

SEQ ID NO: 5464 - DNA, 5738 bp, Homo sapiens
  misc_feature (1)...(5738): n = a,t,c or g
attgaatttaagttctaaggaggtggctgggtttcttattgtcaccttttgtcttgtctcatttagctatatcgagaagtttactgactttcttcggctctttgtgagtgttcacctaagaagaatcgagtcttactcccagttccctgtggtggagtttttgacacttttgttcaagtacacatttcatcagcctactcatgaaggctacttctcttgtttggatatctggacgctgtttttggactatctgacaagtaaaattaaaagtcgtcttggagacaaggaagcagttctcaacaggtacgaagatgccctggtgctcctgctcacagaggtgttgaatcgaatccagttcagatacaaccaagcccagctggaggagttggatgatgagactctggatgacgatcagcagacggagtggcagcggtacttacggcagagcttggaggtggtggccaaagtgatggagctcctgcccacgcacgccttctccacactgttccctgttcttcaggacaatttagaagtttatttgggattacaacagtttatagtcacttcagggtcaggacacaggttgaacatcacggcggagaacgactgccggcggctgcactgctccctgagagacttgagctccctgctgcaggccgtgggccgcctggccgagtactttatcggggatgtgtttgctgcacggttcaatgatgccctcacagtcgtggaaaggttggtcaaagtcactctgtacggatctcagataaaattgtacaacattgaaactgctgtgccatcagtattgaaacctgacctcattgatgtgcatgctcagtccctggctgcgctgcaggcttactctcactggttagcacagtattgcagtgaagttcaccggcagaacacgcagcagttcgtgacactcatctctactaccatggatgcaatcacacctctaatcagcaccaaggtccaagacaagctgctgctatctgcgtgccacttactggtctcactggccaccaccgtgcggcccgtctttctgatcagcatccctgcagtgcagaaagtattcaacagaatcactgatgcctctgccctgcgacttgtcgataaggcccaggtgttggtgtgccgagccctctctaacatcttgctgcttccgtggccaaaccttccagagaatgagcagcagtggcccgtgcgctccatcaaccatgccagcctcatctctgcactctcccgggactatcgcaacctgaagcccagtgctgttgccccacagagaaagatgccactggatgacaccaaactgattatccaccagacactcagcgtcttagaagatattgtggagaatatctcgggggagtccaccaagtctcgacagatttgctaccagtcgctgcaggaatctgttcaggtctccctgggccctctttccagcttttatccatcagtcagatgtgactgatgagatgctgagcttcttcctcactctgtttcgaggccttagagtacagatgggtgtgcctttcactgagcaaatcatacagactttcctcaacatgtttaccagagagcagttagccgagagcatcctccacgagggcagcacaggctgccgggtggtggagaagtttctgaagatcctgcaggtggtggtccaggagccaggccaggtgttcaagcccttcctccccagcatcatcgccctgtgcatggagcaagtgtatcccatcattgccgagcgtccctcccctgatgtgaaggccgagctgtttgagctccttttccggacgctccatcacaactggaggtacttcttcaagtccaccgtgctggccagtgtccagagggggatcgctgaggagcagatggagaatgagccccagttcagtgccatcatgcaggctttcggacagtcctttctccagcccgacatccacctttttaaacaaaatctcttctacttggagactctcaacaccaagcagaagctgtaccacaagaagatcttccggactgccatgctgttccagtttgtgaacgtgctgctccaggtcctggtccacaagtcccatgatcttctgcaggaggagattggcatcgccatctacaacatggcctcagtcgactttgatggcttctttgccgccttcctcccagagttcctgaccagctgtgatggtgtggatgccaaccagaaaagtgtgctggggcggaatttcaagatggatcgggtgaggagagaaagaggccgggctaagaggagggcagagtgggcacgcaagcctggcacctgtgcagcaaggagggggcacattgaggcctctgggcgtggtctgtgcccaccctgcagcttggcggcagctcacgagatgcctgctgacctggtgctgtagcctgattgaggggcacagccttttccccagtcttggtgtctgtagcacgtatgttcttagtctcagccatggaggtcccgagttcctggctctgcagcccctccatttgtcttggcatctttgttcatacccaggaccctgccgttctccctcctgggtgatgagccccggtggggccagcattggagtgtgcccaggcttgcattcaggctgagatggttggtgcttgggagctgcacttctgggtccccagggttagaggtgggacccaggttccccggctgtcttgggctctttccagaccagccccagctcagcttgggctgagttgctgccaggtcctgggaggagccctcctagtactcaccctcttgtcccactgctgccacctgtgcagggactgtcaggtgggctgtccccacccgtgcagcacctcggtgggagctgggtgctgctggctcttggtgtccatgaggccatcttgttggagcctgacagtgcctgggacctccttccccatggggctcacctgttctcttcttcctgtgtcaggtgaccaggcctctctcttgcctgataggaacttctgggaacttttccttgtaccgttttatacttgatgaaattaggaaaagaaatcgctttctccctggtcctcttggggttcttgacctgagtcctctgtgaagcagcttgtccacggctccaccgtagtgctcagatgcacacattgctctcactggtgcaaacctggccgcctgctttcctcatttgccacgtgtggcagggaagcttttgcttagactcatcctgttctcctttgtcttggggtcttccttttcttgggacttgttctctcctaagcctcttccagttcacttcagcccctggatatgttttttcctttttctagaggccagatcctaatacttaatgatcagcttctaacgacatcaatatcagtcaactttttgatttaaagctgtggtttcaaaatctnnnnnnnnnnnnnnnnnnnnnnnnnnnnnnnnnnnnnnnnnnnnnnnnnnnnnnnnnnnnnnnnnnnnnnnnnnnnnnnnnnnnnnnnnnnnnnnnnnnnnnnnnnnnnnnnnnnnnnnnnnnnnnnnnnnnnnnnnnnnnnnnnnnnnnnnnnnnnnnnnnnnnnnnnnnnnnnnnnnnnnnnnnnnnnnnnnnnnnnnnnnnnnnnnnnnnnnnnnnnnnnnnnnnnnnnnnnnnnnnnnnnnnnnnnnnnnnnnnnnnnnnnnnnnnnnnnnnnnnnnnnnnnnnnnnnnnnnnnnnnntctagttatatcagaagcacctggggtacttattaaaaatggagaaacagacttctgtgttctacccaggaaattctggtttggcatttgggagccactgatttaaaagacatcccttagttggttttttgagggtaaaataaaagaatcaccaccttccattcagtcacgcactgtgtgtttgaagccagctgcttctcaagccccgggccaggaactggggcaccagtcccagccttcaccaagtctttcatggtagacaggccaatacagcaccctctgtggaccacatagtgccaagcatgtgacatgtcttggctcgagtaagccttctaacaagcctctgaagtgtgggtcctgttactcccccatttcacagatggtgggggctcagaaggtgagcagttcacagaacttggaagtggtagagctgcgaagcaggaggcagacctgggtgttctggccccagagcctgcacacactccccagaagcagattgctcaggacagaggcgctgagctggctgctggggccaggaaataggaggcatctgtgcagactttgggaagaggcaggctttgaatggagttctggaagaggaatagtggttgggcaggaaaatgaacttggtcctgctcatggctctgctggggcttgctgggcctgtttgagtcctcaccgggacctacactgaaaaaaaaagcagggtctcaccgtgtgcatgatggcggaggtcagggcctcacttctggcccagggccttccatggcccacgctgcgcccagtgggacaggccttgggactgtgtttgctgctgctcgggtggctctcgaggggcaggggcggcctgggagccccgtgggtaaaggttctgcagacattgctcggtgtgcgcgtcacctcaaggggccatggtgaagaagagggctgtcaccacagccatgtctgcgtttgaggggccggactcaggagcaagtgtgctggtctcttcagtgtgagctggggccagcttcttcatggtgcagcgctttggtctttctgtccttagactagtggttctggtagggcttggtggcagccttgtggtgaggactcagtgagttgatgtctgtatgttgattgcagcagtgtctggcacccgagaggccctagggacgtattcctcttgttctttttctcccacagcgcctggcacagagtctctgtgacacgcagtgcaacagtgaatagaagttttgagttttagaaagtgctcccctatcttcagtgcacactctgggatggaagtagctgttggggtctggtgggtgggtgacctggtgtgttgttggctgcagctatgcccctgccttccaggacctgccctcattcacccagaatgtgcacaggctggtcaacgacctgcgctactacagactctgcaacgacagccctgccccctgggcactgtgaagctctaggcctggctactgcctgggggacacggacttctgctgctgccacctgcgccagccctaccttccaccacagatgtctcccagatgggccttggtcacactccttggcttctcccaccgcaagcaacgctgcctgcctctgccgctcctccacatcttgccgctgcccagcagagctggcttctgggtccacctgagcactggacggtgctcccagggcgttggagcaggcggaggggtgtgtggccaggtactaggaggcaccaggaaatcccgcggggtggcccatgcagaccaggcgcacgtggctcatggggcagaattgccaaggacagctcacgacagtgccaccttctcaccattccagccaaggagagatgtgacgttggaactgctctggcacttctgtcaagcctcccccgccccaattgccttgagatctctgctctttgtcagagatttgcaaagactcacgtttttgttgttttctcatcattccattgtgatactaagaaactaagaagcttaatgaaaagaaataaaatgcctatgttgttgttctagaaaaaaaa

SEQ ID NO: 5465 - DNA, 740 bp, Homo sapiens
cgtggcgcagggatggcacaaaagaaatatcttcaagcaaaattgacccagtttttaagggaagacaggattcaactttggaaacctccatatacagatgaaaataaaaaagttggtttggcattaaaggaccttgctaagcagtactctgacagactagaatgctgtgaaaatgaagtagaaaaggtaatagaagaaatacgttgcaaggcaattgagcgtggaacaggaaatgacaattatagaacaacgggaattgctacaatcgaggtgtttttaccaccaagactaaaaaaagataggaaaaacttgttggagacccgattgcacatcactggcagagaactgaggtccaaaatagctgaaacctttggacttcaagaaaattatatcaaaattgtcataaataagaagcaactacaactagggaaaacccttgaagaacaaggcgtggctcacaatgtgaaagcgatggtgcttgaactaaaacaatctgaagaggacgcgaggaaaaacttccagttagaggaagaggagcaaaatgaggccaaactcaaagaaaaacaaactcagaaaagttcccaagaaaggaagaaaatgttcttgtaaagagagaatataaataccatcttatgtgttctttcatcttactgttgcgcaactagtaaaattgttgaaagtgaagtggtatttacattacatgacttaagcttttccattaaaaagtataatattgaaaa

SEQ ID NO: 5466 - DNA, 768 bp, Homo sapiens
  misc_feature (1)...(768): n = a,t,c or g
catgttttaggaagctcatctgtcagcttctgaggtgtaggcatatagattagcaggacaataaacatttttctttttggggcagggcagggcaggggtggtatctaaatatctactttaaaaatcaataaatggacaaagtgctacaaaacagtaacagaatggaaatacttcctttcaactttgcttccaaaggctctaattacagagagcaaagaaaactagtctcaggggctgagaacgtgaaatcttgattaggaatccatacaatggtgatattaaattatttctttttattcaccttttataaaaaaaaagggggcaaatacaagaaataaggttatgtcaaagtttggtttttaaagctcaaacttacagagtctgttgtaaggttaatacatagaatgctagctttttagtcacctgagaatcaggaaattcacatgaacataattccctatactgacaaagaactatagctacctatgggcttgtcaagttcctacgcttcattcagcatgaaattgcacttttcttgatatgtataaattaaaatctatgcaactgtctgtgcttgtgttgcctcatatcacatctataaaaacagcatttaaagtttgtaggaaatagaattttggccttttacaaagcaaatactttgtttctttaactcagaattctggaaatgcaatccagttctggtattgtgactgccaaaatatttttggccttcaaacattagtttttttcangtgtctgactctatac

SEQ ID NO: 5467 - DNA, 458 bp, Homo sapiens
cctacttgctcttctgttctgcctagtggtaagtattttctggagcttgtgctgaaggagagggaaccacttggttcctggtctgacttcagaaggagtcctggggagagcctcccagccctcccctcagcttctccctggtctcttccagtcttgctgccagtcatcatggaaaggcttgagaaattgcacttcatgcagaaagtcaaggtcctgacgccccattgcaggtcatgctgacgggtgctctcactcatggtgccagtgcgtgtgggcttttcccacagaaatgtgaattgccagtttcctatctggaaccgaagctccaagacactatcaaggccaagtatggagaacttgagccttatgtctacttcaataagggtctctaaatgccccacttcagcaaggaccagtctattcccatattcaccagctcctccttagctacgtgcaca

SEQ ID NO: 5468 - DNA, 701 bp, Homo sapiens
  misc_feature (1)...(701): n = a,t,c or g
ttttggtatatttgttgttttactgttaatttgacacatctgaaccaaagcattcacaatacttgatatactttgaagagagtcatatactatagtcttaaacataaccacggaacgagcagaacaattaaaactacataaggccttaaaatatatccacagtgtgtattatttccatattcattcatttacaaattagactacataccattaattttatttttatttttcattgttttattcagacagggttcattcaaggaaaggcaacttagtttttgtatgtgtgagctttatttttttactatattggttaatataaaagttatgaattaaacgtattcttatctcctatacccaggagtgaatccatgaaattctcagatagtaatccaaaacaataggtcctatttttaaaaatagctaaagtgggccagggggcagtggctcatgcctgtaattcccgacactttggggagggccaagggcagnattcatgagggtcagggagtttcaaggaccagcctgattcaacatgggcnaaaaccctgttcttcttacttaaaaattacaaaaattaggccngggcntggttggccaaggcatctggtaatacccagctacttcnggggggctnagggcagggggattcacttgatncccgggggaggcagaggnttgcagttgagttcaagttcccc

SEQ ID NO: 5469 - DNA, 709 bp, Homo sapiens
tttttttttgccaatgcttgcattcatgtttattaagacgcagccaagtgaaatgtgtcagctcctcctcttgagtacagccttctttactggtgtataacaatgcccaagggctggatgaactacataatcaaaatcaaatgacagctttctacagacttggccaaaatagtacaacctcagacaccattttaaactgcaagaaatctgagcctttcatagtcttgctttttattgttgacattcacattttaatttttatgatcattgcagattcacattttaaaaacccaagaaacaaaaaagctcttattctaatttagcaaaaagcagaatcatcggtgtgaagacaatacactatctacatacagctgctttgtatccataattatctatgtaagaaacatgctgtcattcacagggactccatttacacgtgcacataagccatgctgaggcctaacaggtaatgtgggttttcgtctagcatcttctctttactctggatccttatcctcatctgaaaaatgggggacagacttctttgcaacaacattatccagtctctgtccttgtagatatggattgacactcctccgctttcggtctctctcctcccttcatcttctcgtaaagggagtttctgttccacttggcccagccccggtagtcatgtttcgggttcaagagaatgctggtgcaactggaa

SEQ ID NO: 5470 - DNA, 500 bp, Homo sapiens
ttttttttgccctgctgaaaaaaaataaatctattttcttgccttccagggcagccaaccagtcagaatgcctctcatttaggcctgcaagtcccatccaagggaaatgtgtggagatgcaagaaggcaacaccaaggggaccttatcaatagccctgtcccctgcccgcctccaaagtcccccaacaaagtatgaaggaagccccacctgggggtctccaggaagtcgaggctggcctctgaggttccacagaaaagcaagatgggggagtgaaggggccggctggaacttgatgctccaacctccagagtttcgaggcacagcaagacaggttcagtaatgtccttccctccagagagcgggccttaatttatggactggtactctgagtacttcttgtggtgcagcagcagaaccaagccgccccctagcagcatgagccctggggcacccagggccactgccatgattgcccaggactagtggggacaagccgtcc

SEQ ID NO: 5471 - DNA, 982 bp, Homo sapiens
tttttttttttttttttgagtattccagcattatttatttgatcagagtaaaatacacttcccatcactacaaactgagcacaactacagttgtctacacattcatatttttgacgtgccaacattttgcattctacatgaaacatttggtttaaacaaaatcttaagaattctctattttgtttcccatcttccctcctgttctctcccatcctccaaagatgttttatattaactgctatgagatttatttgccggtcacgtaatacggaggacagcagggaacaacacaagatttaccatgcctaggggatgaatggcaaacccaactttggctaatgtcattgagaacaacttggaagcgtgagcagagatatctcatgaagtggcagtgaacctacatttccatttatcagaagcaaacatggaaggttacatacatgatgaagtattggaagttaaagacttaagacacaaaatcactaatttaaaagaacatgcaacatgagtatcaacttgctatgtagtgtacatgtaaatgacccaaatattcacctctagcatcctgaatctcttcttactacagctgttatttgtacagcccactgaatgtagattagtaaatactgacatcacaatgttgacacatgcagggagggggagatagataaagcaacagttcttccttccaccttttccaaagtctcaggattaggggaggtaataagttttggaaagaaactgaaatgcaacctggaggagagttggacaagccacattttccactcatgggaaagaagcggaccattctgctactttcccaaagacaaagggactccttaaagggtaacctgaaaaatgagcgctatcctcccagactgttttcttctatcaagtactgcatcatcggtaagcactgaatcctacctttcttaattatactagccaatgacttccttgttctcgttctttattctaagcc

SEQ ID NO: 5472 - DNA, 9795 bp, Homo sapiens
ccggggcggcgcgggggcctcccactcccgctcggcgctgaccccccatccccacccccgtgggaacactgggagcctgcactccacagaccctctccttgcctcttccctcacctcagcctccgctccccgccctcttcccggcccagggcgccggcccacccttccctccgccgccccccggccgcggggaggacatggccgcgcacaggccggtggaatgggtccaggccgtggtcagccgcttcgacgagcagcttccaataaaaacaggacagcagaacacacataccaaagtcagtactgagcacaacaaggaatgtctaatcaatatttccaaatacaagttttctttggttataagcggcctcactactattttaaagaatgttaacaatatgagaatatttggagaagctgctgaaaaaaatttatatctctctcagttgattatattggatacactggaaaaatgtcttgctgggcaaccaaaggacacaatgagattagatgaaacgatgctggtcaaacagttgctgccagaaatctgccattttcttcacacctgtcgtgaaggaaaccagcatgcagctgaacttcggaattctgcctctggggttttattttctctcagctgcaacaacttcaatgcagtctttagtcgcatttctaccaggttacaggaattaactgtttgttcagaagacaatgttgatgttcatgatatagaattgttacagtatatcaatgtggattgtgcaaaattaaaacgactcctgaaggaaacagcatttaaatttaaagccctaaagaaggttgcgcagttagcagttataaatagcctggaaaaggcattttggaactgggtagaaaattatccagatgaatttacaaaactataccagatcccacagactgatatggctgaatgtgcagaaaagctatttgacttggtggatggttttgctgaaagcaccaaacgtaaagcagcagtttggccactacaaatcattctccttatcttgtgtccagaaataatccaggatatatccaaagacgtggttgatgaaaacaacatgaataagaagttatttctggacagtctacgaaaagctcttgctggccatggaggaagtaggcagctgacagaaagtgctgcaattgcctgtgtcaaactgtgtaaagcaagtacttacatcaattgggaagataactctgtcattttcctacttgttcagtccatggtggttgatcttaagaacctgctttttaatccaagtaagccattctcaagaggcagtcagcctgcagatgtggatctaatgattgactgccttgtttcttgctttcgtataagccctcacaacaaccaacactttaagatctgcctggctcagaattcaccttctacatttcactatgtgctggtaaattcactccatcgaatcatcaccaattccgcattggattggtggcctaagattgatgctgtgtattgtcactcggttgaacttcgaaatatgtttggtgaaacacttcataaagcagtgcaaggttgtggagcacacccagcaatacgaatggcaccgagtcttacatttaaagaaaaagtaacaagccttaaatttaaagaaaaacctacagacctggagacaagaagctataagtatcttctcttgtccatggtgaaactaattcatgcagatccaaagctcttgctttgtaatccaagaaaacaggggcccgaaacccaaggcagtacagcagaattaattacagggctcgtccaactggtccctcagtcacacatgccagagattgctcaggaagcaatggaggctctgctggttcttcatcagttagatagcattgatttgtggaatcctgatgctcctgtagaaacattttgggagattagctcacaaatgcttttttacatctgcaagaaattaactagtcatcaaatgcttagtagcacagaaattctcaagtggttgcgggaaatattgatctgcaggaataaatttcttcttaaaaataagcaggcagatagaagttcctgtcactttctccttttttacggggtaggatgtgatattccttctagtggaaataccagtcaaatgtccatggatcatgaagaattactacgtactcctggagcctctctccggaagggaaaagggaactcctctatggatagtgcagcaggatgcagcggaacccccccgatttgccgacaagcccagaccaaactagaagtggccctgtacatgtttctgtggaaccctgacactgaagctgttctggttgccatgtcctgtttccgccacctctgtgaggaagcagatatccggtgtggggtggatgaagtgtcagtgcataacctcttgcccaactataacacattcatggagtttgcctctgtcagcaatatgatgtcaacaggaagagcagcacttcagaaaagagtgatggcactgctgaggcgcattgagcatcccactgcaggaaacactgaggcttgggaagatacacatgcaaaatgggaacaagcaacaaagctaatccttaactatccaaaagccaaaatggaagatggccaggctgctgaaagccttcacaagaccattgttaagaggcgaatgtcccatgtgagtggaggaggatccatagatttgtctgacacagactccctacaggaatggatcaacatgactggcttcctttgtgcccttgggggagtgtgcctccagcagagaagcaattctggcctggcaacctatagcccacccatgggtccagtcagtgaacgtaagggttctatgatttcagtgatgtcttcagagggaaacgcagatacacctgtcagcaaatttatggatcggctgttgtccttaatggtgtgtaaccatgagaaagtgggacttcaaatacggaccaatgttaaggatctggtgggtctagaattgagtcctgctctgtatccaatgctatttaacaaattgaagaataccatcagcaagttttttgactcccaaggacaggttttattgactgataccaatactcaatttgtagaacaaaccatagctataatgaagaacttgctagataatcatactgaaggcagctctgaacatctagggcaagctagcattgaaacaatgatgttaaatctggtcaggtatgttcgtgtgcttgggaatatggtccatgcaattcaaataaaaacgaaactgtgtcaattagttgaagtaatgatggcaaggagagatgacctctcattttgccaagagatgaaatttaggaataagatggtagaatacctgacagactgggttatgggaacatcaaaccaagcagcagatgatgatgtaaaatgtcttacaagagatttggaccaggcaagcatggaagcagtagtttcacttctagctggtctccctctgcagcctgaagaaggagatggtgtggaattgatggaagccaaatcacagttatttcttaaatacttcacattatttatgaaccttttgaatgactgcagtgaagttgaagatgaaagtgcgcaaacaggtggcaggaaacgtggcatgtctcggaggctggcatcactgaggcactgtacggtccttgcaatgtcaaacttactcaatgccaacgtagacagtggtctcatgcactccataggcttaggttaccacaaggatctccagacaagagctacatttatggaagttctgacaaaaatccttcaacaaggcacagaatttgacacacttgcagaaacagtattggctgatcggtttgagagattggtggaactggtcacaatgatgggtgatcaaggagaactccctatagcgatggctctggccaatgtggttccttgttctcagtgggatgaactagctcgagttctggttactctgtttgattctcggcatttactctaccaactgctctggaacatgttttctaaagaagtagaattggcagactccatgcagactctcttccgaggcaacagcttggccagtaaaataatgacattctgtttcaaggtatatggtgctacctatctacaaaaactcctggatcctttattacgaattgtgatcacatcctctgattggcaacatgttagctttgaagtggatcctaccaggttagaaccatcagagagccttgaggaaaaccagcggaacctccttcagatgactgaaaagttcttccatgccatcatcagttcctcctcagaattcccccctcaacttcgaagtgtgtgccactgtttataccaggcaacttgccactccctactgaataaagctacagtaaaagaaaaaaaggaaaacaaaaaatcagtggttagccagcgtttccctcagaacagcatcggtgcagtaggaagtgccatgttcctcagatttatcaatcctgccattgtctcaccgtatgaagcagggattttagataaaaagccaccacctagaatcgaaaggggcttgaagttaatgtcaaagatacttcagagtattgccaatcatgttctcttcacaaaagaagaacatatgcggcctttcaatgattttgtgaaaagcaactttgatgcagcacgcaggtttttccttgatatagcatctgattgtcctacaagtgatgcagtaaatcatagtctttccttcataagtgacggcaatgtgcttgctttacatcgtctactctggaacaatcaggagaaaattgggcagtatctttccagcaacagggatcataaagctgttggaagacgaccttttgataagatggcaacacttcttgcatacctgggtcctccagagcacaaacctgtggcagatacacactggtccagccttaaccttaccagttcaaagtttgaggaatttatgactaggcatcaggtacatgaaaaagaagaattcaaggctttgaaaacgttaagtattttctaccaagctgggacttccaaagctgggaatcctattttttattatgttgcacggaggttcaaaactggtcaaatcaatggtgatttgctgatataccatgtcttactgactttaaagccatattatgcaaagccatatgaaattgtagtggaccttacccataccgggcctagcaatcgctttaaaacagactttctctctaagtggtttgttgtttttcctggctttgcttacgacaacgtctccgcagtctatatctataactgtaactcctgggtcagggagtacaccaagtatcatgagcggctgctgactggcctcaaaggtagcaaaaggcttgttttcatagactgtcctgggaaactggctgagcacatagagcatgaacaacagaaactacctgctgccaccttggctttagaagaggacctgaaggtattccacaatgctctcaagctagctcacaaagacaccaaagtttccattaaagttggttctactgctgtccaagtaacttcagcagagcgaacaaaagtcctagggcaatcagtctttctaaatgacatttattatgcttcggaaattgaagaaatctgcctagtagatgagaaccagttcaccttaaccattgcaaaccagggcacgccgctcaccttcatgcaccaggagtgtgaagccattgtccagtctatcattcatatccggacccgctgggaactgtcacagcccgactctatcccccaacacaccaagattcggccaaaagatgtccctgggacactgctcaatatcgcattacttaatttaggcagttctgacccgagtttacggtcagctgcctataatcttctgtgtgccttaacttgtacctttaatttaaaaatcgagggccagttactagagacatcaggtttatgtatccctgccaacaacaccctctttattgtctctattagtaagacactggcagccaatgagccacacctcacgttagaatttttggaagagtgtatttctggatttagcaaatctagtattgaattgaaacacctttgtttggaatacatgactccatggctgtcaaatctagttcgtttttgcaagcataatgatgatgccaaacgacaaagagttactgctattcttgacaagctgataacaatgaccatcaatgaaaaacagatgtacccatctattcaagcaaaaatatggggaagccttgggcagattacagatctgcttgatgttgtactagacagtttcatcaaaaccagtgcaacaggtggcttgggatcaataaaagctgaggtgatggcagatactgctgtagctttggcttctggaaatgtgaaattggtttcaagcaaggttattggaaggatgtgcaaaataattgacaagacatgcttatctccaactcctactttagaacaacatcttatgtgggatgatattgctattttagcacgctacatgctgatgctgtccttcaacaattcccttgatgtggcagctcatcttccctacctcttccacgttgttactttcttagtagccacaggtccgctctcccttagagcttccacacatggactggtcattaatatcattcactctctgtgtacttgttcacagcttcattttagtgaagagaccaagcaagttttgagactcagtctgacagagttctcattacccaaattttacttgctgtttggcattagcaaagtcaagtcagctgctgtcattgccttccgttccagttaccgggacaggtcattctctcctggctcctatgagagagagacttttgctttgacatccttggaaacagtcacagaagctttgttggagatcatggaggcatgcatgagagatattccaacgtgcaagtggctggaccagtggacagaactagctcaaagatttgcattccaatataatccatccctgcaaccaagagctcttgttgtctttgggtgtattagcaaacgagtgtctcatgggcagataaagcagataatccgtattcttagcaaggcacttgagagttgcttaaaaggacctgacacttacaacagtcaagttctgatagaagctacagtaatagcactaaccaaattacagccacttcttaataaggactcgcctctgcacaaagccctcttttgggtagctgtggctgtgctgcagcttgatgaggtcaacttgtattcagcaggtaccgcacttcttgaacaaaacctgcatactttagatagtctccgtatattcaatgacaagagtccagaggaagtatttatggcaatccggaatcctctggagtggcactgcaagcaaatggatcattttgttggactcaatttcaactctaactttaactttgcattggttggacaccttttaaaagggtacaggcatccttcacctgctattgttgcaagaacagtcagaattttacatacactactaactctggttaacaaacacagaaattgtgacaaatttgaagtgaatacacagagcgtggcctacttagcagctttacttacagtgtctgaagaagttcgaagtcgctgcagcctaaaacatagaaagtcacttcttcttactgatatttcaatggaaaatgttcctatggatacatatcccattcatcatggtgacccttcctataggacactaaaggagactcagccatggtcctctcccaaaggttctgaaggataccttgcagccacctatccaactgtcggccagaccagtccccgagccaggaaatccatgagcctggacatggggcaaccttctcaggccaacactaagaagttgcttggaacaaggaaaagttttgatcacttgatatcagacacaaaggctcctaaaaggcaagaaatggaatcagggatcacaacaccccccaaaatgaggagagtagcagaaactgattatgaaatggaaactcagaggatttcctcatcacaacagcacccacatttacgtaaagtttcagtgtctgaatcaaatgttctcttggatgaagaagtacttactgatccgaagatccaggcgctgcttcttactgttctagctacactggtaaaatataccacagatgagtttgatcaacgaattctttatgaatacttagcagaggccagtgttgtgtttcccaaagtctttcctgttgtgcataatttgttggactctaagatcaacaccctgttatcattgtgccaagatccaaatttgttaaatccaatccatggaattgtgcagagtgtggtgtaccatgaagaatccccaccacaataccaaacatcttacctgcaaagttttggttttaatggcttgtggcggtttgcaggaccgttttcaaagcaaacacaaattccagactatgctgagcttattgttaagtttcttgatgccttgattgacacgtacctgcctggaattgatgaagaaaccagtgaagaatccctcctgactcccacatctccttaccctcctgcactgcagagccagcttagtatcactgccaaccttaacctttctaattccatgacctcacttgcaacttcccagcattccccaggaatcgacaaggagaacgttgaactctcccctaccactggccactgtaacagtggacgaactcgccacggatccgcaagccaagtgcagaagcaaagaagcgctggcagtttcaaacgtaatagcattaagaagatcgtgtgaagcttgcttgctttcttttttaaaatcaacttaacatgggctcttcactagtgaccccttccctgtccttgccctttccccccatgttgtaatgctgcacttcctgttttataatgaacccatccggtttgccatgttgccagatgatcaactcttcgaagccttgcctaaatttaatgctgccttttctttaacttttttcttctacttttggcgtgtatctggtatatgtaagtgttcagaacaactgcaaagaaagtgggaggtcaggaaacttttaactgagaaatctcaattgtaagagaggatgaattcttgaatactgctactactggccagtgatgaaagccatttgcacagagctctgccttctgtggttttcccttcttcatcctacagagtaaagtgttagtcctatttatacatttttcaagatacaagtttatgagagaaatagtattataaccccagtatgtttaatcttttagcctgtggactttttttttaaccgtacaaaactgaaagaaccatagaggtcaagcctcagtgacttgacaccataaagccacagacaaggtacttgggggggagggcagggaaatttcatattttatagtggattcttaagaaatactaacacttgagtattagcaataattacaggaaaataagtgcgaccacatatatcttaacattactgaattaaaactatggcttctaagtccttatccaaactcagtcatccaaactagtttatttttttctccagttgattatcttttaatttttaattttgctaaaggtggtttttttgtgttttgttttttgtaaaccaaaactatactaagtatagtaattatatatatatatattttttcccctccccctcttctttcctaactaattctgagcagggtaatcagtgaacaaagtgttgaaaattgttcccagaaggtaattttcatagatgtttgcattagctccatagcaaaatggaatggtacgtgacatttagggtagctgatatttttattttgttaaataatttccaagaatagagtatggtgtatattataaa

SEQ ID NO: 5473 - DNA, 402 bp, Homo sapiens
tcattttagactgctacttccaaactaagctagattcttggttttaatgagaggaggcagagagagggaggcagatggaagaagaaaaacagttaaataagacatacccagtcactggcatttttggactataccgtatctttctaggcacaagggaaataggataaactgttaaggtcttttttacttcactttttatttatgtgttctatttgtgttagtcataactgtttatagtgggttgtcttaattttttacttttatttatatgaggataggagctgtgcagatcttcactcaagttagttctgtcacgcttcttcccattatttagagcacagttttttaaagcaactgtcaatttctcagccttatgagcttgctgtatttcttggtatcatg

SEQ ID NO: 5474 - DNA, 1122 bp, Homo sapiens
cggccagaagcccgccgcctccccgcggcccggcgagcaggccgcccgccgcacccatgagcatgtcagtgaaaaaaccagtgaatcgccttccaaaccaggagaaaagaaaggatcagatgagaaaaaagcagcaagcctcggcagcagtcaatcctccagaacctatgctggtggaacagcctcggccaccaaggtgtcagcttcctctggtgcaaccagcaagtcttccagtatgaatcccacagaaaccaaggccattccagtcagccaacagatggaaggaccacatcttcctaacaagaaaaaacacaaaaaacaggctgtaaatacagaacctgagaagaaagtcacagtcaaccaagctgtctgtggttcatgagaaaaaatcccaagaaggaaagccaaaagaacacacagagccaaaaagcctacccaagcaggcatcagatacaggaagtaacgatgctcacaataaaaaagcagtttccagatcagctgaacagcagccatcagagaaatcaacagaaccaaagactaaaccacaagacatgatttctgctggtggagagagtgttgctggtatcactgcaatatctggcaagccgggtgacaagaaaaaagaaaagaaatcattaaccccagctgtgccagttgaatctaaaccggataaaccatcgggaaagtcaggcatggatgctgctttggatgacttaatagatactttaggaggacctgaagaaactgaagaagaaaatacaacgtatactggaccagaagtttcagatccaatgagttccacctacatagaggaattgggtaaaagagaagtcacaattcctccaaaatatagggaactattggctaaacccatagggccagatgatgctatagacgccttgtcatctgacttcacctgtgggtcgcctacagctgctggaaagaaaactgaaaaagaggaatctacagaagttttaaaagctcagtcagcagggacagtcagaagtgctgctccaccccaagagaagaaaagaaaggtggagaaggatacaatgagtgatcaagcactcgaggctctgtcggcttcactgggcacccggcaagcagaacctgagctcgacc

SEQ ID NO: 5475 - DNA, 1326 bp, Homo sapiens
attatatcactcccaatagcactgacctggtgatcaaaaacacttgagaagacatctattggccatctctggccaattacactaagaaacatatcaaggtgcttttggcacaggtgcccacaaatacggatgcagtgctgagatagtttatgagacttgtaccatttcacaaactctgaaattgggttccatattggcaaggctgccacagttgttaagaataatcctctatgtttcttcctcacaaaaccatatctcatttatatccagaccattacttcactataattacaaggacaaattattagcaagaaataagaatagtattagaagaattgatcctattttgaacccctctccagtatcttcacactcttgtcaactctccaggcctctctcttgccctgagttatcagcctgtgtggtgttaactaccttagaaggtacaagctaagaaatgtaacagtatcaaccctcccagttgcttaattatacccataggtaatacaaaaagctctgaagacccaaagatgacattactaatgatgtgatttcaggagccacagaagaaccttaccagcttccctcaaatcagtccttatcctctttctatcttcactcccatcatcatctattttcacactatccagctaagcaaagattcctgggaggctgacttgtatcttcagactcacagagtgaattcagctcttctgaatcaagacccacccagtctctttcattcagacctgttgctaacaaatttatatttgccaagggatattagggcaaaagagggctacttgattgggtgggccaacctcgtgcccacatgggaaggtatctttaatagggtcttttcaaaccttagtggaggagggtcagctcaatttggggcaatgcatttgttcccagtttcattttcttcctggggaattaactcgtcatttcattccttcagtcatcttctgtgtagggtgaccggagcactgagaggcagctctgatgcactattgtgtgtcagcagctcaaaggccctaaaacactgaaggttctgcatctgaagtattaggattgttagcagcaaaatatgaaagatgaggtggacagtcctctaagccctatttaggggaagcttttccaagccacaatcttaactacctacccaaaggatttgcattacccccagattctgtgccaacaaccttttaaggggaattacagtccttgggaaatgagttttgatggtgaaattgggggtgttaaggaagggaaagattgtcatagatggtagggctttgaaaatgcagggtattcagctgccac

SEQ ID NO: 5476 - DNA, 1925 bp, Homo sapiens
taatgacaagctgtataaatgctttacttctagctatttaatggtagcattactggggaactcagacttccctcttttaattcttcttagtaaaagatactcatgaaaaaagcagttttattttcctaacaaaaaagaaagagctcattatgtcagtgtctatgaactgtacccatcccaactctcaaatcgtttggttttttttatcttgattgagatcctcttctcactatgctagtggtggagatattgacaaaatcctatttctttcaaagaggaacttttcacaccgaaaaaagagcatggaattattttatattgttataaaaatcccagatgcaaatttttttaatgccaattattagagcttctggggaaaaagtatagtttcacggaaataaaactatgttctttcagggttgggtggataggtggctgctagggtgtctggctcctggcggctttgccatccatgagggcaagggctgggaacacagtgtctttgcctatggtagatccatgtgaatgtcaggaagccagctcttcagtcttggagatgatttctgctacaattctgtagaaagattaaggatggcagagtaaaaggttaccaagaatgccaggatgtttttcttgggcgtaggaggtccagattactttcctttttgatgaaagagtttggaagactgtcccatctctctggcttgagaaatctctgccattttaaacatcactgtgaaatagcaattattatcatctgtatttagttttaacattacccacaacatagaaataataggtaaaaatcgtcttgcctactcattccaaagatgatcaagtcattaatctagcaaagtattcatgtatcagattttgtatattttgaatcaaagctaactaggaatgttagatataagaatgtaatgatattcatgcactgaattctaagccaatatgaacaaaaatgctgcatgaatggcacatataggtcaccaaagttcattcacaggtagaaaaaacttgtgctttcttttccatctaaaaacaaaaggagactttctttatctcatttaaagaacagctctttgaaattgaaattgaccctttttgcttgaccttaaggagattagcttccagtagatgagtttgcaaaatacttttcctgttcttttgttttgctggtattgaaaacatcccactaaatcagatgaagaggcatgggaggaaaaatatccaaattaattactaaaatcgagaagagaaggcaaactcttgaaaagtaaaaaggtgtttgtgaccttcagtatttattgaacagaggaaataactgacaagggcaatacaattcaatgttcatgtagtaacattcatgtcacttgttgaatttggttctcatatgtatattgcatacacataaattcaaactataagtcgtcatttttgagccatcatcttacattcatgtaatgaaattatggaagagagtaaaaactagctcttaacttagtaaatataatatggtatttaaaatcaggtcactacagtaaggttctaagtattgccaattgaaaagctagaaatggtattactgttgcaaagtgttgtcaataattgactccaatagcattgtaaatacttgtatcccacaactattttaaacccaagcaataaaatggattttctaattcacttcaattctttatttctcttacctatctatgtcttggtacataagaaaagtgtttccatcactgcattggtagaattatttcagtgttattatttttgtgatttcgtatgtctacacaaaaatgaattagtttaatttatattgtgatacagttgtttgagaaatatttttaattctgtttcaactttatttctccaagtgtataatataaaaattacttctgttattgttctct

SEQ ID NO: 5477 - DNA, 263 bp, Homo sapiens
  misc_feature (1)...(263): n = a,t,c or g
tttttttccttttaaaaagttttattgtgaaatatttatccatgagtacatataacatagatgtccagtttttcaagttacaaaaagcagacagccctcccnnnnnnnnnnnnnnnnnnnnnnnnnnntcgctctgtctcaaaaaaaacacatcaatgtttgtatagctaaaaagaaagaaatttaaatgtccaataatggataaataaacttgatagtcattagaatgactacagcaatcagtgaaaattttcaatcatgtg

SEQ ID NO: 5478 - DNA, 677 bp, Homo sapiens
tatgcagctaaatttattctcacaacaaattacatttaaatgtgtaaaagtggtcaacaggaaaagggcataaaggaaaacaaagcgttctttcaggggaagtaagctgctctggaggccaggaactactgcttgcgttgacacggtgtgagtgggtatctttgccctgaagctgaagttaaactttctactggccgtgtggcacacacgttagatgtgtattaggttaagcctggccaactagagagcgaaggggcttattagttaaattgtgctaatatcagttaggaaaatgcttgtcatgttgtggtgaaatcttgagtttgtgttgcaatgcctgggacatgaacgggccatacaaacagaggaaagctctggggcttccaggcaatggccttgtgtcgagtcatcttacaagtgtccatcttgaaatcataaagtggatttaaaaagaagtagcagtgccacagtttatcaccaagaacttattttaatggaaatgggtctaatgtcccttcatgcaacaagacagatgaacaaaaaacaatggtcctaattagctatgagtgatcttgtatccaggtggaaacaaagggcatgtgtacatgtatatatctcttagatgaaatcacacatgttgtgaagggtagaaaaacgaagcaccaagcagtgcttag

SEQ ID NO: 5479 - DNA, 448 bp, Homo sapiens
gagactgccgagcagccttgagccgttgagcagctgaacagaggccatgccggggcactccgaggcctgagacgaccacgcctgtgccgctgaggaccttcatcagggctccgtccacttggcccgcttggctgtccaatcacactccagtgtcaaccactggcacccagcagccaagagaggtgtggcgtggccctggggacgcatggctgaggcaggaacaggtgagccgtcccccagcgtggagggcgaacacgggacggagtactgacacgctgccttccgacacagtctccctcagtgactcggactctgacctcagcttgcccggtggtgctgaagtggaagcactgtccccgatggggcttgcctggggaggaggattcaggtcctgatgagccgccctcacccccgtcaagcctcctcccagccacggtgcaagccatta

SEQ ID NO: 5480 - DNA, 521 bp, Homo sapiens
gtgcgacataattaaaatagggatgcatgacaactgttttattgatgatgcctatttggaccacaaggccagccagcatttgggccccaggaagaatatggccccattcatgtcattactccacaatgcggcggaaagactggacagctggggaggctgcaccccaatcgatgggcttccggtactccttcttgtccaggaggtactgcctgccacggtagttgggtagctcatagaaaatccagacaccctccagcaccttacaggagtggatctctcgcatgtgaaattgctccatgatggaagggcaatcttcggtggtttcatacatctgaccactaaaatcccctttctcaaagatctgaatcttatactggcctccactaggcagatgaacagctctgcaggagctgaggcggtcgttgaggcccatccaacgctggtattcagggtactctccctgtggtaagatgtacatgtacccagcaaagttgggcctttcataaacatgcccaggtgcc

SEQ ID NO: 5481 - DNA, 573 bp, Homo sapiens
ggaccagccgtgcaaatctctagaagatgacggtgttctttaaaacgcttcgaaatcactggaagaaaactacagctgggctctgcctgctgacctggggaggccattggctctatggaaaacactgtgataacctcctaaggagagcagcctgtcaagaagctcaggtgtttggcaatcaactcattcctcccaatgcacaagtgaagaaggccactgtttttctcaatcctgcagcttgcaaaggaaaagccaggactctatttgaaaaaaatgctgccccgattttacatttatctggcatggatgtgactattgttaagacagattatgagggacaagccaagaaactcctggaactgatggaaaacacggatgtgatcattgttgcaggaggagatgggacactgcaggaggttgttactgggtgttcttcgacggaacagatgaggctaccttcagtaagattcccattgggatttatcccactgggagagaccagtagtttgagtcataccctctttgccgaaagtgggaaacaaagtcccaacatattacctgatgccacacttg

SEQ ID NO: 5482 - DNA, 305 bp, Homo sapiens
ggggagtcctcaaagttccatctgtgatttcttcaacagttggtattctcctttgtaataaattttgaaaaaatggggaccgtgcagaaataacagccttgtgggctttgagctcttcatctaaacagttctgatgtccaccaaaagcttcttccagttcagagtctgaagaaaagctaaggacgacatcgtaataacacatgtaatcaaagagtccacgcatatctacatcaagggaattcttcactaagctgaacaaggataacgacattttgaaaccctgagtcttccattccaaactctcc

SEQ ID NO: 5483 - DNA, 748 bp, Homo sapiens
gctttttaagctcccctgagccggtgctgcgctcctctaattgggactccgagccggggctatttctggcgctggcgcggctccaagaagatccgcatttgctaccagcggcggccgcggcggagccaggccggtcctcagcgcccagcaccgccgctcccggcaacccggagcgcgcaccggcaggccggcggcgttgctcgcgcatcccagccatcactcttccacctgctccttagagaagggaagatgagtgagtcgagctcgaagtccagccagcccttggcctccaagcaggaaaaggacggcactgagaagcggggccggggcaggcccgcgcaagcagcctccggtgagtcccgggacagcgctggtagggagtcagaaggagcccagcgaagtgccaacacctaagagacctcggggccgaccaaagggaagcaaaaacaagggtgctgccaagacccggaaaaccaccacaactccaggaaggaaaccaaggggctaggctctggacacagaatgttcagcttaacaaagaaatgacacttgccagcaaccggagcctggcagaaggaaaccttttgtaccagccccagctggacacgttgaaagcacgcttgacccagaaataccaggaactccaggttctctttgaagcctatcagataaagaagaccaaattaggtaactttttaagggtgatcattcgagaataaagagttgagagaaggacaaattttcaagc

SEQ ID NO: 5484 - DNA, 585 bp, Homo sapiens
  misc_feature (1)...(585): n = a,t,c or g
ctggaaattcctggctttgcctattatcatggttgttgccttttcaatgtgcattatctgtttgcttatggctggtgacacttggacagaaacactggcctatgtgctcttctggggagttgcaagcattggaacattttttatcattctttacaatggcaaagattttgtcgatgctcccagactggtccagaaagaaaagatagactgaatttgtatttgtggaaagcggcttggcttggaagattccattgtgcagaactggagtctttactgacccgctttccacatcagcccaaggtctttttaatgcctttatccaaaagcacatcttgtgctccatgcaggatgatgacagaattgatctggatggttactgccttgatgggctctttactattggggacaggttagatttataatttgaagctattctgtaattaaaatataacctggaattcagcttgcagaatgggaaggctggaatctgttcattgtattcttattggattgtcaatttaattagctggttgcaggatnaagggtaatattattttttaaaaaccctaggctnccttgtccatt

SEQ ID NO: 5485 - DNA, 409 bp, Homo sapiens
ggcaggtgtcctctgcatggaagaatcatactcaatagccgtaaacgctgacaaattccccttcctccctgccttctgatgggggctgggcaggccagctggagctgtgtctcctgctgggattccggactgagagtgacagcaggtagtgaaacctcaagcaatttaaaacatggtattgttcctggaagactggttatgttggctagggtcagcaagagagggcatcaaggctgtagtctagcagtgatttaatctgcaagtcaaaccagacgggtattttgtattattcatatgtcacatcctaccaacagacagtaagtcaggcaaggctcctgggtgctccttgtcactcacgtaattttcacatcaggaaaactctggggctgggtgcagtggcttcacacct

SEQ ID NO: 5486 - DNA, 508 bp, Homo sapiens
gcatatgacaaggacgaggacccctattctagccagttaaagctggacagaatttttaaaagcaatgaagccagttccttggatatatccacgggctttgctttgagaaggaactgagtaggcagtgagaagagtcgagtgaagcctggcccgtgagtgcctcaacaactgagatgaacgtcgactcgcttgcaggcaagttgtcactcagcagcgatctgaactatatcctgggttccagaaaaggcagaggttcttaccgaaagcaggggaggaagccgcagcccaaggaggtcgtcacttgccgggaaggtggctcgggccaggctgcactcaaaacccgtgctctgtccacactgctacggggccagagccaaggaagcttccacttcttcccccagacagccccaacagcggctaccccaagggagccagcagccttgtgttcctggggattcccagcccctgcagaatgacccaccagggtctttagcatcacagccaaatt

SEQ ID NO: 5487 - DNA, 942 bp, Homo sapiens
ttttttttttacagtcacatgaaaaataaacatctttatttttttgcctactttatttcattttttcaaataaaatttaaatctgtacaaagtatactgttacagtatatattttgtaagaatcaatgcctaaaataatcacaatacttcaataagcagtacagcagacctcgctagttttcagctttgatattgaacaaactcaagcccggctgatgcacaacacgtttgcttggtttccacatggtgatttcccagcactgagatgggagaacatgacagcaaatatggtaatattacagcccgaccaacactgcgtttcttcatgtgataataactgcacatatttaatacagaatgctcaaatttactttttaaattgcatttgcttacttcttagttggcaaaattcagcattcttaaatggggtccccaaacagtgcaaattaatgatattctaactgtatattggcacatctccaataaggattaacttgtaaactcaaagaatatcaacaacttagtcctaaattttaactaatatacatctggtccatttaaccaaagtcattttggaaagatattaaagaacaattctatttctgaaaggatattgttttgaccattctttagagaagataaatttttaaattgtcattaaaatgtttcactataaaaattttacaaacttgattagaaatttcaagattatgattcacagcagacaaatacaaactgtatattccaacaatacctattcttagactttcaaacagagcacaaccatgtcagctgtgttaactaaaattctgaacagtgtactaaatttataagtggtgctgggtctagcaagtgtaaatacacagtatatttcaatgaaaagaattgtcttctttatactttatttgttttcccataaggaaacattaatgtttacattct

SEQ ID NO: 5488 - DNA, 537 bp, Homo sapiens
gcaggaggggaaggatgggcttcctgcaacctcccttgccccacggcttcccatcctacccccggccgcgttagctgaaggccagcagggacgcaaaagtttttaggccccttaggtctttaggttagcatacgtatcaaggacagtaactaccatgggctcccgaagttttgccaaaacctcggatgccgtggccttcctgggcccaggcgctctgccgaaatcatatgggctgtagcattcgtgctatccctgggggttgcagctttgtataagtttcgtgtggctgatcaaagaaagaaggcatacgcagatttctacagaaactacgatgtcatgaaagattttgaggagatgaggaaggctggtatctttcagagtgtaaagtaatcttggaatataaagaatttcttcaggttgaattacctagaagtttgtcactgacttgtgttcctgaactatgacacatgaatatgtgggctaagaaatagttcctcttgataaataaacaattaacaaatactttggaaaaaaaaa

SEQ ID NO: 5489 - DNA, 521 bp, Homo sapiens
tttttttaatctccaaacaattctttattcagtgttttgcttgtgtttgcatgttgctatgatggacaggtccccctcctccattcttgccctctggagaagtggttcctgcagtgtagagatatgaacagggtatggtaggattggggaaaggggagagagaagcagtagatacactccttatcctccccaaattttaagctctatttctgtgccctagtcctagacacacattagactcagggagttttgtctgaagaccaggtcccactgccccctggctgaagagtctgctttaaatgggaaaacaacgtaggagcaggggtttttaggcactttcagtattctcaggtgttcttcgttctggcccttccagggtaattaggaaggcagaacaagacagatgagctcctgcctgctctgagacaagaagggtggggtctcattagctttgcaaccaggaaacatcctgttttatggtagtggggtcaggaatgtaggaactggtatccattctgccc

SEQ ID NO: 5490 - DNA, 353 bp, Homo sapiens
  misc_feature (1)...(353): n = a,t,c or g
gttcagtgactnctattgaaccaccaaaagtccattatgaaactgtattgcctgtcagggcacccaaccttaccatgcaatgtgctcaaattcaaatcaaccaccattatgttggactgcggactggacatgacttctaccctcaatttccttcctttgccacttgttcaaagtcccaggctgtccaatcttcctggctggtccctgaaggatggaaatgctttcttggacaaggagctaaaggagtgctcgggtcatgtatttgtggattctgtgccggaattctgtttaccagagacggagctaatagatctgtctacagtagatgtgattctcatctctaactatcactg

SEQ ID NO: 5491 - DNA, 677 bp, Homo sapiens
  misc_feature (1)...(677): n = a,t,c or g
tcttaatgtaagtataagcattacaaatccttgtagaataaatatttttagcattgttacgaaggttaaaaactgggttttgttcacttacatgtcttaaaattgccttaaaatgaatacagaaatttatatggcagcttctagtacagttgactgctttaacatggcctgacatctagtgatatttttctctctttcaaatttctgttttctagctcttaaatatctgtttctcattcttataaatcaagatgcttgtagtatataattctgagactaattatctgcttttgaattttttccactgcaattcatataatgtgaagatctgtgaaaatgctatgggaaaactagcttgggttcaaaatatcttaaccaaatataccctgtaggcttcccaagagtgactgtctgacagttggtgactgtagaagaagctggttggggtgttttctgggccaaggaaatttaaaatgtctgcaatgttatccatcattactttttgctgtcagaagggatggcagattgaagctttttctccctatcgcattttcagaagttgcccgtgtcagagctttcaccttgggtgaagggaaagatggggcaggaattctggaaacagaactcctgagacctacctctgnctgcctaaaaatgtggactgnctcaggtatgag

SEQ ID NO: 5492 - DNA, 459 bp, Homo sapiens
tttttttttcttaaaatgtttcaatgcacataacaacagaattaaagagataaaggcaaagagagagagagccttagagtaatgagacattacctttggagcgcacggtgtaacactctttctgtaaattttacacaaaaatggcaagaaataaattgtaatacacttttaagacaagactgaatctatgttttaatatcaatataactttgaaattaattattttcaagttttatgcagagcaagaaagcttttttaaatggagggctctaaattttctttcatatgggatatttacgtagagatgaattatgcttaagaaaagcatcgtggctaagtgggaatctatttagatccttaatattgtaacatagagtgccaataatagctattaacatattacatttcctttcacaaatcccagaaattagctaagacaacattttctcaaaagagaat

SEQ ID NO: 5493 - DNA, 537 bp, Homo sapiens
tttctcaaaaacatcttttattgattttgtggcaagtactccacagtcaataactcgcacatctgcatatggtctgcttgcagcatcggtcttcagattttcaatttgttcgattacttcaaaaccagaaataaccagtccaaagactacatgcaccccatccaggtgtggagcaggctttgtggtactatgtaataaacatcaacacaaagatgatgtcaaacacgatgtgttcaggtgaagagagcagaaaggtttaaacacagcatgtagagaacaaagaagtaaagataaaaagataggggaaaaagttaaacatgatatatatctaaccttaaaaaccccaaaacagcaatagtagccatcttactaatttaaaaaactcaagattataatgaattacaatcatctctattagactatatgtatgcatacatatgaaatcagtttgacttgtagccataaatacacagcatgaatacacataaaaattaaagttactctcaactccaaaacaacaaaacaaaacacttaaaa

SEQ ID NO: 5494 - DNA, 304 bp, Homo sapiens
  misc_feature (1)...(304): n = a,t,c or g
caaaacctactgatgtgggtacccaagcaggaacccccctcttgcaccggcgactcacgtgggaagaagaattcactgagctgaaatggagtgagagctaagatgctctcagaatattcttaaaatgactgtgctgcaaagaagcccgggtgaatagaagaaaatagaaggaatggtgggatacaagtgaaggttaaaatgagaccccattttatcgcaccagctgttgggtgattttcagcggcaccttttccaagcctctttgaggagttctgctcttaacccacantggccccntagtgtt

SEQ ID NO: 5495 - DNA, 902 bp, Homo sapiens
gtggcagagtgccctgcgggactgccagcccctcctgtcctccctcagcaacctggcggaacagctgcaggccgcacagaacctgcggtttgaggattagcgcctagatgtctgattttggagctgcagcatgccaggccgtggctgagagtatgtgagccatgccttgcccttttctgaggctcagggaaagtggatggagctagagagacaacaggaaagaccggtgctgaagaacatagtgtctttcctctattgtggacctaaagaggtggggaagcaaggacaagaggcaaagagccacactgcccttggcatcatccaaagcattgtctggttgacaccaggtcctggttttgtgtcttttgtcaatacctgaatccttgacaaaagaaaaagtggttttgatgatttaaagaaataagggtgattttgacagaaaatatattttaaaaattttgaccaattgcaatagttatcctcaagccaatttccagaacctgccaccagggggaggtggtgcagcatgaatcattctgaatgctttgtctttgaagtgttcccctattgctgttaccatctcagaggaagtaactgggcatggtgagactcctaaaatgacaggagtttttttggccaaagctggcatctgacttgccacattcctctgagtctggagtagccgcaggggtgggagaatgcccagcccagagtcagtccatcggggttacatttccaaggtctgctgccttcatctatgtaatggccgtgttactttcagatctttcagcttcccagagtgttgtgggaatcttggtcattgaatgtaaagggacttagtaaagggtatagatatttttcaaaaatgaaaataacttttgttcttataagtgataagcttt

SEQ ID NO: 5496 - DNA, 508 bp, Homo sapiens
gcatgagccaccacacctggcctggattagtaatttcggatttccaaattcaggtcaagaagtggaatttattatgtggttcttgtgaaaaaaatataaatgtggccttttaaatatatttagtcttttttttaaacaaaggctactcaaaccattaccttcctgccccccttgaaaagaaaaaaaaaatctatccatcccatttgctttctctaattttgaaaagtcagaaagatctcaaaggtttcttactaccgtacttacatgcaaaggcgaaagcacatccaattagatttgagggtatcatttattccgtgcagagccaaggactactgtgaaaaaaaggcatagatacagaaagaaaaaagaaaagcagcaataacaaactaaacagggctagggagcagtggcagaaaaaagttcagaagcaatacatttttttaaaaaaaaagcttctatttgtttcttttgactttttattccctgactcgccatatgatttgtcgac

SEQ ID NO: 5497 - DNA, 171 bp, Homo sapiens
acatggaatttgttttatacagttgcaattatggtccattaatacaatctatttgtatgttatcagtaacagtaatactaacagtgaacccttattaagcatttactatgtgccaggcacaaggctaagagttttacagagatgatctcatttaccttgggttacttacca

SEQ ID NO: 5498 - DNA, 440 bp, Homo sapiens
ttttttttcattctaaaatgttttattagccttctgcaggctctgggttggctttctggacatgtttcccaagttggttcaaacacactattcttggtcttgatacatttgtgatatctgatgtaattgtagatgaaaaagaaaaaatattatgggaatccttggtcttttttgttgctttgaagagtcccatgaagttagttacaggaggtaataaagtcaaagaatcttttggttgaattttaggttttaattttcttcggtgctccttccctcttttaaagataggaattatggatggtcctccattcttctccagacttaaggaaggaagtcccaccagtgtttgttgcatttgaaattcctttaaaaatgctgggttaatacttgcatctctgctgatattattttttatacgaatgaactgattaggtttattc

SEQ ID NO: 5499 - DNA, 832 bp, Homo sapiens
  misc_feature (1)...(832): n = a,t,c or g
gaggagggggcaagcgtgtgtgagattcagtggtccatgcgtgcgtttgtcgtgtaagggtcattcctggggtttggagtgggggaacaaatcaatgtggctgtttttccgtggaaagaattcccactgcagtgtcccggagcctgcgtgtggtgggcaagctcctcaaatggtatctcacagggaataggggagtcttgaaaacgcagcttcggcagtaggaacatgaacctcttacctaaaagttccagggagtttggctccgttgactattgggagaagttcttccagcagcgaggaaagaaagctttcgagtggtatggaacctacctggaactgtgcggggtgctacataaatatatcaagcccaggggaaaaggtgctggtgattgggtgtggcaactcagaactgagtgagcaactgtatgatgtgggctatcgggatatagtgaacatcgacatcagtgaggttgtcatcaagcaaatgaaggaatgtaatgccacccgacggccccagatgagcttcttgaagatggacatgacgcagatggagtttcctgatgcctcgttccaggtggtgttggacaagggcaccctggatgctgtcctgacagatgaggaagagaagaccttacaacaggtggacaggatgctggctgaggttggccgtgtcctgcaggtgggcggtcgctatctctgcatctccctggctcaggctcacatcctgaagaaagcagtgggccacttctcccgggaggggtggatggtgagggtgcaccaagtggccaacagccaggaccaggtgttggaagcagancctcagttctccttg

SEQ ID NO: 5500 - DNA, 415 bp, Homo sapiens
tcgaaccagctaaaagcatctcagcaggaagacgcagggaaggaggcaaccaaaataagtgtggtcaaggtggtgggcagcaacatctcccacaagctgcgcctgtcccgggtgaagcccacggacgaaggcaccctacgagtgcgccgtcatcgacttcagcgacggcaaggcccggcaccacaaggtcaaggcctacctgcgggtgcagccaggggagaactccgtcctgcatctgcccgaagcccctcccgccgcgcccgccccgccgccccccaagccaggcaaggagctgaggaagcgctcggtggaccaggaggcctgcagcctctagactgatgcccctgcccccgcccatccgcccccacgctgtacagagtgcatgaggagccgccggaccaccggggaccgactg

SEQ ID NO: 5501 - DNA, 1185 bp, Homo sapiens
gctttcaaatacggtgcctttttatttaaaacagtgtaaacataacaactcaacaccaccaataattggaaaaagactggatatgtgaacactaatttcctcatatgtcccatgaaagtgagggtaaataaacagacaaatcttcaggagaggtttcagttcaccttagcagtggtaaaaatattgctttattccaaatgaacatacaacacaatttactgttcttttggggggcttcttgtgaactgaatagtctgggtatttttatttcaacaatttattcttcccatactaaccacagaagccgaagccttggtccacacatagcagacttgctataaaataaatggtaatgagaatgatgagaaagcaaatggtaactgtcaatttgttaattgtcttgtattaataatttaagtaggcatgattcaaaataaacacacatccttgatgaactcaccttatgatactgatatcattaatgagccaatagttgatcctctcaaaagtattcacatcagaaaatggtctagacagtgtcaagagttttatacgacccccaccatggcaagtgaccttgatttaagaactaactgaactttatacttaatggaaaaatttaaagtgaaaagatctaagagggaaataatttttctgaatagtagattccctgatgtttcagaacaaattttagcaagcgtaatacgcgcacacatgcacacacatacgcacaatgaacacatgtgcttacagcatatgtgcccgcgtgagcaagtccacacacacacacgctcggcacacacatgtgcacacaggcacacaaaaactgagaaacgctcctccagagcctctaaacaatctcaaggaaaaacatttctattagcatgattttagtgacacgatataaggatttttttgtctctttttctgtaataatttcatacctccatctgagatctgtgcattcaaatctcagaggaaggtggcacacaagagtagttaagattgcccccggtttctccttctatctcctgtcctccttcccattgcagagtcttttgtggcattctccaaaaatcaaatagaaaacactacatgtgtcgacatgacataacctgtgatgaggctattgggtgaatagaaatttagggcttgggactggcaagccaaatggcaagagccacc

SEQ ID NO: 5502 - DNA, 895 bp, Homo sapiens
tttttttttttttgtttttgtcaatttatttagaaaaaaattaacatgggcaaatgagatacctcagtgttacaacagagtatagaaatgtctagcaatagtcaaataatttgatctttaaatacaaaataaccacatgaacacctaatatacaggtttcatctgaatacatatttattagataaatattagaggttgtcacatcatctaactacatacagctttgcaagactagaaatcacaattagttttttgaccagtttaaagtatgaaatgattgcattgtacatacgatgtacaaagacgatgatggtttctgtgggagttacttcaggctgcactggtgggtgtgtttatgtgtgtacgtgtgaatcacctgtgatcatgatatcaaaaattatacaaagtatgaatttggttacaattttcttctgaaatccccgtttcttttcattatttccatagcaccctaaaaatacacaggtggcaggactagtacactgaagctaaatagtacatgtaggtaaaataaaaacagaacaaaaacccctttccactcagggtcagagtatattacatgagcgagagagacagacgtggagaactcacaaatgctataaccaacaggatctagtttttccacgtgatggagttccaagcttttttttttgttttgttttgtttcgcaaaataaaaacaatacacattccaagagaaatgaatgcatctgttgacacgtctctatttctcatttacatatgtacacacgtcccttgagtcgctgctgttgacacggccctgtgtggacgggtcaggcccgaggcccgtcgggagcagacctgtagctctctgggggatcagggcttccattagggagaaagtattagcagtttct

SEQ ID NO: 5503 - DNA, 569 bp, Homo sapiens
gagagattgcatttctagcagagaattccttcagccttcttccaaagctagcttggaatctacaagcgacttgggagcttctgggaaacatggtggcaacgtctctttggatgttttaccagtcaaaggtcctcagggttctcctcttctctcacgggcggctcgcccgcctccggatcagctggcctccgaagagccgtggactgtcctacccgagcacttgattctggtagctccttctccttgtgacatggcaaaaactggacgtttccagattgtgaataactctgtgaggttactgagatttgagctgtgctggccagcgcattgcctcacagtcacgccgcagcatggatgtgtcgcgccagagagtaaactacaaattcttgtgagtcctaattcctccttatccacaaaacagtcaatgttcccgtgggagtggtttgatctatataacacttgtggacgatgggacagaaggaaaattgtggaaagtttcaaattcgaggaaggatttaactcaagtggaacttttaactcgtttgacctccaaaccatttggaattctt

SEQ ID NO: 5504 - DNA, 713 bp, Homo sapiens
gatcagaactcacctttgatttccagattgaatcaatagtgtgcctacaagacagtgtgctagctttctggaaacatggaatgcaaggtagaagttttagatctaatgaggtaacacaagaaatttcagatagcacaagaattttcaggctgcttggatctgacagggtcgtggttttggaaagtaggccaactgataaccccacagcaaatagcaatttgtacatcctggcgggtcatgaaaacagttactgagaattgttgtgctttgacagttaactctagaaagaaagaacactaccactgcaacattaatggatgcttgaagctgtacaaaagctgcagtaacctgtcttcagttactttgtaatttattgtggcatgagataagatggggaaaattttgttttaagtggtatggatatatttagcatattgaaccacacaagtgcttaattcattgttatgtaatctttgtacatataggcagtattttttctgtgaaacttcatattgctgaagacatacactaagaatttatgtagataatgtacttttatgagatgtacaagtaagtgtcttatctgtacagatgtaaatgttgatgaaaatgcaattggggttaatattttaaggaattctttagtatattcttgggtgtgggctatattacaaaatggggatgctgggcaatgaaacaatacatttaacacg

SEQ ID NO: 5505 - DNA, 700 bp, Homo sapiens
ttcagatcttaggtctcaagggcactttggcgcgtagtaagtgctttatgtaagaaggcagggcaggggggctttttacaggagaaaaaaaaatgacttataagagaaagagcctggagtatttttggaaaaaaaaataatatttttatgttaaaacaattttaaaatcttaaaatggccatcagacatagagagctttgtgtgattcatgttttaaaaagaaccgaagaagccacaggagggcctgagggagcccctggctttcccctcagcctcaggaaaggtggtcaggaaaactctggctggacaagggtcagtcttcggggtcagcagcgagattgctctgcagccagtgagggaggtccccgccatgccggctggaagaagaacctcgcatcttttggtgtgtatgcaccttggcagccagcaggaaagcagcgaagagccgcgcgccctctggcctcaagggagcattggcagaaccataaggtactgcagaagccgtcgaaaccgactgctcggctggattaggcgtgttggctacatctttcccacaaccgtataacgaccgatggtcatttctccaagagcaggcttggcgagtccttgcagagctgacatagaggcgcccgcatgtcacttagtctaacgctgacagaaatgaatgcagaaggaagattttcagtcctgaacgtgaatt

SEQ ID NO: 5506 - DNA, 871 bp, Homo sapiens
  misc_feature (1)...(871): n = a,t,c or g
gccagggcatctctagaggacgctgctcgcccccctctttcattcgggaaactcctgatcagttttgtcggggtttctgggtttcttttcccccaaagtcctagtgccattgtggtgctcgttgtttacctcggactctggacgagtgagagcttggcgactttttggggggagggggcggggagtttgtcgctgcctaggcggtggaggtggctgggggtgccttctgatcttcctcctcctccccctccccccgaacctcttctctcctcacttgctgggaccccagacgctcacagccccgcgtcaatgggcagggagagggtccttgcggctgttgtcagcgagggcagaatcaaaagtggcattttagtgcctttccggggcttttctcgcgaccccctgccccccaccctcgctgtcccccgctagatgccctcgttgggggtgcgaggctgtggggaaaagtttaaggtttgttaatattagtcgcgattgttggcgaggggggtgggggtgattggaagggaggcgaggtggccttcccaatgcgcgttattcggggttattgaagaataatattgcaagtgacagccagaagtagactttctgtcctcacaccgaagaacccgagtgagcaggagggagggagagacgcgaagagaccttttttcctttttggagaccttgtccgcagtgatttttttttttttaagagaatcctcagtcaccacgtcgtttccccagcaccatcacagtgtacagctcataacgggttttgctttgtttttacgatttccccccaacgaatcacttgtcagatcaattttatcttcttcctcctccntgcttcccaccctagtgccgaatt

SEQ ID NO: 5507 - DNA, 168 bp, Homo sapiens
ttcaaatataaaggataaatgaagactttcctgggtaaacaaaagatgagggaattcactaccaccagatgtgtcttacaaaaaatgctacagttctttcaatctggaaaggaaaaggattcttggcctggcaacaaaaaatgtaaattacacagacaatttccaaat

SEQ ID NO: 5508 - DNA, 539 bp, Homo sapiens
  misc_feature (1)...(539): n = a,t,c or g
gaagcgagacgcaggttccgatcctgttgtgtagttaatttctggtgtggtcttgagtaaggtaccccacctttatctgtaaccatctagtcaggtgatctctttagccattccagtgcccgggctctattagagttagttctaaggcattcatacttcttgcttagggcgtttctgtctttgatccctcatccccaggtgctagtgtatgagttgttgggaaagggctttcgagggggtgggggccaatggaaggctctgttgggacggcaccaggcgaggctcaaggctgagttggctcggctcaaggttcatcggggtgtgagccggaatgaggacctgttggaagtgggatccaggcctggtccaggtgagctggaagaagttgaggggcggncctactcactgctcattgcgtcctacctacctcccagctgcctcgatttgtgcgtgtgaacactctcaagacctgctccgttatgtagtatttcaagagacaagggttcttctatcagggtcggctttcagctggatggagt

SEQ ID NO: 5509 - DNA, 570 bp, Homo sapiens
ttttttttttttttaaaatagtgcaatcaaaacctttattaatttttctcattaaactgaaatgataaaccaaatgaatgagaaaagtggcagtaaaagatttagcatgaagtattatttctcaggtaatgtcaagaatattatgaaaatatatacttgcttataactgaatcaaagaaaatgaatgcatttacctttgaaaagcagaggtactgattgccttcaagccttcgggttataggaccttaggctgggagctgatggccccacatagctgatcttctggttttgtaatgagagaaaatggaagagtctctctggaaggaaaacttaggtcatttatctctcaagctttatctattccataatgtatatggaacactaatagttctgcctatctttctttgccagagtagaaaacaggttcaaaataaaatagtctgaattatcataaagacataactaagaatggaatatttaaaattataattcacttaaccagtgaaaactgaacacattaatcttctttagtcggggacctgccatcatcttttgcatattgtatttagc

SEQ ID NO: 5510 - DNA, 628 bp, Homo sapiens
tggtgtgcgtgaatgaggagcttcgccctgcttgaatgggacccctctcagtggtgtcagcttggggaggaggagatggccctggagactaaatacttgtatgctttcttaccctcttaggtctcagccttagatccaaggacagtccaaggaagtcctaagaccatggagttggtgatctgggatctgggtttgctgatatttctcaccgtggtgagttgatgccaagagccagaacccacagccagaggctcagctggtccgtgtttatgcagatgggaacctcaaatcactggtctcacttgtcctttgtttcagaatctcttggtggtgtttgtgggcacgagaggggcagagaatggagagtgaggctaccacatgaagcgtcaccagagctgctccctgctgcctgctcagagcaccccggatccactgttcaatctgcacaagattcggggtccagacatgggagacttcagctgcctcagaggaccgtggacagggaaggccagcctcgcatccctctgtccatgcctggaatgactttaataaccaagagttttatttttgaatttgtagctgtcgttcactttttacccacccattcaataaaccttacagaattgca

SEQ ID NO: 5511 - DNA, 489 bp, Homo sapiens
tggaactgaatgggcttgctatgaaaaggggagagcctgccatctacaggccattagatccaaagccattcccaaattatagagctaattacaactttcggggcatgtacaatcagagatggcaacacttgaatggattacagggactctggagccaaagatccaaggagatgctcttttccttgtcagaacccagattaatcattagcttcttaaggcagggaatgaaaggtgaagtccaagaaacagatgaagagttacctaagtcagtgttataagatgttccatggtaaaagggatttgaagacaaattttggaaatgctgcatactgtatctctcttgaagactcctaaaggtgtcatgaagaaaactgtttacctaagtggttcctaacactgactgaacatcaggctttcctgggcagctttaaaaattctgatgcccagactttatgtggactaattaaatcagaatttctggttgcaaaa

SEQ ID NO: 5512 - DNA, 389 bp, Homo sapiens
ttttttttttttttttagtttttcaaagtacttttattcactttatcttccatatatgttatctcctctgattccagcaataacagcccggtgaggtagccagggcaagtatgtattttacacattagcaggaagggaggctaagcgaggtttatgtaacttactcaggctgaaacactgaagaaaaatttgtgactctcatttcagtgatgttttctgcattattaaaaaatattatgctactcctcactatattatgttgatggttgaaatgtcattataaagcttaatttatatgattctcttgatgaggatgatgaagcaaatgctccatcaactcactagtttacaggggcaagcattttcctacatttcacacataatttgat

SEQ ID NO: 5513 - DNA, 342 bp, Homo sapiens
actccaccctggccagtcgagggatcttagggctatcccgacaataagttcctacaacgaggctgggaacaatgtgatctctttggctgctttctggatgggcttttctgatcattcaaccccaggggggttgggggaaaactgtgaacttgtgctcccagctgaggctacagtctggatttattatcttgtctacctttctcctctccccgggacctggctaagaggcatcaaggtcataggttaaaaggaatcttaaataaggagtatagtgctggggtggatggaaaggggagaactccaatggcctggcttggacttgggttaaaatggcaaaactca

SEQ ID NO: 5514 - DNA, 454 bp, Homo sapiens
  misc_feature (1)...(454): n = a,t,c or g
gcggagccaagacggtcggggctgcttgctaactccaggaacaggtttaagtttttgaaactgaagtaggtctacacagtaggaactcatgtcatttcttaccaatgatgcgagctcagagtcaatagcatccttctctaaacaggaggtcatgagtagctttctgccagagggagggtgttacgagctgctcactgtgataggcaaaggatttgaggacctgatgactgtgaatctagcaaggtacaaaccaacaggagagtacgtgactgtacggaggattaacctagaagcttgttccaatgagatggtaacattcttgcagggcgagctgcatgtctccaaactcttcaaccatcccaatatcgtgccatatcgagccacttttattgcagacaatgagctgtgggttgtcacatcattcatggcatacggttcttgcaaaaganctcat

SEQ ID NO: 5515 - DNA, 558 bp, Homo sapiens
tttttttttttaacatattaccacatccaacttctttattcttgagaaaacaaaaaagtccaaaatcaaaggaaagcacccgttttaaaccctcatatctttctcagggctcactgcagtctggccatatctcaagcaggtctgtccaatggcttggaacatagacttttgcagtgaaactttaaaaacattacttgaattaggattacacaaaaaaaactaaattctaagtgagcacaactatcgctgagaccctgaaatttcaggggaataaacatggttcaaaactcaaactgttcatcaaaataattacgcaggtcagccaccactgcagaaccatcactgctcagaggaattgagtcagcaatgactgatctcatcatctcttcattagcacataagcggttcaacttgggatacgcaaggagtctctgcagaggtacgaaaaatttatctccaacacagaagggtgtgggagagttctctatcttggccttctcaacctctgtgaagactggtccaaagcatgggacagggggcctttggagccaccaatgt

SEQ ID NO: 5516 - DNA, 567 bp, Homo sapiens
ttttttgtccatcaagaatgaataagttgtagtatatttatataatactatatagcaataaaaatgaaagaaagtcacagaagtaaacattttgccatttatataaaattcagaaacatacaaaattaacatttcacttacagatacatacgtatgttgtaaaactataatagacaaatgacaaacacaaaattccaaataattatttgagagggagagggccttagggaacttctaaaatgtcgacaacatctgtatcttaagctggctgatgagtacacagatatttacatttattatccctttatatatacgtttatgtatttttgtagtatgaaatacttcattaaaaaaagagtgaaaatgtaagacttcaaaaatgaagactaccatttatgtataacaataaaattagtgtaaaaaagtatacaaagaaaatgttcaattctttatctttccgtgctctatataatcagtattaatctaaagaccataatcctagtatgaaaaaaataacaagctttgacacaaaatctaagcatctgctttcctggcactcttaagtta

SEQ ID NO: 5517 - DNA, 588 bp, Homo sapiens
  misc_feature (1)...(588): n = a,t,c or g
attcggcagaggctgtctcaaaaataataatcaaatcaagtattttaagtttggctcttctttttttcaagaaaggctttttggatacctagaataccttcatgtatgtggcttgatttctgtttcaggaaaaggggggcgggaggagagacaacagccgtgttccagagtctgtcctgagatgtcgctgagtccagacacttgggctgcacgtgccctgcagatgacaaagcgccggcagctcagcacacgtgcaggaggggttaaagccaatattgagtttttgttcttgttgttttaatctgaacgattattctcctgtaaaaataatttgggaggggcgggtgttgttcnnnnnnnnnnnnnnnnnnnnnnnnnnnnnnnnnnnnnnnnnnnnnnnnnacagtggcgcctgtctaaagtatttttcacaacatgtttgataatcagtgctttaaaaagcagcagtgtcctatgaagtggaaatgtcagttctagagcattggatgtgaagttctggtcatgtcaccttgcgtgtctcaccctggaggagtgaaggtgggcgcccggcgggggggtgtggctgca

SEQ ID NO: 5518 - DNA, 605 bp, Homo sapiens
aatagactctgtcctctacccccaacagcaacctctttcctcttggtccccaaagctctagcctgggtgagcagggctggatactcctatacctagagtcactagccactgcccagtctgtttcaggagcaggcctcagagttcctcaggggttaaagtgggaagaacccgtgtgtgcacattttttgtgcttttccagaactgggtaccatttggcagttgatcaggcaatctcccccgctaccccatttctacccctttgtttccagcctcttttttcctctgcaaccaaggtttcttgtttatccaaggtggggagctgaactgagacaaggtatggaaagggtgcctgggcaggtagcaagcaccttgtagggggtcagaaatgttgcaccttctctgaactcctccattgaccctacagattccccagtccctggtcctgccctttccctcattcactcagcaggcatcagcagagtcccatctatgcgctcctggcctttcagcaaatgctctgtcccctactcccctatctgtgcaggctgaagctatgtgcatagttgggatgagggctgtgttgtctcaacaccacgccgagcccc

SEQ ID NO: 5519 - DNA, 478 bp, Homo sapiens
aagaagatgccaggaaataaatgcagatgaaataacagaataggaaaatcaccaatttgtagctctcggtgacataaccgattcaggaagaaatcatcaatggacactgagctcattaagtgaaagaatgatgagtatctggacagttacatagtaccaaactatctctctacgaagttcttgcctatctcaagtataaaatattaactttacaatgaaggaatcagatgtcactaccttaatccaggggatttaccttaatttctagtcactaacagtgaaacagctagacaatacatgccatctgaagtgatacaatataattatgataaagcctttgatattccacaggaaatattggagaggagataaagaaacaagttaagtcaggagtccccaaagcccaggacacggactggtatcagtctatggcctgttaggaaccaggtgcacggcaggcgttgggagggtgagcagc

SEQ ID NO: 5520 - DNA, 386 bp, Homo sapiens
gcaaggtgggctggggctggggaccggggagtactgggaatggagcctgggcctcggcaccatgcccagagccgccactttccagtgctgcagccagagggaaaggcgtccaccaaaggctgctcgggaagggtcaacacacttgagcagccttagctagactgaccagggagaaagagagaagactcagaagccagaatcgtgaaagaacgagggcacttcgctaagcagacgccacggacaactgcacagcagcacgccagataactcagaagaagcaagcacgcggctgttgcacgcttccgaaatgcactccagaagaaaatctcagtacatctatagcaagtgaagaggccgagttagtcccttagaaacctcccagtggc

SEQ ID NO: 5521 - DNA, 729 bp, Homo sapiens
  misc_feature (1)...(729): n = a,t,c or g
ttttttttttttttcttacttttactggccttttgtgttgtggtctgggtcagtttctgtaaatgaaggacagttctggtcaaaggttttgccaaccttccttcctggccccacttcaaggtctccgcctgtaagaggatgtaggaaattgacctccagaatgtctcttcctaacttcaggctcacagaaaacgtgcctgccagaatgtgccgctcctcaaaggttcccaagggattctaccttcagtctgtttttttctcccacatactccccacccccgtccaaactactgccaccttccaagacccctgtgatccccttcacccctctgccccactttctctctcccagccttcccccaggcccctcctaccccagcagtctgagggacccatcccttctcaggtgacaggtcaaattgtcactcccagtgatttgcccagctgggtgaccattcgcagccacagcagctcacagcaggccctcaccaattccctcncccagggacatgagatgcgttctggaaggcacccaagaggaaaaacagacaaaggtcctttccaattatggaagagaacatgaactgagataaaaaagtcaagacctccagtgacttgacaatcaagtcccaatggtcaggcccaacctgctgctgactgtgggggaacagttggcggtgtgtgcgcagaacaaaacacacaagtcctggaggaaaaaaaaaaatttaa

SEQ ID NO: 5522 - DNA, 433 bp, Homo sapiens
gcagtgtcatatgccctcacatgccatccatatacaaagaatacataaccacctacgtacttccatttcacaaacaccaagtgggttgagcttctccccataactcccccaaaaaacgcttatgatacttgaaaactcaccatttaggtcaattcctttatttatggtataaatcccctatttaatataaatagccctggtaggcataatagttaagaattgttagtctcttttcccttggtataaatatggttatcaataccttatctaagagcaattttaatttggaaaacagcgtgaagaagaaagaaatggaaaaaggtggaccctggagattcaaaagacaagatttttttagtcaaaattttgaacagagtaagacatgacagaaaaattcaggcaacattatgtccatctgcttaatgtaaatata

SEQ ID NO: 5523 - DNA, 452 bp, Homo sapiens
aacaaccagtatccagccgcagaggtggtgaactttggcacctggttcctcttcagcttccccatatccctcatcatgctggtggtcagctggttctggatgcactggctgttcctgggctgcaattttaaagagacctgctctctgagcaagaagaagaagaccaaaagggaacagttgtcagagaagaggatccaagaagaatatgaaaaactgggagacattagctacccagaaatggtgactggatttttcttcatcctgatgaccgtactgtggtttacccgggagcctggctttgtccctggctgggattctttctttgaaaagaaaggctaccgtactgatgccacagtctctgtcttccttggcttctcctcttcctcattccagcgaagaagccctgctttgggaaaaagaatgatggagagaaccaggagcactcactgggg

SEQ ID NO: 5524 - DNA, 375 bp, Homo sapiens
  misc_feature (1)...(375): n = a,t,c or g
gagcttgttcactttttcatcaaaacacgacctcatccatcttccctcacccacatgattgagagctgagacatagaagttctgttgaggattctgtctgtgttcagtgctgtggttgaacagcacgatgagaaaagcagggaaggtgaactcctcagctcctgtgagagggcaccactgaccctcttgggccttcaggtccacagtcacagtccgcagtgggtgacagggttcttaggatgcctgcatggggtctctaaatgtctcttttaaggcacagtttacttcctcaggaatctaggcctggattcccggggtnttttcctgcagcttgcacaaccagcgtnttaagggttttttaaggantctttgggc

SEQ ID NO: 5525 - DNA, 694 bp, Homo sapiens
  misc_feature (1)...(694): n = a,t,c or g
gttcccttattcaatcaaaggtaatgtatattacttccaaagtataggagtattaatttaagctgaccaaaaaaagaggacccagatactcgtttccaaagatgttttgaatccacctattttcaaaaggccaaatttcattttacagctcttgtgaaaccaggcaagcagtgtaaattttaaaatgcagcagtgggatatcttcaaatgtagcagtgagatttttaaaatgtagttgtttcaaaactgatcagtgaccgtctaaaatacgggctccttgaggacatcctgcgcctggttcatcctttttgcactctcaaagtctagcccttcccagatggggacctcagtccccagcccccctacactgccatcccccagatctttagggcagtagggttcattgacaaggttgcaggctacaaacttggcaaagtttatactaacacctcattcccatcccacctcccatcttaaaaaggaaaccgttaagtatcttattctagtgacttcaataaaggaactaatttataagacagccaagaacaattaaagtcataaagggccaaacattttattttcatctaagaaccgtttgcaggggtgnnnnnnnnnnnnnnnnnnnnnnnnnnnnnnnnnnnctgtcttgggccacacgtaaaatacattaactagctgatgagcttttttttcc

SEQ ID NO: 5526 - DNA, 570 bp, Homo sapiens
ctttctaatcagagtaaaatctatctctcaatatagatacatgtttgcatttactcccaattgagttgtgctttgcctggagcaggatctgctactttaagacaaaattttattgcccttgagccaaaggattaattacatccattgatagacaaaattccagtcatcatagagattctgcctgctgtacagttgctctatttttccttgattgaagttgaggcagatgtcttttgcctttcaagcagagtattcaaacgaggctctattagcagaggaactaaaagctctgcatctcaaaacttgaaggcagaatgggtttcatgccagttctttctgcttcaaccacgtggtccattgtgggaaatcttttgtacacagcagtgctcaccgagcgaaagatgagcagggaggtgagattgacgtagcgcatcagcgtccttctaagcaggcgcccgtgctcgtcgcttccgtgaacactgctagagatgaggaacattagcctgtctggccagggcaaattcacaaactggttccaccatcggttcactaccagagtaacagtcgagc

SEQ ID NO: 5527 - DNA, 584 bp, Homo sapiens
acctctgagctagagtcttgtagtcacttcctggtgacccctgaccccgttgatttccgtccgctaggttgctctcacccatggcgtttgctggttatgagatttgcggaacgtgtggtggtggtaaagggcaccaactgttgtcagcctgcatgtgggggtctgaggtctggctctacagcttgtaaaatggaaataataatgcccagaggatgaaattaggccacataggccgcttggcatcatagtaagcactcagtaaaggtcaattgttattaaccatttttatacagcgcctttgtttaggtgcagagctttatcagagccaaaagatctctgcgctctgttggaaaagatagttcctgcagtaattattagtaccccatttaatggctaagtaattatagctaacagtgctaggatttctttttcatatatgacttcatttgaacttttcagtactatttgttgatttcataatttttcgagcactgctgttgaaactgcctttgcaaaattacaactgaggaaattatgatagtggaagaaatcagacttaaccgactccatcttgcttctaacct

SEQ ID NO: 5528 - DNA, 973 bp, Homo sapiens
ttttgtttaaaaaaagcaaatctattttcaaattgtgcaatgtctgaatggaattggcaaatgaggtgaggagatggggtaactgcctttaggtcccaaccctgtgcctgtccctctgccacagtggcttccttccatcctattccccagtcacgaaagggctggtccccagagctcacccagaaagcatcttgccgggggcagggcattccctcggaagtcctggcctaaggattttattacactgtctgctcctgatgaccctctgcggttgtcaggcgtgaatcctctggaaggaactgtttgcagttgtatgcacaaaggagacccatgcaggcatgcaccccagatgggctgctagactacccctcttcatcagcctgctggaaagagcagacagcgtaacagcagcctatgccaaacagcactaaggatgtcagtgtacgagacggtgcgaagcccagaggaggcggcttgggatcctctgggccatccctggccctgttagcacagacacatacaagttccttggacttgtcacactccttttcacttgatccctctctggcctggggtcacatttatgacatcccccctctgcaacctttctctctggggggctgtaccaaagggcatgggtacctcagtctggtatccagactgtgaaatcagcctctgggccaaggagggtcctacagacaaggtggcatctcaacctcacccaagaaacccccgggactttaccccagcaggctgccactggggcaccgaactaagccagctcagccttccaagctgcttagcctttgtcaaccatcaaagtggggaaagggtctctggccttgcaaggatttgggcaggatggaagtctttgtctaggtctgaaatcaagggcttgggaatctagagcagagctcctggccagcgtttgaagcctggcctcccacctggggcatttactgacaccctgtcg

SEQ ID NO: 5529 - DNA, 401 bp, Homo sapiens
  misc_feature (1)...(401): n = a,t,c or g
ggagagaaggagggaagaaagaggagagagagaaaaagaaagggaggaggagcaggagagagaagcctgtctcgcctactatagaattttcttctctcctctcaaaacaagttccttacacatttggctgaccgcatggtacacgtggctggtgtcagggttctgtctgaactctgtgattgaggagaccaacctgcaggagccactttgaagatgcttactactgacagggcaggatcccatgaggcaggcatttcagggctaccttgtccttggaattcacatttcttggagccctgggaaggggaccagctgtttcagcttctgcctgtcttgtggaacaggttgcaatcctttagggaaagggaagtattgacttttttgcttncattctacaaagt

SEQ ID NO: 5530 - DNA, 664 bp, Homo sapiens
ggagcactgcaggtttcctcctgaaggctggctccggctctccctcaataatggcagcatcacccacctggtgatccgacccaacggccgagttgcgctcaggaccctcggggacacggggttcatgcctcccgacaagatcactcgatcctgagggctccggcctctccttccctctgtcctccctgcacaggccgcacacacttaacgttttgttcccaaggagaccggcggaaagtagaaacctgcaatgctgcatctgggaactgacttgtgaccaggctgagaaggggagagttgggatcagacagcctgacttctctgcagggttttatacctgaccatgaacccccaggatggcgtggggtttaaggtgaaagcgtctcacgcacaagtcaggcctgttgtggggacttgaaagaggcctgacccagaccaccatgttcgcacccacagctgacccgtgctgagggtccaggctccatgtgcaaagccggtcaggcacgagggcgactgaggcacgtggatgaggagggcacccaggttctgttcacaactcacttcacttcatacatccttttaatttcttaaaaccctcttgtcccttaaatatttgtcaattaaagattttctggctgggcaaaaaaaaaaaaaaaaaagtttt

SEQ ID NO: 5531 - DNA, 321 bp, Homo sapiens
gtacccatcctgtcattatgtcttatggagaattttctttcgttcccaacaaaacaatgaaactcacaaaactgactgtaataatttgggtaacatgaatttaaagagcaatcaatacttaatgttctcagctctgagtgcacacattgtaagtctgaatgatgccaatgatatggccacttagataagtaaagtttgggagcatctcaaatagtttttttattctctgggtgcaggatgagcttcctagagtctgatgtgatacctatttgacgcttttacaaagaatcaatagtcttcctcccttgaggtgtgagcagg

SEQ ID NO: 5532 - DNA, 1115 bp, Homo sapiens
ctcctgaccacatgtggtacacccaccttggcctcaattatgtgcattttggtatatttacttgtatttcaacatcttgtgagtttgaaaaacctgaaaggccagaatgcttccttttatttctcaccatttgggcagcacctaagtggttttgtaaaatgcagcatctggtgctgtgggtctctctcaggccttgagggacacttccttcctccccactcgcctcctctccactagactttggttcctagagggcgtggggccgggtctgaggttcttgcctgccttccctcccattggtctttggttgctcatccctctaactgcaccccttcttggtccttcctccacagacttcagataatagataagtcattagcaaaccagaccgaatctttagggtgaagagctccccaaagccatctggtgaggtcattgtggggaccagggactgattatttgtcacctggatcacaaagatgggactgtctgctcaggctggtggtgacaggatcctgacccgtggtcctctcccgctccctctgctccaccaggacacatgtataggacactgtgctgtgtgcagtggagaaatctccctgggccaggggaaagttcagacagtgcctctagattgtgttttgcctcctccaatgtagagttgacatctggaccccagagcccagcagggctttctgtcagacatgctagggtggtagaaatgggccctccaggtccccctgcagtgcactgggcagagacctccggaaagccggcagcgggagcgcttcctgggcagcttcccccagcacagtgttcccaaaccagtccatccggaaaacagtctgtacagcaaatgctgtgtgagatcttaggcttttcactttttttgttttgttttgtttttgaaagaaagaaaaaaatacaattaacaagcctcttttgtaaatgggtttcctttctatgtataaaatcgtggtggtcccttgtttttacatgttcatgctgtgtaattttgagatgttactgagatatgttctgaacataatgtgcatttttttctgtacagatgaaatgggagaatttaataaagagtttgcaggtttttacttgtt

SEQ ID NO: 5533 - DNA, 415 bp, Homo sapiens
agactgcattattgggaaaaggccagaagaagaaaatgtctataataaactcaccattgtgcaccatccaggtggtaaggaaactgcccacaatgaaaataagttttataatgtacacttcagcaataagcttcctgctcgaccccaagttgaaaaggaatttggtttctgttgcaagaaagatcattaaagaaggttattataatgaaactcacgaatctacggacattttgctttcagggtgaagcaagcttgaatttggattgcctgctctctttaaagcgaattcatactatgacagcagaaacaaaacttcagatttcagaatttgttattggcaaaatttattctcattatacctgcttcatatgggtatattactattaaaacagaataccataaaaaaaaaaaaaaa

SEQ ID NO: 5534 - DNA, 311 bp, Homo sapiens
aagaaaggagccaaggcaaagagggaccactgtgctcatggacccatcgctgccttccaaggaccatttcccagagctactcaacttttaagcccctgccatggttgctcctggaaggagaaccagccaccctgaggaccacctggccatgcgtgcacagcctgggaaaagacagttactcacgggagctgcaggcccgtcaccaagccctctcccgacccaggctttgtggggcaggcacctggtaccaagggtaacccggctcctggtatggacggatgcgcaggatttaggataagctgtcaaccagt

SEQ ID NO: 5535 - DNA, 835 bp, Homo sapiens
  misc_feature (1)...(835): n = a,t,c or g
ggtccggcacactggacgtcctgtgattttcatcaccccagcttctttcttggagctgctgttgcactaatagacaataggccatgtcttccgcttagcagcctgtcttggtttctagttttccctgggctttagtggtatcttcctaacaataagcatagatagacaggggccaatgagtcctgaagtcatttaatttaatttaangttaattaattaatttgacagggtctcactctgttgcccaagctagattgcagtggcacacgtcacggctcattgcagcttcaaactcccgaggctcagggtgatcttcctgcagggctcacgccatcacacccagttaatttttgtagagatganggttttgccatgttgcctaggctggctcttgaaattcctgggctcaagcagtccaccccacctttggccttcccaaagtgcctgggattaccaggcatgagccactgcgcctggctctagtcattttaatagcaagtatcctggtataatcatgtcccagcggccttttctcactggccttcaggtttcaggttccccatctgttaaataagggagctttgcccctagttatctgtaagggacacttcatcttgaaaatgcaaatgccttggcctatttttgtaggcctgggagctaaggatgttttttacatttttaaagcattgtttggaggggaaaaagagaacatgtgacagagacctcatctagctgactcctgtgttagaccttaagaacagcctgaaatggggtggaggaggtttctcagtggatatatttagtttgcagagtccttccttcccctgagggctac

SEQ ID NO: 5536 - DNA, 401 bp, Homo sapiens
gcacagtgatcattttaaaaaggtttcgattctgaaatgaatggatacttttttggtctaaaggtgctaactcagctccttcactgaggtccctggttcttagctcagtgtggttgaggtaagtgttgatgttatcctgtcacttactagtaggagccagggtgctctatttgcatcccagctctacctcttactggatttggggaaagttgcttgacctccacgaacttcagcatccttgtatgtaaaagcaagaaaataaagttcatttagcaaatatttcataagatcccataggctctaggcattctaggagcaagtgtacaaagtggaataaggaaaaaaccctgccatcagggagccacagtattggaggagggaggcagacaggcaggcatcac

SEQ ID NO: 5537 - DNA, 1518 bp, Homo sapiens
cggcacgaggcccgataagccgagaacaggagcaagaacgaggaagaagaaaccctaggcagacaccaggccaggcttgagagacagaactcctgcatggctcacacagactgggggggaaagccccaccccttccccttgtaaaaaatgtatagactcagtgcacattttgaaatgttttgtatattatatgttgagatttttcagatcttttagcccagtcatatgttctcacgtctcctactttttgtttctcgtataaaactttttgatttgaaccaaaacacgtgaagatgacaacacacaccaattggatgataattgtagcgggggcggtggggggggagaagtccacgccatccatcatgcaaaattctttcagatgaggtgggaaggccgtgtacatagttatgtaaaaagagattgcttcatgagctaatggttcatatatgcaaaagggtaagatgaaagctttactttgtacaaatgtaaatagataaagtaacataatacattaatacttcttaaaatgtgctatttgcaaacttacttaatatcagtgaacacagtcggctaaagctgtgttcccatatattgttatagacagctaaacccttcaactatgcaatgaatgttcgggcttttcacaaaagcccgcctaactcaaaggagccttttcaaatccatttacagcatacttaaggtcatattttccctgaacaagcgcttacgtgatatgactctgttttccttgcttgttttttttcaaacggagaaacatcctgttttgcaaattgggaccccaggctggaacttagcatctgaagttgccgcttgtgggctctgggggaaagtgtagccccggagaggtaactgaggacatgagcaaccagtgccagggagggtgggatttgccagatgccaaaatcaggggacgggtggtggtgtctgtcagacacacacaggtcgccagtgacttcacacacacctcatgtgagaaccatgccttttttagtgtgtcctatttcatacctgtacacacttcctcgttttgtaatgagatttacttacacccaaacagatcctgaaagaaagcttcaagttttctcagatgatggatatgttttcactgtattcaataactgacggatgtaaggtgcacgtttcctgatgatgtgacgcactgtattccagctggtgatcaagtctgggaacagccgtaacaggtcaaccttgtggagccatcgcgagttagagggtgaaagatggcagaaaaaaaagtcttgtgtgtgagtgtgttttttgagtttgcatcaatcttaatgtctcttcataatacttttataatacattaagcctcttgtctacatatttggagagaatatgactttactagcagagaaatacaatatatcttgtctactggactgtaaaatatatgtatgaaataaaattagttccatttggtcttctagtatattaaagtgctatctgacgttgttatcctgtttttgcaaa

SEQ ID NO: 5538 - DNA, 142 bp, Homo sapiens
gcacttctactttgtattaaaacagttttggttattcaggtaggaagaagagaaccaaaccaggctgtttccagttgtctggggtttacattatgttacctctcagactgttagtgaaatcagggagactagtgggttttta

SEQ ID NO: 5539 - DNA, 425 bp, Homo sapiens
gaaatgagaggattttagggaatgtgtctaacctgcagcagtggaaccagggggaactgtgtcgttctataacagatcccttggtgtctttgttatagccagaattcagggttggatgaaccatattttcggacccattgtgatattttatttttcttgttctgttaatctggaatgttaggtgttaaaaggaagatggtagttgtaaaactagcaagacattttctaggactcctgactggtggcatgtggcatggcaaaaggagatagctcccttttctggctgtagggagacaacttctcaaggcccaggaaagccagcatggcccccagggagccaccttgaggaatggaggcccacatgagctaccatccttggtggtggctctgcacctagagctccaaccacctgccacaagcctatg

SEQ ID NO: 5540 - DNA, 590 bp, Homo sapiens
aattgtaaaggtaaagaaaagaacattcgactattctaactttaggaaaacctaagttaaataatgatttacctatgtgactctccactaattttctcttgcaaatcatcaccccttaattaactgacatccccaaggcagtcaactcaagctgtagctttaaccacagaggttaaacaattcacagtcctgttgttgctgtcagaaacccaagttacactgtacctttgtctaatcaatggtgccctagtttggtgggagatggagaggaagggacctgttggcaaggaaacagctgcttccttcctgaacaagggaaaaccagtaaggtgacagatgggcagagcagaaaagtagccaaaaattgctgtggctcctgtttggcaataatttctggaactgaggcacaactgaatattttaaagtatatcaacaattgagagagtattgtttacctgagtgcgccaaagttcaacaagccttcccacacgtttcccacatttgaaaaacttttaagtttgcagtagtacaaagagcttagccttagcctatggtacagtgggcaaagactggcaaggcactgtcccatt

SEQ ID NO: 5541 - DNA, 595 bp, Homo sapiens
ggcggcagcagaggcagcagcagtagccaccactccgccgaggccgcaaccccggctcggcctccccaggccccgccgctgccgcagtcatggctgctgatggggtggacgaacgctcgcctctgctgtcagcatcccactccggaaatgtcactcccaccgccccaccgtacttgcaagaaagcagccccagagcggagctcccacctccatatacagccattgccagtccagacgccagtggtattccagtaataaactgccgtgtgtgccaatcactaatcaatttggatggcaagcttcaccagcatgtggttaagtgcacagtttgcaatgaagctacgccaatcaaaaaccccccaacaggcaagaaatatgttagatgcccttgtaattgtcttctcatttgtaaggacacatctcggcgaataggatgcccaagacccaactgtagacggataattaaccttggcccagtaatgcttatttctgaaggaacaaccagctcagcctgcattgcccaatcccaaccagaagggtacaggggtcgtgtgttggggcactgttggggaacacattccctttgggatgggac

SEQ ID NO: 5542 - DNA, 543 bp, Homo sapiens
atttgtagagcgaatttccatttggcccattatttgtaactgtgtaactgctccaagtgccagaattgcttacacgttaaagcagcacctttccatttgcccacatattcttcttgcacaccccttccattactgctgaataggacattgcatgggaagagtacagaggtggcagaatgaagctagagtgggaaggactaaagactgagccccagagtgctcccagcaaccgccacgtacaaggtctgaaatgacaagggcaagagtgagataggaaactgtgtgtgaaaggaaagcccttgcagtatttctgcctccctttctttctgcctttcaccccactaaatgtacgttattgaatgccagtacttctctagtgggatgcacacttgttaaatagtgttaagagatgtggagatgagatatacccctttggatgtagaattattcatttggttttgtttccatacttcaattataggaatccaagttaattttgatggactaatgtggggtttattattttccaggtccaaaggcttt

SEQ ID NO: 5543 - DNA, 116 bp, Homo sapiens
gcggcacgagcaaaacacaaaaacacaaccacaaaaagcaaacaacacccccctcccacccaaagaaaaagaaatggtaactacctgggtgacagagcaatactccatctcgaaga

SEQ ID NO: 5544 - DNA, 5555 bp, Homo sapiens
cttacataaagggacaattggagcctgagaggtgacagtgctgacactacaaggctcggagctccgggcactcagacatcatgagttggtccttgcacccccggaatttaattctctacttctatgctcttttatttctctcttcaacatgtgtagcatatgttgctaccagagacaactgctgcatcttagatgaaagattcggtagttattgtccaactacctgtgggcattgcagatttcctgtctacttatcaaaccaaagtagacaaggatctacagtctttggaagacatcttacatcaagttgaaaacaaaacatcagaagtcaaacagctgataaaagcaatccaactcacttataatcctgatgaatcatcaaaaccaaatatgatagacgctgctactttgaagtccaggaaaatgttagaagaaattatgaaatatgaagcatcgattttaacacatgactcaagtattcgatatttgcaggaaatatataattcaaataatcaaaagattgttaacccgaaagagaaggtaggcccagcttgaagcacagtgccaggaaccttgcaaagacacggtgcaaatccatgatatcactgggaaagattgtcaagacattgccaataagggagctaaacagagcgggctttactttattaaacctctgaaagctaaccagcaattcttagtctactgtgaaatcgatgggtctggaaatggatggactgtgtttcagaagagacttgatggcagtgtagatttcaagaaaaactggattcaatataaagaaggatttggacatctgtctcctactggcacaacagaattttggctgggaaatgagaagattcatttgataagcacacagtctgccatcccatatgcattaagagtggaactggaagactggaatggcagaaccaggtactgttttgaaatgacttccaactttttattgtaaagattgcctggaatgtgcactttccaactatcaatagacaatggcaaatgcagcctgacaaatgcaaacagcacatccagccaccattttctccaggagtctgtttggttcttgggcaatccaaaaaggtaaattctattcaggatgaatctaagtgtattggtacaatctaattaccctggaaccattcagagtaatagctaattactgaacttttaatcagtcccaggaattgagcataaaattataattttatctagtctaaattactatttcatgaagcaggtattattattaatcccattttatagattaacttgctcaaagtcacattgctgataagtggtagaggtagaattcagactcaagtagtttaactttagagcctgtcctcttaacaactatcctggttgaaaagcaaatacagcctcttcagacttctcagtgccttgatggccatttattctgtcaaatcatgagctaccctaaaagtaaaccagctagctcttttgatgatctagaggcttctttttgcttgagatatttgaaggttttaagcattgttacctaattaaaatgcagaaaaatatccaaccctcttgttatgtttaaggaatagtgaaatatattgtcttcaaacacatggacttttttttattgcttggttggtttttaatccagaaagtgctatagtcagtagaccttcttctaggaaaggaccttccatttcccagccactggagattagaaaataagctaaatattttctggaaatttctgttcattcattaaggcccatcctttcccccactctatagaagtgttgtccacttgcacaattttttccaggaaagaatctctctaactccttcagctcacatgctttggaccacacagggaagactttgattgtgtaatgccctcagaagctctccttcttgccactaccacactgatttgaggaagaaaatccctttagcacctaacccttcaggtgctatgagtggctaatggaactgtacctccttcaagttttgtgcaataattaagggtcactcactgtcagatactttctgtgatctatgataatgtgtgtgcaacacataacatttcaataaaagtagaaaatatgaaattagagtcatctacacatctggatttgatcttagaatgaaacaagcaaaaaagcatccaagtgagtgcaattattagttttcagagatgcttcaaaggcttctaggcccatcccgggaagtgttaatgagctgtggactggttcacatatctattgcctcttgccagatttgcaaaaaacttcactcaatgagcaaatttcagccttaagaaacaaagtcaaaaattccaaggaagcatcctacgaaagagggaacttctgagatccctgaggagggtcagcatgtgatggttgtatttccttcttctcagtactgcagactatgccatgttcaaggtgggacctgaagctgacaagtaccgcctaacatatgcctacttcgctggtggggatgctggagatgcctttgatggctttgattttggcgatgatcctagtgacaagtttttcacatcccataatggcatgcagttcagtacctgggacaatgacaatgataagtttgaaggcaactgtgctgaacaggatggatctggttggtggatgaacaagtgtcacgctggccatctcaatggagtttattaccaaggtatgttttcctttcttagattccaagttaatgtatagtgtatactattttcataaaaaataataaatagatatgaagaaatgaagaataatttataaagatagtagggattttatcatgttctttatttcaactaagttctttgaaactggaagtggataataccaagttcatgcctaaaattagcccttctaaagaaatccacctgctgcaaaatatccagtagtttggcattatatgtgaaactatcaccatcatagctggcactgtgggttgtgggatctcctttagacatacaacataaatgatctggatggattaacattactacatggatgcttgttgacacattaacctggcttcccatgagctttgtgtcagatacacgcagtgaacaggtgtttggaggaacagaataaagagaaggcaagcactggtaagggcaggggtttgtgaaagcttgagagaagagaccagtctgaggacagtagacacttattttaggatgggggttggatgaggaggctatagtttgctataagcttggaatggtttggaacactggtttcactcacctacccagcagttatgtgtggggaagccttaccgatgctaaaggatccatgttacaataatggcattatttggaaatcccagtggtattccatgaataaaaccactatgaagataatcccactcaacagactctccgttggagaaggacagcaacaccaccctgggaaagccaaacagtcagaccagacctgtttagcatcagtaggacttccctaccatatctgctgggtagatgagtgaaaccagtgttccaaaccactccgggcttgtagcaaaccatagtctcctcatctaccaagatgagcaaccttacctcctgatgtcctagccaatcaccaactaggaaactttgcacagtttatttaaagtaacagtttgattttcacaatatttttaaattggagaaacataacttatctttgcactcacaaaccacataatgagaagaaactctaagggaaaatgcttgatctgtgtgacccggggcgccatgccagagctgtagttcatgccagtgttgtgctctgacaagccttttacagaattacatgagatctgcttccctaggacaaggagaaggcaaatcaacagaggctgcactttaaaatggagacataaaataacatgccagaaccatttcctaaagctcctcaatcaaccaacaaaattgtgctttcaaataacctgagttgacctcatcaggaattttgtggctccttctcttctaacctgcctgaagaaagatggtccacagcagctgagtccgggatggataagcttagggacagaggccaattagggaactttgggtttctagccctactagtagtgaataaatttaaagtgtggatgtgactatgagtcacagcacagatgttgtttaataatatgtttattttataaattgatattttaggaatctttggagatattttcagttagcagataatactataaattttatgtaactggcaatgcacttcgtaatagacagctcttcatagacttgcagaggtaaaaagattccagaataatgatatgtacatctacgacttgttttaggtggcacttactcaaaagcatctactcctaatggttatgataatggcattatttgggccacttggaaaacccggtggtattccatgaagaaaaccactatgaagataatcccattcaacagactcacaattggagaaggacagcaacaccacctggggggagccaaacaggtcagaccagagcaccctgcggaaacagaatatgactcactttaccctgaggatgatttgtagaaaattaactgctaacttctattgacccacaaagtttcagaaattctctgaaagtttcttccttttttctcttactatatttattgatttcaagtcttctattaaggacatttagccttcaatggaaattaaaactcatttaggactgtatttccaaattactgatatcagagttatttaaaaattgtttatttgaggagataacatttcaactttgttcctaaatatataataataaaatgattgactttatttgcatttttatgaccacttgtcatttattttgtcttcgtaaattattttcattatatcaaatattttagtatgtacttaataaaataggagaacattttagagtttcaaattcccaggtattttccttgtttattacccctaaatcattcctatttaattcttctttttaaatggagaaaattatgtctttttaatatggtttttgttttgttatatattcacaggctggagacgtttaaaagaccgtttcaaaagagatttacttttttaaaggactttatctgaacagagagatataatatttttcctattggacaatggacttgcaaagcttcacttcattttaagagcaaaagaccccatgttgaaaactccataacagttttatgctgatgataatttatctacatgcatttcaataaaccttttgtttcctaagactagatacatggtacctttattgaccattaaaaaaccaccactttttgccaatttaccaattacaattgggcaaccatcagtagtaattgagtcctcattttatgctaaatgttatgcctaactctttgggagttacaaaggaaatagcaattatggcttttgccctctaggagatacaggacaaatacaggaaaatacagcaacccaaactgacaatactctatacaagaacataatcactaagcaggagtcacagccacacaaccaagatgcatagtatccaaagtgcagctg

SEQ ID NO: 5545 - DNA, 345 bp, Homo sapiens
  misc_feature (1)...(345): n = a,t,c or g
gcaaagtgttaggattaccgatgtgagctaccgcggctggccaactctgcctcttaaattaaaaaaaaaaagtaaagaaaaaaagattctggaatagaccatcaaagcaaatgcaaaagctggcccctggttggcagtagacaagacactgggcctgcatcaagactctgtgtggcgcatcctggaangagaggtttgggagagggagttagaaaagggggaaacactacaacagccacaaccctggaggcttaagtttcaccccaggtcttcatagcaatcttgttttgtttttgatctccaaaaatggggtcagcctaggatttatgagatacctccctcaca

SEQ ID NO: 5546 - DNA, 664 bp, Homo sapiens
ggagcttggttgctcacagacagcatgggagctgtcacagaggaagctgatgaatggaccgctgtggggagactttaaagtagaacagtgataagggagggcaggatggtggggatgcagaagcagcagccagagagagacggactggggtgcagacggagtgtggaaaacgcataccttgaaatgaagcatccagcagatggggtgagtggatacagctcaggagattctcccaggaatagcagggaggcgtaaagagagacaacgtacagagatagatgaatggaaatgggtaagggaggtgttcattcacatccatctaactgcaaaatacaaaagtaagaagtcattgacatgaagcaacgacgaccaagacgttctcagatctaaaggtgaatgatctcagtcagcctggaaatgcacaaggtggaaaaataacataaaaaagccataagaccttgaagaacatcaatgtcaaagataaattctaaagtcccagagaaaaaagaatgggaatcaaattgacctcagactatacgtgagaaacacggagagccagaaaactgtgatgttccatcctcagagtttgaaggaaatatttgaaggctgaattttacatccagctaaactatcaaaggcatgcaaagtccatgttattcttagg

SEQ ID NO: 5547 - DNA, 836 bp, Homo sapiens
ttttggaaatagaaattttatttacttcaaattaactgtactttactcaaatagaaaagaataattttcacattatgaagctacacaattccaaaatacacatgctgaggctctttttaagtccgaattgtctagtaattacaaaaaagtgaagagtttacagatatacaaggaaataaaggcgaattattgcaaagaaaacaagtttaatttcactttgaatgacaacgatttttctggaaagcagatacttcactcctttaagtttccacccaagccacaataatttcaaacggtcttgcggatgacccagctggtcactcttgtttatgtggggactggaggtaatgagagccaaaaaaagtgctataaacctaatttggctagagcaagttcacacgacacgaccgtgctttaaaaacttgctctccattatgtacttccttccatcaggttggggaaaaaaaaatggtggggatggtgagtaaacacaccagtggtttcatcagaggggaactcactactcaggaggtgacggtgacgtggtgccggtccctgaagtacgcgcacaagctccggaggttgcgggagcattcatcgcccctggaccccgcagtccccctcggactcagggccagagccttctgcgaagcaacctagccccagggaaacggtagcggccgcagaagccccgctctctgtaacggccgcggaggagcagcaagcctccctgtgagtcggtgggagacaagacggagcggcggtaagggcggtagggaagtgaagcgcctctctccaccttgttagaagcgcgctgaaagcggcctgcctacccc

SEQ ID NO: 5548 - DNA, 1654 bp, Homo sapiens
ggctataagcgcacggcctcggcgaccctctccgacccggccgccgccgccatgcagccctccagccttctgccgctcgccctctgcctgctggctgcacccgcctccgcgctcgtcaggatcccgctgcacaagttcacgtccatccgccggaccatgtcggaggttgggggctctgtggaggacctgattgccaaaggccccgtctcaaagtactcccaggcggtgccagccgtgaccgaggggcccattcccgaggtgctcaagaactacatggacgcccagtactacggggagattggcatcgggacgcccccccagtgcttcacagtcgtcttcgacacgggctcctccaacctgtgggtcccctccatccactgcaaactgctggacatcgcttgctggatccaccacaagtacaacagcgacaagtccagcacctacgtgaagaatggtacctcgtttgacatccactatgggctcgggcagcctctccgggtacctgagccaggacactgtgtcggtgccctgccagtcagcgtcgtcagcctctgccctgggcggtgtcaaagtggagaggcaggtctttggggaggccaccaagcagccaggcatcaccttcatcgcagccaagttcgatggcatcctgggcatggcctacccccgcatctccgtcaacaacgtgctgcccgtcttcgacaacctgatgcagcagaagctggtggaccagaacatcttctccttctacctgagcagggacccagatgcgcagcctgggggtgagctgatgctgggtggcacagactccaagtattacaagggttctctgtcctacctgaatgtcacccgcaaggcctactggccaggttccacctggaccaggtggaggtggccagcgggctgaccctgtgcaaggagggctgtgaggccattgtggacacaggcacttccctcatggtgggcccggtggatgaggtgcgcgagctgcagaaggccatcggggccgtgccgctgattcagggcgagtacatgatcccctgtgagaaggtgtccaccctgcccgcgatcacactgaagctgggaggcaaaggctacaagctgtccccagaggactacacgctcaaggtgtcgcaggccgggaagaccctctgcctgagcggcttcatgggcatggacatcccgccacccagcgggccactctggatcctggggcgacgtcttcatcggccgctactacactgtgtttgaccgtgacaacaacagggtgggcttcgccgaggctgcccgcctcttagttcccaaggcgtccgcgcgccagcacagaaacagaggagagtcccagagcaggaggcccctggcccggcggcccctcccacacacacccacacactcgcccgcccactgtcctgggcgccctggaagccggcggcccaagcccgacttgctgttttgttctgtggttttcccctccctgggttcagaaatgctgcctgcctgtctgtctctccatctgtttggtgggggtagagctgatccagagcacagatctgtttcgtgcattggaagaccccacccatagcttggcagccgagctcgtgtatcctgggggctccctttcatctccaggggagttcccttccccgggccctaacca

SEQ ID NO: 5549 - DNA, 76 bp, Homo sapiens
tggaagaattaattaaagatctttaattaattcttccattctggaagaattaattaaagatctttttttttttttt

SEQ ID NO: 5550 - DNA, 414 bp, Homo sapiens
acatgtatcaagaaccactgccctgttactgttcacgaatctgtgcattatgaagacaagatattttaatgcacttttcctacaggtacggaatttctgtgctacataaaagagaatatgggtttacaagctgattcttattctaggatggaaattgggtaaacatatttttatataggggattctctttaaaaatttttttatccacttctgtttattagcatatatatggctgatgaataggttttaggaatagccccagtaggtgcaaataatttaaattagatgcaacgtataatatttatactccaactgaataaattgactataacttttatggactctgtgccacaacttgtcaagtgtttgaatgaaaaaaagaaaaaaaaaaagatctttaattattcttccagc

SEQ ID NO: 5551 - DNA, 729 bp, Homo sapiens
tttttgcagcttccactctttatttccaaagaatcagtgtcacacatgcagatcacaaagcgggtctccctgtgctgcttccttctgtgttttctagtctctcccccaggggctgcccagggccctcaggaactgagtgtgggcaagacactgctgggccagagggcacgacgcccacgtgggcccgtattgcccaggccatttggcagtgcagagcccccccagcctccagcaggagccccctggcatgagctctcccctcaggggtcctgagcaacgtccctgccagggctggtgggtggcagcgggggggcagacacctcgctgaggtcctgcagcagagcttgcagccgctgcaggctggggtgcacgttttcctccagccactcctccacggcatccgggtagaaagccagctgcagggcaccttccagctcctgcacgagggtgctccactgtgccaggaggctgagcgctgcgggctggatgtgctgaaccatgaccgggtggatgagcttccgctggcggtggtaggggctgaaccagccagtgacatacctgttgccctccagcagcgcatccacagagctgcgcagatggaggctgacttgtgtgacaagggcaaggatgttgctgccagggaaggagccggccccctccctaacagggtccgttttttccaggctggaaatcccgagaaggttctccactttcgctttaacatcttcc

SEQ ID NO: 5552 - DNA, 335 bp, Homo sapiens
ttactatcagacagcccccaaagcagattacagccaaggtgcaactcagtatactcaagcccagcaaactcgacaagtgacagccataaaaccagccacaccaagtccagctaccactactttctccatctatcctgtatcctccaccgtacagccagtagcagctgcggctactgtggtgccatcctatactcagagtgctacttacagtaccacagcagttacatattctggtacgtcttattcaggttatgaagcagcagtgtattcagctgcatcttcctactatcaacagcagcagcagcaacagaagcaggcagcagcagcagctgctg

SEQ ID NO: 5553 - DNA, 295 bp, Homo sapiens
aaataaagtaggtaaaaggcccctgccataaagcattaaccccacctctgtggacaaagatagttaggatggggtttagaatgcatttacttatgggtcgtggttttccttccaatctggctaacatcagcttaagcttccttaagtaatttcttggtcttcctaactggagctagaagtttgagataaacatgatgaactgttctattctaaaaaaaattagggaacaatgcatattactagaactagtttattttattaagaaataaattgcagccgggcacgtaggcttgtg

SEQ ID NO: 5554 - DNA, 402 bp, Homo sapiens
  misc_feature (1)...(402): n = a,t,c or g
gaaactcagaaggtacagaagggaagtatctcccagccaccctgttgctctctcctgagttttttatgaacccttgcacacatgttttatgtatattatcatagtacgtgcacacacacacactcatgtttcctctctctacagaaatggtaacatattaaaggtactcttctgtaccttcacagtagaagtacctaataccctatgtaggacttggccaacaccacagccaggtaagggcagggcaggcacttggcctccaagctctgcgtccagtgcttgctccccacagtggcccccaactcacccacagcagctgactcagccccaggctgntntaacaaccatncccnaaagcngcgggaaatnggcatnctngaattttggcnaganaaggccctc

SEQ ID NO: 5555 - DNA, 387 bp, Homo sapiens
  misc_feature (1)...(387): n = a,t,c or g
gggacttgtgctcctagcatttgtaggtgacgtgttgatctaggtctgccttttttgtgttcatgttagtcactaacaaggggggtttctagtgcttatggaccacatggcaattaaatgcccatatattgccctgaaaccatctggtttaacttgtccctcaatcctagaagaaacctgacaatgggattttcacatttctctaaggaatatgttagtaagttattccttaagcacatagattccatccagattattagtgcctttttccccccagctcaattttagagataaaaagagctttagacatggtattgtacacttcaccaaacctctgttttatccctaaaatagaccaagagaggnttaccaagtcttcccaaggtt

SEQ ID NO: 5556 - DNA, 418 bp, Homo sapiens
  misc_feature (1)...(418): n = a,t,c or g
ggatccatccgacagccgcgggtgcgtggtcgtgcggcaagtgagcgatttggtgaacagacactcccttctgtaggtaagaatatctcggggggcgaattaattgaagaagcaccgtcatccctcggtcttagcagtgtcgcctctctcttcccgggtttggagagctgggggcgggttcctggctctgcgggcctgggctacactctgagccgcgtgaggagctctccccctacgccgcagcccgcgtgctgggattcacccaagtgggtttgtctggaattcccatttgcagccttctggaagcgcagattaaataaaatcatgattcccgtaaagtgccagcacctcctatggntacattccacgttcacagattttaactgaaaangcattttagcatagaantcccaattcc

SEQ ID NO: 5557 - DNA, 1806 bp, Homo sapiens
gaatgaaaatggttataataccaatgcaaccatgaccccatcactgaagaagaaggctaaacgactatgtaattttgatgatggatggaaggacacatactactgaactaggaaggtaaataaccaaaacagagcatactacataatatacagaaaaaaatttgagattggacatggtggagaaggggatgtgcaagcacatatggagggcaaatctcacaagtaagatgggacaggtgaatgcttctaaaccaatcaaaaatacctttgtttccccaaaagacaccaatgctcagtcaaaaatagcagctgctgaattagcatgggcataccaggcaaataagcctgcattgtcatagcgttcccttgattgctctatgaaactgagtaaagtttcatttcctgattcaagaattgcagctaaaatatcctctggacaaagaagaagggaaattttttgataacagatgtgttgactccttacagtataaagccaatttctgtcatatctcaccaacaatcctggtttctacagtacatcaattttaagtaatatgccaaatcatggcagcaaaaatatgttccctctagctgttaggtactttgacttggaaaacagggagtttccaaatcatcttcttcatttctgtgagggattttaatggaaactggctggaaatcataaaatattgttggatattttgtctaaataccaaactaggacttagctcatctatctgtgtattcgtcagacagtatagatgtaaaattttggcaaattgcattcagtctacaaacttcttaccaaagaaaatgaaaagatcttatccattcaatgccttggtaacatcttatatacaacactgctaaaaagggatgtgagttgcttaaatgtgacattgagactttcataatgaaagcttttggttacttttcaatttcctcaaaaagtgcaaaagcacttatggagatttttgacttcacagaaatggaaggtaacctctttagacgtgtgcctgcaagatggctgtcattgtagtgagccatagaaacgatgctaaaatgttggcctgccataagatcatattttcaaaggacaagaataatgtcctttgacattgtttgaaatctgaaaggagaaaaaaatcaagaatctgaagtgggccttaaaaaaatcagtaagtcccttgtgactctgatttttatgaatctgtctctcaaaagccagggtgcccccagaagaactgagacaaactgagtttctgaacatttgaaaatgaggagcaggctcaggatccacagggtgtaaccatcccgtgaggccctgcctgagcagccagccagtcagtgaggctcttcaccttacttccatttctctgattccatctatgtacaacttacgaaaacttgcattattatagactgggagttcttaaattggaatctgtgaatctaaaggggccagaggatagaaatcaggaaatctgaaaacttcgatggaaaaaagaagtttttatttatttccatcaggaaaataggcaacaaaccacagcagtattagtacctgtgtctctgtcatcactaggaatcacagatatccacgttacagatatcttaaaatatttatgtacagcaccactctgaaattatggtaataattagatccaccccctaggtcttgtaatctttaatatgttaataaagaagcacatctattatgtgacagatttaaatgtttaagaatttgatttcaatgaaattgcatttcaataaaattggcttcctttgcaaaaaaaaaaaaaaaaa

SEQ ID NO: 5558 - DNA, 411 bp, Homo sapiens
tgtttggagctccatttctcatttgatgacttgctctgcgtggggaggtggggtctcattcccccaacttcctcagggaggacccctgccctccgctgctcctctgtcctgctagccttcctccaggaagcacactgggtgcagataatcaggacattccagagatccccaatttaagagggtcatttccatctcaggggactcccggatgggtgtttccgctctcaatagcccctcttgttttaccaggaaagatccagttaaatcacccactggaggtgaacagctcattagcggggagagagatggagcatcgagtgacactgggccatccaggcggctctgctcccaccagacaggagctaggcctcactggcaggggggctgccacagccttttcaggggctcgct

SEQ ID NO: 5559 - DNA, 1837 bp, Homo sapiens
aacaccaagatcctaagtaattccaaatgccttagatatcaatgaaagctacacaccattgagatgggcaaaattctttctctacaaagggagtaatcaagtaaatacctgttctctttcaatggactgttgcctattgagcattgtggatgatgtgttttcagatttccaggtgaagttctgaccctacctgtttggccaaagacgtaaattgagaggaaaggccttggtcttcctgatcaaccagcatttaacgaacagtggcttaatgcagatcactcaagaggcagcatagcaatgtaaaaggaatataagtaggtgttggatgcctttttcctagaccaggaatggggaatatataacacctgtgccaccgctcttttaaggaggcattatgaatgagtgcagcattcctgtcctctgtgccaggatttggtcttagaatccatgtcagattggtgcttccagacatctattcccagtccatcagagtgaaatgaaggctatttgccatccctgccttagacagaggagtgaaagaattaagtgggtagacaccaaccaaaatgactttgaaagcagtgagctgattgagctccagttctgtggttaccagaaatactgagtgtctgtcatgtgcaagacaatgctaagaacagaatacagacataaataagtcacggcccatgaccttgaagagcttacggccttataaagaggttcactgtaattgtcttcaccagggcgtccttctcaaagatgcccacttttgtctggcacattggggctcggtggtctggtggtcccttcggtcttggccctatctgtcctttgtttttgtgatttactaacaatcatcacgaaccagttttgtttttcttttaaatttgaacatcacatcttgtgttttagttttttgctcttatgatttttttctcactgcttttcagtcttctctgtacttcatttttgtgaaaaagtgaaaatcacatataatctttatttaaaaatgctcaccaagcactgcagactttggagttagggattcagcagcttgttccagtgaaaaggaggagtgaagctggggaagttagtatctaagaggggcaagctgattgcatgtgcatttatacctatgcctttaaaacattcccataaaaagtattaataaagaaatttccattccacactagtactgatgaaaaggtggttgattttgccttgtgataattatcaaaggatagtttttcatccttagattttattcacatgagagattttttttattttctctgttgacttaggaacacatcataaattcacaccaactgacacgttgctgacgtctgtacttgacataaccatttttattcatacaggaagcattaaatataaaagatggtcagttttgaagagcaaagggtgctgaaatgacttgtacggttggctggtgctttctcaaatggattgccatagttcattactagtaaagaaaaggaaaatgtgatttacgttgtcatttttcctattaaaaaaaacccttaagaatggggcacttgagctgtccctgcaatgttttcatatctagtagtcattttagggaaagtgataatctgtagaatgaatagttatgttttgatatgactgatactttctttgttaaaaggttgtattaagtcttcaatttcaagtgtagcttaaaagtgtaaaccattatgtgattcatttgaatacaagaatgcctatgaaatacccactataacagcattccttttgtgtttagaactatagaagaaaatgtcttcaaataaagtagttttcagtcaaaaaaaaaaaa

SEQ ID NO: 5560 - DNA, 1039 bp, Homo sapiens
caagtaaattacaacttacattaaaggcagattctttattggctgaatgtgctgtagtagatatttaaaatatcacaaacattcatgattgcagtttttaaacttagctcacagttgagttagatacaacagttaacatacttaggaaagacaattcttaacagctttatcaagcacatttgtgaaagattaaactttcatttccagttaccatgatgtccccccatacacccaaatgaacccaacacatttaatttattttaaaataaatggaaactgtacatggcctacactgtgcctcctaaaattacttgccattaatgaggacattaattttagcatttaaaaaaagagatttaaaaataaccatagaaaaacttgaaaaccctgacaagccgactacaaagagaattcctctctgaaaattttcagatgcgacggtatgagggagttgggtgggctgctgactctgagagaagtcccggtgacctgaacctattccagtgaagccagtcagcagtgaatgtggggcaagtgcatgcggctggtctacagctcccattgcctggtgaccaaggagcatcctgaagtttcagagaagagactgtgtgacagcagcattgttccagctactgagcaagatccttcagcaggtaagaagtggcagagacagtcacctgctgaaggagcgggcagggagttggccgtccacgcggagcctggcctttccgttaggggaccctgaaagtctgcgaccgccccgccaacacctgagagtgtaacacagtgcccgttacacattcacactccatcacagataacacacagggcctcagggactgcaacacgtgcatgtgtagtgacgcacgacaaattaagagtgagtgagaatgaaagctcatgcttagccctgtgaaaaataaaaatcagatagcaaaacgcaaagttaaatcacagacacctggaccacaaataatctaccccagttgtaatatgtattttaatggagaccataaatttttccaaaaacccgcttgag

SEQ ID NO: 5561 - DNA, 280 bp, Homo sapiens
  misc_feature (1)...(280): n = a,t,c or g
aaggcggcctaggaagcttacaatcatgagcaggcacatcacgtggccaaagcaggaacaagcaagagagagtcagtgggtgtggnnnnnnnnnnnnnnnnnnnnnnnnnnnnnnnnnnnnnnnnnnnnnnnnnnnatctcaaagacagcagcaagccatgagggatctacccccatgggtcaaaacaactcccaccatgccccaactccagcactggagactgcaatttaacttgaaatctgggtggagataaatatccaaattatatcagagggcctt

SEQ ID NO: 5562 - DNA, 526 bp, Homo sapiens
tttttttttttttttaagtcaaaggtttaatcatgatccaagagcccagagagactttaggacaataataggaataaagcaaggcccacaggctccagctcctgatgcccagatgttcggcaggatccggggacagggcagtgcaggcagttgttttccatcctccactcagaggaggagacgagggggcaggagccttcttcacaaaggagaatgactttctaggctgcctcagaacacccagtcctccctaccctaaccctaatctggaatgcaatagagaaaggctaacttattagattctggtgatcctggtagtcaagaggaagggctcagaaaggggcttggtggagctggtcaccaccagatgacatggctaaattgtggccaccaaggaggggcagcatgaatcagaagtggagatggggtggagggaatgaggactggaccagtaaggatctggaggtcataacccttagcttctcccaggactggccacaccctacctttgctgtgatggcacacc

SEQ ID NO: 5563 - DNA, 371 bp, Homo sapiens
ttttttttttatggatgcactgttacatgtttatttagcgaaggtgacttggaaaaggagattcacatacttccactgtatcctccgggtaagttttccttctcttctgtagatgtctccatgttacagtcaactataaaacatggctcatgttcactctgggcttcgccttcagaggagtttgatattttggaagtggtacctttgttctgtgtgcttttcagaccaaccgcttctttcatttcttcaaggcttccttccaaaggagttaaatcatcatcatgtccttttggaagagcagggtcctcaatggtgtaagaaaagccatttccctctggggcatggcgtcttctttcccagcctgtctacaa

SEQ ID NO: 5564 - DNA, 100 bp, Homo sapiens
tgcaggacaggattctgggttctcaccatgtggaatctcttctctgtttgcttcttaccagctcaacaacgcccctctgaaagtaggactcttggaaatg

SEQ ID NO: 5565 - DNA, 1261 bp, Homo sapiens
gatgtttaaagaagtcttttattaagcacaaacaacttttaatacattatcaatacaaataggaaaaggtcttttaatgactatgatatatcaaagatctgaaaggctttctctgtattgacacaataaaaataatcaattctgaagaattacaaagtaaaattttgaggacaccactgtctactaacaagagtttaactactgtctaaatttactaaatcacctgtggaggaagggcaacttttttttttctttttaatagagagaattcctactcttattagcaccattcaaagcttattatcagttgtttgtctacaaactgacaggtcaggtaaagctttaaagcaagttttcagtgcaatgtttatagttccttcttttaagatacttggaatctacagcctcgaagcatgttaagtaattatgccttggtagtagcaaggtgttaacatgtaaagagaaatgtgtcatgaaaagaaatgagacttattttggctgtgaaatgcatcttaaggtgtggtggctaatgctgtagtatgttgacaacatgcgggattatgaactgcaaatctgtaggtagctggtagctattagctctctgtggtcaccatttcaggatgtctcagctgctgccttttgagattaactagtttcatcctgtctctgatgttttctgcagtagaagccatgtcacttggactcccaaaatattgttcggttccatcaggataaactactggaacagttaatctatccaaaagtgatttcccaactgcttcaatttcatcaaattgctcctcatcattaatagcttcaggctcttctggacagtcctgcaaaatcttttcagcatttgagtgaaatgcaatagccatttccaatctatgtactctctcttcagatgctattgtaaattgtttccatactctgttcagtcgaggaagtgtatccccagatgaccgagaagtgcagcgcaaagattggcataacacaactgtggcctgtagcaactgcctgccatagtcataagtgctctgtgcaacatcaacaaattttctatgcttttccagcaaaactttcgtttcttgagcatcatcgcccaatctgatgtgagtcttaagcagagcatccagaagttcacttagccattctactgcctgggcagcatcttcttcacatttaaacaactgcaccatctgaagcatctttaaccttcgcacatctaccatgtcttccacatctttgttttctaagctgc

SEQ ID NO: 5566 - DNA, 1217 bp, Homo sapiens
ggcattttcattttatataaaagactagaaatttcatgtgtatagtaaagaaccatgaacttactatgggtatttctctttggatataatactaaaaataataatgaataataaaaaggttggcaatggccgttcactgtttgggggagacctccattctccaacagcgtggtagtgcttgcagataatgtacagggcagaggccaacttgtctctcagcatgatcaaccccgagtacagcggggttttaatctgcctgggggcatttccacaatacagcctttatccttgagggtaacaagttagcctcataatatcagagagaaaaactagttcttcttcatgctgggcagctgagaatgcgctaatctaaaacttaatacatctcaaaaagttaaaggggaaaaaattggtttcatcaccacctgccaggctttatggatggatgctggctgacatgcacagaaggggaagggggtctcctggctgcgcatgcctgaggggcttccccatctgttccgtgctgcaggcatgttagagggagcctcacctttgcagtactggagcacagtctccatcgcactcttccggtcggaggcccagcggatgcgggcggaaccagtgatcttgttctcgatgggccaccagccttgccagaggtacacctcgtggtgattgtcaacaaggaaaagtgctgtgagggcagggacagggccagaccatcaggagctccttcacggacacttctagctcactcctcccccaacctagtggatgttgtccctcttgactgcagtgtcacagggggaaacccccttggccatcaaaccaggggcaaaggggcaaacagagaaacccaggataccccagccctttgacagttcaacggggagaagcctgtaggcagagagaagtggtgtcaaggagttggtctttttcattcctcgtcctccaggtcctcctccctttgccccagctcaaggccctggccccttctggatactggcagggctgtgcctaagagtggaagggataatgcatgtgcccactcaaggggctgttagcaccgcatatctccaaagagcacaatcaacactggagcgcacatctcactgcagacaggtcagtggcgttcctgccctgcacgcgattgcttagcagtgaggtgagctcatggctctcttacagagaaatgggccttaaaaagcaaaactgcc

SEQ ID NO: 5567 - DNA, 924 bp, Homo sapiens
ggacgctattgcccttcgcgccacgcgtcgagtgggcagcagcgggactcagccgggcgccaggttcctgccaggcagcgcgagtaagccgggcggccgagaactccttcctgctacttcgcccagcgccgctgcttcggcttcccagcgaagtgggagaccttcctccctgtttgcagacgtccgtgggagacccttattttttccaccgctaaggttaagagattctggaatagaagcgtcgaaggagatcaagtgaaccttctacaactcctcggatgtcgccagtctccctttcggggcggaagactacgtttgagcatctcactgaggtgcaggaatggaagaacccaccttgcagcttttctgcagtgtggcttgcctgatctacccctaggaatgaagaggaggcttgtaataatccgatgaagtacagatgttgaagaggatatcgcaggacctaaacttgtgatcgtttgggggaggtcacacacgtttctgagtgggaatggatgggcgtgaatgacgtgccctcttaaaaagcacaacaatcctttaagaggagcaaaattgagttttcccattttggccaagattttgaagacaggtcaatgtattctacatttgacataagatgagaactttctaaagtattctctccaagagcgtaaacgatgactaccccagccctgctgcccctctctggacgtaggataccacctctgaacctggggccgccttccttcccacatcacagggctaccttgagactttctgagaagtttattcttctccttattcttagtgccttcatcactctgtgttttggggcattctttttccttccagactcttcaaaacacaaacgcttttgatttggggtttagaaagatgtgttaattccaccatgtagatgccgggaag

SEQ ID NO: 5568 - DNA, 738 bp, Homo sapiens
cttttttaaccaaacaatgttaaaataaacatatctgaatagaaaactgtatctggttcttttttatgtcaaatgtaaaatactttaatagagaaaattccatttttctgcatctatttagatgatattacaataaaaggcagtgtggattggagaacatagctagtgagaatattaggtaatgtaaatttaagaagaaattagcttttccatatgaaataaaatcaatgatcacataaattcaacatgattatgaggactaaagtaaaaatacacagtacaatatagctttcggtttcttgttcggcacatatattaatatattttcaaacatcaaacaatataacaccaatatctactaaaatctactagcacagtaagggttactaaagcttagctaattattaacatcttaaaagcctagttcccatatgaattctgtaaccaagaatattctctgtgctatgcaagctggttgaagcaccgtctttttcaggattctccagaattcatacgtatttcaaagttaactcatgtcgaaccccacaattccttattgaatgtggttgatcttctaaacagaccttcatttatgagaacataagcatatactcatcacaattttgaaaagaatggaagtccttcatacatatcagtttttaattttatccaatcattaattttctgcagagttgttttttcttgacttaatatttttgcaacttttttcattttttg

SEQ ID NO: 5569 - DNA, 309 bp, Homo sapiens
  misc_feature (1)...(309): n = a,t,c or g
agaacagaagtttcagtaatgctgctcgtgtactgtccagactggctgacatgcatagcacagaaatttcacttcagcagcgactagagtacattgctcgagccattcttagtgccaaaagttccactgccatttcatcaatagctgccgatggtgaatttcttcatgaattagaagaaaaaatggaggttgctaggatccaacttcagatacaggagacactacaaaggcagtattcccatcattcttctgtacaggatgcagtttctcagctggattctgagctgatggtccataaccaagcnctta

SEQ ID NO: 5570 - DNA, 432 bp, Homo sapiens
gcggcacgaggggaacttcggctcagcacagggaactagcacaaatactgatatcctggctgttgctcttcctgtgaatagcaaactatttttcaacgcttacccagaagtcttgtgtcatccatcagcatacatgaaactgcagcaggctaacttgttagcttgcaagcagagtaaagtcagactcttcatggctcttgacactcacgcatgatagtagtgccgcaaagcaatgcaccaacagaaacactcatatttctaaatgctcagctgggaggtgctgctctttgaaaactccattgccttatgtgatctgacccctcattacctcaataatctcaccttctacaacttttcctctagctcacttcatcccgtaattctgaccttcctagcctttgaagcacctcaattttgtttccactccagggc

SEQ ID NO: 5571 - DNA, 1145 bp, Homo sapiens
ggttttgtgctcttgtagaaagacctggacaaagactctccttgtgtccttctgtcagatgaagtctgtcactctgctagtaaaggggcccttgtcagactgaataacaatgcaagcctgaatgtttacattagtgttggtcaaagtcagggttcctgctccatctatatctaaatacactagggtgcttgttaacaaatgcacatttctggactcaaacccagaattatggagtcagaaattctaagggcacggccctggaatctgcattttaagtatgctccttgggtatgctgtttctgcacaatgaagtttgagaaccactggtctagataattcaatctgaagagcttggcttactcaggtatcaaggcctcagactccactcacttttctggggcctgttggggtattttgacaatgcatcagaaatagcattgaatctgttgcctggctggctcagctggactgttaggcctgagaaccacagggagcttcccacctggtcttgctgctttagatgattggagcatgcaggtttagggagctgaaaggacacatgccaggcccacagcagtgagcaacagaacagaccaatggaaccaggttgcctgagacagcgccctctaccaagcattttctttggttttggggactggcagtccaaaccgctaaaccagtctgtgtaggtacagtatacacacagctgcagcatgaccccacttcctaggatggtagaggggaggcaggggctcccagccacacagccactgcctccaacgctctctgtccctagctccactgcatgcggttagctggagtctggaaatggctgggggtgtctggttctccagaggagccctgcccagctgccgggtgtgaggaggttagagaaccaacctcattctcgcagtgctctggcagttcatctcttgcaaatactcttaaaagggagagcctggtcaaggtcactatgatttaaattcctcatctttgaattattcagccaaaagagcctggagattaaccaaaccaacttaggccttcttttaaagtcaagaacagtagccaattttactaaatcgaagtattgaaagttacttaattcctctgtcaaaatttaaatgatggcgaccattttggag

SEQ ID NO: 5572 - DNA, 1054 bp, Homo sapiens
gggttttttttttttattttttttattttaggaaacttcttttaaaaaatgttttctgttttgtatgtgtatgtgtatccagaaatgtccatcctccaagctggccaccactgttccctgaatttggcagtgcctgttgcttgcagctgtcagcatcctgaaaaccatgaggtgccttcaaagtagactctgtggcccagccgcgcgagtggcctccaggaccctgccgcacgatgtcattctctccttattctgaatcctgtctggctctgatgctgagaaaaaggacaaagtcggtgtgtctgtctgcgtgtgtgtgcatctgtgcctgtgtgtgtgtactgagttttggttttttttggaacctttttttctttttttaagaaaaaaatgacccttggattactaatacagagttcagccctcctttagtcactataaaacggactccatgttttcacaccactcatggtcttccaggttatagataaactttgtcctatgtgtctggtttgcgggcacagggtccctccccaggttgtctagggtcagagtagaggcaaagaactcactggtgctcagcccgccctcgtggtttttgatgtagcgtttatagtttttcctcaggcactgccacgtggtggtgtacaggatgaaggcgaaggatttgagcgcgatggcgatgctgacatacaggtatcggtagaccacattgtcgtagaggacgcaggcgccttgctccccacagaacgtgctccagaacaggcaggtggagtcgatgccagccccgaagatgaggggtggagggatgaagcccaacaaacgaaggaggagaaaaagaactcccaaagcgtaagacttgagttcagggctgactgtcctgatgaggatgatgactgagggtgtctgtgccatggcaccgatcaggctgcagatacacatcacacagaggaaagtgaggaaggcctcttggcacccaggactggggcattttccaggaaccacggttgcgttctcagcagggacggtggtgaggcacgcacagcccgtgagc

SEQ ID NO: 5573 - DNA, 297 bp, Homo sapiens
gagcatgccaagcaggagccctttcacgtggtcacacctctgttggagagctgggcgctgtcccaggtggcgggcatgcctgtcttcctcaagtgtgagaatgtgcagcccagcggctccttcaagattcggggcattgggcatttctgccaggagatggccaagaagggatgcagacacctggtgtgctcctcagggggtaatgcgggcatcgctgctgcctatgctgctaggaagctgggcattcctgccaccatcgtgctccccgagagcacctccctgcaggtggtgcagagg

SEQ ID NO: 5574 - DNA, 435 bp, Homo sapiens
aacctggaaaaaacctggccccacttttaaggtccaccccgaaaacaatttaaccccttggaataaaaggaaccctgccctgaatttatggcattagtggtggcatttttttgtgtacaagatgtgggtgatggaggggctgtttctttttccgtgtgggtggttaataatcgtcagtctcggagggcgatgctcgtaggatatttcaggtgagtcagggttggatggtcatcggctttcagagggagaccacgggaatgttcagggaaacaatgtcagcttctctgaggaccagaattcatgttcacgggcagtgatgagttggcttatggagtgagtccagtctggaattccgccgtgcattctagcctgtatcatctcatttggacaaatgctggcacgttgaaattaaaatgttaaaaaacaaaaaaaaaa

SEQ ID NO: 5575 - DNA, 1009 bp, Homo sapiens
tttggtgggagctggttgaattgtctttattaacaaacaggatatccaaggccactacattgaggaggggggaggggggagggaggagaagggttacttgctgctcacactatatacagatgcaagcaaggggcgtggagagtgagggctccctgctccctccctccaccggggaagggcatgggctagaagaggagaggggggtcgggaatggggggaatgttttggctggcggggtcccccctccattccctggagtttgggggaaggggaatcattaaagtgctttcagaaaatgaagaaatggtccctgcccctggagtggctggtgaccccccaaaaatctagggcccagtgaccccccccagggtctggtacattcaaggggggagccggctcccctgacgtgcaaataaaggggtcccaggccctgcccagtcagcagcagtggggtaaggggttcaagccccaagcactctcctctcaaatggagaaaaggggggaggggctaggcccactcaattcctgggaaggggaagctgtgtccctccccagaagctggggacaggcacagttttgggaagaggacatgttggggaagaggatggtcacgtgatcacgaaagcatcaggggtcagaggtcacgttcccagcaggctccagtgaaatcaaaccagtaaaagcaaaagcccagggaggggaaagaggggcggcccgggaagcctggctgcagggggagagctgggtcccagtgtgggacagccccagcccagggccccgtcaccagttcatgatgcagttacggttcagagtcatgaagtaaacttggctgctgcccccagagcggactgaggcaaaaaacaccttgtcattccgctcacacaggaacttgagcctctgagctcgtttgtgcatgaagaccccgtcgaggtggcccgtctccacagagcggatctcaatggctttctcaccccagcccattatctggttggagcagatgtagccacag

SEQ ID NO: 5576 - DNA, 762 bp, Homo sapiens
taaatgaaaacatttctaaacatgatgtacacataaatgaagtaatgcaagacatcaaggtattcaaatctactgtattgctattttcacccttaatgtatctttctacatagctttctccttttggaacagtaatacatggggcagtacattattttcataaccttatgccatcaaatcaattaatacagatgcttgacacatttaattatacaaaatcaatttgcttcaagatacaaaattaatgttgatatgtaattaatgaaaaaaataagatgttaaaaagataactataagaatatccagatatatgctgtattcccacttatatagatctgatcaataaaacatcaacacattcacttagatactgatttaatccatggatcaaggccatattttcaaagtattttaaggatgccaggacactgcaaaagctggagaaaagagctgaggaacaacatatgcttgctaaacaagaactatgtttatttagctagtgaatacctagagtaataaatttttacttcatgatagcaatcaggctcgcaaacacccagaaataggaattaagggttttaaatgtagttataaaggtcataaaaagtctgattagactgaggtacatttactcaaaattttgagattcattaagtggtagcaaacaaaataattcctcagacaaatgcacatttttcagtatacatattaatggggggaggagggaagaagaatgtgcattaactggtgaaatccaccaag

SEQ ID NO: 5577 - DNA, 451 bp, Homo sapiens
gggcggcgagaggaaacgcggcgcgggccgggccctggagatggccccggcgcggcttgcgtgttgtctcgtgctctggctccccgcgtgcgtcgcgtcccacggcttccgtatccatgattatttgtactttcaagtgctgagtcctggggacattcgatacatcttcacagccacacctgccaaggactttggtggtatctttcacacaaggtatgagcagattcaccttgtccccgctgaacctccagaggcctgcggggaactcagcaacggtttcttcatccaggaccagattgctctggtggatagggggggctgctccttcctctccaagactcgggtggtccaggagcacggcgggcggggcggtgatcatctctgacaacgcagttagcaaatgacagcttctacgtggagatgatccaggacagtacccagcgcacagctg

SEQ ID NO: 5578 - DNA, 620 bp, Homo sapiens
  misc_feature (1)...(620): n = a,t,c or g
gtgttattgagctgtaactgaaataagggttcacccatttagtgtacaagtcagtggttttcactattttcataggtttgtggaccatattcagtgtgagagcttttcctcaccttataaacgccatacataccttttatcaccctcttatccacatgcccccagcaacctcctttctgtatctattcatcttgcaatcctggacatttcatgtaaatagaatcagacaatgtagccttgcaagtggtttctttcacttagtgtaatgagttcagtgttgtggcacatatcagaactagttttttttggaggaataatattctgttgtgtggacaggccatgttttgtttacctgttcattagttgacagacatttgggttgtttgcatctttgggtgcctcacctgtgccctcggtgggatgggcgtggtttggtctgcacagctgtgcttttaaagccatttcagctcacatgtatctgtcacaaatgggagactacatacaaatacgtgtctttcagctttgttagggggaagggaaggcagggcaggatgcccctgtgtccttctccntttactccccaaggncacttaggaaggtcntaagggccctttgtgggg

SEQ ID NO: 5579 - DNA, 1256 bp, Homo sapiens
ttttttttttttttttgcttcacattgaaagcttttattttgaaaaataaaatacaaaagtcattaggttgtaaatgtataatggtaatttcccaacttctcagaaacaatacaatgaattaaataattaggatatttaatattattcacatcaatacacttaaacaggcacacgtgttctacaaaacattagaacatgtacagacaacctatttcaaaaggagactgcccaagtctgcttacagggatcccatttttaaaccctctccttgaaaacaaacgtcataatgtaagaaaagagaacaagaggagttttaacaggaaacacatgttccttctgggctccttactgcagggctgtgcatgaaatcgggatcaagagctctttgctcaggaggcagatccctcacgaggcccaaagctgtgcggacacctccatcctctcagtgggaggaaactggcaaatgcacaggcgcgcagccaaggtgcagacgctccaccaagcttggcaggggacagccaatcctaggaatttcccttctgctgaaaaggcagcaatctttcctcatgtatggaagaggctcctggttctgctactccacttgctcagtctgtggtttttctttaagaaagtcaggtagttggaattctcccttatagacccttcgagtgttttcaataattttgggatcaggttttccgtaggttaggtgggttggcatatgggtcatatccaagcttggcaagcataggagcaatcactgccatgtcttgtaaaacatctggcggtatcttcccaacccattttgatagagctcctacattgactggcttgattacttggtctgtagatctctccacttttgacaggagacactcccccagctttcccaatcatctcttcatggtgcaatactgagtggttccatggaatctggaggaactttaagagtgttctcatccaccgttcaggatgtaagacaagttgttcatagtgaaccaacatgcactttttataaccaacctccatacactggttatacatggtctctatagcacgattccactttgtcaaacagtccctatagctgttcagatcaaatccagctatagtaacttttcgagaaatcattgaatgtactgatgcccggccatctcggaccatcaggagaaatttggcattggggaataacctagaaaggtaagttaaagatttcagggcaaaaggatctttattacataaataaggggctggc

SEQ ID NO: 5580 - DNA, 363 bp, Homo sapiens
gtttgattcttcaagaagtaaactggcttcatttgaattgctttgatttgggacgtcttgagggtattagttgtaagccaaaacatgttttaaaaagttgcctggaatagcattgaacaatttaactttcattgaaataggcatatatatgccttctcttgataaaggagacgtgcatatggatattgaataagtttcatttcaagataatgaaataggcacttagccttcatcctctgtctatagttcagaaggatcacatcttctcctgtcttggagttcctggttaacttttagttaaaaatggtgactcctctcctccagcagaccccttccctactttctgtctacacattgacctgt

SEQ ID NO: 5581 - DNA, 454 bp, Homo sapiens
  misc_feature (1)...(454): n = a,t,c or g
gtggcttttctagactttatgtggaaacatttgacaaataaggtaactgaaaacaaatagtttgatttagagatacttgccatttcctgtgttcagtaaattttgttggtaacaaatgcatattttataaattgtaaatgttttatacataagttgaaatggttgatatatgcttgctaattaaatgctcttgtgcctggtcttggtggcacttgcctcaaggattgcttgagtctgggcattctgggctgtagtgtactaagccgatctggtatccacactaagtttgggcatcagtatggtccagggctgcataaggaggggtgaaccgggcccataccagaaccagaggcaggttcaggaactcctgtggctggatccagtagtgggggttccgtggcctgtggaattagggcactgncattttcagcccgggcaacctattcaaggaccc

SEQ ID NO: 5582 - DNA, 519 bp, Homo sapiens
  misc_feature (1)...(519): n = a,t,c or g
taaataaaggatacaactgaggaaccacatggaagagatgcatacggcaaggtggggaggggctgcagagtttccatcaagtctctgggcatgctacccacccagtatgtcgagttgttcaccaatccagaagcacatcaaattaggagtttttatagagttcaatctctggccctgcaaccccaaggttggcaagtgggctgacaagttttaaccctcaaatcaagtgattggcctttctgactaaaccaactatgaggctatctaggggccccaccaaaatcacctcacagtagaacaaactcaggtgtggtccaaagtggatcactaggaacgacaaagacactcctagcactctgcaaactccgagtgtttttggagagctctgtgccaagaactgggacaaagaccaaatatttacttactctattacaatgctaaaaacaccaaataaagtaacaacttggaatggaggtgatggccttgcagggatctagtttaaccttgaantcttcagta

SEQ ID NO: 5583 - DNA, 381 bp, Homo sapiens
  misc_feature (1)...(381): n = a,t,c or g
gccactgcgcccggccctaagtgtatatttgtacccattaatcaatctctcttcatccctgcctccctgnnnnnnnnnnnnnnnnnnnnnnnnnnnnnnnnnnnnnnnnnnnnnnnnnnnnnnnnnnnnnnnnnnnnnnnnnnnnnnnnnnnnnnnnnnnnnnnnnnnnnnnnnnnnnnnnnnnnnnnnnnnnnnnnnnnnnnnnnnnnnnnnnnnnnnnnnnnnnnnnnnnnnnnnnnnnnnnnnnnnnnnnnnnnnnnnnnnnnnnnnnnnnnnnnnnnnnnnnnnnnnnnnnnnnnnnnnnnnnnnnnnnnnnnnnnnnnnnctttgttgtggttttatttgacatttatctgatggataatgatgttgaccatcttc

SEQ ID NO: 5584 - DNA, 965 bp, Homo sapiens
  misc_feature (1)...(965): n = a,t,c or g
ttttttttttttcaaagagtagacacatttttaattgtaaatgtttacatattttctgtagtgtttgggttaattccagtaaatatatgttacctttataataaagactatgtacataaagctaaaaagtcacagctgtgggccatcttgcatcaaacatggctagagaaggcctgtttactcttattctgcagaaggacatggggcaaggatggctgcggcccccacactcggtttcagacacagtcaacactcatttcccaggtcccggctctcctctcacttcctgggtgcccctgccctttggccactgggatcctggcacacaggtgacagccagctcttctgggggctggggcagtccactgggtcatcactgccaaggacactcatatagacactcagcccatcagatagacaagttgaagctgggctggggacaaatacagcctggagcctgtacagtgcaagattctcaaatatttgcgcatctcacgtggaagcctggaacctggagcctgggttctggtctnagattcacccctgcctnattctgcaaccttggccttgttgttnaaaaaaaatctggccttgggaaactgctctctctcccctttcctttccttccctcatcttggttcctaaacagaccctcccctcaatggcaatagcctactggagacactcactcgagagagagtaaagccccgtccctaacccagctcctgtgtgtgactgatggcactggggcctggagtgtatgcctgccactgagtccaggccctcttcagttccaaggaaccatcacatccaggggacaacacagaacaaagggcaaggatcccagctctgcatcctcagcttggtcaatggcctgatctgggggctgggagacaggctgtggccctgttgtgctcaggcaagttgatccttctctgagcccattttcctgtctttaaaatggg

SEQ ID NO: 5585 - DNA, 562 bp, Homo sapiens
gatggatcagatctctgaaagcaaccacctaattcatcttagtaacactaataatgtaaaactcctatctgagatagagttccttgtgaaccacatggacttggccaaaggtcatataaaggcccttcaggaaggagatcttgcttcttccagaggcattgaggcctgcaccaatgctgctgatgcccttctgcagtgcatgaatgtagctcttcggacccaggccatgacttgcttctggcagtcaaacagcaacagcagcggattcagtgatttgcggagagctttttgcccggagactggccagtcacctcaacaatgtttttgttcaacagagacctcatgattctatctacttttgcctttagcaacatgatgagactgattatgtacataacttagagaaaatgaaaataaactgaaatgcactgaactaaaagtacaaccaggaaaaaactgaagttgtggaactttttaccatatgcttaagtttagaaatttttctctcaacatacatatacagaaacaagctataataaaataaaacctgtattgcagacca

SEQ ID NO: 5586 - DNA, 765 bp, Homo sapiens
  misc_feature (1)...(765): n = a,t,c or g
tttaagcttacttatggttgaaaactggcacacacaaaacgaacatcatctagcagtgcccagcgaaggtagaaacccacgcatctcattagaaaaatctgcttttaatattttggtttcaagaaatgatgcatgacttctcaaatccttcctgcaattaatccctccatgttcctgtgtttagaaaatgattcattacctttgaaccttccttcctttgccttcggttgtccttggggagccattagcacacactgtggcgagctagggttacctaacccgccagcatcacggctatttgttttcacaggtgcagtatgcaggaattgaaactctggcagcagccacagccccctgcggaagaagcgcagcgctctctagggcacacaccgactttgggacagcagcacccaatattgtgtttggttgagtagaccaatgttatggctgtttcagtggtacccaaggtgtccttctgaaatgcatgccctgtggcaccctctgtatacttcctcctccttcacgtgcacagacatacacacatgtgcacacaccctcatgcatgggtgtctagttgcgtagaaggtcagcccagcgaaaagaacaaccccaagactgtgaaagactaacatccantctgaaataggagatacaangctgccatggatctgaacaccacttcttgagaacagccaggagnccacttggattcagagtgacnttgaacttgtttcaanctccacaggtctcttaagattcgntatt

SEQ ID NO: 5587 - DNA, 1042 bp, Homo sapiens
cgctggattgcactgcaaaaagattttgtctgatgttaagtaattacaaggcacccctagacttggaaaagtagtccccagtatactactaggctattcagggaacttcagcctttccctgttaaactttttccttttctctaagttttatgttggctgggttgggtgagagttggtaaggagaagatgccagtgaaatttccatcctaggacaaagtgagaattaaagggtaaccagttctgtagtgagaataaggctttgaatgagatccaagcctagctggtccagattgctcccttggtgcccgagtcggaatggatagaatgatagagaataataccctcaagacttacgaccttgctttgttttctttttatattttcactaatggtgaaatagattgcctgggccttaaacaaaggaataaaggcagattataagcagtattgggatgtagaacttggtgttacttatattccatgggacaaagtcaagcctgaggaactggagagttttttgtgaaggaggaatgttggacagtgacacacttaacccagattggaaaggaattcctaaagaagcctgaaaatgaagttgctcaaaatggaggtgctgaaacctcacacacagaaccagtatcacccatacctaaaccattacctgtgcctgtccctcctattcctgttcctgcacctataacagtgccacctccacaggtgcccaccacatcaaccgggtccacctgtagttggtgctctccagccgcctgctttcacgcctcctctgggaataccgcctccaggctttggtcctggtgttcctcctccccctcctcctccaccatttttgcgcccaggattcaacccaatgcatttaccaccaggttttctgcctcctggacccccacctcctataactccaccagtatccattcctcctcctcacactccaccaataagcatcccaaactgtaagcatgtttttttctttgtgtttgcttatcctcttggagctgggtgtaggaggataagcaaaaaaaaa

SEQ ID NO: 5588 - DNA, 480 bp, Homo sapiens
aaaggtaccgtcctacatacagtgaaatctcgagagaaaatctcaagaatggctgggagagatacaagaaatagaaaactgcatgtcccaatagctactcttagataggtgcacctgcagtgaagagaccagcatcagacggagtgggaggcccatatgggggaagccagaaacacaggcagagggacagaagcagacagtggagagaaactctggagagaaactcagccttgcaagatggaaagataagcttgcctgttccaagggaagggcgtgggaaggaatggcagtgggaagaaggtaggtctggggatgtgaagagaaaacccagaggcccagagaaaaagaagtcagcaggaggcggccagcccctattcaggagcagacccgaggagcagagaaagacttgacacacagtgggttgggaagaggcatctctgggggcagaaggtcaaccagctaccttgggaaaaaaccagc

SEQ ID NO: 5589 - DNA, 842 bp, Homo sapiens
atgattgggaaccaccactccagtgttagaaaatgtcaaatgacagaaggtgggctatattaagtgggaatttccaaaccccaccccctggaaggaaggaatgcttggtgacaagccttagaggagagagatgcttgtctagcccattgcctgtgtgcccaggaagagatgtgcataccttgagatatagagaagactctagtggggagaagccccaggccagcttgtcagcacagggcatcggaggcccccaaccagctccaagttctgaacagcacacagccttcaaaggcttgtactgctgctcatacccagcagaggccttgcaccaggcctccccatgcaaatcagtgtccccgcagcgtaggtaaaggagctctatctgttctcccttattgggtgaacagatataccgtgggacactggagagactggaagattgcccaacatttatttactgatctgtgttcaccacagaacctaaggtatttattggtattgtttcaaccagtacgagtgattctttcatttagtggtcatctctgcactccaccacagacttttgggaattacaagatgaaaagggccaacatcctcaccctggcatagctcagaaaatttggttggggaagtagggacatagacgtgatcactacaccataatttactaagctgtgagaactggaggtgcatcagtgaccagagtgcatttgagccagaggtagaaggtactggagacaaaaggaacaacatgcgctctaggctgtatcattaggtacaattttctgtccttgggggagtctttttaaccctaagacaaaaattatgaatatagaaagagg

SEQ ID NO: 5590 - DNA, 159 bp, Homo sapiens
tcactttactactcacactaaactgcactttccagtgtcatgtgggagaacgtgttctatacaagctgtcctcagggggagtatggataagaataattagaaaaaaaatgtttgatttctgactattcttagactttgtaaatccatggcagatataaa

SEQ ID NO: 5591 - DNA, 930 bp, Homo sapiens
caaactgagaaaaagcagttttaatagcacacacacacacacattcataggactttaacaagatgttagtataaaatctttaaaaaaaaaaaaaaggaaagaaaaaaatctgtatttacttcctaagagctggtggattaactggctgacaggactgcccaggaaaaacaaatgcacagataatgaggtgcgccgacactgttcatgagtaaggaataaccatggatcatgctaactgctctacggtgccccggccgcctggaccctactgttgcctccttagcgacaaaccaccacagtcatcccctaattctccaactcagtagcttgtttaatgggctacctcttaaaattttcatttttaatttaaaaattactcttggcttaaagacgccacacattattactggccagtccccaccaattatatttgttttgataaaaataaaaatgcaaatactccaactaagcctggatgataacacgccattttgtatcttttacatttgaggagatttttgtgaagctgaaagcaagctactatttgcgcttgaaagcagaaacaaaatgcaaaccttccaaaaggtgacaaaggcaccactgccatcaggagatagaaaatgtacaaatgctgttactttacggctacatcaatgcattttgtgcatggagagcctcttaatgtgataaaactagtagaattatattttcagtaacaagaaaagcagttagaaaaggcaaacagttacacacaaaagcataaacacttacaagtaccttaatgtgcagcttgcaagaagggtaataagtttgccatacatatccataaaattagacaaggtgatttttggcacagtaatattgccaaacacaccaccactcagtgcaagcttcgtttgccaagtccccaaagtggcctgacattctctc

SEQ ID NO: 5592 - DNA, 317 bp, Homo sapiens
ccatctcaaaacaaaacaaaaaacgatgggctttctgtcatgtgcctgagaactgggaggaagctggagaaaagatgccctctgaatctttgtgtttggctgcccaggctcgccttgacaccgaatggttgaaaacagatatacagatgatagtgtcgaaccaagtggaacaaagaaagaagatctgaatgacaaagagaaaaaagatgaagacgaaactcctgcacctgtatatagggccaagtcaattctggagacctgggtgtgggtcaagcaaccaggaaacggaagcccaaagaggaggggagcttacagca

SEQ ID NO: 5593 - DNA, 390 bp, Homo sapiens
  misc_feature (1)...(390): n = a,t,c or g
gcctctgtgagtttctgttcagatcttttgcacagaaaaagctgtatcatggaaccagtaaaataaccaaggagaggttgattaaagttctgtttataaccctagaagattcctgccctagggatatgggatggctgaacgtaggaccaccgacacttggacagatgaagtagcagtttattagtcacgcatgctcacagccctggggtgggggacaccgcatgccnattcagttaatcatgtgtgttgtaacttttcggggagggacatttgcagagactaatggtatgacattctgaaaagcggtgacagattaagaaattttttaattctgcagatggtagtgtcgaaccaagtggaacanagaaagaagatctgaatgacaaagag

SEQ ID NO: 5594 - DNA, 1026 bp, Homo sapiens
ttcagttcttatcaagcattccagctagcctatgccagagatgttacacagctctttaataatagtggccatagctgtaataacaatgacaacagtaggtaacggtagtcataccaacagtagggcagtgcattttatattacaactggtttcttgctctagtaggcttggggatgggtgaagacggacagggctggcgcagaccctttccttctcctctccagcccacagtgatctgggcttttacaagacagcctgcttccattcagtagtgtgggaaagttccttcttggcttagcaatacccctgagaccttgttcagtgggctgtgtctctccctgggatgctgggagcaccaagtgtggccgagctagggctgctgacttcctctgggcgcctctgggctgcgagggtctcttacaggaattgaggccctttgctgctccaagaaatgctgaggctgtgggcagaggggtgtacccaaggggactcttgctctgtgtctgactttgggggatccccaggtgggcagggcaggaaggaagcgggttcccagcactgcaaaggggcagcagcattacagctcagccttccagacattgtagatccagttgagataggctgagaccttggtgtatactcctggggtgctcgggcccccgcagccatagccccagctaacgatgcccaccacatgccactggtcagattggtacatcaggggcccaccactgtcaccctggcaggtgtccacacccccttccgggatgcctgcacacatcatcttctcggtgacttccccctgggtacgcatcgtctgcattgcaccgtgtgctgtcaatgacctggactgacgcctgcagcagtatgtcagacatcttccctccattctgcttcgtaaagccccatccaatgatccagagtggggtggctggagtgagctcctcatcaaagaagggcagacagatgggcctgactgtgcctgagaaagtgagtgggaactgcagcttcatgagggcgatgtca

SEQ ID NO: 5595 - DNA, 1155 bp, Homo sapiens
  misc_feature (1)...(1155): n = a,t,c or g
tactacatataaaatattttattacaaaaagctccattgcatggcatttcaaaaagaacatttcctacagttttctttcttcttcttcttttttttttttgctgttacacagaagagactagttaagtgtaccattgaagactattacgcatcacgtgcctacgttcatcaggccttaagccctcaaagaacaacagcatcaggggctctgtgagagccgccacctgagcctcaccgcttagttcataaaacagccctgtgtcctttctacaaagccaggtcgtgttttctacccacagttcaggactccagcgtagacagcaaacacaaaacttgtttcctttttgaaacaaaacagtcttagtagaagcaaaacaaacaaccacaatctaaaccagccgcgaggaaccctttcctagctggaaaggagaatgtgtcgccagcgattcggagtgaaaaggatgggaagatgcctgtgccaacaccctttgaatgtggtccacagattcaccagctccaaggcagcatctctttccaaagcacctgcaagctaggaggctgtgtggggcaacaaagtcactcctgatacagagaatccccccccgcccgccgccatccaaatggcgtccatgcacagcttggcccctccgcttctcaactgtggctcatgtggctttgttagagtcttgggggtgaaaggtgtgagagacaggagggagcgtggctcaagtggggccattcagtcgggcggccgggtgtcgggggccttctcctggacttcatcatactgcggtggaggagtcaaaggctctatcgagggaggagggacgtttttgtctgggaggttgatcctaaagtctttgaggtgaagcttttcagatttaatccttcgaactttcagctggtttcagtcgtttggccaacttagagttctgcctgtcaggggggttcccagggctggcctccacgtcagccctggtggatgtgggggtggtctcgtcgagccccgtcagtgactcataggacgggagagagatgctcaacctcgggttctgctcctctccccttgcttctgagtagtttgtgttcatcacttcctcgtagctgggancatagtaccttgaggcagcctcctcatcctcctcttcttccagc

SEQ ID NO: 5596 - DNA, 506 bp, Homo sapiens
tttttttttttttacaacagattcccatttattttaaaatgaaattagctaggcatcatatatatgaatgaaagatcagaatgaaacacatgaagatgttaacaatgattgttttgggccacagaatcaggcacaagctcgggagagaagccaacaaaagctcttctgcacaatgggagggagacaccattgaaaaaggcatcgttccttcttcatgcaagcgaggcctggctcccacaggcatggtctccttgcagctgcaacagcagaggagggcgctggcagggctctgcgtccaggtgtgcctctttttctctccatactctttctggaggttgactagtaccttctccactggtcatgctcatactgtctgcttcctggtccctggtctctccacggctgtccctgactggaacggctatacccagagcccgtcctgtggtagctggagccctgtcttccccacctccctggcattcagcagcctctgtggtctctaaggc

SEQ ID NO: 5597 - DNA, 261 bp, Homo sapiens
  misc_feature (1)...(261): n = a,t,c or g
ctaaatcactagctctcaagcttttaaatctcccaaaatgtcccaaatcctgggccacacctttgccacacttctcaaatgagaatctctgggagggccccaggtactgcggtggcactgacagcattgtactgggggctgctggttccctgtcagatgttttaagtcagattggctagcatagtcacagctgctgacggtgtctttattcatggatgctcagtacagcagttgctaggtttcaaataggcaaattncagg

SEQ ID NO: 5598 - DNA, 279 bp, Homo sapiens
ctgctttcttgcagaataaacagccattggactcttcaaacaaaaacgctgtctccatcaagtactgctttcgcaggataagtgaccatttttaatcagttgaaattaacggaaagtagcagttatttttgaaagatgacatcaattatataatatagtaaagagatttaatttttagtcctttgtttcttactgcacaaattgtatggcgtttgaatagaattcccatgatactgacacttcagcaaatacttgcttgatgggctaccaatctctata

SEQ ID NO: 5599 - DNA, 2466 bp, Homo sapiens
cgggaagtgccccttctccaggatcaaggaactggggcggggggtgtttcctggaccccagtcctccgaatcagctcctagagtggaaccaggaaggattctggagccacagaagatagacagatggaaggtggggaccaaagtgaggaagagccgagggaacgcagccaggcaggtggaatgggaactctctggagccaagagagcactccagaagagaggctgcccgtggaagggagcaggccatgggcagtggccagacgggtgcttacagctatcctaattttgggcccgctcctttgtttttctgtgcttttgttctacaacttccagaactgtggccctcgcccctgtgagacatctgtgtgtttggatctccgggatcattacctggcctctgggaacacaagtgtggccccctgcaccgacttcttcagctttgcctgtggaagggccaaagagaccaataattcttttcaggagcttgccacaaagaacaaaaaccgacttcggagaatactggaggtccagaattcctggcacccaggctctggggaggagaaagccttccagttctacaactcctgcatggatacacttgccattgaagctgcagggactggtcccctcagacaagttattgaggagcttggaggctggcgcatctctggtaaatggacttccttaaactttaaccgaacgctgagacttctgatgagtcagtatggccatttccctttcttcagagcctacctaggacctcatcctgcctctccacacacaccagtcatccagatagaccagccagagtttgatgttcccctcaagcaagatcaagaacagaagatctatgcccagatctttcgggaatacctgacttacctgaatcagctgggaaccttgctgggaggagacccaagcaaggtgcaagaacactcttccttgtcaatctccatcacttcacggctgttccagtttctgaggcccctggagcagcggcgggcacagggcaagctcttccagatggtcactatcgaccagctcaaggaaatggcccccgccatcgactggttgtcctgcttgcaagcgacattcacaccgatgtccctgagcccttctcagtccctcgtggtccatgacgtggaatatttgaaaaacatgtcacaactggtggaggagatgctgctaaagcagagggactttctgcagagccacatgatcttagggctggtggtgaccctttctccagccctggacagtcaattccaggaggcacgcagaaagctcagccagaaactgcgggaactgacagagcaaccacccatgcctgcccgcccacgatggatgaagtgcgtggaggagacaggcacgttcttcgagcccacgctggcggctttgtttgttcgtgaggcctttggcccgagcacccgaagtgctgccatgaaattattcactgcgatccgggatgccctcatcactcgcctcagaaaccttccctggatgaatgaggagacccagaacatggcccaggacaaggttgctcaactgcaggtggagatgggggcttcagaatgggccctgaagccagagctggcccgacaagaatacaacgatatacagcttggatcgagcttcctgcagtctgtcctgagctgtgtccggtccctccgagctagaattgtccagagcttcttgcagcctcacccccaacacaggtggaaggtgtccccttgggacgtcaatgcttactattcggtatctgaccatgtggtagtctttccagctggactcctccaacccccattcttccaccctggctatcccagagccgtgaactttggcgctgctggcagcatcatggcccacgagctgttgcacatcttctaccagctctgtggtactgcctgggggctggcctcgcctgtgacaaccatgccctccaggaagctcacctgtgcctgaagcgccattatgctgcctttccattacctagcagaacctccttcaatgactccctcacattcttagagaatgctgcagacgttggggggctagccatcgcgctgcaggcatacagcaagaggctgttacggcaccatggggagactgtcctgcccagcctggacctcagcccccagcagatcttctttcgaagctatgcccaggtgatgtgtaggaagcccagcccccaggactctcacgacactcacagccctccacacctccgagtccacgggcccctcagcagcaccccagcctttgccaggtatttccgctggtgacgtggtgctctcttgaacccctccagacgctgccagctctggtaacttggttaccaaagatgccacagcacagaaatatcgaccaacacctccctggtcacatccatggaatcagagcaagatttcctttctgcttctgttccaaaaataaaagctggcactttgcttccgcttgtctcttaaa

SEQ ID NO: 5600 - DNA, 1108 bp, Homo sapiens
tcccaaacacatggcttttgaactgcctttccttggatccagttcaaggggatggaggagcagtgagagtcagccgcccttccactccaatttcccagcacctcccttatctctgcctcacaagtcacccagcccccctctcttccttccttgtgcttgaagaatctctccttgctggaaagccccctgttttctcaatctccctttccacttcggtaaaatctctacttgctggaaagccccctgttttctcaatctccctttccacttcggtaaaatgcccactttctggtccccacctttttcctgagtgtagtcccaaccagccaaatccaacctcaaaacaggaagacccaaggccagtgacccccataggcctgaggcttgtgcagggcagtgggcgtggggtaaggcttcctgatgccccctgtccctgcccagaacctgatggccctcattagtccttggctcttatcttggaagcacaggcgctgacagccgtcccagcccttctgtctgcgggcctgaaccaaacggtgccatggggaacttgtctgcacagggcggagctctccccctcaactgagaactcaagtcagctggacttcgaagatgtatggaattcttcctatggtgtgaatgattccttcccagatggagactatgatgccaacctgggaagcagctgccccctgccactcctgtaacctgctggatgactctgcactgcccttcttcatcctcaccagtgtcctggggtatcctagctagcagcactgtcctcttcatgcttttcagacctctcttccgctggcagctctgccctggctggcctgtcctggacacagctggctgtggggcagttgccttctttcagcattgtgggtgcccgtctttgggccccaggggttaggtagcactcgcagctctggccctgctgtagcctgggctactggtgtctggtatggctcagcctttgcccaggctttgctgctagggtgccatgcctccctgggccacagactgggtgcaggccaggtcccaggcctcaccctggggctcactgtgggaatttggggagtggctgccctactgacactgcctgtca

SEQ ID NO: 5601 - DNA, 493 bp, Homo sapiens
tagtacataagatctgataatctggcagtcaggtggtgagggttgatgatcagccacatttatcaagggggttaagatttaagagcaatttaaaagggccaggtctcagacctgtgcaaggccacgagttagaagtgagactatccctgagtaaaaccaggacacttaagtaaatacatcctcagtaaaacaatatatagaatgtgaaaaattcacccactagcaagcagagaagaaaaggaatattgtcatttttaactgcgcttctagtgaggaaaaggagtctctcctaagaatttgtcatcataagctttggaatttgggcttcattatactacctacatagactgagaaatcctaaattaaaagtggtactctcctaatattgtgtggtgcttggaagaaacaaaaaaatcttttcggaaccacatactcttaacctaggcaacccataattcccacagataaaagcattgcaaacacaagcttttaa

SEQ ID NO: 5602 - DNA, 200 bp, Homo sapiens
  misc_feature (1)...(200): n = a,t,c or g
ttgtcattgggatcataggcatgagctactgaggccgtcccaagctatttaaaatactttcagaattactttataccaaaggcaaggcaatcttaggagattcttacaagtctacaaatttaaaagatcttggaagagtttccacagttttccagccttngagttcttgttctnagttccagattgtggggttcatgacc

SEQ ID NO: 5603 - DNA, 390 bp, Homo sapiens
  misc_feature (1)...(390): n = a,t,c or g
gcaggtacctgggagcccagctccttccacctgctcaggtgccccctccattgcgatgccccctccagcacctcaaatcctctcctggagcttctggggacacaggctcagcctctctcagctggcttcatcccaaaagcctgaaatccagccccacttcctggggcctttgagtcctcacttgcttggggccccatccgctggcaggctgggtctgctggggctgtttccacgttccttcactcttgtttntattttggacaggaatttaaaaaaaaagtgacttattttaatttactgttaggctttatttggaaaaataaactttcccagttttgaaggtgttacaattttggatggagttttttgnacaaaatggcatggcaggtt

SEQ ID NO: 5604 - DNA, 314 bp, Homo sapiens
gctgtctgcctggaatggagcaggctgaaatgttaacatcatggtgaggtgggccccagggggttcatgccttaaaatgaactggtcctgcagcttgctgtctttatgaccttgccaagtcatctgccttccctaagcctcagcttctcctccatacagtggaataacaggccctgtctcttgggccagggtgggtcccaccttgccgataatgagagtatcgctctgatggttacaggcagaggctgcaggccataccagccagccagcaatgcccttgcaaagagtcaccaagaggccaggcacagtggctc

SEQ ID NO: 5605 - DNA, 858 bp, Homo sapiens
gcatatttttaacattttacttaagatagcaaaccagttcgttttaagtaagctaacttgttcattagtatctgtggcttaaaatggcaaaaaagaaaatatccttgagtttgtaatctagttacagaagtaaggcatacacacacacaaagataacagtacctagagagagagtgtgtgtgagtgtgcgtgtctctgtgtgtgcacgtgcacgctcatggccaaatgtgcgcactctacataaaggaggcaggagttcctataggctatttaatgtaagagaaactatttttctcctgttccagctgtatcagatactcgttccgcaacacagaaatgactcagaatctcagacaaaatgtattatttgttcaattttaattttgctactacattcataactcttaaattgttaggctgtttcatttacatcaaagttatctcacaaaagagaaggcaggaaacgttttgtgagtgcctattctatgtcaaacactgtgttggcaccatattttacaagtttttttcctcttctcacagtgatcttgtgagttagttacttatatttttattagaactcattattctgggtaccctccaatgaggaattagagaggttaaataccttttcctagattcccacagcaggaaggtgggcatagctgttttgtctgacaccagaacccatctcaccacactgctttacagtcttcctgaagggacattttgaggtgggggggccttgcaaagctcagagactggtttgaatggtttaattttgcaatggatcatgtccatgccaggtgttacaattcttaacttcctccaaattcgtgtgtccattagacatttgggtac

SEQ ID NO: 5606 - DNA, 107 bp, Homo sapiens
gggccagtgggattgtgccttgccttagttgttcggacaacaggacgtgtgactggagagaaataacctggcagccccacaactgccaatatggtgtcctaactaag

SEQ ID NO: 5607 - DNA, 422 bp, Homo sapiens
  misc_feature (1)...(422): n = a,t,c or g
gctttaactttgaggaccctagggtccatttgctcatccagtttctgtgtagccaacattaaaacacagctttggaaataaatagattgccagtagcctcttagctgttatccatttaaaaatgggattccagtctttaaaagtcttattaggataaaagatttatttttctttgatcattggttgaaagtcattatttatttccaacactggattgtcacataaattcctaaggaagagttaccttgtgtgtactcagtgcagtcagagtagactttttaaaatgacaaattattaaagagatattcagtaataaaagaaagcctataaggaatacctataagggtagggcacatcaccacttgaggaggaaaaaaaaaattcanggggagtttatgtttaaagtgnggccctnttttaag

SEQ ID NO: 5608 - DNA, 441 bp, Homo sapiens
tgatctctgtagcagaaaagaacagtatagatatcaattgtcatcaacagatgcaacatatcttgtaaatcaatatattttcaagtgaggtctctgaatcacctgcactgaaatcatctgtgatgcttatcaagcatgcagattctcaggacccttcactgacttcataaatcttcatctctggaggtgagaccctggacactgtatatgcaacgagcacaccaccaatcctggatgagccccgctttttctctgtgccagaaccttaatgccacgcagcattacattaagtcacattacaactttggtcaatggaaacacaggtctttttctgacaaaatgccatcaagccaggtttgctccccacttaagttcaaatattaatcattaattttctgagcctaaatgcatttatccatgttaaacataattattttaacc

SEQ ID NO: 5609 - DNA, 1066 bp, Homo sapiens
tttaatcagacaaagatgatttattttcatacctaaagcactttataatattctctggaaaatctaaaatcattctgttatcctaacatttttatactatcatcattttagaaaataaaaggcctgcgttatatactagaaaaatttcttcattatattgcaaaatatttatctcctctagtaaagggagattaaagaacaactgcaagaggtaggaaggtcctgaaagtgtttcatttggtatctacctaccccaaccccaagacataaagacagataaaggcactaagatgctagtatgtggctagtcctttcaataacccagtcagtccatacagataacccatgggatatattcaagccactctttgagccatcggatggtcattatttggttagttcacccaaggtaaggccataccagctgttaaaatgatgtagagattaatcaacagggctgccacttgcgaatcccctccaaggatgctgtgcaaaggggtctcattggtcctgatgagtaatcttgtgactgtacatattcctgggtgcatgtccacaaatactgaggtatagcctgcatgccactaaaaataacaaaggtttcagggctggagacattgtcaaccacactgtcatgaccatctatagctccaggactcagtggtgggggaaccaatatttaacggatgtccctggcagaagaagcctgtgagtacttcagcctcaaacacatagatcagcttatctgcagcagagattttcttggccttctctgccaggtttttgaggttcttggtgaagtatatgccagctccgtattttggatcgcaaggtgtcgagtacattctttgaaagccaactctgcataccacattgcagaactggtatgggacttgctgaaacagcctatggctcacaggttgcctgtgcagtttttcttccatcattttcttctttctttgaaaggcagccataaggacctcattgtctatcttctccacctaggattccaagtccatgagcagccagcttagaatcatcagcaggtgagcttttcctttggcta

SEQ ID NO: 5610 - DNA, 279 bp, Homo sapiens
tatttccttgttcttgtaattctccagctggtctttgtagcattgtgatagttgaatcaatagctgaacactaaaggtttaaaactaattttaaaactaattttgaaaacctgtgaagaacattgacttctggtgaaattcttgtttttcttaagtagcattttgacggtaaagtcattctcacagtaagagcatcattttcatgtagtttttaccactagttttccattttattaaaaagtgcctgtaaaagtctacttattgaccaggagtggtggc

SEQ ID NO: 5611 - DNA, 430 bp, Homo sapiens
gcttgagggctcttaagattggtacatatacaagggctctgtttgaaagactttggctgccctggcgtcctggctgttttatgcctggtagctctagcggttaaaagctctctctgtcttgccactcctattacccattaccagtacatttgttggagaactttggttgtagaatataaatcccagaaacagagctgtgtgtgcatggttaagttttttagttcatgagagaagggggaaattaaagatcttgactcatacctgggccagtacaacattgcacagggaagaaaaatgcaattaggtgcttgctttacagtaggaaggaaaatattggtaagtgtttttacatcgggtcagattctgggggattttctaattctggaggccgaacttatgttactgtgaaggaaatggtggtggggtttca

SEQ ID NO: 5612 - DNA, 340 bp, Homo sapiens
  misc_feature (1)...(340): n = a,t,c or g
gcagagaaatgcaaattaaaaccccaatgagtatcatctcatctcgctccagttagaatggctgttaccaagaggacaaaagatagtgttggtgacgatgtggagaaaagggaaccctgtgtgnnnnnnnnnnnnnnnnnnnnnnnnnnnnnnnnnnnnnnnnnntctggaggttcctcaaaagtcacaggtnnnnnnnnnnnnnnnnnnnnnnnnnnnnnnnnnnnnnnnnnnnnnnnnnnnnnnnnnnnnnnnnnnnnnnnnnnnnnnnnnnnnnnnnnnnnnnnnnnnnnnnnnnnnnnnnnnnnnnnnnnnnnnnnnnnnnnaaatttttggtgtt

SEQ ID NO: 5613 - DNA, 335 bp, Homo sapiens
gaaaaaattaagagttttgctgttaactccttaagagggctttaaagccttttatattaagtgccatacaacttcagatgccttctgaatactgaacacaagtgtaatattatagttcattaaatgtcttaggaatcgtgtggagtgaatgcaaggaaaggagtgacaagatatcaccccacaaatgacttacccattacgaagggaaaactacctttctagctaaaaggtctgtcagtcactaaccaagtgattaaacttagcatcactaatagccaacttaacaaagtttttttttttttttggtttctaaaatgggagatcatagttttcac

SEQ ID NO: 5614 - DNA, 408 bp, Homo sapiens
ggataaagatgtaagaaggataaggagagaccagatgcagtcgagggcttttgtggcatgaggaaaggatatttaacttggcaccaagaaatggggtggcattctaatgctgctcctgacctcctgtgtgaccttgagctccagtttccctctttgtaaaatggtggccctgatgactacctacaaggttggaggtgggaataagggacctaatgcatgtccagtcatctgtcatcaacactcaataagccttttcctttcgtggccatccatcttcaggtttgacggaagtgaggatctgccctcagggttgaaagggtcaagatggtttgctcaaatattttatttctctcatgaaatctcttgcaggtttggttcatcccagactgattctttttcagggcagta

SEQ ID NO: 5615 - DNA, 545 bp, Homo sapiens
  misc_feature (1)...(545): n = a,t,c or g
ggtaaaaggatgagaagaggttacacactaggattttaaagttcattcctggacatgtggaatatttcttaacagtgagatcaggctgtgtcccggttcatgggtaacagaagtaaaggttagaattgaaggcaagaaatccctagtggagagtgtttgacgggtcattagcataatgagtccttcaatcataatggcaagtaaaggagtggaaagaccatctgcacatccaatgtggaagtcannnnnnnnnnnnnnnnnnnnnnnnnnnnnnnnnnnnnnnnnnnnnnnnaatttctcttgtgttatatcccaagaccttgtgacataacaacattgaataatcgtttggtcagccaaagaaggaagggaagaaaagaggaaagaagacattgcagataatacaaacaagttgatatcctcagagtttttggttatgttaaagaggtttggtgagagagaagttaaacttgaagaagagtttgttcatcacagaaatagaattgtgtgggtcgacgggccgcgaatttagtaagtagtagtag

SEQ ID NO: 5616 - DNA, 236 bp, Homo sapiens
ggtgctaatggatggaattcctgcacaagttttaactgaacaagaaatcccagcaaaaggcattttctttctacttctttgattgtggaaaagcagacatttctctgaagcatgaccttattcttcgaaacggtattgctagtaaaatagcatgcaggacttcagacctcagggatcctttccatgcactgaccaagaattgtattaatcctttttatcattatagtttttttaca

SEQ ID NO: 5617 - DNA, 237 bp, Homo sapiens
  misc_feature (1)...(237): n = a,t,c or g
ccacttccacggcctctccaggcactgaggggaaggcattgctctacctctccctgacattttgctccggggcagatccaaccttacctggggcagcaaactttgtcctggtacctgggcccagctcgccagggatgtgggcagagcaccagcctgggcatcaggaagccaagtttcaaggactgtctttgagtctgtctgtatgaccttgggcctggcacttnttacagacctaag

SEQ ID NO: 5618 - DNA, 660 bp, Homo sapiens
  misc_feature (1)...(660): n = a,t,c or g
cctcttctcataccctgtgctaacaacttttaacaaaaaatttgcatcacttttaagaatcaagaaaaatttctgaaggtcatatgggacagaaaaaaaaaccaagggaaaaatcacgccacttgggaaaaaaagattcgaaatctgcctttttatagatttgtaattaataaggtccaggctttctaagcaacttaaatgttttgtttcgaaacaaagtacttgtctggatgtaggaggaaagggagtgatgtcactgccattatgatgccccttgaatataagaccctacttgctatctcccctggcaccagccaggggggccacccatcctccagcacactggggcagcaagctgggacacacggcacactggatcccaaatgggtaaggggatgggtggcgatgctcattctgggtctgctacttctggngctgctccctacccgtgcaggtttcttcatttgttcctttaaccagtatgccggaagctactgcagccgaaaccacaaagccctccaacagtgccctacagcctacagccggtctccttgtggtcttgcttgcccttctacatctctaccattaagaggcaggtcaagaaacagctacagttctccaacccatacactaaaaccgaatccaaatggtgcctagaag

SEQ ID NO: 5619 - DNA, 440 bp, Homo sapiens
gtgaacattgtcagtctccaatcaagcattgtttagggaagaggggcgacagatatgcagctacacaatgtttttactatcttgagttctttttacccagattccatagctaaatccagatgtattaataggtagagactacttcagaaaggatgagactattttcttgcttaattatccacacagtaattcagaaatgtatattgaacactttttatatgccaggcactgctgggcactggaaatataaaagtaagcaaaaatgaaaaactatcctgtcctcctgaggcttagcatctaagggagacaggcattagtcaaccccgtgtggctgtgaatcagccatgatgctgagtgctacaagagaggactgtgcggctgggagggcttataacaggatttgacctagttagggaagatctgaggaagtgatgaaagaa

SEQ ID NO: 5620 - DNA, 508 bp, Homo sapiens
ttaagcttataaatttgcaaagctctggagttgggctacatgttcagttatttccccccagtttttgttttgatcaattactttagtcctagattatttccaatagctaagttatctcatatctgctacgggacacatctttcctgtggtgctaccatgcctcagtggagatatttaattctctaagcacacttatcatttttgttcactcttagatgtctaaataaccatatgacacaataattactcattttgtttgtagtaatagaaccaaaactcaaaactaatttaaataagtcgtcttcaaaattctgtaaaaatatgcctctcatgccaacatagtatctcatgggaattgaaaaaaatgttatgtttattttctactagactgttaagcatctccagggaagggccatactcatctttttaactgtcagcacttatctcttatgagtacattccatgaccaaatttcacataaggcagtgtactatgccctgcaagttac

SEQ ID NO: 5621 - DNA, 759 bp, Homo sapiens
tgaattgttccaaaacgttttaattatcatgaatatcataagtcatacaaaaaaataaagaataatacaaccaacactcatgcacctgccatcctatagcttaaacatactatatcacatctgactattacctagtctgtctttccccaattagtgatgcctctatagtgagatctataaatgttggttctgtttcttttgtttctgaaactctagaacctgttcagtacatattgaataaaaaagcaacttttcactgaaagagaaggataagcggacatctttcaacagcagaaaatgtatatcactgcctgttcttctccatccacaaggctgaggaggggatgaggctgactctcaatggggagaagtcagcaccgccaccctccttaaaggattcttgatgctcaccaaactatgcaaaagaaaacctctcttctggctaaaaggaccatgacgcgaatgccccagaaagacaagttattgtctgttctcaccaagtttttttaaaaaaggactttttgtgactctaacaccaaggtttggtgttagaattaaattcaagggacatgacattgtctttgattttgttatacactttgagaagcacataaggctgaactccaggagataagaaccaaggaggggacataaaatcataaatgtccataaactctgaatatgaagccactctacagatacacaaagtacatttttagctgaaacttcatacaagaaatattgaaggtatacactaaa

SEQ ID NO: 5622 - DNA, 866 bp, Homo sapiens
gattgcgttagagataaaccagttcacgccggagccccgtgaggaaagcgtctccgttgggtccggccgctctgcgggactctgaggaaaagctcgcaccaggtggacgcggatctgtcaacatgggtaaaggagaccccaacaagccgcggggcaaaatgtcctcgtacgccttcttcgtgcagacctgccgggaagagcacaagaagaaacaacccggacttttccgtcaatttcgcggaattctccaagaagtgttcggagagatggaagaccatgtctgcaaaggagaagtcgaagtttgaagatatggcaaaaagtgacaaagctcgctatgacagggagatgaaaaattacgttcctcccaaaggtgataagaaggggaagaaaaggaccccaatgctcctaaaaggcacatctgctctctgttttgctctaacatcgaccaaagatcaaaagcttaacacctggctatccatgggatactgcaaagaaattgggtgaaatgtggtctgagcagtcagccaaagataaacaaccatatgaacagaaagcagctaagctaaaggagaaatatgaaaaggatattgctgcatatcgtgccaagggcaaaagtgaagcaggaaagaagggccctggcaggccaacaggctcaaagaagaagaacgaaccagaagatgaggaggaggagagaggaaaaggaaggagggaaggaaggaaggagagaaagaaaagaaaggaaggaagaaagaaagaaagaaaagaaagaaagagaattttcacagatttagttccaagcaacagatgctacctcaggggcagaaagggaatttattgagaggatttggggtcactcacagaatccc

SEQ ID NO: 5623 - DNA, 673 bp, Homo sapiens
cctgagatcacaccattgccattcccagcctgggccaacaagagtgaaactcccatcgcaaaaaaaaaaaagaaggggcataatttgtggatgaggattggatataaggtaaaggatgggacattcttggacttacagatggtgtgattgcctggcctagaagaagaattcccggtcaaaaagaaaccatcagctttccaagtgtgaaagagagataaatctgtgaagattatagggactacaggaaacttaatctttttctttgaaaaagcaattgtagcaaaaaaaaagaaaatttcttactgtcatctaaaattgacatggacatcttagtggactagaagttaagggcataaattctcccagtgatttttaattttagcattgtgattaacaccttctaaaattgccagaacttaataaataattgcttttcattattagtatgccatcaaatttagtagctgtttcaggctttaatgtgtcaagcctaaaatccagatttttgaggatcttctccctcttaaaagagtattcagttaactgccgtaggaaatacacatgtatacaagggcactgtatacatcagtctaaaaaataaaaatatgtatacgttctggtgagtctagcacagcattgcccaatagaaataccaatggaggtcacaaatgtg

SEQ ID NO: 5624 - DNA, 468 bp, Homo sapiens
gaaaccatctctagattacttataagagcgaatacaatgcctacacatcgcttcattatgattcaacatagtacttggcttgctgcaaattcaagttttgctttttggaactttgtagaatttttttcttaatatttttgaaattatgcagaaaacagaggtttcttctccacaacacccttctggtttccggtgagcctaactgtggctgaagatataaatgttcacactgcaagcaaactctgagcaccatccaccatcccaaagagctctccacatcgcctctcctcaaaaccaagcagctgccaggtccctgtgtggagatcctaggagaggagcttggagcctctgtatagctcaacctgaaaactaaaatgcgggattaaaactacaaactgacttgattcttttgccgtgccacatgtggggccacttatcaagcctagttctaaagagactacccaggcg

SEQ ID NO: 5625 - DNA, 471 bp, Homo sapiens
tttttttttattttcaagttcaatatttccattatctttctctgctggctttggagttgtaatgctggcttgttttctgacataatcaaccacttgacccaactggtttgaactacaatactggacctcattatcacatacgtaacaccatacactccagttgtccaaactaagaaccagacagtgaggttcagatcttggcgtcagatagtgcttcaaggcatgctgctcctgagaatttctgccacagccctgatggccacatttaagacacagccaaactgaaggcttttcttctgtttcttcttcagctttatctttcactttattgtcagtcttacagtcttggcagatattccattccacattcactaaagcctttttcaaattaccttgttccaatccttttctaatgtgtctgcacacaggttctaaagtttcagaggaatcatcgattggaacagtttttcc

SEQ ID NO: 5626 - DNA, 470 bp, Homo sapiens
tttccatggaataagtgagtcttttttatgaaacaaggaaatctactaagacttattttgacactggagtgtcatgcccccatcctcaatctaacatgctactgcgttgttagagggtaaaaaggccgtcttcgtcttcccttccatgctgcacgtcattgaggacatttttactatctccaatgtagtctagccttgtgtgtttctgcgaacaataggtttccatgagtttccctctcaggagaaacgccacaaacaatgcgaagagcacaaatcccaaggagggggcgatgatcatcagtagttgggagatgggcatttcattcttcattgacatgggtattccatccatctgtcctgtttttgttgttttgttctgctcaggaactgctgtatcagatgatcagtcaggcgttccttagttccaagggaagaattgggtggggtccatgttggtaattttgaaagag

SEQ ID NO: 5627 - DNA, 168 bp, Homo sapiens
tgcaggtgtggccatgaccaacctgcctggcatccttgtcctgggcctcgccaaggcccagctcattcagatcttcttcttccgcctcaacctcctgatcactctgctgggcctgctgcatggcttggtcttcctgcccgtcatcctcagctacgtgggctgatgtta

SEQ ID NO: 5628 - DNA, 87 bp, Homo sapiens
gttagactggttggctgttcacaaattttgatattccttagagcattaaaacattttaataaatacttataaataggtaaaaaaaaa

SEQ ID NO: 5629 - DNA, 805 bp, Homo sapiens
gctgcgctgtgctggtctctaggcctgaactaggtgctggcatgtctgggtcgtcttttgaaaagctcacttcaagctcaccctgctcctacctatcataaggtcttattcttgtgcactttatcttgggaccaaaactgcctacccaccccttcccgccctccccctgccagaggcctggtgccctgggcccagcctgtggcctcagcatctcataactcatttgctttgtctcccggatgatttccgtcatgctcccaaatgcagcttcaggtgagccaaggggtctgctcctgtggcggagcagtggcaaaggatccagatagcctagggtgagggtgacagagggacagtgggctatgccactaggccctggtctggctttggaaagacctgtgaggggaaaccttcacccagcacccatgccccactctgctgaggccagaggaagggaggcctgaggggcagattggttcatgcctggggtggaggctaagcctggacacagtcagggcggggctggccagctgtgcgagaacacaagccacgcctgcgatggtgctgcacccctggtgtccctgcctggccctcctctggtcacttcaaacatgccctcaggcttggggatgcccttcttccattcccagacagcagtgtgagggtgcagggaccaagatgtcaagctggccgtggagtcgagctggccgacggacccctttcacctggttatgagccgacttctttggtgttctggcctctggctggggaaaagggaaggagcctagaggaggaaaaaggctggtgg

SEQ ID NO: 5630 - DNA, 1517 bp, Homo sapiens
tggttctgttaataaattcagagacaccaatcttttaggaaccacatgaatcccagaggtctataaattaacaaaagacagctcaatgaagacagtgtacccacagagaaaaaagccatgcaggagtagtggtaccatccaaagtacctagaagaaattgtgagaaatatataaactagtatactagtcaaaatttttattttacaagatatgtgtttatgtcccgaaagtctggttataatgcctacttactgtgtcagtgaaaatttccatgtgccaaaaaaaaaaaatgtaatttgttacaatatctataatacttaacttttcttcttttgcctgttcttgttttcctttggtatctgccgatgttttctggagagagcctcttgctgctctgcaaggtcgattttctaaattgctagagcttacacctggagcaagttcaaacatccactgagctcggaacatctggagttgtgcctgcagatctgtttcagcaggactttcattttcttcatcatcatctgctctgacagtatcagatgatgatgaagaaaatgaaagtcctgctgaaacagatctgcaggcacaactccagatgttccgagctcagtggatgtttgaacttgctccaggtgtaagctctagcaatttagaaaatcgaccttgcagagcagcaagaggctctctccagaaaacatcggcagataccaaaggaaaacaagaacaggcaaaagaagaaaaggctcgagaactcttcctaaaagcagtagaagaagaacaaaatggagctctctatgaagccatcaagttttatcgtaggggctatgcaacttgtacctgatatagagttcaagattacttatacccggtctccagatgggtgatgggcgttgggaaacagctacattgaagataatgatgatgacagcaaaatggcagatctcttgtcctacttccagcagcaactcacatttcaggagtctgtgcttaaactgtgtcagcctgagcttgagagcagtcagattcacatatcagtgctgccaatggaggtcctgatgtacatcttccgatgggtggtgtctagtgacttggacctcagatcattggagcagttgtcgctggtgtgcagaggattctacatctgtgccagagaccctgaaatatggcgtctggcctgcttgaaagtttgggggcagaagctgtattaaacttgttccgtacacgtcctggagagagatgtttttagaacggcctcgtgttcggtttgatggcgtgtatatcagtaaaaccacatatattcgtcaaggggaacagtctcttgatggtttctatagagcctggcaccaagtggaatattacaggtacaactgtagtacactgagtgagtggaaaattctctctctccatgtattagttaaatggacatctgttctttgttgcttttgattgacccgcaaaatggccctcagtatttttaatctagtactcaatgtaggaattgcactaaaaaaaaa

SEQ ID NO: 5631 - DNA, 465 bp, Homo sapiens
gggtgcatgttgtgttgctcctttgctcagaacactccaggaaagcttctcatctcactcaggaaaaaccgaagccctctttttgatctgctgttctccacctcactcagtctgctccagcagcactgaccttgctatttctagaacatgctggagatgctggcaagctcaggagccctgtcaatttgtattccccattgccctagagtgctctgtcttcatcatccatgtctcgtccccccaccttctttcgagtgtttgctcaagtgtcaccatagggagagaaccttttctgaccaccttaaacgttgctgaaaacctcccccagcctgcctcttgccagcatgttccatcttcttccttttttagcacctaccaccttcacatatattatttacttatttttattgtctgtttctccctgccacgagagacggagatttttacccctagcacctggaactg

SEQ ID NO: 5632 - DNA, 551 bp, Homo sapiens
  misc_feature (1)...(551): n = a,t,c or g
ccaagctgtaccctgtggatttgttcccctcacaccccacattgtgagctggtgctcctctttactcgataagcagcctcctagaagactgcaggctatttgttaaggctgaagtttcagaaactttcaggtttggcatattgctacattgcagaccctgggagcattacagtggaaaccaatctttggtttgtgaataggaagaatctattaggcctctggtctgaggcagattttttttttgagatggagtctcactnnnnnnnnnnnnnnnnnnnnnnnnnnnnnnnnnnnnnnnnnnnnnnnnnnnnnnnnnnnnnnnnnnnnnnnnnnnnnnnnnnnnnnnnnnngtagttatccctaggagcaatagcaccaattaactctcacccgtggaggaagaattggttattggagagaccctaagggaaaggagattttcagagagactgaatacctataattgtgctgtgtagtgtggaggcaaaaagctccaaaatctagtataacataataaactggatattgaaaactgactgtaaaaaaaaaaa

SEQ ID NO: 5633 - DNA, 441 bp, Homo sapiens
cacacgcacagagacatgccagaacatacaaggacatgctgcctgaacatacacacgcacacccatgcgcagatgtgctgcctggacacacacacacacacggatatgctgtctggacgcacacacgtgcagatatggtatccggacacacacgtgcacagatatgctgcctggacacacagataatgctgccttgacacacacatgcacggatattgcctggacacacacacacacacgtgtgcacagatatgctgtctggacacgcacacacatgcagatatgctgcctggacacacacttccagacacacgtgcacaggcgcagatatgctgcctggacacacgcagatatgctgtctagtcacacacacacgcagacatgctgtccggacacacacacgcatgcacagatatgctgtccggacacacacacgcacgc

SEQ ID NO: 5634 - DNA, 553 bp, Homo sapiens
cgaataagtttattttgtctggagtgactgaggaaatgccctggagagtaccaagagaacagcaaagtccctgtggagcatagagtcaagaatagctccacagggaggagaccaaagtatcctgcctctgccatactgtctcccctgcgaggattgaatcaaagccagggggttcctcttcttataggaagaaggtaagcggagaatcatcagtcctcatcaccaccacaggtgccagcagtcactgctacaagagagttccccagtcctcacaggtcccaagtccagcatgaacagttgctgaaagtgcatgtggctacattcccccacagtaggaacctctttgacaccctgcacccctgcaatccaagcagctaagggatgacacaactgtgaaaccaagcccacatctgggagtgcttcctgacctgggaggccagtagccaccctgtatcccagaggcattgccctcattccacaaagttcaaaaaaagtgcctctggcctaattcctcgcctcctgggtgcctcggtcataggctctcctggggcct

SEQ ID NO: 5635 - DNA, 691 bp, Homo sapiens
  misc_feature (1)...(691): n = a,t,c or g
gccccccactctaaagcctcctccctcccagcgtccactggctccaggctcctcacaacagcagctcatagacacggggcgtctccaggtggtcccagccctccagatgtttctagctctccaggtgggcgctgttttcacgtctgcctgcatccattcattccttcattcctcacctttatcctgttatctctatttttttaagctaccaggaaggaaagggaagaagagatcacgaaactgggacccccagaagggaggagtgggctttgaacttagacatctacctcagagctcaaataggttgtttaaaatcacattcaattttcagatgaaggggaactttatagtttttttttgttngtttttttttttganacanantntnnntntgtngcccaggntgnagngcaaanggntngatntnggttnantgnancnttnnnnnnnnnnnnnnnnnnnnnnnnnnnnnnnnnnnnnnnnnnnnnnnnnnnnnnnnnnnnnnnnnnnnnnnnnnnnnnnnnnnnnnnnnnnnnnnnnnnnnnnnnnnnnnnnnnnnnnnnnnnnnnnnnnnnnnnnnnnnnnnnncntcaggggatttgccgccttgcntccgaaagtnntgananacanttgcaancccttgngcatggccanaacttttaatanttanaggagncttgaagctggg

SEQ ID NO: 5636 - DNA, 412 bp, Homo sapiens
  misc_feature (1)...(412): n = a,t,c or g
ggaataataatacccttgtgtcaggcttcctgtggtctagcactgtgtcccgtactttatagtttatttcctttaatactcatgcccatctagggtagtaggtaccatggttgttcccagttgatatatgacggaatcgaggcttagcagaataagaagtcacccaaactcatacccactggtcagcagtacagctagaattcaaagccacacttgtctaggtccaaaatctgcacccctaattaaccactcctggtaaggaagctggttataaggggctgggtcaagtcagctatgggaaggaattcttcaggaaagtgactcttaaagggtgttcttttggaagggttgtgttaggggatttcacccaaaantggggaagggaggacagggcctttccnttgccagggtt

SEQ ID NO: 5637 - DNA, 704 bp, Homo sapiens
ttcagaattaacacaatagcccatttcaacaagctgtatatttgagaacagagtgacagttattaacatccagtaggaaattaagagttgttgttcacaaataataaattactagattctgacaaagactaatggggattaagtaagcgtgactcaatataacaaatttaagcctaagcatcttctaggccctgaaatgaacaaggtattgctgccagttaaagtcagttgtgtcttacaacctgctagctgtcttgctgtaaaaactgtaacgtaaggcccttgaaatagatgccgtcatcagccccagcccccaagcattcatctatttaaacacatgacagaagatggtggaagagagttcagcagctattcatgtggtagaagtggttattgtattaggacatactctgttgtaggccagcaacttttgagttaaaacaccgcagctgtttctcttcctttctttacatctttctcttcttttttttttttcttagcaataaactcacttttttttccccacaaacattttgtgtagatccaaggagcaacaaattccaactttctgctgtagcaattacacgctttttgtctgtttgactagattttagtattttactttttctcttcttgttaaaggcaacggacagccaagacgtagatccatccaagacttgactgtaactgggacagaacctggt

SEQ ID NO: 5638 - DNA, 264 bp, Homo sapiens
gaaagatatccctgatcctgtttaagagcataaataatactctcaatgtaaattgttttgaaataagatcttaaaaatacaaaatgtagacaattaatattcaggtgcttacttttgagccaatatgtagcagagaaaaactaatttctctgtggcagtatttttatttttggcatttcccaggaattaactgaagactaaaactcatatgtgaagtgtaatgatactaatcaaagagtcagtaaaatttccatttggctaccg

SEQ ID NO: 5639 - DNA, 583 bp, Homo sapiens
aaaaagaacagacggcttgccttagagctgatgaagaaagcagcttccaagggattgcatcaggcagtcaatggcctgggatggtattaccacaaattcaagaaaaattacgccaaagcagcaaagtactggttaaaagcagaagaaatggggaacccagatgcgtcatacaatcttggagtcctgcatttggatggcatcttccctggagttcctggaaggaatcaaactttagctggtgaatatttccataaggctgcgcaaggtggacacatggaagggaccttgtggtgttctctctactatatcacaggcaacctggagacattccctagagatcctgagaaagctgttgtatgggcaaaacatgtagctgagaaaaatggctacttgggccatgtcatccgcaaaggcctcaatgcctacctggaaggttcatggcatgaagctttgctgtattatgttttagcagcagaaactggaattgaagtgtcacagacaaatttagcacacatctgtgaggagaggccagacctggccaggagatacttgggtgttaactgtgtttggagatactataatt

SEQ ID NO: 5640 - DNA, 423 bp, Homo sapiens
ctaaatacaattacaatgtgcaaaaagagcatgtacttcagagtactttcagtacccaaatatgatctaacgcatgaaaattcaactttttaaagtatcagttgatttaattgcaagaggattcaaatgatcccaaaatgtttcctaaaagccatcctttggctgttcttatacacttcacacccttccaaaccgtaaaccattatgtgagaagaatgctcagaactaagtagtgaatgaatggccttaaggtttttccaagtcattaaactatcctacagaataagaaaaattctcaggtacttttatttcactggtttgtaacgcttacctacaacagtaccaaaactcagaaatgttttcaatgcaacgtatcctgaaaacaatgcagcttatagtgtctaggtgcttttctggtcgagc

SEQ ID NO: 5641 - DNA, 458 bp, Homo sapiens
gatcctccaatggacgaccagccaggggaaaaggagcttgtgaaaaggtcacaactggatggtgaaggagatgggcctctttctaatcagctctccgcttcatccaccattaaccctgtgccattagtagggctccaaaaaccagagatgagcctaccagtgaaacctggacaaggaggttaggattgctgcattgcttgcgtaactgaaggttattttttttaatatattctgaagcttcaagtcctttcacaccagtggccgatgaggacagcgtagttttcagtaaactgacttacttaggctgtgcctcggtaaatgctcccaggagtgaagtggaagccttaaggatgatgtccatcttaagaagccagtgtcagatttcactagatgttaccctttcagtgccgaatgtgtctgaaggaattgtgagactcttagatcctcagacaaacact

SEQ ID NO: 5642 - DNA, 2554 bp, Homo sapiens
  misc_feature (1)...(2554): n = a,t,c or g
ctcaagataaagaccttaaagataactttgtgtgtctctccctttctaggtatttgcataggaatcagaggagttaatcttgtctcttctcacaggtttgaatcttcagacaaacttctgggaggactcggtccctgcctcgcagcagatgttccctgtcactcagtaggcatatggctacccattctccccagaaatctcaccagtgtgctcactgtgagaagacgttcaaccggaaagaccacctgaaaaaccacctccagacccacgaccccaacaaaatggcctttgggtgtgaggagtgtgggaagaagtacaacaccatgctgggctataagaggcacctggccctccatgcggccagcagtggggacctcacctgtggggtctgtgccctggagctagggagcaccgaggtgctactggaccacctcaaagcccatgcggaagagaagccccctagcggaaccaaggaaaagaagcaccagtgcgaccactgtgaaagatgcttctacacccggaaggatgtgcgacgccacctggtggtccacacaggatgcaaggacttcctgtgccagttctgtgcccagagatttgggcgcaaggatcacctcacccggcataccaagaagacccactcacaggagctgatgaaagagagcttgcagaccggagaccttctgagcaccttccacaccatctcgccttcattccaactgaaggctgctgccttgcctcctttccctttaggagcttctgcccagaacgggcttgcaagtagcttgccagctgaggtccatagcctcaccctcagtcccccagaacaagccgcccagcctatgcagccgctgccagagtccctggcctccctccacccctcggtatcccctggctctcctccgccaccccttcccaatcacaagtacaacaccacttctacctcatactccccacttgcaagcctgcccctcaaagcagatactaaaggtttttgcaatatcagtttgtttgaggacttgcctctgcaagagcctcagtcacctcaaaagctcaacccaggttttgatctggctaagggaaatgctggtaaagtaaacctgcccaaggagctgcctgcagatgctgtgnaacctaacaatacctgcctctctgggacctgtcccccctgttgggcttctgggcagctgccccctcctgctacccaaaatacctttgggaataggcactcttgccctgggggcctggggaatctttgccccacaggttaagctgtctggggcagcagcagcaagaacccccacttgccatgggcactgtgagcctgggccagctccccctgccccccatccctcatgtgttctcagctgggcactgggctttgcccatcctggcctcatttccatcatgcattcagataattgatttttaaagggtatttttcgtattctggaagatgttttaagaagcattttaaatgtcagttacaatatgagaaagatttggaaaacgagactgggactatggcttattcagtgatgactggcttgagatgataagagaattctcgaactgcatgtattgtgccaatctgtcctgagtgttcatgctttgtaccaaatttaatgaacgcgtgttctgtaatcaaactgcaaatattgtcataaccaacatccaaaatgacggctgctatatataagtgtttgtcatatggaatttaatcgtaagccatgatcataatgttaactaaataactttatgtgggcactgccctagtaagggaacctatggaaaggtttggatttctcccaaatctgggagaattttcaaaataagaaaataacctttatatgatatactatgactaggctgtgtatttcttttcagggatttttctaccttcagggttggatgtagtttagttactattaccatagccaacctgtagttttacatatacattttcttgtggagcaatagagttctccattttacagaagcattttaaatgtagtttgaatattttccacaagatgctgcaatgtgagttatcacttcatttatcttaaagaaagactaaactggttgtcagttacatctgacagaaaaaaaaaaaaaaatcactgtgtaaccagggttaagtggttaaaataatccagggcgtcagtcaaaggcattttgctgactttaatattgattatatttttaacagggaatttaaggaaaatattaccggggaattaaaaaatatatatatattaaaacaagaattttcctttgcccctgtccagcctaaacctacctacctcaaggctgcctaagttcctaagtattgtttgtaatcacccaataaataagtgcatttgtaattcatcagtcattattagcttttattaaaagaagattacgttttacaatgtaactataatctcttgaatttggtatcttattaatgagttttaaagatgtaaaacctaaccttttttaaagctccattgtcttatgtttttagaggcttttccgtaaacatatatcttacatataataaacttttcaa

SEQ ID NO: 5643 - DNA, 406 bp, Homo sapiens
cagagcttctcctgtggctgttccgaagaatcctggggcttccaggacacgggggctgtggtttgagcaatagttttcccagcagctgtccccgtctgctcggaagtgggctccccgaactctgccgctcttagtgaaaacttccttttcataacattctccacctccaccttctcttcaaagggcaggctgtccctcaagtccaagtttccttgtgcattcattttagcatggaaaattccttcgggttcatccccgaggtgggttgatgagggggttccgcccgttccagggttcctcttcttggaacagaatttttagattccctatggttgcttcctccccggtcgggtcaagatggggtaggatgttcttgttcctcaaagacccatattctccaccaatt

SEQ ID NO: 5644 - DNA, 273 bp, Homo sapiens
gattttccaaaaatcctatcctatcctaaaatattaagccttttccttcctgtgtagtacttactaaataactttttgtattcaggcatttgcatcaaattgctgaacaagatgaatagcccacattaattcaatgattttaaaagactatttggggagggttgggtatataattttttagctctatttacatcccaaagtagaaagattaaatttatatttactagagctattcaaagaatacacttttctatattgtaaaaacaggacagc

SEQ ID NO: 5645 - DNA, 471 bp, Homo sapiens
  misc_feature (1)...(471): n = a,t,c or g
gcagagaaatggcaaaatgataatagtgttttttaaaaagacagtcttttgtctggaaaataaataaaatgcaaggcatcagactctccaagagagtattgcatctggagttcatgttatcatagtaccttccttctaaagaagtgtagctggtaaataatcaaatgtaacagtccacactcatgattgaccttgcctggagtatgccgtcagtcaacattaaggggttcattacaatggaggaggtaaatttaaagagtcactgtattttttgccttccaagatcactttaggtgtccttaatgtactgtaaaatctttctctttttctgaacaaaggctgagcctttaatgaccatcagttgttaaaaaggaccagtgctaagctggggcacactgggcttcgtgcctattaatcccaggntactcggggaggctgagggtggggaggnttgctttgaggcccggggag

SEQ ID NO: 5646 - DNA, 792 bp, Homo sapiens
tttttttttctgtgtgaatgtattttattttattattattgaaaacatgagcaaatcagcattctcaacactatggatttctggtcaatagaggactggtttggaagatgggagcacagaaagtaaaagtcacccagcacttgtcttattcacatctgtgcccaccagctggggcatagaagggtttctgcctcaggcatggaggcatgtgctcacagataccagtattccaattccttgctcactccataccagtccttctcctttctgatactacacagaccttgtccttcttgagtaaagagtataaaatagatgctaagcctcggtggtgactttgtaccctctcccaccccaatctcctgcaagttatccattagttttaggagtctgaatttctctatggtggtccccagtccagaatgggctaaatgaggctgtggctgtcttctggacacattttctgccttggtctcacttcttttctcggctgcccatcttcccccacccccagctcctctgcccagccccatctcactgagtctccgtgcggaagaggaactcggcctgggcgccctgagtgttctgccgcagaaagagtcggaacaggtttttgtgaggtccatgtagcttcatttcacacttttccccccgaatggaggagaagggagcatggtcaaataccaggaatcggctaccctctcggggccgagacagcagcagacagtcattgaagaggtgcaggtggactggacgcgtgttcagcttccttcgtagccctggggaagcact

SEQ ID NO: 5647 - DNA, 1463 bp, Homo sapiens
  misc_feature (1)...(1463): n = a,t,c or g
ggttgccttactttaatgctgacctagcagccccgacaggaagctttaacataaagccttgaccctgagaagcatgggtgcgtcttgtcgtgagcaggttcatggctgtgctccatcctcagcccgctgatttttggtcttttgtcctttgatccagcagttcccacgtggatgttgtactgcttctgtccttgatgttgatgccgtgggagtcaggccccggcgcagggtgtcgcatgcttcccagcaggggctgcctttctaggagctgctgccgccgggcgtcccccgtgggcctcgggcatggccaggcgcaaactgccggaccttctgccggaaccgcacaagctcgtccaccacaccatgcaaggtaggcctcgctgccgtcccctgaaacgtactgttgatttgccagagaaattccaacagtttcaaaaaactgttcaaagtaagagatgatggcaccaaacacagcaggacttctcggcccttcaggttccttcagggacgccctgagctgtccattcccgtggtgtgcaaggcccaggatggcatcaaccaccctggngtgtcaaaatcatctgccaaggccgccttcacggccctcttggtgctggagagcctctcccacagcatcgcttccctgacggagccgcaggccagctgccccttcatgtaggcacgtgcgtcctccaggaaagagcccagcccccaggagcagctgctgagcttggagcatggcgctgtcactgtagtcgatggctgagcggtaagtctccgcaggcagaagaaccggaagacatcgggggaaaaggtcttcagaaagtccttaatagtaatgtagttctttaatgatttggacattttttcttctcttnctttggcgtgcaaatgcccagaatgcagaaaataatttccccactgctcgcactgatgaaagacttcgcactgtgcaatttcgttctcatgatgtggaaaagctaaatctatcccacctgaatggatatccagttgacttccaaataccatactagcgatggcaagagcactcggatgtgccagcccggcctcccgggtccccagggagaggcccagaacacctcctggggtttggccgccttccacagggcgaagtcactggcatgacgcttgtcagagtccgctggctctccgactggaccagggaccacgccgaccaatttgccatacttgtctcctctagacttcagatcgaagtagacattgccttttgccgttgaataagcgttcccacgagcaatgattccttcaatgaaagaaattatctgaggaatattttcggttaccctcaggtacaccgtgggtgggagaaccttcagggctgccatgtcctgcttgaagtcttcctcataaagactggcgagggaagcgggggaaatattcatctcattggctcttttgatgattttatcatctacatcctg

SEQ ID NO: 5648 - DNA, 5888 bp, Homo sapiens
gaattccggctgccaggggcgtccggttacatccccgccttcctctgtcctggccgcgggaccgggtttgcgggaccgcagttcgggaacatgttggcctcgagcagccggatccgggctgcgtggacgcgggcgctgctgctgccgctgctgctggcggggcctgtgggctgcctgagccgccaggagctctttcccttcggccccggacagggggacctggagctggaggacggggatgacttcgtctctcctgccctggagctgagtggggcgctccgcttctacgacagatccgacatcgacgcagtctacgtcaccacaaatggcatcattgctacgagtgaacccccggccaaagaatcccatcccgggctcttcccaccaacattcggtgcagtcgcccctttcctggcggacttggacacgaccgatggcctggggaaggtttattatcgagaagacttatccccctccatcactcagcgagcagcagagtgtgtccacagagggttcccggagatctctttccagcctagtagcgcggtggttgtcacttgggaatccgtggccccctaccaagggcccagcagggacccagaccagaaaggcaagagaaacacgttccaggctgttctagcctcctctgattccagctcctatgccattttcctttatcctgaggatggtctgcagttccatacgacattctcaaagaaggaaaacaaccaagttcctgccgtggttgcattcagtcaaggttcagtgggattcttatggaagagcaacggagcttataacatatttgctaatgacagggaatcaattgaaaatttggccaagagtagtaactctgggcagcagggtgtctgggtgtttgagattgggagtccagccaccaccaatggcgtggtgcctgcagacgtgatcctcggaactgaagatggggcagagtatgatgatgaggatgaagattatgacctggcgaccactcgtctgggcctggaggatgtgggcaccacgcccttctcctacaaggctctgagaaggggaggtgctgacacatacagtgtgcccagcgtcctctccccgcgccgggcagctaccgaaaggccccttggacctcccacagagagaaccaggtctttccagttggcagtggagacttttcaccagcagcaccctcaggtcatagatgtggatgaagttgaggaaacaggagttgttttcagctataacacggattcccgccagacgtgtgctaacaacagacaccagtgctcggtgcacgcagagtgcagggactacgccacgggcttctgctgcagctgtgtcgctggctatacgggcaatggcaggcaatgtgttgcagaaggttccccccagcgagtcaatggcaaggtgaaaggaaggatctttgtggggagcagccaggtccccattgtctttgagaacactgacctccactcttacgtagtaatgaaccacgggcgctcctacacagccatcagcaccattcccgagaccgttggatattctctgcttccactggccccagttggaggcatcattggatggatgtttgcagtggagcaggacggattcaagaatgggttcagcatcaccgggggtgagttcactcgccaggctgaggtgaccttcgtggggcacccgggcaatctggtcattaagcagcggttcagcggcatcgatgagcatgggcacctgaccatcgacacggagctggagggccgcgtgccgcagattccgttcggctcctccgtgcacattgagccctacacggagctgtaccactactccacctcagtgatcacttcctcctccacccgggagtacacggtgactgagcccgagcgagatggggcatctccttcacgcatctacacttaccagtggcgccagaccatcaccttccaggaatgcgtccacgatgactcccggccagccctgcccagcacccagcagctctcggtggacagcgtgttcgtcctgtacaaccaggaggagaagatcttgcgctacgctttcagcaactccattgggcctgtgagggaaggctcccctgatgctcttcagaatccctgctacatcggcactcatgggtgtgacaccaacgcggcctgtcgccctggtcccaggacacagttcacctgcgagtgctccatcggcttccgaggagacgggcgaacctgctatgatattgatgaatgttcagaacaaccctcagtgtgtgggagccacacaatctgcaataatcacccaggaaccttccgctgcgagtgtgtggagggctaccagttttcagatgagggaacgtgtgtggctgtcgtggaccagcgccccatcaactactgtgaaactggccttcataactgcgacataccccagcgggcccagtgtatctacacaggaggctcctcctacacctgttcctgcttgccaggcttttctggggatggccaagcctgccaagatgtagatgaatgccagccaagccgatgtcaccctgacgccttctgctacaacactccaggctctttcacgtgccagtgcaaacctggttatcagggagacggcttccgttgcgtgcccggagaggtggagaaaacccggtgccagcacgagcgagaacacattctcggggcagcgggggcgacagacccacagcgacccattcctccggggctgttcgttcctgagtgcgatgcgcacgggcactacgcgcccacccagtgccacggcagcaccggctactgctggtgcgtggatcgcgacggccgcgaggtggagggcaccaggaccaggcccgggatgacgcccccgtgtctgagtacagtggctcccccgattcaccaaggacctgcggtgcctaccgccgtgatccccttgcctcctgggacccatttactctttgcccagactgggaagattgagcgcctgcccctggagggaaataccatgaggaagacagaagcaaaggcgttccttcatgtcccggctaaagtcatcattggactggcctttgactgcgtggacaagatggtttactggacggacatcactgagccttccattgggagagctagtctacatggtggagagccaaccaccatcattagacaagatcttggaagtccagaaggtatcgctgttgatcaccttggccgcaacatcttctggacagactctaacctggatcgaatagaagtggcgaagctggacggcacgcagcgccgggtgctctttgagactgacctggtgaatcccagaggcattgtaacggattccgtgagagggaacctttactggacagactggaacagagataaccccaagattgaaacttcctacatggacggcacgaaccggaggatccttgtgcaggatgacctgggcttgcccaatggactgcacttcgatgcgttctcatctcagctctgctgggtggatgcaggcaccaatcgggcggaatgcctgaaccccagtcagcccagcagacgcaaggctctcgaagggctccagtatccttttgctgtgacgagctacgggaagaatctgtatttcacagactggaagatgaattccgtggttgctctcgatcttgcaatttccaaggagacggatgctttccaaccccacaagcagacccggctgtatggcatcaccacggccctgtctcagtgtccgcaaggccataactactgctcagtgaacaatggcggctgcacccacctatgcttggccaccccagggagcaggacctgccgttgccctgacaacaccttgggagttgactgtatcgaacggaaatgaagacaagagtgccttatttcctttccaagtatttcacagcaacactctacttgaagcaacttggtccagattgaaaagtgtcctctggctgagtggccactaggcccagacccagcccagcctgagccccaacaacaacttttccctcactgttccccaaaacatgcaccctggacttctctaatagaaaagtctccacccctacacaaggacagaaccctccacccctacccccaaccctcagacagacttatacacccctgagtgaggattacatgcccatcccagtgtcctaggaccttttcccaatactagccccccagtggtgaacagaacctcccaaatttgagttgcacccttccctgtggccttatgagctcagcctcgctttgaggtacccaccgtcctgtcagctccttgacctatgagctggggcctgactaggaaaagttgggagttaaggaggaaattagcattccttaatgttttgttttggtgctctgaatttcttctttattatagtcctatagttttactcctcagttcctcaccatcatcatcttgtctaagacccccattataatattcatgcgctgctttttcatcaaaacctaccctgtcctagagatctatgggcatttggtggatgataatgagcagcccctcccagatagaatgtcaatatttgagcagtaggatattggcatttgttagttaaaggcttaaatcaaaagaatgtccaatggtaggaatttcaaggtgtaggtcagatatttgagaataggggatttttttgatgtgccttaaattataccaaagattactaattattcctctttgcccaaaatacttgcatccaaggttctagtctctgttgctgtgctggtctttagccccactgctgggcactgatgtccctcctttttcacggagacctatctgaggtacaggatggggctgggcaccagatgatgtcccaccacagtcccttcacctccggcctacacatgacagaaccaatttacactcaaccatgacctcacccctccttggtttctccctcgatctgtggccctttttggatgtattcttatctaacaacacaatccggaaagactgaattgaatatttatactaatggttcatatcctttattgctcaatgatctaattaaagggatcattgccacatttcatgtttatatttctacaatttgtttagaaaacatctcctgaccatatcagtagctcgtgttatctttttatcaactgcttcccagagtcctaaaacaatagaaattttggattgaaaagttcagcataaggagtttgagtcagtaaaggatgggataaaggagtcgagatgattcaatgaaaagtatcacaaaaaagagattgatcaacaagagaaataaaaaagcccaagaggaagtggtaggggaaggaatttaagaacagcaataagtaaaactcttaagtaactccaaaaagaaaatggtacattttgccaaagaccacttatacttgagaacatggaagaatttgcctgatactctctttggggaaaagagtctctcctcttttcctcaaaccccagtacactcagcctctctgccccaccttctcctgactttgtcctcacttgcttctgcagtacattggaacctgaattgaaagaaagtcttccttggaataattggagtttgtcttgagaggcaaatatagccccaagaatcacaagattcgaggaccatgtaggtcttttaccgtagcccaaatccataaattagtctcactttttgtatttatcgtttcatattaaaccctctatatcaaatgttcatcatgattttgtatgatttttataactattttattcattttattagatttattctaaaattttttaatggtaaattcttaaactgtggaaaccactgaaggtgcttattaactgttctcccagatttgtacaagtattggatgattccttgagtttacagctgtacaaatagtgtggaaaataaactttttttaaaaaagaaaaaaaaaaaa

SEQ ID NO: 5649 - DNA, 1116 bp, Homo sapiens
gtgggatttttttttttgcttctctaggtgaaggtttaaaattaaacttcagcatgggtaaaactaattctttcctttcttttttctctccccagagttctcaccacctcctcccaggctaaatccttcatgttgcaaggagacagagaatcccaggtgagacccggactttttctcctccctcccttccttttttcaccgtgttcaggataaattatcttggttttgtttctggagggaaaagggcagagaggccctgacttgaatctcaatcacatttctgcacacagtaccttggacagaagtcatgatgatggggcccatgactggcaacctgctgggagaggtggcctgcagtgtgtctggagtacatgggggaccccgggagcatcttctgtgtctgtggcccctggaggcctgcatcacttggtgctatgccactatcagatccaccacaggagccatgtgctattcattccacaaggagccctttcaacagggagacatcaggcccaactggattctagccaccttggtctccagtctcctactctcaggcccatgagtgacaattcagcacaggaaatttggttctgtgagcagcatctattggcaggatgaccagcaattcttgtgtgtggtttgcaaagatcttaacggagaacaaatgttacttagtgctgcagaaggagaacaatgctaggttccacaaggtagtctgtccttttgctgtcttgtctacaccagagaacctttggttgacttgctttaatattggcttcagtcctgttcatcaggagttgctgagggggtcacttggagatccaggctcgccaagcagccactgtcttcagcaccagctaatgccctgctagtgggcaaagagggagctctctgaaacaagtgcaattccaaatcccttaacccaagctagagcatagaattcacaggaccgctgcctttgtcctcctccagctcagagactgatgtctatatcatgaatgcgctaagaaagggagaatcacgagtggaatccagtatcagtagctgggagcaaaagacacttgcggtaagggtcctcgggtttttcactgcaagacttttacctaatccttg

SEQ ID NO: 5650 - DNA, 509 bp, Homo sapiens
  misc_feature (1)...(509): n = a,t,c or g
gtttttttttcttttgttttgtttgtgttctcaagaatgctttctaaaacaaactcatgtgacataaacagggccagcttgccctagttacacccttactatttcattaacaaaggaactgggctgccattctgtttttgttatgcttatgctgaataactgtactcagccagctgccatgacttgtctgtaatcccannnnnnnnnnnnnnnnnnnnnnnnnnnnnnnnnnnnnnnnnnnnnnnnnnnnnnnnnnnnnnnnnnnnnnnnnnnnnnnnnnnnnnnnnnnnnnnnnntagccgagtgtggtggtgccagtctgtgcctgcctgttagtctcggctactggttcggggagaggggcctgaggtgggagggatcacttgagcctgggtcacggctgcagtaagctgtgggcaacagagcaaaaccctgggtgacacagcaagatgtgttttcattaaanattaagtattataactgtatttcaattgactttctttcttctt

SEQ ID NO: 5651 - DNA, 315 bp, Homo sapiens
  misc_feature (1)...(315): n = a,t,c or g
gctgatagttggcattggtcctgtgctcttctcagcacagagtaagtagatgaaattcagttctcaactttcccctagggagggaaaaagttgatccagcactgcagcttctctagggcagcccagagaaatagcatctgtctcacgaagctctaataggtccagcatggtctagacacctagggaagaacagagacagcagattgggctgatacatgctatagttccctaccccccagctcatcacagagcaagccagcatctccctggggagggaaagagttgganaggcctgctgaatctctgnccanctga

SEQ ID NO: 5652 - DNA, 947 bp, Homo sapiens
tttccttcttataggtcaaaaggataagtagtccatagtatgaataactgaggggagtgaagtctttttccttattccattggagtcttggcgctgcagcgtgtgtaaagatgtatacgatagagagtttttttaaaacctaggttcttaatagtgaggctatttaaagaaagaaattaaggtagattaagccatcgattgtatcaaagagaaagtgtgaaaaactacttttagaaatctgttgtcaatattgatttttgaagaaactttggtcagtgttaactatgaagaaacatttaaacatttttgctcatttgtaacaagccttgtttaacttgtacttattttgcttgaagcatcacttgaaaaggtttactcctattcataatttaattgtaattataataaaccatatcattttattaaaagtcaaaacaataaaaaattttgcacttcacagttataagcacaaataggttccagcaaccaaaattgaagaaatcttgaactttgaccgtctttacctaaagattaggttaaaatttgagtgagaatgcattctctctgcatgatttctctgctctacaaatgttttaactgcctctttgaaggtggagaagtcatggtagcttttgaaatcatcacagacatgttacataccttttccttgagtatacgctccccaaaattgtttcacaaaaagaatgaaaataattttatgtttttggcctgctatttatatcttggctttctgaacatatattaaatttgacaagaaactgtattttatgttccattagccttagtatgtgttttcaaaatatttattttaaaatgttgactcaaaagttaatataaaacaatagatgtgtaaaattctttggtacgttaagaatatcctgttctgaggtttacattctcccatctttccagttttcaccttgtgt

SEQ ID NO: 5653 - DNA, 436 bp, Homo sapiens
  misc_feature (1)...(436): n = a,t,c or g
ggaaggagaatttttaaatgatgttattatagacttttatttgaagtaagttaattttccactgatcttttattaaatctttaacattccgtcatatcttatgtctttgttttccagagtcaggctttttgagttttaaattccatctctgccacttactgtgtgacatttggggagttattttttctgtttctgtctttgcacattttaaaaatgagaattctatctaaaaagttgtgaaaattgggccaggggagatatctggncttatgtctataatcctgacactttngggaggtcaaggtngggaggatcgcttgagcccaaggagttcacgaccagcctggggaaacaaagtgaggaccntgtctccacaaaaaattttaaaantttggccngttcatattaccnatagttcccggccacttgggtggct

SEQ ID NO: 5654 - DNA, 211 bp, Homo sapiens
tcattgtcaatattcatctttggtttgagcctccgtttctttctcctttaaatgaaattgcttaagagcagataaatgtttttcagcactttattcctccttctcagttctctttgtttcccctgctttattaaaaatcttaaataatatccatattgttggcaccagactctcattgccgaaaccccatttaggctaagctagtgctgtg

SEQ ID NO: 5655 - DNA, 972 bp, Homo sapiens
ccctcagtgggagatattttgccaactgccatgtggaagaggtgcctccagctgcccgagacgaccgggcagcccatcggctatgggaggccagcaagaggctggcagggcttgggcctggggaggatgctgaacccgatgaagacccccagtctgaggactcagaggccccatcttctctaagcaccccccaccctgaggagcccacagtttctcaaccttaccccagccctcagagctcaccagatttgtctaagatgacgcaccgaattcaggctaaagttgagcctgagatccagctctcctaaccctcaggccaggatgcttgccatggcacttcatggtccttgaaaacctcggatgtgtgcgaggccatggccctggacactgacgggtttgtgatcttgacctccgtggttactttctggggccccaagctgtgccctggacatctcttttcctggttgaaggaataatgggtgattatttcttcctgagagtgacagtaaccccagatggagagataggggtatgctagacactgtgcttctcggaaatttggatgtagtattttcaggccccacccttattgattctgatcagctctggagcagaggcagggagtttgcaatgtgatgcactgccaacattgagaattagtgaactgatccctttgcaaccgtctagctaggtagttaaattacccccatgttaatgaagcggaattaggctcccgagctaagggactcgcctagggtctcacagtgagtaggaggagggcctgggatctgaacccaagggtctgaggccagggccgactgccgtaagatgggtgctgagaagtgagtcagggcagggcagctggtatcgaggtgccccatgggagtaaggggacgccttccgggcggatgcagggctggggtcatctgtatctgaagcccctcggaataaagcgcgttgaccgccaaaaaa

SEQ ID NO: 5656 - DNA, 451 bp, Homo sapiens
gggcggaggagattttcggacctgcgacttccgaacaaccctggcagggaggagcggcgttcagccgggggaggcctgaagaaacgctccggggcccagtggctctacccctgctcctgcccgaccctgccgcctccctcacggagccagcggccgggaatgcagacatcagaacgtgaggggagtgggccggagctgagccccagcgtgatgcccgaggctcccctggagtctccaccttttcctaccaagtccccagcgtttgaccttttcaacttggttctctcctacaagaggctggagatctacctggaacccttgaaggatgcaggtgatggtgttcgatacttgctcaggtacagactttgtggagttgctctggtctgctctgccttctgccgtcctgctctgtagtaactaacactgaccatttaggcagtggctgggctgt

SEQ ID NO: 5657 - DNA, 1053 bp, Homo sapiens
ttttttttttttttttttctcagtttgacattagtcttttattataaccatattgaatggggtcgctttgccaaaaggagaaatcatttcttaaatcagtatgagttatagcataaagatggatgagaaaaaagcgatagggcatacatggcgtcactgaatattccatcaatcaaatgaattgtgccaactgtgagaaaaactactatgacagcttttacatcaaagtggtctcaagcctgtttatacgaactttatatatctttttaacagtataaaaagagagctttagtaagtaacactgagaaagcagtctggcctttgagaaggaagcctgggcttgccaggtgcccatcctcaatgtatccggcctcttctctctgctccacagcctccccagtgcccctcctccagacacacaggggcaggggccagggcccaggtgtgtgtccgcaggaaaggagggatggaattggttggagccgccacagaacggccactctatgtggggacctaagtcctccgtacacactcctgttctataatgaacccttggagcagttccttaaaaaaataaaataaaaacaaaaataatgtgcatcaactctgactcacaggttattcttaggaggccagcatgactgccacagagtttgatatttgttcagcatctctgacaaagtagaggaggcattcctgttgagagcgggcaactaacccccaactccctgaagcagcttccttagcaaccccagggctgacagcacaagagtcaactggtcatctgcaggcaaggcaaatcacagggaggtcctggtttatttttagagtcacattctttctgcagtgatattatttctttccggattgcagttacctctgaacattagcaggaggtcagctttggaagagtaatccagtgtaactaaatgtttaatgtgttatctgaccctgtggcatacactcaaggtaaggcaaagtaattagacttgctagtctgtaactctcacacgtaatgtacaaagctaaattttaactcaaattccaatctga

SEQ ID NO: 5658 - DNA, 399 bp, Homo sapiens
gataagatttcttttatttattcactgtagcaatagtgtcctgaattaactttctctccactattagcacatattccttttatacatagccctttataaaaatgaaaaaaaaaaaatcccttttaagctgctaagttcctttttcctcccagggtgccctgaaaaccttgaaggaattttaacgaacgatgttggaaagacaggcgagcctcagtcagatcagcagatgcgccaagaagaacctttgccggaacatccacaggacggcgctaaattgtccaggaaacagctggtgctgcggcgagggcttctgctcctgggggtcttcttaatcttgctggtggggattttagtgagattctatgtcagaattcagtgacgtggtaggaaagaaagtca

SEQ ID NO: 5659 - DNA, 713 bp, Homo sapiens
atttccttttagtttattgtttaaatacatgtcttgccaatcacaaaatatctagtgtagccaaagacataagaaatccctgtatgaatcaaaaagtgccattcttgcagctttctgtcacaaggatgctgagaaatgtactgtaacagtttaggaaacacaagattgtctcaattttaagtttcaatcattaatcctcttcagaactggaatcaccctcttggtcagaaagttcgggaacagggaagcggagaatggcagctaccccagtcaactggctgagctgttccccagaaacgtgaagactagagaatatcctaacggtgcctgcattctctttcacactgtccaccagcctcacataccggctccgtgtggctacatcctgatgcctgaagagctcatcgctgatgagcaatgtgtcaattgccatggcttcattggccttctccacctgcttgagtccatagaaagctcgatccggttcatgctgtaacattttatagaagtcatccaaggctttgacttccccagcagctttagtgtctgaaaggcggctagccacagtagggtcacaaagggcctctttcagggagtacttgtgtccggaggaggcatgtacctgaagaaatttggaccggttttccaggagcagtttgttgtcggtcttcactgcttgttgaaacatgtagtcgcagaactgctccctcacc

SEQ ID NO: 5660 - DNA, 350 bp, Homo sapiens
gggcgtctttccggcttctccaaacccttgcgaaaaactttattggcaaagctatcagagaacggacagtgtacccactgaggcggccaaagcttaactggatcagggcaggatgacatgaccttgtggtagatcccagaactgaggccccaggatgacagaacaggagaccctggccctactggaagtgaagaggtctgattccccagagaagagctcaccccaggccttggttcccaatggccccgccctggggtgagcctctccgccctcgccctcggagtagggggtagcggcttgggtctgacacatctttgaaccttgtggccaggcctggacttcgcccccag

SEQ ID NO: 5661 - DNA, 351 bp, Homo sapiens
  misc_feature (1)...(351): n = a,t,c or g
gtaatcccagctatcaggnnnnnnnnnnnnnnnnnnnnnnnnnnnnnnnnnnnnnnnnnnnnnnnnnnnnnnnnnnnnnnnnnnnnnnnnnnnnnnnnnnnnnnnnnnnnnnnnnnnntgctcaataaataagtaatctgagtataattnttgacccatagttactctttttacatctctttttaacatttttttttttacctttaaaacggtattacctcataataccctacacattgatagaactccagggctttaaagtaaaggccttgagttgtctcagcattaaacccttgaggactactctcagatgactctttctttccctaaactgggtatttctgttcagca

SEQ ID NO: 5662 - DNA, 398 bp, Homo sapiens
gtagaggaaccttcgcgcaccgcctctccgggtctgggaatctgctgaactccttgcctctcctggggtccctcgaacgccccagctaagaagggcgggggccttgccagggcgcgacaacatgacgttcaaggtcttcctgtggcttctgtaaagaaatgttcacgtgggagcctgtccacatgggctgtactaaggatctggcacgaggaagaaatatcactgcagaacctgaagccctccgttggaagggtcgttcactcgagtacctattctaagtaacagtgacacaaaacacatgttagaaaaaaacaaaaagtatggtaggttatactgttttttaaaagaaacttttatttatgccttttgctgtaagtcctctaattttcattgggcct

SEQ ID NO: 5663 - DNA, 781 bp, Homo sapiens
cgctgtaatttttgcctgcattcgtaactgaagagataagtaaatgtcagaggttaagataaatctttttctttttttacctgtccatatttacaaacattctgcgttccgtacatagacgcctggataagaacccctgtgcaagaatgactttggtgctactttaaaaaaagtggttggggaagacctcataggaaatgacatcaataatagattgcatgataacctatactagttcttactgttaccaatttaaattctaactgcttaaaagctaacacggtccttcccctttttttgaggcacctgatttgaagtactttgagtaggcctcaagtgtcgtatgcaagtactaatctagggggtgtgccctttttcaaaagtgatttttggagaagataggatgtagtattatagcaaggaaaattcagcatctgggatgatcatttccttctgattagagaaatttaccttgttaatattctgttcacccaacccttctaccctcagtgttgaccaatactggaaaaaatttagggctttggagtgaaattttaaaagttcaaaaccttgatctattaattagtttgcttaccttgaggaagttgcttatcttaatcttctatttgaacttcaagtacaaaaaccctactcacggacttaactgtgaccattaaatgagataaccaaaaggctgaagatgatagtgagttgattttaccttttttctacatacagatgtttcagttctttcattagtggttgaaggtctgcgttcttt

SEQ ID NO: 5664 - DNA, 1390 bp, Homo sapiens
tgattctgtaaccacctgagaccttcacgtttgctgccgttgggggctcaggctgcactccccgggtcacctgacctgctgcccaggggcttccagtcctgtctgtgtggactggcacctgggctgctggagaagtctcctcccgttcggaccagcctcagggctgcacgttacctcaggaatggggccccaccatgaaggggccatctgtcagcagcgtcttctaggtccccagctcagggagccatccccagctccagttttctcatgcgaatatgcacagttttaattcacgttgtttacactagcctgccgatgagacccagacacaggcagacctgggcgctcttgacccctgattccagtgaggactgggccctgaggagtccttgcagacctgctgcctgccccacgacaggcccaaagatggacccccccctggccttgtgacagctccccaagtattctccggtggagaaactgcagaggactggtgggcggggctccccagccatcaccatcctgtgtacaatggctgtagacttgtatatggctcctttaatattgtaaagatgctgatgtacaattgtcgtgcatttgtgtgaacacattgcgttcccagtccatgccataaatgatgctctcaagcaaaagactggaggctctgtcctgtgcagaagcagcagccagactcccgcattcgatgttgtgcagggaggtttggggggcggaacggattcctcccttggatccttcagttcccatcgaggaataacccgcagcagtggtggaggaaggtcagtggctgggtcctgagcttggtgttatttattgcatttgggtgcctgtcccctcagggcagcacagattctgaattctgattcacagtccctagccagatgggaactgggaaagagacagaaggcgtctgggtgcttttgaaccctgtctcaaatgtttgggattttctctctcactattctttggttggggatgatgtcctctttagacccccacgtaatggtatgagaaggtggcaggcagtggctcagccagccaggggggcaccaagtcatgcagccagcgtgagacctgcagttcacctaagcacagaacgagatctcagtatgcctccatgtaaacagattcacataggcctccaatttcaatgagaccttttgcattttttctcaaagcccttatgttctaacccatgagaaccattttacctgccctctaagggcaccagcttcgacctgcctcaggggacagcagcacagaccagtggctccctgtccaaggccgcagagcagacgccatcccactgtacaatcgaatttgctggacaaacttgataggtttctctgcttagcaacgagcctatagttag

SEQ ID NO: 5665 - DNA, 707 bp, Homo sapiens
cgtggagctgcggcagtgttggcagaagagggcccaggggagccactcaaaatgtgaggaacaggataggccctaagtctgggccctttgagtcaggaaaccagggccagttctttttcaggagttaaatgtttacccatttccaaggttgcgttttgggaggggacatgggttctctccttcctgctatttaggcattctccaggttcgagatccacccgtgtgtctggaagggactgcgggaccattccttccatcctctttatttcctgaggtccagagaaggaaggagacttagcagccacagagcaagaccccaatctcctgactgcactggcctgactgccccctcccaggggatgttaatgaaatgaaggaagtggtgaatgtcacccgagactgtcacaggcttgccatacctttggcctacacaccgggctctagagccataatttccaacctggggagtctcctgtgcacttaaatccgaggtaggctgcagtatcggcttgaagctctgacactgtcagagaaagtggatttattgtgtcataggagtttctgggacccagctcttcctgagaggggtgggaagattggggatgggatcctcactcagcagtctgggtagggccctttgaggcagagggtcttcggccagtgaagagagatttattctgctcagagtgctggggtccccatccttt

SEQ ID NO: 5666 - DNA, 370 bp, Homo sapiens
  misc_feature (1)...(370): n = a,t,c or g
gaagagggcagcattggccgttttatcttggaccagatcactgaagggcagctggactgggctcccctgtcctctccttttgacatcatggtactggaagggcccaatggccgaaaggagtaccccatgtacagtggagagaaagcntacattcagggcctcaaggagaagtttccacaggaggaagctatcattgacaagtatataaagctggttaaggtggtatccagtggagcccctcatgccatcctgttgaaattcctcccattgcccgtggttcagctcctcgacaggtgtgggctgctgactcgtttctcttccattncttnaagcatccaacccanaggctgggtngaggtcctgcaagcag

SEQ ID NO: 5667 - DNA, 632 bp, Homo sapiens
  misc_feature (1)...(632): n = a,t,c or g
gcccttgtgggagacagaagccatcagttaaatgaggttaggcctctcctcctaatatactgattgacaatgcatattagccaggtaatgcactttagctaccctggacaatgctatcaagtgtgctgggaagggaggaaggcctctctacatatggaaaagcccatgcgtggagttcccctcctttcaacattgcaacaacagtaacaacaagacaaccgcaacatgtgggcgtagtcaggcaatgctgtgtgcgaagtaaactacctcaaggtatgaagttacctcagcaattattttcctttttgttccccccaaccccattaaaaaaatttttttttgatttttgtttttttgcagcttgctgatattttatataaaaaagaaaaggcaaagcaaaagagaagctgatagtcttgaatattttatttttttaatgaaaagaaaaaacaagaaagttatgtttcataatttcttacaacatgagccagtaaccctttaggaactctctatggagaacaggcctggtgggaaaggctttgggggctgcccccttaggaggaggctagtgctaagagggaaggcccaggtttgagagtagccagtaggnagagcccagagccttgtttggc

SEQ ID NO: 5668 - DNA, 1790 bp, Homo sapiens
tttttttttttttattccataaagcataagatattttaatgagaaaacgaaaacaaaatcaaaccttagtctcatgtttctatctaaagacactcaaaactagtttttccctgcccatccctttcctaactgcaactttatgtgtgaccatgtaataaaggccagtttaaagattttttttttaaaaaaagtttaaaccttttttaaaaagattaaacaatcaggctagcaaaaaggtactcaatacatattttccttatatcaaacaagctaatttcagtacaatataactatacagaatatatacaatacacatgttcacaaagcaaacactataggctcagaacagatttgaaaaaacatgatattcacattgattacaataaccctaaaaatgattgtaacgttgaaacggcacttagtttacaaaaaaggtcacaaaaatatatatatatatgtagtcaccaagaactatggttcctgtaaaatactaatagccagatactagtatataaaatgtgaagttctgatattgtatacattttttggaaataaaacaaaatccaaaaccatttttgttattgtcaaaagtcaaacatgccaagttaacttagctatggcccagtgtcaccaagtaaagccatacttgaatgagatgacgactggatacaaagctggtgaaactggggactggcacagttaagagttgtactaattctaggaaaggggtagaagacataaaaacacccatctatgtaatttaattcacattttctcccctgcatcaccttcccttgagagtttcacaaaatgccagtgcccagaaagaatcacaatgctataactggcagggtaaaaaagtccccccgccccgacttccttgctgccgggctataggcaaatattaaagcatgcatcagctacccaaagccatcagtcacccatctggaagaccatggtgtacagtttccgcctaggctggctgcactaggaagtactccagtttttaaatggagcccagctttatgttagccctgtaaaatattgagctactgtagcagcaaatatgaacattacagaaaaacaaaattttatttaaaaaattgttacatcaaaatttttttccttcaaatctgtgtcctttaaccaaacaacagtttcttctatcacttaattctggtcttattacctcagtctgactttctcattatgcttctctggaaagacacttctaaatcctggagattaaatttactcttaaaaatggaaatacaggaattttaaagtaaaaagaaaaggtctgttcctaaaagttctttcacaaatatatatatttaaatattaaaataggctacctaggatttttataaaatggcttttgaaaagatagtagaggcacaaagaagccatatactatcctccaagttggacataaggtgccacaaggctgccctacaaagaggcaggcaatctctacctgatgcaacgggaggcaccagtaaacaacagaaacattaaatacattattgggaacttggaccaaaaccaaattttactctattagggaccgttgcttttttaaaaaataccttgagatataagcattagaagtcatcactttgtacaaggaagaaaatgaatacagtttatgatcttactccttccaaatacctgatgtcactcatttcaggtacctgaaagatgaaaagcagtgcaactttcaacaatttaatggactactctcattatgagagactttacacagcatctgtcaacttgaaaattaaatc

SEQ ID NO: 5669 - DNA, 322 bp, Homo sapiens
gcattctcattttatttgcattttaatgatgagaaatgagtaaagagagggctagatgcccaaggtcacacaggaaatgacagagcagagatgtaaactcaggtctgtcccccttaattgttacttcagaggtcacgctggggaccctgaatccccctgttttcagggtcagtagcgaatttttaagctgaggggtgtagctgatggccctcagactgaatcaggtctgtggagacatttgcttatctggcacattgggttagaaaatttttaaaaatgattttagagagtgtctctgtagccacagtatccacatgctcat

SEQ ID NO: 5670 - DNA, 336 bp, Homo sapiens
ctaattaagctgcagtgcctagtcttaatatctttaactggttatttttgtcatgcttaaagttaacactttattaacagttctgcaaagtcatcaatctcgattattgccccattcgctcctgcaataattatattttcagttaggtttaccaatgcattgtctatccttaatgtctctgtccctcaatatgcgtatttgtttcctgacctatcttcccactgttaaacctattgagttcctattttagctactgtgttttgcgtgtggaattctgatatgctttttaaagtttgctgtttaagttatctcgtcgaccgccccgaatttagtagt

SEQ ID NO: 5671 - DNA, 439 bp, Homo sapiens
  misc_feature (1)...(439): n = a,t,c or g
gctagggactgggaatccaggaactgagttcagagcccttggggaagaaggaattgtagaaaacaatcagatagcactacttgacttacagttccttatgatttgtagtcacttctgacattattgttgctaaaacttttctcatactttttgtttggcaaacctcctcaagggggctttaagctggaggaggttaccagctctgtctcagtctacacccacatccctgcccccagtaatcctcagatgcagggaccttcccagtgcctgtgacaactaccactgcagggggtgtccctgggnctgcagactcgtgggcatgtgggttctggattccgcagcagcctagggccctccttgcctctggttactgactccccaggcacccattgttgtggcaccctttgaagcactgnttgnttatgntcttaaggcattt

SEQ ID NO: 5672 - DNA, 940 bp, Homo sapiens
  misc_feature (1)...(940): n = a,t,c or g
aaattatattaggttaaactgtatgaaaccctgctatttgatgagttctgatctacaaaaatgacagctccacctgatctgatgtatcacacattaacatcacatctaattcaacctgaaatgtgagtctcctttgatcttgcaaagtatctcctatgaatccgggctcttttgcttagaaggtagacagctgtaacctctaacattgatacttcgatcttcagtctctctgaatgggcagctgttaaacagtaaaggcctgggcagagttgatggtgaaaaaaagctgtatttttataccaaatggaactttagcaacacgttggactactttgtcgggcagagtggtcttcagacaggtgatgctgttggcttaagagatgaacacgtcttctctctgaatttgtttttattggttggtttcacttgaacagaaacgtttgaatggtgtgaagattctttagaaaagtgattggatccatctcaattgtgcacttgcaacagcagtgatgtaaatgtgcttatttgtagttttcatttttaactgtgcagccttaccacacctattttgaaagctgatcttttgtcctcttcagggcttttcccttgtgccatgttgtctccagcaatatatgtggcttctggctcagagcttctgctgaggcagggcctcgcgctgagtcacatggctccttggaacaagaaaactttctcagaagtccccacacgggtgggtgacagaaacagtttgtggcaacacaaatctctctccatggtggaggaaacctttgcttatccactgtattctactcagtgtatagtgatgacagatgtactagaattaaaccagtcaagtgtactggcccagggntgagtgttantgtgtatctcgcctgtggaacctactcagcagcttngttttctggggttgggggcattt

SEQ ID NO: 5673 - DNA, 1503 bp, Homo sapiens
  misc_feature (1)...(1503): n = a,t,c or g
tttttttttttttttatttttgcttctttttaatgtaaacagaatacacaatcacattaaaaaccccaacatgacacagaatacacacagaattatatatagatatttacaggccctcgaaagccaaaaggaaaaatggcccctctggttaagggaagcttctcttcctaccttgtccctgtccaaaatcaaagtgctgaggcagctgaaggagcctccgcaattacttctggatataatgtagcaggaggctggaataacatcagaaacaccccacccccaccccagagcacaaccaagataccgactttctggccctggccctaatcctaaactctcctcctttgcaagctgacaaagcaaggatttgtatgtctcgagaggcatcagcatgacccctgaaattcagatgcacggcggaggggttcccatcccattccagctttcccagccttgggctgattgtgaaatgagccaaaccaaccatatccaagagaggaggctgggggaagtaaaggaagaatgatctcagcagagatgactnttcggagcaggaccctgggaaccaagggaggtcaagctggctcacccaagcccaggacagactgcggaagacacagtggggctgtgctgcctcctggtggggatggnagcactgcagcaatgaactaggacagtcccacaggtaccttcagatcatcttttctctccatttcagtcccctaaccaacagcctcactgcagcagctcttcccaggaaatgggcttggagaagacctccctttctaaccagaggtcatagttcatctgaaagtcctcagggaggtccacccgttggcccaggacactctgcaggcagttgtccactggcaggaagtcagggttgctgtgggcccggtcatagcgccgggcgttgaagcgttcaatgttggcacgaagggcacactcctctgcctggaagtcccaaggccgggcatcaagatcattgccgtatgcccagtcgtcgttcagccgatgccgcaccttctggtagatggcagacatggtcttcatgttgctctttcgccactgccgccccaagtatttggtctgtaccttgagcagcttcagcacatagagctgcatcatggcttgtttcacctttagggcccgcttcaagatgggggctgacttgaacaccaccagcatcattgtccttgaatgcttccactttgtcagcttgttcaagatccgaagcagattgatacaagaaaagaggttcctccagcaaaattggttactgtcacctgcttccaaactctccgccgtcagctctggcagctcatgcaccacgcagtgagggtaatccaggacagaaatgctgttcttggcagtgatgtaggacatgatgttttgattgaagaactttaggatcaaaggaatgcagttggcaaacaccaggtgctgggccatgtattcaaactggtagacatggttcaacttcaaagtgcttgagcagcagca

SEQ ID NO: 5674 - DNA, 429 bp, Homo sapiens
tccaagcttggttgaatccacagacataagagcccatggatatggagggccaactgtataatgtaaaaaaattccttctcatgcgctagtttccagttttcatcctttgtagataaccaggggcaacagtttgatataggtcttttcacctctctttgtgtgcatatacaagtaattatttgcagatttgtctgcatattcagaatttaaaaattacacttttttttagcagctttagatgtacagaaatttgagccgataggcacagaaagttcccatattcccttcccttccctcgtttctcctattgcaaacatcttgcattaatttggcacatttattgcatttgatgagcccatatcaatatgttgttatttattggtctatagtttacatagggcttattctttgtgttgcagtttttttttt

SEQ ID NO: 5675 - DNA, 364 bp, Homo sapiens
ggtatattcttgctaatgcctttcagtactaatgttttccctgctccagcgtaacacccagaatcttttccttgaccattctgataggagcctagaaccttctgtagttttcagtgtttctttggtgaggcaaattcttggaatatctttggcacgggggtgtaaaatttccactcgctatatttaagcctacagctgggagcaatttcttattgatgtacctaaaactagttaaatccccactctccttagcagtccctcttgaggagttatttaaggatttagggtaatatattacaaattgtgagtgcaaatctctgccactctctgaggattgctgcacttaggggatcactaggccctg

SEQ ID NO: 5676 - DNA, 2000 bp, Homo sapiens
  misc_feature (1)...(2000): n = a,t,c or g
gcgaccgcttccgactcagcctcttcagcgaccttgcccgaggacacggagttgcagaggaagctagaccatgagatccggatgagggaaggggcctgtaagctgctggcagcctgctcccaagcgaaaagcaggctctggaggccaccaagagcctgctagtgtgcaacagccgcatcctcagctacatgggcgagctgcagcggcgcaaggaggcgcaggtgctggggaagacaagccggcggccttctgacagtggcccgcccgctgagcgctccccctgccgcggccgggtctgcatctctgacctccggattccactcatgtggaaggacacagaatatttcaagaacaaaggtgacttgcaccgctgggctgtgttcctgctgctgcagctgggggaacacatccaggacacagagatgatcctagtggacaggaccctcacagacatctccttttcagagcaatgtgctcttcgctgaagcggggccagacttttgaacttgcggtttagagctgtatggggcctgtgtggaagaagagggggccctgactggcggccccaagaggcttgccaccaaactcagcagctccctgggccgctcctcagggaggcgtgtccgggcatcgcttgacagtgctgggggttcagggagcagtcccatcttgctccccaccccagttgttggtggtcctcgttaccacctcttggctcacaccacactcaccctggcagcagtgcaagatggattcctcacacatgacctcacccttgccagtcatgaggagaaccctgcctggntgcccctttatggtagcgtgtgttgccgtctggcagctcagcctctctgcatgactcagcccactgcaagtggtaccctcagggtggcagcaagctggggagatgcagaactgggcacaagtgcatggagttctgaaaggcacaaacctcttctgttaccggcaacctgaggatgcagacactngggaagagccgctgctttactatttgctgtcaacaaggagacttcgagtccgggcaggggagctggaccaggctctaggacggcccttcaccctaagcatcagtaaccagtatggggatgatgaggtgacacacacccttcagacagaaagtcgggaagcactgcagagctggatggaggctctgtggcagcttttctttgacatgagccaatggaagcagtgctgtgatgaaatcatgaaaattgaaactcctgctccccggaaaccaccccaagcactggcaaagcaggggtccttgtaccatgagatggctattgagccgctggatgacatcgcagcggtgacagacatcctgacccagcgggagggcgcaaggctggagacacccccaccctggctggcaatgtttacagaccagcctgccctgcctaacccctgctcgcctgcctcagtggccccagccccagactggacccaccccctgccctgggggagaccccgaaccttttccctggatgctgtccccccagaccactcccctagggctcgctcggttgcccccctcccacctcagcgatccccacggaccagaggcctctgcagcaaaggccaacctcgcacttggctccagtcaccagtgtgagagagaaaggtgctggcataggatctgcccagaagagaaaatgacccatgcgcagttgggctctggatacggcgctgtctatagcaagtgtgccagtctggcctcctgttcctctgctggacctggggtaggctgcaggggtgggcagaagcccctcttaaattgtggttgccatggtaccgagggactcattcctggggctcgctgggacctccctaaacccttcctggaagaaaactggaaccaactctgccctacctccctgcactaaccagctttgaggatggcactgaagaacccttggagcaaacatacctcccttgtgactcccacatcaaccattaaagttatttaacagcagccttca

SEQ ID NO: 5677 - DNA, 2061 bp, Homo sapiens
tttttttttttgctgatctagacttattaaatttatttcatgtcattgtggtcacttttacagctgtttagacttattttcaatcacattactcttcacagaattcacagaattcattaactaactagtatgttacatccaagggttcttagtagcacattgaaatagaaaagaggcccacgagttgttgcttgtgtgtggaacctgagtctgattacttagacagatgtctagaacattattgctttattaggcctatttttaaaaataataaattattcctaggaaacccaccctgccaggtgctcattctgcgactgctgtgggttcactcagaacatacctgactggtgggtgctgaatgaacctcccacccatgtatcctgctgctccggacgctctgagggctggagcaatgcccctccatgcgtgtaaacattttctacagcttgccactttcctccctggtcttgcagccaatgggctgcaagtcatacatgggtctctatgtaaaacttaaattagacctaaacaacagggttcagcgaatgaggactaatgctccctataaaagccactgccccatgcaagggaatacacctgatgcaacaaaaatatcttgagtctccaactataaggaatgtctcaaagaaaatgtccttgatttaattatggtccaaggtggctgctttgcacaagcttgtcagtgacatgaacttgaagacttcatggtagatttcatggctggggtttcttattttgttccatatgagtttctattttgtgaaaaatatcttggaggttttcgcgtggtccccaaagctctggggaaccgtggataccagggataagggacgggcttcctcagggtcactggcgctccgaccgcatttggggcaggatccctgagagtggtggctgcgtcagacttgggggatgggagcagatgctgtgtgcagaatgcaggctgcagtcggggcctcagtccagcttcttgttgttgtctgtgttgtgcaacagaagctaaaaagtcgattatgagcttggctgtcttcctgggtctttccatcactactgagtgcccacagttttccagaagctccacctggcagttggcaattgacttggccaacatgtctgccccagacacatccagcacctggtcttgtttcccccagatgatctgcgtcggaaccttgatcttgtccatgttctgatggagagagtatctggacttctcactgacgatttccaaaaacaactttcggtagaagttgttatgagggatgcggacatcgacaaggccttgcaggatctgctggggcaccttgaagcggacataggagcagagctgaagcatttcactcatctcttctggggtagacgggatcaagggaatcttctccacggcggcagagccctgcagttctttgagccgttgtacaaaattgattgtcagttgagtactgcaggccagcaggacacacgagacacaggctggagacatccgatgggtagtaagcagcatacaccccagccacctggccacccatggaggtgcctaccaggtggaaaggttttttgttcagcttcaggcattctacaaactggtgtatcctcttaacttgcccatctatggacaggtcatccagggaggagcgggtggtgccctcatgtcctggcatgtccacgcagaccaagtgcaggttctttggaaggaacttgaccacactgagccacatatccttgtgggcagagaatccgtggagcatgaggatggagggtttgtgcccaggcctgccccggaaggaataacagacactgatagtcttcatggtgaacatagcggacttgcatgcccaatgtcctccgccagtaccaataatagattcttatcagtgctgaaggccacagaagaaatgaagccacaaatgccaggattgggatggccagcgtgccgcccgcaatcacaaacatgttaaccacatcaagatccatcctgctctttcaggctggctgactcctgaccagcctcaaccgcctgggtcccgccgccgggcc

SEQ ID NO: 5678 - DNA, 427 bp, Homo sapiens
  misc_feature (1)...(427): n = a,t,c or g
gattagggccgtttggaaaggggcttgtcctgagagagggggatcggcgctggcagggcagtgcccgtgctcgctggtggcgttgtgatcctggatgtgtccagggaagtcctctccccgttttcttgggcggctccagcccatccagcccccctcatccttcattgccattttctcctatcattccttcataaaaacctcaaataacatcctaacctcgttcctaacagccttagctgggaaggggacgaggaggcggctgcaaagcgcttccttcttctggctactgggaaggcccctttcgtatttgggggagtccctggcctttttcccagagcctatggcntgttttctttgaggggtgtggggcattccgttttttggccaacctttnaaccttttgaaggnggttgattttgantaaagg

SEQ ID NO: 5679 - DNA, 298 bp, Homo sapiens
ggagcaacatcacctttgcttcttgtagtacagatatgtgcattcgatgtggtgtaaattaggacaagacagacctattaaaacattccaaggacataccgaatgaagtaaatgctatcaaatgggacccaactggcaatctcttggcctcctgttctgacgacatgactttaaagatatggagtatgaaacaagacaattgtgtccatgatttgcaagcacataataaagaaatatatactatcaaatggagtccaacaggaccagggactaatattctaaatgccaaccttatgtt

SEQ ID NO: 5680 - DNA, 544 bp, Homo sapiens
  misc_feature (1)...(544): n = a,t,c or g
gaaatgctacttactgtataattctacttacacaacgtttttgaaaaggcaaaactatagtgatagattagtagttactaggtgccacaggtagaaaaaaagtatttgctggcaaggtggcgaggaattttgggggtaatagaaatactctatatcatttttgtgatgcttacacaactgtccatctttgtcagaaatcatctatcctcccaacttatgaattttattctatataaattatatgtctataaagatgattttaaaaaacaatttatttttgcttttcagggtcagtgccaggggttgttcagcctacgtttagtaccactattcatctattatattcctgtcagcttgagagatacagtcaggggaagcacctaaaatcccgcagtgttttcagcacaaatacccgggcaagctgggctagttttgttctactgctttctcagcaaaccataataggaggtgcagtggtttatctcaacatcttcttgtgatggncacactatatactaaagttgagctcacattatatactaaa

SEQ ID NO: 5681 - DNA, 487 bp, Homo sapiens
gtacagtttcagatcgaagcacatttggacacacttataaatgagcaagcctcttatgggttaactagggtaggcttgagttacatctataacactgtacagcaacataaacctgaacagggctctttagctaatatgcccaacctagattctgtgacactgaaggctgcaatggttcagtttgatcgttatctgtcagccccagacaacctattgataccacagctgaactttcttctaagtgccacagtgaaagagcagatcgtataacaatctacagaattagtctgcagagcctatggtgaagtgtatgcagccgtgatgaatccaatcaatgaatacaaagatccagagaacattcttcaccgatcgccgcagcaagtgcagacgcttctttcctgattatcttatttcattgtgttagcaaaatatgacctccctaaaacactgaaggttattttttattctttgaatttttactttataa

SEQ ID NO: 5682 - DNA, 657 bp, Homo sapiens
cctggcaaagggatatttggtttggccatctctggatgcctgattgccaagctcaggaccaggcaatgtgactttgcatcagcaacaaccagcatcccttgaccaggcctgggcagagtattggtctcctctcagcccctgatcctgtgaagtaaggatgtgggggaagacctggcaaggacacagatgaaacacaaacaatagtaattctcaggccatcatcagtggagccatgttaatgtaatctgatgggcttctccagggtccacaggaagtgaagaatctgtttcccatgcagtggactcaaaacccatctgggctcctaacccttcctgtaaacccctttagtggcttcattagagcaggcgttcagctcactgttctattcatctcaaggaataatgggcttaaagcagtttctgtcctgctggttaacttgtttggcctattccattctggattttgtcaagcagtagacaagcaattagacaagaacttggaggcaccatttgtatccactttttagacttaatagaaacattgaagatgaacataatctaccaacgaaagacgtgattcaattcaacactcccttcccatgacccaggctgggcaaggaggccacgtgatgtggagggcacattccttgcctgccaa

SEQ ID NO: 5683 - DNA, 1111 bp, Homo sapiens
ccgcagctaagcgcactcgccgacgcaatggacccggcgctggcagcccagatgagcgaggctgtggccagaagatgctccagtaccggcgggacacagcaggctggaagatttgccgggaagggtaccgaggagaaggcattgtatatgggacactagaggaggtgtgggactgtgtgaagccagctgttggaggcctacgagtgaagtgggatgagaatgtgaccggttttgaaattatccaaagcatcactgacaccctgtgtgtaagcagaacctccactccctccgctgccatgaagctcatttctcccagagattttgtggacttggtgctagtcaagagatatgaggatgggaccatcagttccaacgccacccatgtggagcatccgttatgtcccccgaagccaggttttgtgagaggatttaaccatccttgtggttgcttctgtgaacctcttccaggggaacccaccaagaccaacctgggtcacattcttccataccgacctcagcggttacctcccacagaacgtggtggactccttcttcccccgcagcatggacccggttttatgccaaccttcagaaagcagtgaaagcaaattccatgagtaatgctaatcgttacttcttggcaaagaactcccgtgactcatcgaggagctccagctgttgggacaccaaggagcctgggagcacgcagaggcctgtgttcactctttggaacaagctgatggactgcgcatctctgagaatgccaaccagaggcggcagcccacccttcctgcctcctgccccactcaggggttggcgtgtgatgagccattcatgtgttcccaaactccatctgcctgttacccaaacacgcctctccctggcagggtagacccaggcctctaaccatctgacagagactcggcctggacaccatgcgatgcactctggcaccaaggctttatgtgcccatcactctcagagaccacgtttccctgactgtcatagagaatcatcatcgccactgaaaaccaggccctgttgccttttaagcatgtaccgctccctcagtcctgtggttgcagccccccaaatatatttttctgatata

SEQ ID NO: 5684 - DNA, 131 bp, Homo sapiens
cactcatccccattcatttaccaaatatacagaattcttcagatatgccaggcactatgttgagcattggtgctgaccgatgtaggcccagcccttttgatgtttacattttggtgggagacagacatagc

SEQ ID NO: 5685 - DNA, 1184 bp, Homo sapiens
acaaacaagaagacctggaatttgccgcgtctcagagctactctgagtttttctactcttattggacagggcttttgcgccctgacagtggcaaggcctggctgtggatggatggaacccctttcacttctgaactgttccatattataatagatgtcaccagcccaagaagcagagactgtgtggccatccttaatgggatgatcttctcaaaggactgcaaagaattgaagcgttgtgtctgtgagagaagggcaggaatggtgaagccagagagcctccatgtcccccctgaaacattaggcgaaggtgactgattcgccctctgcaactacaaatagcagagtgagccaggcggtgccaaagcaagggctagttgagacattgggaaatggaacataatcaggaaagactatctctctgactagtacaaaatgggttctcgtgtttcctgttcaggatcaccagcatttctgagcttgggtttatgcacgtatttaacagtcacaagaagtcttatttacatgccaccaaccaacctcagaaacccataatgtcatctgccttcttggcttagagataacttttagctctctttcttctcaatgtctaatatcacctccctgttttcatgtcttccttacacttggtggaataaagaaactttttgaagtagaggaaatacattgaggtaacatccttttctctgacagtcaagtagtccatcagaaattggcagtcacttcccagattgtaccagcaaatacacaagggaattctttttgtttggtttcagttcatactagtcccttcccaatccatcagtaaagaccccatctgccttgtccatgccgtttcccaacagggatgtcacttgatatgagaatctcaaatctcaatgccttataagcattccttcctgtgtccattaagactctgataattgtctcccctccataggaatttctcccaggaaagaaatatatccccatctccgtttcatatcagaactaccgtccccgatattcccttcagagagattaaagaccagaaaaaagtgagcctcttcatctgcacctgtaatagtttcagttcctattttcttccattgacccatatttatacctttcaggtactgaagatttaataataataaatgtaaatactgtgaaaaaaaaaaaaaa

SEQ ID NO: 5686 - DNA, 2011 bp, Homo sapiens
tttttttttttttgtatcaattaatttttttattcagaacctggatctttaagactggtataaacaaaaataaaatacaaacaacttgttattaacataatagctgcagttattaactgcaagaatacagtaaaaaggagtcatactaaatgttaatgttcttgcaacagaattttcccaatcaccttaaggtagcaaattctggcaagaaatgataattcatttcttattaaaaatacttaaagaatttccaagattgatcagttgtgccacaaataaaacagcagtttattcaaaagagcccttacctttctcttattttcctaaaagatctgccatttacaggtaactactaatttcagatcagttattcaaaccagggttcttcctgtaaatccacatcttagctttatatatagtaaacttacactcatattccctttccagtcttgaagctaaacacttttgtaaaaggaacaatctaatatcacttcatatgaatcttggttcttacttttcttctatctcatttttattttcttctattatttgttcttcctcctcatcaccaaaagtctgttactgcatggtggtaaaggagagagatctagcagccacttctgcagcaaggcccagcagtgaaggtaaaatctggtgacagctgtagccgtgcccagcctctgcttaatggagggctgtaatgagtccctggggagttggaggggcagtggtcagaccacttccatctgcttgtggttcatcttcactctcacattggtaacacattctttcttctgctccttggggaagacttcatttgaagaattatctttatttttaccttctagagagttttcacataaatactcagtcctacttatttcattgtctgttgtggcggatttattactttcctcttcagtatcatttttactgacttttcccatatctgaattcattgatggttctgaattacttatgggttccactgggtctacaggagacaaggatttcaacacggcatgatcactaaatagaagttgcttccacttctgcctttctgcctctgaagctttaaatcccagcacagattttaattcttggagcaccctcttggattcttcatcgtcacgcttctgtctctctttgtcttcttgagacaagtaataaaaatcatcctttctgaaatcactatcaatatctatatcatctacataagcttctaattcctgctcctctgggattggatctttgtctgcaatgtgtagagtaggctgcttcaaaggtactactgtacaatgtgggttttcacatgctatttcaggcttgcccttttttatctgtatttcttcgtagcagtttgtcgacctgagaaatggcctcttcccagcaattgttgcttgcttgaacgtggggctgaatcaactttaatttctgttctaggatgggataagcctctgacactagttcttgtgtttctttagtacaaacaagcttttcaagttcatcttcaagaattattacctcattcagtaatgctttcagatggagctgcaactacgcactgctgtgtgaacattattcagttctcttgacttctgttgagttttggataaacactgcggtactgactggtgctgagtttcaaagtaccgatagaactcatagctgcgcttaagctcttccaaacaggcagaatgagcatgaggtagaccttgagtcacatcagataagatacgatgaggcagaagtgctggagtaagtaagggcccaggaggtgaattggctgtagaaagtaatagggctaaccgtctgaagaactctgaactctgtgccacccagagttggaacaaaaccttcaatgcaggcaggctgaagccatctgtaaagttatgtgcttcctcttctgaaatctgctcttcactaagtccaaggcccagctctttaaaaggcaccacacagatgtagttggttacattgtcactctcagagttcagggggtagtttttcc

SEQ ID NO: 5687 - DNA, 181 bp, Homo sapiens
ggttgagggaccgtggggggtggcaccagagcccagggcacctgagggcctctctggatgcagctgctagcggtcataggacagcaaacactattcattggattctgacttaggcaggcaccctgccgagtgccttaaaggtgtaatctccgttactcttcacagtacattaaaaaaatag

SEQ ID NO: 5688 - DNA, 447 bp, Homo sapiens
gcgtctgatccctgctggggacggttgcccgggcaggatcctttacgatcccttctcggtttctccgtcgtcacagggaataaatctcgctcgaaactcactggaccgctcctagaaaggcgaaaagatattcaggagcccttccattttccttccagtaggcaccgaacccagcattttcggcaaccgctgctggcagttttgccaggtgtttgttaccttgaaaaatggctactggacaggatcgagtggttgctctcgtggacatggactgtttttttgttcaagtggagcagcggcaaaatcctcatttgaggaataaaccttgtgcagttgtcagtacaaatcatggaagggtggtggaataattgcagtgagttatgaagctcgtgcatttggagtcactagaagtatgtgggcagatgatgctaagaagttatgtccaga

SEQ ID NO: 5689 - DNA, 1078 bp, Homo sapiens
ttttttttttttttgcttttctctactcctggggtctacgaactttcaccaacatcactatcagacacagagggacatcaggtggggaggagggtgaaggcagaaggtctttggtgggtcagaacttcaaaaaggcattgagaatctgtccacagttctgcccctcccagccagaaggaggtggccttcaacgcggtcatcttttagctgccagaactttgttaaccacctgggaccgtggacatcttctctcgtgtcttgagccctcatccccacccctccaagccctcatgcccaccacaccgtgtcccacattccccatcctcccctgtctgctccccatctcaagtccaattccaaggccagagccctggcagcttttctgggagacagcatgaaaaggaggggagtggagatggcagagatggggtggagccagtgcgctgtggtcctgttggcgtggtgatgtggggccaatcctgaggccagaggttcatcaccgtgatctggaagcccacggggccccctggtagaaactggaagaacaaaggggaaaagaaaccagaacaggaagaagacgagtaagcatccgagtgcacgagagtggagccggagccacgtggaggcagggccggcccgtctatctgttgttgagctgtggagagccggtaccatcctcctcttcctccttgtcatccttcatgcctttcagtctctggcgagcaaagtcctcaaatacaatgtcgtcatcatttgtgtcaagttctatgagatatggtatctactggcgtctcgttctctggaacttcccgatgcgggggttcctctttgggcttggggtgcattagggtgaagggcagttccacggccacgtcgccgccccgagacaccaccagcttcactttcactttgtaggaaacaatgatccccaggatctcacggttggcaccttccctcaacagggtgctagaggccaagttcgtgtcttcgtgcttgagcttcccgtccaaggcgaggccccgcttctctcggttattggctaggaagggggtcagtgtgtagaccttgcagaacgtcg

SEQ ID NO: 5690 - DNA, 853 bp, Homo sapiens
  misc_feature (1)...(853): n = a,t,c or g
gcgtgtgcagccgccgctgtgctgctcctgctggcgctgctgctggcggcgtgcgtgcggtgccgaagaggctcgccgcttgcgccccgcgantcacgttgtcgccgccgccggcgatgacgaacgggagccagccgggcgcgccacacaacagcacgcacacgcgtccgccggggggtcagggctcggcgctgacgcgtccttctacgtgatcctgggcttctgcggcctgacccgcgtctacttcctgatccgggcgtttaggttgaagaagcctcagcggaggcagttacggcctcctcgccaacactgaggaccccacggagatgggcctcgctggacagcgacgaggagacggtctttgagtcccggaatctgagattgatgctgagccagggaggcggcccttccagcagccatgagggaaggacaggagatggggcccaccccagtggcccagcaaccccctgctccaccgctcattcccctgctggccccggggctggtctcacccagtgccaacccgagagctccttttggaacctgcacagcccgccgacctgttgccacctgcacccaccgctggaccatgcagcctcgcctcctggatgctgtcccagcctggccgagggtcccaggtgaagactggagggaccccaacagccaccgcccaggacgctgaggctcccttgcctgactgtgacttgtgcctctctcctgcccccgtggggacatggcagcccagagccaaggctgggtgggcaggtgacccaaggaacctttctgggaacaccttctcgccgggctgggaacaataaatgcagccatgtctctgcagctggtgctgacccca

SEQ ID NO: 5691 - DNA, 1769 bp, Homo sapiens
gcactggcaggtcttagacaccaggtatatataattggagcagatacagtcatgaatgagtctgaagatctatcagccttatcgaaacacatgaagcaaaaccattgaaactgtatgtgtacaacacagacactgataactgtcgagaagtgattattacaccaaattctgcatggggtggagaaggcagcctaggatgtggcattggatatggttatttgcatcgaatacctacacgcccatttgaggaaggaaagaaaatttctcttccaggacaaatggctggtacacctattacacctcttaaagatgggtttacagaggtccagctgtcctcagttaatcccccgtctttgtcaccaccaggaactacaggaattgaacagagtctgactggactttctattagctcaactccaccagctgtcagtagtgttctcagtacaggtgtaccaacagtaccgttattgccaccacaagtaaaccagtccctcacttctgtgccaccaatgaatccagctactacattaccaggtctgatgcctttaccagcaggactgcccaacctccccaacctcaacctcaacctcccagcaccacacatcatgccaggggttggcttaccagaacttgtaaacccaggtctgccacctcttccttccatgcctccccgaaacttacctggcattgcacctctccccctgccatccgagttcctcccgtcattccccttggttccagagagctcttctgcagcaagctcaggagagctgctgtcttccctcccgcccaccagcaacgcaccctctgaccctgccacaactactgcaaaggcagacgctgcctcctcactcactgtggatgtgacgccccccactgccaaggcccccaccaccgttgaggacagagtcggcgactccaccccagtcagcgagaagcctgtttctgcggctgtggatgccaatgcttctgagtcaccttaactttgaaccattctttggaattggcgtggtatatttaaccacgggagcgtgtctggaaacgcaaactatcattaatttcatactagtttgtaccgtatctgtaggcatcctgtaaataattccaaggggaaaactaaacgaggacgtgggttgtatcctgccaggttgagtggggctcacacgctagggtgagatgtcagaaagcgcttgtattttaaacaaccaaaaagaattgtaagggtggcttgctgccaggcttgcactgccgttcctgggggtgtgcatcttcgggaaaggtggtggcggggcgtccactaggtttcctgtcccctgctgctccttccgtaagaaaatgaaatattctatgcctaatactcacacgcaacatttcttgtactttgtaagtccgtttgcgagaatgcagaccacctcactaaactgtaaacggtaaagagatttttacttttggtctccgtgagtcgcatctctactaaggtttacacaggaattccacctgaagacttgtgttaaagttctacagcgcgcactgttaactgaacgtctttttcttcagcctatacgcggatccttgttttgagctctcagaatcactcagacaacattttgtaactgctgctgttgctttctacatacaccttataaagtgacatttcaaaagaaataaggtgccacagttttaaaccagaaggtggcactctgtggctccttgtagtattatagctatactgggaaagcatagatacagcaataaagtacagtaatttt

SEQ ID NO: 5692 - DNA, 525 bp, Homo sapiens
  misc_feature (1)...(525): n = a,t,c or g
ccttactcgctcacccacggctgagatccctcacctcatccctttccaccactgcttcacagggagggtcccacctctgcttcttcactttaatctctatttgcgaatgaggcaacagctagccagtacctccctttggtctctgaaattcaatcctcacaatcctttgctcccaagatgtcttccagcactgacttctttcccctctctctgggccccctatggacaatgccctcttataaggacttctcactcttagacattgcctctctagcccctgtattaatgccaaattgcataaaagttactcaacccttattttcaatttcttgtactcttactattgaaaaccagcaacagaccacactgagcagccccagcccagaggtgtaaacactgaggcatttgtggaaattgtaaatttctcatgtccccctaactcttccacgactctccgntgagtagattcaagnttggnttaacagtgatgtnaaannnnnnnnnnntnancagnntnnntgtcaa

SEQ ID NO: 5693 - DNA, 617 bp, Homo sapiens
ttatcagtccttctgcagtagccatttgatgataaaaaccgtagatgttgtggagctctctgtgctcccaattgccatgatgaatggcattcttctgcatggtttgctctggccctctaaagacagaaggctcattcatgtcattccaaaggaagaggatgtccgtagatccctgataaacagggaaagcaaaaagacttgaataccactctctgaccttgggattggtgaaatccaggtaagaggagagacctggccaacacaccccttcaaagtcttccccttcctgattcttcacaaagaagccctgatctttggccttcacatatactgagtagtcaggatcaatcttgatgtggggatcactgatgaccacaagcttacgctttttgttcctgagcagctcttgcatcctcttggggttagggaatctgtttttgtcccaggtgaagtacctcttgccctcagtgtgctctatgtccagccacatggcatcataaggaatgtcatgcccatcaaaccctgcatccactgcttttacatccggctcaacttcatagttccaggtgcaactggtggtaatcccaagagagaggaggcggcatggcctgtgttcc

SEQ ID NO: 5694 - DNA, 371 bp, Homo sapiens
  misc_feature (1)...(371): n = a,t,c or g
gctgccctagccctagccccagtgaggtcagagtggaaacatcggccatggttgatccaaaaggcagccaccccaggccttcacggaaacccgttgactcggtgcctctaagcagagggaaggagctgctgcagaaggctatcagaaaccagaaatgatgatgcaccgtgcaacagctgtctcattgccgtctttatgtgtgaaaaaacaacagccaaagaagccagagggaacatgtccagcagcagagtcaagaacacggaaagtggccagacttgaaaggcccccgtncctcaaaaatcgaagatgaaaagcaggaagtttcgtcctttccnatcatcagtttaaatccttttccctgaaatttcttt

SEQ ID NO: 5695 - DNA, 132 bp, Homo sapiens
  misc_feature (1)...(132): n = a,t,c or g
tggtctctttagttggactccggtgctattttcctcagtatatttgatggtctaccacaagggggtccccaacccctgaggccacagaccagtgtggagtccgtgggcctgttagggaangggcctgcacag

SEQ ID NO: 5696 - DNA, 754 bp, Homo sapiens
agaaactaagtgaacggaatgcagtactgaggttcaagaaagctgtacgccatttctttccaacttaaatccttcagtaacaacaaacaccactcacttcaagatgcattgccagccccgtggcttccctcagctcttggccacaacttgaaaactgtcttgaatgaagtacttggggagaagacaggccactgccctctgttccacagttttcttcatgcacggggtcctcctgttaacaattactgttgtgtacatataaggtatttttagagaagagaaacaggcctttattttcctatgtccttttttacgtttagaatagtcacctgaggggggatcagctcaactgtactgtgggagaaattcttttccaacaaacctcatgctcgtttttctgtggtgcaatttcaagggcaacgtgttctgtcctcacctcactctggtactcgcctcttggggcggctcagcccattcatggggatggcaccaagcggccatgctcagtcttccagccccgctgagggtaaaccgaggcctctggcaggctgtgcacaggtgctggcctctggctccttcaaggagcactgcctgtcactcgctcctggggctgtctagccatgtctcccacccccactttaccgcagccagctgctggggatcaaagcaagtctgttcttatgttattttgcctgtatggaaatcattttctcattttatcacaattcctttcaactcaggttaattcgcgtgg

SEQ ID NO: 5697 - DNA, 1044 bp, Homo sapiens
ataagatcttttcatttgttttttaacatatgtcatgtattacagtgattgaatacagtcaacagtgagacaaatacaatactgtaccagttttaaaaacctgaaccataacggcttcgcattctagtacacttacttacttaaaacaaaaattgcttagataacaaaactatacttcaagttgttttagaaacagttctgcgctaggaacatacaaaggaaaatgacccgttgtgcttctttaaaatcgaatgagagtctcctctagggtcctgctgacagagccccccccagcctccgccaggtgaggtgcacagggcccactccagggcaccagctccccccaacttgggcttctctggtttgtcgaaggcatcatccagttccacactatgtttaacagtcctagtcagccagggcgattacatatttctgggaagaaaatggcaaatgtccccattaaaaaaaaaatcagtatatcaataatccagtatatccattcataaataagctttcagatatgttaggaacataaaagctattgttgaacacgacttagcaacaaatcccacatatgataaaaaatggagaattgattttaggttatcaaattaccttgaataaatctctctggtatcttcttatagaaggataattttccgtaagaatcaggaggttcccagttaaaaaaaaatccattctttctctctctatgaaaaaacccttaacatattttcaaaaataataaggtcaatctgtaggcctttgcctggaatccagtagtttgaaaccaaccagctaacagtgctatgcagtcacactggggtttgacctcaggggccgctgcagctgcctctgcctctaaaggctgaattcctgcagccagtggcggggtcggggggcagctgcagcaacaggcacggcacatgggaggggcatggcctgctggggcaggacccaggtgtgcaatagtcatctgtggcatgtcacacagaggagctcagagctatggcgctcaagtggattgaaccaattggtaagtta

SEQ ID NO: 5698 - DNA, 194 bp, Homo sapiens
gcggcacgagggctaaaagcttcacttccattcattgccatagaaaaacaatgtttgatgtgtatgttgccccctaagaacatgacaatcaggttctttcctggatttaagcaggcatttgtttgtagcgggaagtggaggaaatgcctctttctctactccagcccccatctccttgaggatcagtgagacga

SEQ ID NO: 5699 - DNA, 1005 bp, Homo sapiens
tttttgtctccaggggaggggctgtttgctggctcaggctgaggatggcccaaagtccagggtctggtggggaggagggaagcttaactcaagtttgggttagtgagttagcaagctctttgtgcagatggggatgtaggtaaatctttttaaaagtgaaattaacctcctgccaattttacaacccaagaatttttttttaagggccttggagccatctctaaaacaaacctcaagggatttagtgccctgtctccctgtctctagaagccttagcctgggcacctggctcaatcttgtaactgcctgctagccatagattcctttcagccttgctgacttctccctataaaagtaaagcctttttctgccccagctctgagacacttgcagatcttaaggtctgagacttgctgattttctggttggagtgtttttttgtattgccatagtcccttccccctgaagcaatagcccctccccacctcctgcaatacgcctttccaatctttattggaagtctctccctgcctacttcctaatttattcttatttgacagagggtatggaagacttgcaatttgaaaactggggaccagttccaaagtcagtaattgtgttaaccacgtgtataacagctctgctggacacccaagaaagccatgggaacgccaactggaaaggtccccttccccaggggagcctgcgaaggagaggttctgtagaatccaagcccacatttccaaagtcacccccaacgcgtcctctcacaccgtccactgtgcgtttgtatgtgtctgggatccagggcaatgtgaattttctttttatttgggagattgttcacggaaaacagatcttcttctctcttgtccacctattaattgtttacaatatttgtacatctatgcaaaatacttgaatgggccatggtgccttttttccttgttagtatttaattaaaaatgaattgtttgtcatttgcaatgttaaaaaaaaaaaaaa

SEQ ID NO: 5700 - DNA, 912 bp, Homo sapiens
atatttgtgtaagtttgtatatgtgtagggctgtgtaggtatgtgtatatacagccatattctaagtgtatatttattaaaatagattgcatgttgcaatacagttttctgaaaggggtctcattgactattaaataaatgactactactaaacttgtctgtagtcattaatcttaaaattacctgaaaatctgatgacagctgccttccctaactttaatgtattaggttggcacaaaattaattgtagtttttgccactattaatggcaaaaaccgagattatttttgtaccaacataatacacctttcatattatgtattatcttgcttaatgggttttatcttgattatccagttacttccatcctcttcccaatgttaatttgcaatagttttaaaatgggaacaaatgaatcaatcatcagatagttaaaatgaaattaaatcagctgcctaataatttatggaattcattggaatgtgcttaaaatgctaaagtgtatgtcattgaacatgaaatcttttttcaggcacatacattgttggtattgatgactttttaaaacctgtgggataaacttgcactgcacacggaagttttattcttgtatatttagatttgtatgcttgtgagtaaaaatgtgcatttgtaaatactgtgtttttaggttgaatcaattaagtcttaaaactgtaaatttattaagcttgttgccagtaggtttaagaaaatcatgatctcacaatgcctcactttgacatttatcatgccttttattaaaaatatcccttaggaacagtaagtttgccttaactctctgcatggtttaaaaagccattggttttgtgtgtgtttacagtaattatggcagatgactaaatgagttgacacagtaaaattacttcccat

SEQ ID NO: 5701 - DNA, 586 bp, Homo sapiens
ggtgtaaagcattagtaaatgtgaaaataattctaatgcacaaattattgtggcttttcattctagaattataagagaccatggattaatcaaccttagaaagtttcaattaatggaacggcggtatcccaaggaggtccaggacctgtatgaaacaatgaggcgatttgcaagaattgtggggccagtggaacatgacaaattcattgaaagccatgcattggaatttgaactccgaagggaaatcaagaggctccaagaatacaggacagcaggcattaccaatttttgtagtgccagaacctacgatcacctcaagaagacacgggaggaagagcgccttaaacgcactatgctctcagaagttctccagtatatccaggacagtagtgcttgccagcatgtgtccgccggcaagctgacattgattccggcctgagtccttccattccaatggcttcgaattcaggtagacggagtgcaccacccttgaacctcactggcctccctggcacagagaagctgaatgaaaaagaaaaggagctctgtcagatggtgaggttggtccctggagcctatttagaat

SEQ ID NO: 5702 - DNA, 1829 bp, Homo sapiens
  misc_feature (1)...(1829): n = a,t,c or g
ggcctgtgccttccaacccattagccatttcttgttgtgcccctttccaagatacagcctgcaagtggtagcaagaagtgattagaggcagatctggacttggcaacagaagtggtttcccatctccattgtctgagtctgattttcgctgatgctgttttgtggatttttgtggtagtgatggttgtcagtgctgccagtttcccaaaacgtaatcaagcctctggtcacatggctgtcgatgtaggcattctggagtggtgttcagccaagtgaccgggcaaaattgggctgtgaaattgtacttccaggcttggatgtaatttttgctctagagagangcaagtggtgggaaggaggtagcatgacgtgtggtgtgcgggtttccttgctgccgtcacctctccgctcatacaggaatgaagccttagccaggagncaggctcagcctgtgccactcaccgaagccactttctacaggccagcaggggcttgttgcaggctgtgggttttggtgtggtttgtcagaggctaattcttgcagagtttccaaaaccagaagacatcgtacttacccaaagcccgttggcacctgccaggtattggcatcggtccctaaacccacggaagttgattgaagtgaagttctcccacctgagcagaaatatgaccatgcagcgcaccatgaagctctaccgactgccagaaccaggggaggcctgaggcttcagttttactctgctgcaaaatgaaggcgggcctgcaagccgactacacgtacggaggctgttgaggacaatttcattccattaaattaaaaaatactgactggctggcaggcaggtgccatgtctgggaacagggacgggggagcttcacctttttgtcttggcttttctttgggctgtgggggggcatccatttccagggtcggggaggaaataccaaatgcattgttgttctgctcaatacatctcacttgtttctaataaagaaagcagcagaacaacaatgcatttggtatttcctccccgaccctggaaatggatgcccccccacagcccaaagaaaagccaagacaaaaaggtgaagctcccccgtccctgttcccagacatggcacctgcctgccagccagtcagtattttttaatttaatggaatgaaattgtcctcaacagcctccgtaggtgtagtcggcttgcaggcccgccttcattttgcagcagagtaaaactgaagcctcaggcctcccctggttctggggaaggtgggccaggccatcagaaggctgcctcacaggtgggtaggcactgacgggagggacactcctgctccctcccctgatctaacatctggttcccctccttctcctagagtgcagctccatgcagttgtccaaggcctttgggccgttaggttggttaaatgctggtcgtctttggggaaagaattcaggaccacagggactcccctaggcttctgagagccagcaagtaggggggcgacagcagttagacaggagttgtggggaaggcctgacattttccataaacctggtgttaaagtagctgggtgtgggctggccttcaaataagacagaagcctcttcagaaataggcatgtgtggggaaacgagccctatacaggcctcgatccggagtggaggcctcctactcagctctctccctacacacagactggagtccgtggtcaaatgcagagtcaatccaaaggcaggaggtaaaggtcgtctttgaaacatggcagctgggaggactgggtggcagagggtgggggccaggcccagggaggccttccaacagcagtt

SEQ ID NO: 5703 - DNA, 534 bp, Homo sapiens
gcgagggctggagcaggtctggtctttagagcagcccgaatggcactgcaaaatagacgagggctcagccgggctggaggcctcgagctggagcccggacgggcgccacattctcaacaccacggaattccatctgcggataaccgtctggtccttgtgcacaaaatccgtgtcttacatcaaatacccgaaagcttgtctgcagggaatcaccttcaccagggacggccgctacatggcgctggcagaacggcgcgactgcaaagattacgtgagcatcttcgtctgcagtgattgggcagctcctgcggcattttgatacggacacccaggatctcacagggattgagtgggccccaaacggctgtgtgctggcagtgtgggacacctgcttggagtacaagattctgctgtactcattggatggccggttgttgtccacgtacagcgcttacgagtggtccctgggcatcaagtctgtggcctggagcccagcagtcagttcctggcagttgggagctatgatggaaaggt

SEQ ID NO: 5704 - DNA, 629 bp, Homo sapiens
gagagccagtaacttaatgagtgatgcccttggaaaatgtggtggccaagacagattattgcagggttggccccttggttctttcaatccaggatcttgcttctgacaggtcccagggatggggagaggaccttctggctgagctgggctccatgagaaacgcctgacttccaagagcctttcctccccagatccactttgatggctggagtcatggctatgatttctggatcgacgctgaccacccagacatccaccctgccggctggtgctccaagacaggacatcccctgcagcctcctcttcggacccagagagcccagctcttgccttcccctgggggctgtccccctctcagctataggagcctgccccacactaggacctccaaatacagctttcaccaccggaagtgccccactcctggttgcgacggctctggccatgtcacaggcaagttcacagctcaccattgcctctcaggctgccactggctgagaggaaccagagccggctgaaagcggagctgtctgactcggaggcctcagcccgcaagaagaacctctcaggcttctccccaaggaagaagcctcgccatcacggccgaattggacgcccttcgaatatca

SEQ ID NO: 5705 - DNA, 484 bp, Homo sapiens
  misc_feature (1)...(484): n = a,t,c or g
tttttttttttaaaagtcaaaactggtgtttattgtgttcccaccatagcagtcattttgtataggtaaagtgattggatctacatattcctccataatattgctctattatatactagtgatacacagccatatgctacataaagacatttctgtcaatgattccacatttaaaaccatggtcccataagattatagtgggaacatatacagaaacctaatacatgggcccttggatattgggcattgcaggatcaagtaggggaaatgactgacattcagtaataatgctgtgacatttgggtatttcatgtggaaaatatacatggtaaataaaaatacatattaacatctagggtttgtgttaaggtacattctataatgtttacacaatggacaggattgcctaggtggacactttctaggntgtatccccttcgtttaaggcatggctgaccgtatttactggcgttcngggtgatta

SEQ ID NO: 5706 - DNA, 108 bp, Homo sapiens
tggacaagagccgggaacagacgcctccttacacaggacatcccaggactaatcaatgtggggaaaggtgctcacgtcattgcattagcatcacaacttcaagaaaag

SEQ ID NO: 5707 - DNA, 737 bp, Homo sapiens
  misc_feature (1)...(737): n = a,t,c or g
ccaatgaaagcgcagatttattgaggggaaagtacactccacagaagtggaatgtaggtgcgggagcaggcgaccaagcggctcaagaaccccgattacaatgttttttagggttttannnnnnnnnnnnnnnnnnnnnnnnnnnnnnnnnnnngaataagctagaattttataataccccaagagttctttaaaggcctccaatcctatgaaggactggtgcacaaccaatcagaggctgaagtggagacttctgtcttgttaccacaggagtgaggacgtggcctgtgtgctgcctcatcttgcctagaactagctgcacctgctgttcttttgcttatgccttcattcttggttaccctaattccctattctcctgcctcactctgaggcattagagttggtttttcagtctgccagggacaaaagagaactaatccagataggaccatgccaaggaagatagaggagaggctaaagaaagagtacaaaggtcaatcagtcgttcccatggaaaaacaactctcctgcttatatagtcaattattgtgtccaattcattcagcaaaacatttattcatgtaatatcccttacttggtattctaacttatattttcaactcattttaggaacttgaagtcagtctcaggtaaagaacaatgaaagagaaatctcagcttggtattggtaatggtggtgataatctccacctggagacactaggcgtatgttaaac

SEQ ID NO: 5708 - DNA, 307 bp, Homo sapiens
cggaaggccagtacttacaggatgggggtaatgtctacttcacaggcttgctgtgagggccaattgaaatactatacaaaaattatttagcactgtctgtgccacatatagtaatgattcccgaattgggagctcaaggaatagacccaagttttgtgggcctgcagattcagacttttcttatgaaaaaaaattgaatgttataaaatgtttacaaaagtgattatctattgagattaagaaatcacaacaaatcacaaaattttacaagccgcaataccaaaacatcctaaaatcagaatccagg

SEQ ID NO: 5709 - DNA, 1698 bp, Homo sapiens
gagctactgcgtgctcatctcctccaaagctgtttacttcctgaaaagtggagactacgtggatcgagaagccattttcctagaagtcaaatacgatgacctctaccactgccttgtctccaaagaccatgggaaggtgtatgtgcaggtgaccaagaaagccgtgagcacgagcagtggagtgtccatccccggccccttccaccagaagcccatggtccatgtgaaatctgaggtccttgctgtcaagttgtcacaataaataatctacgcagagagcctctactatgaaccagcagcttatgttaagactcagcgaaaaccgagagcagctggagctggactcctgaagccccgctgctgagatgggcgctcccgacacagcgcagacccaccaggaggaaagaggcccagctctcagctgacgatggaggcagaaccggagtcgggtttggggaagttgtcaaggaatgagggaaagtaaatcctcatgaggaaaagtacaaatggaaatcgtattaatttgtgaggcagggagttattttagattatgggaaataatttttaaaggtattggttaaataacgtttaaaaacatgtactgagatgaatctaatttttagattgccctgtattttgttaacatgtatatatgtacaacagtgtgtttgtaaatatataggaacgtttctgaacagggtctgtgctatgtgtaaaggtttgttaactgtaaagtaatataaagttatattggatcttctattgcactaattctagatgtctaattcaggatactgtctatagaaaggcattcttaaaagttaaagaatgttacgtcttagttttgggagactaaagtattccccagtaaagtggggttgaggtgagggctgtggtcctgaaaggggacgcctttgacatcgtggctgtccagttgggctgtgagctgtggcacccaggactggcgctgggcccttcagaaggatctaggagaggggcttgggagcccacttttaatttctcacccccattttacaaagagtgcttagattcttacaaattatgatgtaagttatccatttggctttttcctaactagtcttaccaaacttagggggaaacctgtgctccattaccacatgggtgcaagtcagcattgtaagttttctcaggttattattattagagaggttggaaacattggtaaactctgttgattgagaaggaaaaaaaaagtcccattgaactgttgcaacaaatcagaaatccacataaaagtgctctcctgcctgggcagcaacaaccaagaacaaagccccgggactgttttctttttaataaagccacaggcaggcatcgtagctccacagcccgaggggacacaggatggaaaccccaggatgagaagggagcagggagagttccagaaagggggatgaaataggagtattaaaaagctgcgttggtaagtttttcatggaaccaagatttgacaaaggcatctcttatccttggttttaaattcctgctgggagcaaggcctggtatgagcgccctgggtcttgtttttggtgtttcgcttttctgtaaggattaagcagatagggagaagggaaaaggggcctcactttagaatgaatgagtcaccttgtgatttttaaatttttattttaataaagctaatcaatttctaaaaaa

SEQ ID NO: 5710 - DNA, 388 bp, Homo sapiens
ggtctcaacaatcttctagaccctccttgaaagatggtgctctggagagccaagatacagagaatgtcccagttacactatcagaggagaaccgttctgaaggaaaagttggttttcaggcctataagaattacttcagagctggtgctcactggattgtcttcattttccttattctcctaaacactgcagctcaggttgcctatgtgcttcaagattggtggctttcatactgggcaaacaaacaaagtatgctaaatgtcactgtaaatggaggaggaaatgtaacccgagaagctagatcttaactggtacttaggaatttattcaggtttaactgtagctaccgttctttttggcatagcaagatctctattggtattctacg

SEQ ID NO: 5711 - DNA, 498 bp, Homo sapiens
ttttttttttttgcaagtccagagcagttttaatgggggtggaggctgtcatatcatctaggcctgacatgtagtcttgtgctccatcaagcaattctccctgaaatccttgtttccgctggtactttctcctttgctgcatatcagcaaaagtagctgctccagttgggtaggtgtaggccatatgtggtaggaagctcatctgatccagtcctgggtatggtcgtagcccaggaatactggtctggactggtggcatgaaagtagcagggggaaatgcgctttgaggtggaagagctgtgtataaaggtttggcactaaatgggttcatgctgaacactgggttagtgcttttgttgtccagattatttgaatttgaaaattccttcttgataaaagtcaagttcagaggctcatctgagttttcagatgaggaagaaacactgttatgatctaaactgatgctactagcttttgttttgttctttgtggctatac

SEQ ID NO: 5712 - DNA, 492 bp, Homo sapiens
  misc_feature (1)...(492): n = a,t,c or g
gaagagctatgcatgcagaagtaactgcatttccaaatgaccgaaaatccttgacctgtcataggaatacctcagggtaaatgttgctgagggcagttgcaatctaagaaagaaaacatgcttgccctttatcatagtgtcaccttgcaggcctttttttttcctttgtgactcaccgggagtgctgatatgtgtatgtcttttccccctcatagtaccaagcagagtaatagggaaccggtgtgcttttaggatttctaccttctgtggcgcgatcctcccactgctgcatgccagtcgcctgcctctttcatgaaatctccttcccgttttggtttggctttgtttctatgttcgtttttatgggataggattttttttttcagggttaaacaaattttaaggggatttgcttattcaaaaaggaacanggaatacaggcatcttaactgaaagcttgtaaatacagtgagtgctttagattgggttttt

SEQ ID NO: 5713 - DNA, 334 bp, Homo sapiens
  misc_feature (1)...(334): n = a,t,c or g
ttcnnnnnnnnnnnnnnnnnnnnnnnnnnnnnnnnnnnnnnnnnnnnnnnnnnnnnnnnnnnnnnnnnnnnnnnnnnnnnnnnnnnnnnnnnnnnnnnnnnnnnnnnnnnnnnnnnnnnnnnnnnnnnnnnnnnnnnnnnnnnnnnnnnnnnnnnnnnnnnnnnnnnnnnnnnnnnnnnnnnnacatttacataactgattacaatacattggtataggtctattttattagttgctgtnaanctcttgctgggcccacnttatagatnaaacnntatagtaagnnnatatgtgnangaaaaaaacatattatatacagggttngggatttcta

SEQ ID NO: 5714 - DNA, 627 bp, Homo sapiens
ttttttttttttgggtatttttacatatttattaaaacaagtttcctgagaagtttgactaggctatgttgttgttaacctagtttgcttaaaatgtacgaaaatgcaatcaaacttacatatcttttaaatattcgaaagtcagattttgttctgattgccctatccaattagggcaaattagtgagggtttttttgttttttgttttgtttttctaacaatagtctgaaacataaaattaagtttgggtttaaaaacaattcttgaaactgtcataaacatatgatatctattgattaaacagtaataaaaagacacaaggtacaagaattgaggcttggctgttctggctgtatactaacttcatataccctgacagaataaactatctttttaaaaagtgctttgtacactgcacaattatagctttaccaaataaaaactcaatgacatgtcgctgaaatttgcttcttctagaatttgaaattatttaaaatactgcatgagaatatttttatcatattatataatatgacttcatcaacatgaagttccaggaccccagatgcctctctgagaagttcattatttgatagggttggatcaaatgtaaaggtccaggtgtt

SEQ ID NO: 5715 - DNA, 2992 bp, Homo sapiens
cgctcgtatcaggcttcatggcggcgcggccactgtcccggatgctgcggcggcttctgaggtccagcgcccggagctgcagctcaggggctccggtgacccagccctgccccggggagtccgcgcgagctgcctcggaggaggtgtccaggcggaggcagttcctgcgggagcatgcggcccccttctccgccttcctcacagacagcttcggccggcagcacagctacctgcggatctccctcacagagaagtgcaacctcagatgtcagtactgcatgcccgaggagggggtcccgctgacccccaaagccaacctgctgaccacagaggagatcctgaccctcgcccggctctttgtgaaggaaggcatcgacaagatccggctcacaggtggagagccgcttatccggccggacgtggtggacattgtggcccagctccagcggctggaagggctgagaaccataggtgttaccaccaatggcatcaacctggcccggctactgccccagcttcagaaggctggtctcagtgccatcaacatcagcctggacaccctggtgcctgccaagtttgagttcattgtccgcaggaaaggcttccacaaggtcatggagggcatccacaaggccatcgagctgggctacaaccctgtgaaggtgaactgtgtggtgatgcgaggccttaacgaggatgaactcctggactttgcggccttgactgagggccaccccctggatgtgcgcttcatagagtatatgccctttgatggcaacaagtggaacttcaagaagatggtcagctataaggagatgctagacactgtccggcagcagtggccagagctggagaaggtgccagaggaggaatccagcacagccaaggcctttaaaatccctggcttccaaggccagatcagcttcatcacatccatgtctgagcatttctgtgggacctgcaaccgcctgcgaatcacagctgatgggaacctcaaggtctgcctctttggaaactctgaggtatccctgcgggatcacctgcgagctggggcctctgagcaggagctgctgagaatcattggggctgctgtgggcaggaagaagcggcagcatgcaggcatgttcagtatttcccagatgaagaaccggcccatgatcctcatcggtgggtgacccatcaagttatttttgatgttccccaattccccaccagccaatccaagcattttctcctgggacccgctccatgttcagggtctaagacccagaatgagtttctccagccaggtggccactttatggaaaggatgcagggtcccccagacccctcctctagcccagcagcggctggggtctggctcctttcagagacactacacttcccgtgcagactcagatgccaactcaaagtgccttagcccaggttcctgggcttctgctgccccctcaggaccccagctaacctcagaacaactaactcatgtggactcggaaggacgggcagctatggtagatgtgggcaggaagccagacacagagcgggtggctgtggcttcagccgtggtcctcctgggaccggtagccttcaagcttgtccagcagaaccagctcaagaaaggagatgccctagtggtggcccagctggctggagtccaggcagccaaggtgaccagccagctgatccctctgtgccaccacgtggccctgagccacatccaggtgcagctggagctggacagcacacgccatgccgtgaagatccaggcatcttgccgggctcggggccccaccggggtggagatggaggccctgacctctgctgcagtggccgccctcaccctgtatgacatgtgcaaggctgtcagcagggacatcgtgttggaggagatcaagctcattagcaagactggtggtcagcggggggacttccatcgggcttagcacctgcccttctcacccatggcccacccaggcctggagctgggatgcaatgtaggctgagggaaagacgtcaggttcctttaatcacagtcactgtttgtttaccttgagcagtaaacccgaagtcagcctgctctactactaacaaacaggcctgctgctagatgatctctaatgaccaatggggcttcctttctatagggaggataccagcaggcccttaagccttccaggacactaaggtcgtgggagcgggactgcaacaagcaatgccagataactgagaaatcatgttctttgtggactatttcagacaaccaggttccgacagtccagcccagaacttttccttctcattttgggttttctcttctcctgctttcctggggagagattaagcgctcattaagcagaggagcccactttgaggagagcaaagcacaagcttgcctgaagaatggatcccaacttctccccggcagctctgcctccctaagtctgtgaagccgcagccctgccctgtcctgtcctgtcctgacttcatctctccttctgcccaagtctgtgtcccatcagacttgcagcctttcagcttaacagttgcccggtcctgctggccccttttcctctggcccccctcttctgaaacaggatgtgcacacatgggccatagccctaaggactcctgccagaccacacagcccacacctggccctgttcacggctgttccacccacccctctttattctggagcatatcagggaaagaaaagttgatgatagattgccttcaccctcacagcgcacaaataaagctacgatgccaactttgcagatgcaagaatgaagacactgtgtgggtagggcactgagctgctgcagtttcacagggaaggctgcacctatcaatcaatcaatcaatcctatcccaagacacagttccctgagggaagaagaggagggacctggaaaggcctaagggtgtactctctgtatagccccgctatgggaaaataaagtggagtagggggcatagaaaaaaaaaaaaa

SEQ ID NO: 5716 - DNA, 289 bp, Homo sapiens
gcacagtcctagaaaagcagcaagaattcattctgtgtggaacagcttgattgtcatagattgtaggcaccatagagaatcagagtgaagagcaatcactgatttaaattgaggtacagctgtgtccttatttcatttcaaagagtaatgaagcagaaatgcagtgagagctcacacatttgggtggcttgggaacggaaatgttttggatatgtgaaaatgcagatgggtccaggttcccagtatggctccacacagttctctcccagctccctagcagttctccgag

SEQ ID NO: 5717 - DNA, 442 bp, Homo sapiens
  misc_feature (1)...(442): n = a,t,c or g
gaaaacagttcctcctgaggatttcagagaagagctggacttcctggctgactctcacattctcttcttctgaactgcttcttctggtagctccctgtcactttggacaagctcgcactgccctccttggctgttctggaactgtgtgatggacttcatcctactaggacacagttgcttcttgaattccccagataaacacccacccgtgtgaatgacaagccataataaaaattaattgtcaaaattaatcaacaaggtcccaaacaagattgagagccagggggacagaagtgccaccggtaattatatagtcacaggcagacctacgaggatgttcatctttcctcttaaggacaacttggaagttacagacgtttcttagaacttaaaaagtttgatagccccttacccaaagaantagaagcattggannatatgt

SEQ ID NO: 5718 - DNA, 422 bp, Homo sapiens
  misc_feature (1)...(422): n = a,t,c or g
taacctacccacacagggcccccatcctgaaagaagttcacatatatttagggagctgaaatgagtgtttaaaggataataccaagaccataaatgctaagtgctaattgaggggtatattcagggaacagttttggaaacatgaggccaagggtagctaaggaagagtttttagaaaaaacttgataattacagaagcagagaagtatatttgccttattacttaatctctgttttcacagaataggctannnnnnnnnnnnnnnnnnnnnnnnnnnnnnnnnnnnnnnnnnnnnnnngctggagtgcagtgcttgcaatctcggncttcactacaacctctggcctcccgggttttaagcgatttctttcttgccttcagccttcctnaggttggctgggcattaccngggatgtgncca

SEQ ID NO: 5719 - DNA, 618 bp, Homo sapiens
gctagaacttgggaatagatatagtacacgaacagtgaactgcctgtttttgacaacacagacaccacctattgaaggctatacacaagcatgaactcactctcccttttagcctataaagtagatcttactgtttaacaggtaaaatggggctgattaaggctgagcaatcaccaagtgtcagaccgcgtgccaaactccacactgtaagatgcgtcacctaagcagcatgctcaggcatgaatgagccttaaaaggccacacagcacagtggttaagagggcggggcctggggttagactgacatcatctgaatccagcttaagtcagtctccactcagggaagatgcccctctcagtcatggtagacctgggcagtgggtgcccagctgaccatgtaccccagtcagcagggtgagagtctgttgctatgtgcaaaagtgtgacctaaggtttaggctgcctacaggaaccagaaaactctgattctgtgtcatttacatgtgtaaaatctgaaacttggggccaggacatccaaaatgggaatcctcacttaccaacgttggaggacaccgcccggttcatgatatcaagtgcctcattaaatttgtccttgac

SEQ ID NO: 5720 - DNA, 450 bp, Homo sapiens
  misc_feature (1)...(450): n = a,t,c or g
ggagtcaagtagcttgggtatttgtgtcaccatccaggatgtaacaaagcccctgggtctctttgctgagtgctccgtggtagaggcagtgctctgggctcccctgccagccctgcccttatgagcaggcaaagcatggtggaccagggtgttgatgaggatgaaacggccatgcctgctatgtggcatcaggaggagctgggaaagggagactcactgcatctgagcctctcggggttattttaaaacctgttggttggtgtggtgaaggggaccgctgccctctgccctaaacttgcccctgcatggctctcagggacagagctcttgttaatacggtatgttaactgtgtcttcctttcacccccaaacaggaacagattatcagtctggtcaatcagatctgcggcaaagtgtctggtaaaaaccgcagcattgagaactgnctca

SEQ ID NO: 5721 - DNA, 186 bp, Homo sapiens
gagcactcagaacatacaaggataaatgggctgccaccagaggtgaggagtctcttgtcactggagaggttaagatagaggctcaagaacaatgcaaggaaaatggaggttttcaaacacaaagtggatggtggtatgagacaatgtttaatgtccttctaactccaaaatcctgatctggaaagc

SEQ ID NO: 5722 - DNA, 457 bp, Homo sapiens
gggaatggtttgcagtgtatgtggaacttaatcagcaaattgcagcactcttgaatgctggcgatgaggaagatcttgtggaactaaagtcactgcagcaacaacttagtgatgtttgttatcgacaggccagtcagctggaatttaggcaaaatctcttacaagcagctcttgaatttcatggtgttgcccaagatttgtctcagcagttggatggcttattagggatgttgtgcgtagatgtagcaccagctgatggagcatcgattcagcaaactttaaaactgcttgaagagaagctgaaaagtgttgatgtgggattgcaaggtttgcgtgaaaaaggtcaaggtctcctggatcagatctccaatcaggcatcctgggcctatggaaaggatgtaaccattgaaaataaagaaaatgtggaccacatacaaggagtgatggaagatatgca

SEQ ID NO: 5723 - DNA, 530 bp, Homo sapiens
ggaagctaagtggcttgccaagtccttcacgaaatgagccacgctgatgggtaatttgtggagaaatatcttaattttgatttccttaaggaaaagcgaaaagcagagttacagtcacaaatcccctgaacgtactgctgtcaccagtgtcattgtggctgcgggaaggagatctgaacctaacttttcttactccctgaggagtttcttgttggacccaatggggtccatgaagacactgatggggatggaagcagacccatggcatcaactgcagtgtttctgctgtgttcatcttctcagaaaactctgtgacccagttctttgggagcttttgtcagtctctttcgtgccatctaccttcgaaggaaggaacacttttagagttacaatgatgaggagaggagcgggacaatactcaatcctataccaagtcaattgagattagtttcctactggggagtaagtgcctggcccctgctactcctaatttgaaatgctattaatattacctagccttttacaaagga

SEQ ID NO: 5724 - DNA, 561 bp, Homo sapiens
gagaatttttatgatggctgctgtaaaatccttatcagataattccaacatctgtcacctcattgtttgcatctactgatggtcttttttccattcggaaacattttcctgtttcttggtgtgtggaatgattttttattgaaacctggatatttttaggtattatgttatgagactatgggtcttatttaaaccttctgctttagcccaactttctcagataccaccacagcaggggaattgggagcactgccttcattattaccaggtgtggctaggagtccaggttccccagtcagcctccctttatactgagtaacagggtcccctcattactactgggcaaggtgagaattcagtttcccattaggtctttattgattcttccctggctggaatgtgcagcggcaccttttgctgcaccctgggaatttccactaatgctatgggacagagtgaccaggaagagcttcattacaccaggtgggaatgaaattcccagtagcctacacagccttctccgacaccactctggagttgtattcttccagcacacaaaca

SEQ ID NO: 5725 - DNA, 636 bp, Homo sapiens
tgcatttgaaaagctaagaacagcctttattggagaaagtaggataaagacatttccatatatgttcatgggaatttaccattcaaatttaccattcaaactgggggagtagagatcagtcacttttgccatcttatctgtttaaaactctttcaagaaaagaaaagaaaggaggagtctctttcaagaaaagaaaaaaaggaatactgtgtaagaaccacagaaaaaaagctaagtaggagcagatgtgggtgctctttccttaacagtcagcatagaatgtagagactgacattttctttaagaacagattattataactaagcaagaaaaagtatgtgtacataagttggtcacagtgacacttgtagaaaatataagtagctgtaaatgggaaaatgtcaaaaatgttccatccaaggaatgttagaaggtcccttctttgccttgctcatctgaaaagttccaattcaccctacaagccttagccccaaggctgggaagccactgcctctactaccaagaagcatccagtgtctcttttgtgcagcctggcacccctcctgtggcttcatgataacatctatcactctttagggatcatttacacttctgctgtctcttctccctaagaca

SEQ ID NO: 5726 - DNA, 988 bp, Homo sapiens
  misc_feature (1)...(988): n = a,t,c or g
ctataagttctctttaatacctctctttctctttccctcctctcaaaattaggcataaattgtggatttttccatcaaagtagctttcaagatctgttctctcccaatcctaatttcttcaagccacatcttttccacatgtaaatgtcatttttcctcaactacatcataaatagtttgagaataaagaccacattatatgtacctttttgtcctctatagcacctaccacaatagcatttagtaagtatctgctgactagttgatggacacatgtaacacaaacttnatatctcaagggcatccttcttgctcatccccgccccctcacaanccccactgcccagcccccagcctcctcactggaaggcaaaggtgctgccatagagcttcttggcggtccggaaccgagcctccttggcaggagggctgctcagcaggaggaactggtgtgaggtgtgcatgaacttcagcctgctgagaggtagtttgacaatgtgtgacctgttgctagagatgatccactgcaggagaggatgggccagggggatccaacttgtccatctgtttcttgatttccaaatatgagccctgggtcatctcccgaatagacatcacactatccagagctttctgaagccgctcataattcttcttcttagggttaaaggccagagtcttgggatcagtggggtccaccacagagggataaggctcaaagatgatgctctttctaggggactctaaagctgccctacacatggccaccagcagatccaccacctctgctccagtggccacctcctctgcagctccagacatgacgcccagtgtgtagaaggagaaaacgcatagttcacgagtacagacagctggcttcagcatagatccattttggaagacatgctgctcatcacacaccacacagtactcattcaatgttggaatcctctgttctgcatacttcatgatctgaacgaggaatccc

SEQ ID NO: 5727 - DNA, 1589 bp, Homo sapiens
atggttttacaacaaagctgatcttaaatagtacatttccccgctgataacagcgccatcttccttcgacccccagaccaagggatcaaagctactgctcaattgagtttgacatcagctaccgacttttaaggaatctagaacaaagttctggagccaggccagaagtggtaaaagattcagttagccccttcctctgtgctgtgctgacagggagggagccagtgactggacaatctatgaccccaagtttgtggaaacgtggggcttcagctgagggtggggtagtgtgatttcagcagtgtctgtacctccctgacccctgcgctgctttgctctgttgtcacctcccgcacagtgtcgggacactgaccggaagccaaacctgtgcctggtggccacagacaagacacacggatatccgtgaaccttgctgctgtgccctcaccgaggccagcgccccacctgctggaacagccaagccggagcagttctgtctggggccacagctggctcagcctgtggactcaggtgttatcctgaagaagttacaacaaattctcaaagaataaacaatgggcttaaaaaaaaaaaaagggggataaacagaaactcacagtagctgtggctcaccatgtgcccaggcactgtgccaagcacttcacatttagtgctcattacaaccctatgaggtaggccgtaccactatccccactttacagtgaggaacaaacaggctcaagagtgaagtccctcgcttgcttagtatctcaaagctaagctgcaagcaaagatggggctccaaggtctgtgtgacctgagctcttggttatccaatacttcaaaactgtcacttaggaaagaagagaacatttttagaaataggagaaaacccaacagccacagtgattgtcacagagctgagggggcatcagaccaggttcgggggcaccagaccaggttcagggccactgcataactgccaatgccctgccccagccccaggagacacgcagactccactgccctagacgagtggccctgctgttaataaataaataaaggtcaggcacaatcctacacaaaggccccagaattcaaaccactgtcttgtttctcagacttttgcttaagagcccattactgggtggactggggaaatccctgatttgggtcaaaataaatatgccagttctcatccaaagcttacctgccttccctcctccttgagctgtgcctggggctttctgttgccaagaaatgttaaggagccaactccccacgagaagcctgtgggctctgctattccactgtagcctagcagggagctgacaggccaggcacggagttcctacaatggctgtagccagagttccaggtcagggaggtggggaagaaatgcctcctttaggacttaactcctctttaacttcagggcatgtttattctgaacccaaatgagtggaggaagaggtaggcaacaaaaggaagagaactttacccccaagtcattgagttggggtaagggagctccaggatattgacatccccacccaccatccccagagaggatgatatgatccctttcc

SEQ ID NO: 5728 - DNA, 428 bp, Homo sapiens
gtttctgttgtgatccagctgatccattgatcagtggggttggggacgcttctgttctgctcatttattgctgtgtaacaaaccacctctaagtgagggctttaaaacaagatcgttcatttcttttgcacatgggcattggggtacctgggcgcagctacgcacttctcacctggggcctcatcagtcagatggggccaggttgggttagccccaaggcttctcgcattggcctaagaggcttcagacaatgagggctttggcggctggggctccccagccacacccttcacctcgtggcctccaggtagcctgtccacctgccaagaacacacacacccagccccacaggtcacccctcacctgctgctgctcctctctctccctgcacgctccaaagtccccagaagcctggagactcccaagag

SEQ ID NO: 5729 - DNA, 589 bp, Homo sapiens
gaactggaaggtgggcattgggagctgaggccccacctttcatttcagaaaagtgcacaggcagagcgggctgagtcacaggcacaggtgaggaactcaactcaaactcctctctctgggaaaacgcggtgcttgctcctcccggagtggccttggcagggtgttggagccctcggtctgccccgtccggtctctggggccaaggctgggtttccctcatgtatggcaagagctctactcgtgcggtgcttcttctccttggcatacagctcacagctctttggcctatagcagctgtggaaatttatacctcccgggtgctggaggctgttaatgggacagatgctcggttaaaatgcactttctccagctttgccccctgtgggtgatgctctaacagtgacctggaattttcgtcctctagacgggggacctgagcagtttgtattctactaccacatagatcccttccaacccatgagtgggcggtttaaggaccgggtgtcttggggatggggaatcctgagcggtacgatgcctccatccttctctggaaactgcagtttcgacgacaatgggacatacaact

SEQ ID NO: 5730 - DNA, 728 bp, Homo sapiens
  misc_feature (1)...(728): n = a,t,c or g
gagaaactgacgtaatgaaagaaaaagactttgagacagggccaggaaaacgctgccgcctacaagcaacacacctaaacggagtntcccagaagggtttagtggcacgtccaggttcgtgtgtgaagaaatagatgggtccccttcagagtttgaagcatgacccatgtgaccagataggagaatctctcgagcgcagggaaagctgggtgctgcctgtgtggtggcagagtctggagggcttgctgtgctggggactaaagagcaggaggactgcaggtgaggcgtgcagatgactttttatcggtaaagattttaatgccatttggtaattttgtcattaacatttattatgatagacaaggcttctagtatctttgtttcaaaactggtttgttccaaagctagagataagaaaattatgcatctcatctagtttcataaaaggaagtttggaggacctgctcccatcaaaacactggaagatgcagagacttttgtcagctcctggctaattagataatgctaatcatgtgagtagcaataaaaattcgaagtcctgccagacgtaggttctagacattctgacagccaactaaagagccagcaataacgtgtgcctaggagtgcgagagccttctccacctccgtgatgcctccaggttcgtgcatggccacttgtgctgcgtgagcgtcgtaggtttaggggaacagcctcgggccgaatt

SEQ ID NO: 5731 - DNA, 485 bp, Homo sapiens
ggatgatcgtggggaaccacaaggacaggagccgctcctgagcctgcctccagctggctggggccaccgtgcggggtgccaacgggctcagagctggagttgccgccgccgcccccactgctgtgtcctttccagactccagggctccccgggctgctctggatcccaggactccggctttcgccgagccgcagcgggatccctgtgcacccggcgcagcctacccttggtggtctaaacggatgctgctgggtgttgcgacccaggacgagatgccttgtttcttttacaataagtcgttggaggaatgccattaaagtgaactccccacctttgcacgctgtgcgggctgagtggttggggagatgtggccatggtcttgtgctagagatggcggtacaagagtctgttatgcaagcccgtgtgccagggatgtgctgggggcggccacccgctctccaggaaaggcacagctgaggcactgt

SEQ ID NO: 5732 - DNA, 279 bp, Homo sapiens
ggatcccagcggtgcctttattcaattgaaacagcgtgattttgcggctaaatccacatcctttcatgtattgtttttatatcagaacgcgtaagagtttctgttctgcactcatagcacccacatttcctgcagagtcaagctgccactcccatgagatcgccactctaaaaggtggttctctaacttaggggcagaaatgttgcataggcctaagggtcctttgcttaactgatgccacaccccactggtgcaggtggactgggtcaggcggccgca

SEQ ID NO: 5733 - DNA, 1904 bp, Homo sapiens
tgaatcgggacctcccgccccttccaaacccaggagaggacgtcgacccaagtctgaatctcagggcaatgctaccaaaaatgatgatctaaataaacctattaacaagggaaggaagagagctgcagtgggtcaggagagccctgggggtttggaagcaggtaatgccaaagcacccaaactgcaagatttagccaaaaaggcagcaccagcagaaagacaaattgacttacaaaggtaaaaatgcatttgcaaagggagaaaatgaaggccaaacagaagcaggctccagcttctgcaaaaacttggattcacaaatgtccctgaacagaaaatgaagctcacttcagaacacacactctctgccttgaaaactaaagacgactattacttccttttcacatgaccacaagtcctctgatggaaatgtacagcagaaactcttgacgagagaggctaaaagcaactctgttctcccccttcccctagacttttcttacgaaaagtcaataattaagcaaattgcttaacacttggttccagttcctgcctatctggagtttaaatgcgtaatacaccattaatttccacgctggcagtttttattttaaagaaagtaacaagatgtctttacactgacactgaaaattcatccattttagagccaggaattcccatgttacacaggaaaaaatagaagtctactgaattaattttttaaaagaaaagagatcagattaaatatttctttgtttttccttttggaaacttttatgtataattctttctgcctgcctacttttctgcaaaaatgagatgtacagatttcggttccctggctatggaaaagtgatgtggtagcaattttataaatgttgctttctgatttttatcagagtgagaaaattaaaattattgatttgcaagtagtaaacagttcatattttgatttcccctcattttagtttaatataatttgcaataaatgtacatattgttgtttgtttcataaagcatatcactttaaaatggtttttactcctgtgattatgttggaatatttggaattttaaaggagtaaagactgtccagcatttggttttataatgtttgtgaccagatttttattaatgtaaaaaaaatcaatttttaaaaaatagttggactttggcagcttttaaggaaagttggaggtgttttaggattgctatcaattttcagcattgtgctatttggaaataagtgttttgcttttgtctgatggtctgggctcatttttatgtttattttagaaaactgttgcatcaatatattatgtttcttggcattgttcagcataggtaatgtgtgcactttatgtgtacacataatcatatttaagttttttgcataaaataaatgcttctagatgtcatggcagtctttttaatctttttatcatatgctttcttgtgaattttttcatgttaaagagctaaagtcataacatgattacagtcaactctccattatctatataaaatagtgactaagcctcaggtttttaattttgtgataacaaaataacgaaggcatgtaagacctgattctggaggaacatgaaatttgtcttttctcatgtccagagttctatcctgcccccactgtccactgtagggtcatccgcaaagccctagcagaatgtgctcactccatttccttacacgtttctagcatgggtcagaggaaacaacatttgtgttataacttcgtcttgataggctgtagtgtacatgggatgtaaaacaaacaagtgtatcaaaggtggatgattctgttagagtgaagtttgagagtaaatgtcacttacgtttctcatagataatcaagagttggctgtgtattgactgatagatgggtaatta

SEQ ID NO: 5734 - DNA, 269 bp, Homo sapiens
gaagcatgttataagcacatgatgttagcttaggcaaatttaactccagcacagaacacgtaattttaagtccttaggaaggacttcaagatattaagatacagaacagtttatactcctcaaaattgtcacatttgccagaagacaacccctggccttcaagatggcatgaaaatgctagttcctgatatatatcactaacctggaatttgtccataatgttgcatagcacattaaccagttcctagctagggtgtcaaaccaccaaa

SEQ ID NO: 5735 - DNA, 364 bp, Homo sapiens
ataattgtgacacatagctggggggtggtgctggaggtttcagaccgcctcacaggcagagttccagggtcagagagcatggagtactgtgtgtgaccttcttccagaagcacgggcacaggagcatgttaaaggccctgaaaagaccagtggcaaagaaactcctttcattttgtttaatccagagtttttcaagcttatttaactatagaacacttttctgtgggtttcgtagcctctttctagcacagtatagtgagtggggaaaggccctgactgagagtcaaagattctgagcaggaaccatgatctcttcctgcctagtatgtgacttgagcaagacacttttcctctccccaggcct

SEQ ID NO: 5736 - DNA, 495 bp, Homo sapiens
  misc_feature (1)...(495): n = a,t,c or g
cctggaaatgtgtcaactgcccgtcagcctggattcaattctgagggctaagccacgaccttatccatgagtggcgaagacacccctgaggaaaggattgcttgcacctcacatctgtcttcttctaagattactcggagattttcaaacaacatctgagaacagaagccccctcccctactcagagaggaacgagggtggcccacctctcaagggccttggattcctgggaccaccctttgctgggaggaagaatccacaccgaatccttctgtcttcatggcctgctgtgctgaaacagaacagcaggttccatctttcacatctttttttctcccccagatgaaagacgactcaggaacggtagggctgggcagaggtgtctcttccttgagagacaacaaaagcttcttaaggggagggagcttaaaggctgctagaaacctancccaaccatccactcctgatctgagacagaaccttnttcgccactct

SEQ ID NO: 5737 - DNA, 174 bp, Homo sapiens
gcacaggtaagtgaaggcctccgggtacccaagtgctgacaggccttagaagaccaaggaccgacaggtcctgctcccccagagctcaggggtgcagaccccaggcccgcctccttcagacctaagtaagagtccagactctagctgcctcctccctcagacccgaagtctggg

SEQ ID NO: 5738 - DNA, 856 bp, Homo sapiens
tttttttttttgatttgtgaaataggtttagcaaaaatatattgagaataaaaatcagaaactggtaaagaaaagccaaatgaaaaaaatatacaaagttatcccccaaatgttgataagaacctagcgagttcagaagataggcccaggtgagaagtaggcccaacccggccaggcctcgaaagtgctccgcgtaaactacacgttgaaagtggacgtgttattggcatttcattcaaatccatgaggagaaaaaactacgggaggaaatcttacaacaccattgctgccaccacctgcagggccagcttctcactaggatggaaaagaagcgtttctgaggaacaattcacattagtacaaaaaaatgatacagccatttccaaagagcagagtaatgatcacaatggcagtttcgaggaatccagggtcagtcctcacacgggcctcacccagcctctcccgagtggcgacggcgctgagagccagaaagggggcaacgcgaagacgagtttctagcgacccttgggaaaagcctacgctacacatttcagaggagattaaaacattccatatgccaattaactttaacctaaaaaaatagagtgggagggaaccttgacattcggagaaattcaagtgtggcggtaacgctgaggagtgaggctgtttgtccaggaacgctgagctgggctcagacggtcatcagtgcagaccgagcggacgctgctgaggatggctcagtggtggggaggcgctccctcccgaggaggcctgtacgtctgtgtctggcggctcgagctgggtctccgggccagttcatgctcgccctctcccgcagcgggccggccgccct

SEQ ID NO: 5739 - DNA, 135 bp, Homo sapiens
aacatattggcagagtgttaccttgtgtttcggtctattggtgtttgagtagaagtatggcttaaagcttgttcttgactaccaataaaagaactttaggggatggcagagggggaaggattcagaagattttac

SEQ ID NO: 5740 - DNA, 651 bp, Homo sapiens
ccgcggcgagcaggcggcgtcggtgtcgggacgctctgctgggggcggggcgcaagggaggtttcgagcccggaaggtccggcgcccagagctaacgggagtcccaggttaaacactttaagatgagaaaaattgatctctgtctgagctctgaagggtccgaagtgattttagctacatcaagtgatgaaaaacacccacctgaaaatatcattgatgggaatccagaaacgttttggaccaccacaggaatgtttccccaggaattcattatttgtttccacaaacatgtaaggattgaaaggcttgtaatccaaagttactttgtacagaccttgaagattgaaaaaagcacgtctaaagagccagttgattttgagcaatggattgaaaaagatttggtacacacagaggggcagcttcaaaatgaagaaattgtggcacatgatggctccgctacttacttgagattcattattgtatcagcctttgatcattttgcatctgtgcatagcgtttctgcagaaggaacagtagtctcaaatctttcctcataatgataacaaaatgctcttgcatgattttttaacaatatatttaaacaggaagttgtcactgatatactttattaaaaggatttttatcaaaaaa

SEQ ID NO: 5741 - DNA, 1390 bp, Homo sapiens
  misc_feature (1)...(1390): n = a,t,c or g
ttttttttttttttcccttttataaaatatttattctaaaaaaaaaatcacactgtacaaatttagatagaacattatcaatgctcagatttataaaaatgggaacagaaagactaaagctagcgaaggaacgtacatttctgttttgtctttttaaattaggaaggtaaaagtgattttttcttcaggtgcagtgatagtaaatgtctagaagacatccgaagagccagaaataaaaagcacaggagccgcctgcagactctcagagttctgtcttcacccgctgaatccgaagtggatgcgtgtggcgctcccgcagggtggcctggccccgtggatccacgccgaacgctcaacgagattcccaaggctggctgtgtacagcctaaaactttgtgctcagagaaaaaccagcatgatgggttcatcaactcctgtttctcaaacaaaatgagttttctgtacacttgttacaaaggtctgtacaaaagcacgaagctgctgtgaggtgttatttccgaaagagttaaaaatggatggaagggagctgttcgtacagttccgcctgtacattcacagagggaggacaccataaaaaaaggactcactcagaaattccagaccggagaatcctggcttcttaaaagattattttgaaagcttggaataagtttcagctctgccatttcccaaaccgcttcgcccagcatcgtcatagttcagcttcctctaaaactatattctccctttcttacacgcaaactaccaggaaaataaccgcaacccagtgaaaactatggggcttctgtgaatataaggaacgaggcagggagaagtcgtaaaagctgngggctcagagcccggagcgcccttcacattccgngtgccgtggcggccacagtcacagccaggggtgccaggcggggtccatgcggcacagattgtccaggctgtttgccgcggccaccagggtgttcaccttgctttccccgccttcgaactgggcgaggttgtgcaggcgggtcatgatggcggtgacggctttctgaaccagggacaccagttgctggctgtccatgttctctggctgcccggcggccgagagaggagaggacgtgtcctcttgtgtttttttgtgccaagcaatgatctcgtcccggagaaccgttttcagaatgccatccaccttaaagtttggctgggcgaagcaccgggcgaccgcaatcatggacgctgtcaacgggccggagaccccgatggtggtcagaaactcagaaatgttgggcgtgagtcgaaatgggacaggacggttggcatccaggtctccagtcgcgtcgtttatgtcaaatcgaaagtaggcaacattcagtttgccagtgtcctgagcgat

SEQ ID NO: 5742 - DNA, 1535 bp, Homo sapiens
tttttgaattcatccatttattcaactttccggtatgcaagaacttcttttcatggagtgtcacggaggccctgagggaggaacggtaaactggggcaggggtgtgcatagctctaggaacaggtttaaggtctaggctttagagttggggaaaggggagctattacagatttcaaaaaggccataactggccttaacctgtgcaaaatcttgggggtgaaagggcagacagggagtcaggctggaggtgatggagaagtgaggaatatggggaggtcgtggtagtagagttcacattgagtggatgtgggttctgagtcagggaaggtggtggcactttgtgtgttgagactgggttggtagaagaacagagctcaccacatctctggtgtggagggagaggggaaaagagcagtatgtgagggcaggtgctcagctactgcttccttcttggagcaggtgaccaaggagtttggctatcactccctgcccatcccaggctccctgcttggggaggggcctcccactaacctccagtgttttatgtttttagttgtgagtcatggctgaagaaagccagagagaaaataggagaaaaaaggcggagctgaaaatggaggcaaagtccatgggttggggacctagatggcccccttcaagtagctcaggcctggcagcttgtgctgggcttgtggaagattccctcttaagaggtgaaatacctcgggaagcaagccccagcacgggtagggcttgtgggtctgcggggctgggccactagtgttacctgacaatgccagctgcccctaccccaactgcacacaggaagcagggcacatggggttttgctgagcacgtcagccaaaccagggcagggaaggtgtcttcgccctgggcaaggccaagagggacacgtgcagtcttgctggtcccacagccgcggcacgcctcactcctcccaagggctcatgtcagtgtcgatggccacgcagttgtaggccgcatagcggagcttctcctcgcataccttggcactggcatagtgtggcaggaagagggtgctggagcaagtggaagactcgggcagcgcgtctgtggtctcgtagccccagcttgtctgggtagatgtagatccgtgcttggcaaggcgactgcggcccgtgaaaaaagcgcaggaagcggctccggtcctcgttggtgaagttgttcagtgcctcccagaaatactgcacccgcgagtcagatggctcgaagtcctcaaaccgggtgagcttgcgcagagcatccacagtgacctctggatccccacacactttcttctccaactcttgccaggtcagcaagtccagcacagcctgtggtaccaccttcagcagacctgcctgcatagctgccacctgctccttgctctcctctagccgtgccttctggaccagttggatgaaacgagaacggtccccatatcccacgacgatgcctgcacccccagggatcagctccaccacctgttggtcactcagtacagtggtgaatgt

SEQ ID NO: 5743 - DNA, 654 bp, Homo sapiens
gattttttgcaccagttgctggagacagtgccccagaacaatgagaacccttctgtcgacctgttgccccctaagtctggtcctctgactgtcccatcttgggaggaagcccctcaagtgccacgtattccaccgcctgtccacaaaaccaaagttcccttagccatggcatccagtcttttccgggtccctgagcctccctcctcccattcacaaggcagtggtcccagcagtggttccccagagagaggtggagatgggcttacattcccaaggcagctgatggaggtgtctcaactgttgcgactctaccaggctcggggctggggggctctgcctgctgaggatctcctgctctacctgaagaggctggaacacagcgggactgatggccgaggggataatgtccccagaaggaacacagactcccgcttgggtgagatcccccggaaagagattccctcccaggctgtccctcgccgccttgctacagcccccaagactgaaaaacctcccgcacggaagaaaagtggcaccctgccccgagtagcatgaggagccgggggggagtctggagatgagcccccctaccctctctcctctttgttctctcattgttgttattttaataaatgctcattagtctgtaaaaaa

SEQ ID NO: 5744 - DNA, 967 bp, Homo sapiens
  misc_feature (1)...(967): n = a,t,c or g
ttttttttttgacacttattatccttcagtctttattttaaataaggcccctgtcctttaccctcccaaagtacttttagacattttccttctgcccagaatcctctgcccggtcccctgtagctagtgtccagacactggtcacagacctccactgagcccagttagagcgctgacctcccatctcaggacttcttgggcccttgcctattgccatactctactgtcagattttaaaactgctagaccatgtgccaattcacattgacttgtagccactaggaccctgtgtctttttctattgtgcttgttcatggccaggaatcaacgaactttggacagacaatcagtagactttgggtgtggccttggtgaaggcttcccactttggtgacttgcatgtgcccctctttgttgagggggttttgaagcagcttctgcgtcgttgggagctgggctgctgcgcccagcctgaggccctggaccccttttgcaccatcctaatttcaacatccagatgtcaattcagaaaattattatatcattctaaggactcaaaacataaaatcccctcttttgtctcatgttgaagagctgatgacatcggacctatcaggtcagacttattttcctcagtcagagactgaatggcatattttcaaagcacttcgtctaaattgcatggcacacaccccaggagcccaaagatctggttgttctcttgagatgcagagaggaggcccacaggtggcggaggggtgaaggaggaggagccaccacttccgaagcatcagaatgtcaaaatctaagttttccacgaggtcagcagcaggtgtctcctggtctggagagggcatggaagtggccacaggtctggacngtctctgggtggatgtgagggagggtgattgaactggaggagggggctggcttgagaccttcctgttctatgttgggggggatactg

SEQ ID NO: 5745 - DNA, 797 bp, Homo sapiens
tttttttttttttgctataaaacctccgccgcaggcaggagtttattgggaaccacgagtgtgcggtgctgggggcatctcttaggcgggcaggacggcccccccaggctcaactcaggacaaccccaacggactgagcggccccatggccctcggcctgtggccactgaggctccgccttccccgggctccctgaggaagcagagtcctgacttccaggaaggacaggacacagaggcaagaactcagcctgtgaggctctgggtggctcctgaggccagaggacgccttccgcgatccatggctcagcatcgtccttctggcttcccagccccgggccgaacgttcgggttaataagcagagcagttattcggctcctggcaggagctcccccgttagtttccacgttgtgagcacattcatacttaagactgtttctctttgtgttttaagcgtctgtctctgtagtaaactgaaatgttaacagaaatgcagctgggcccctcacagcatggggcaggaggtgggccccctggtgggtggggctagaaggtggccttggagtgtccgaagatgcagatggggaagtgcttcacgtgcgaggaccactgcgcggcccagctggaagaacttgacgtcgctgcactccacgccgtcgatgaggaccccgcagcatgttctgctgctgccctggcagtgcagatgagccggctgatgccctcaatgcactggctcttagactccacgtccttgtccttcgctttcttgggcagaaacatcaccttcttgttcttct

SEQ ID NO: 5746 - DNA, 100 bp, Homo sapiens
ggctttctggtccaagatggtgcctttttttctgcatcttccatagggaatgaacactccttatggtagaagggatggaaggaccaggcttttttttttt

SEQ ID NO: 5747 - DNA, 484 bp, Homo sapiens
tttttttctttccactagccagcttaatagccatggagccccacaagctcccacagtgccactagttacgctccctggagctgtagagccaggacatcacgacagtccagaggttcaaagacaaggctattgtacaccctggtagattctggacttcttttagcctgcagatgtcatagatcaagcaacctctagaacacgtcatttcaggcaaaacagtaggaagacatacagacatcatgaacaaggttatttatttagattaaaacttttgaaattaccagaggattaacttgaagccccagtatttgatgaaagagggaaggaagataactgagtggttaaagcacaagtttggatccacatgctggctgcctctcacgagctctgagatcttgagcaagtcacttcacagctccccaccttagcttacctgtctctagaatgggggtgataacgacaccacctgtcacatagggttgtc

SEQ ID NO: 5748 - DNA, 1497 bp, Homo sapiens
tttttttttttttcagactgagctcctggcacaggagcttttccatgaaaagtttattagaagggcacttacaagaggaagagagggaatgagaggacacaaatctttaacaataggggtacaatgcttaaacaggtgctctgcttttaagatataaaagttagaaaaatctaaaacactataaatacatacatgctttttacaaagttattaaaaggtcaggctggccgaatagtgaaggtaatcaacacagtcaatgttctattccccatccctccacacacatcagagtccagaacagccgagttgcaacagcagcagtgaaggtgagtgaaggcttcttggatagatggctccatctctctgtaatgctttcacccctagcaagggagtggggcttggttcagaggacccttgtggaagggcccagatttgactcagagctgtctgtttttacacgcggccacttgtttagccagcctggtttggtgtttctggatgctgagccaaaaagccactacaccctccaccaacattcagaactggctgtgccccaactcttccagccactgtccttgggaggagagacctttccaactttcttaaaaaaaaattaaatagttatctgtctgaatggttttaagaaattattacataaatataaaaacaccagaatactagagtatacattacttctgcattaaaaaaaaatccattgcagaatcactgagaatttctcaatccagtttacatgaggcaagtttcttttctatgatagctgtgtttttgaaaagttgcctgtttagcccatcatctccccaccatcacctccccatgggagatgcttcatcatcattttggatccatgtcctcttgcgtacgtttttctgctttccctacccacttgagaagcggctgatgctccttaaactgtgatgaaaatacattgtgaagacggttacctgaaaggggcctacaagggaacatctttgccacacaaagacagtacagcttcgctgtgttgaggtttggttctggtaaaatggggacacgtttattttgggggaactcccaactctagccaagtcacacagtaagaaacagggtccagggctaaacgggtgcaactctcttgctgctggtatcccccttggtgaacagtcctacaagcagcctgcagattcttctccctacatctcctgtaaggacgaaggagtggtgtaacctgagctccggccctgtggagaccctcatgaggcctgaggctaagaatgaaacagatctttgcttcttccccagattacttacatacgtgcatgccatgcacacactacttcaaacctttctgtagtcttgagtaaaagcatttagcctggaatatgtccaaactctaggaagccaaggggagatggagaaaaataaacaaactaagcacatgatatgtgctatagctcacttcagtatattaacgatggtttaaaaaaataatcaccatgg

SEQ ID NO: 5749 - DNA, 766 bp, Homo sapiens
gatggaaaaaaaatattttttaaaaaaaagatatactgtggaaggggggagaatcccataactaactgctgaggagggacctgctttggggagtaggggaaggcccagggagtggggcagggggctgcttattcactctggggattcgccatggacacgtctcaactgcgcaagctgctgcccatgtttccctgccccacttcacccccttgggggcttgctcaagggtaggtgggcgtgggtggtaggaggttttttttttacccagggctctggaaaggacaccaaactgttctgcttgttaccttccctccgtcttctcctcgcctttcacagtcccctcctgcctgctcctgtccagccaggtctaccacccaccccacccctcttctccggctccctgcccctccagattgcctggtgatctattttgtttccttttgtgtttctttttctgttttgagtgtctttctttgcaggtttctgtagccggaagatctccgttccgctcccagcggcttccagtgtaaattccccttccccctgggaaaaatgcactaccttgttttggggggtttaggggtgtttttgtttttcagttgttttgtttttttgttttttttttttcctttgccttttttcccttttatttggagggaatgggaggaagtgggaacagggaggtgggaggtggattttgtttatttttttagctcatttccaggggtgggaatttttttttaatatgtgtcatgaataaagttgt

SEQ ID NO: 5750 - DNA, 1239 bp, Homo sapiens
tttttttttttcagagtgggaaacgtgtttattgtttgatcagtctcaggcctggttggggggtggaaggcaggactggggtcccttccccaacaacagcgcagaagcccccaggaagatggcgcagattcctgacgacccacagccaccttttatgaggccagagactttacacaccacactccccacctccatccagtcaaggctctgccatggaacagctgatatctttaggctagaggactccattctgtgtaggggctcattcccatctcagctccagaacacggaggacctgaagattactcacggattcctccttcagggcagggctctgcttttgaaatgcggctgctctgtgtccgtgtccagggccctggaacaccagcctcaggctctcaccaggtgtctggacaggagtccaggctccctgcaaagtcctgtggtacctggggcacccggcagcccggctcatggatgcttccaccgcgtgtgtttctgcagtgtgttctgctccataaagcggcgagggcagtgtggacactgaaacgggcgttccccagagtgcacccggctgtgctgggccagctcacccgcatcccggaagcggcgagggcagagcgggcagccgtggggccgcccacccacccgccaggtgaatggaatggtgccgtgccaagctggtggcgcgcttgaatgccttcccacagatgtcacactcgaagggctttacctccgagtgggtgatgctgtgtcgctgaaggtaggacatgtactcgaagacccttgagcacacggggcagctgtagcactttttctggcctggagccccactggcccctggctccctctgtgactcctcgtccaccagcactgtgtaggggacaccctgagtgtcaataagcaggtagtggttgggccttggaggagatgaagcctggggagatccgatggaggaggaaggtccaggttctggggagcggcaagtccgacggggagggccctccatggtctcaacggaggaaaatgccagaggctgagggcagggggatggcagcaccagcatccggagggctggctgaggcccagtgcagcagcctctcaggtccgggcgactccaagcggccccgggctaccctcgcagttgcaggcggcggcgagaaggggacctctgggtgtgccccaggaactggggcgccggccgaaagagagaagccgaagggagagaagagggtctag

SEQ ID NO: 5751 - DNA, 1872 bp, Homo sapiens
  misc_feature (1)...(1872): n = a,t,c or g
cggaggctgttggatgtatggggagctggcaganaggtggcagtcactgggacaaggagggacttgcctctcttctcattattgtgtcctttgctttagtgtcagtcctngacttgtgcaggcctgttttgtgtagatctgttttggaagatggcatggtctaggtggttgaaggatgtagtagaaggatggatggtggaaggtggggacgttggtggctggctgaggtgcatggcccccacacaggacagctggagcctaagcccagggttaactgagcctcaccaccaagacgtgtctnaggctctgcaaatgggatgaagcactgagccaacaggcgagatggacacacacaagccacagtccttcttcccagagagtctgtcccagaaggactgtggcttgtgtgtgtccatctcgcctgttggctcagtgcttcatcccatttgcagagccttcagacacgtcttggtggtgaggctcagttaaccctgggcttaggctgaggcgggccctgtgctgggggtggtagaaaggatgctgctgaggcagctggaggagtgggagtagctcagaggggagggctgttggatgtatggggagctggcagagcaggtggcagtcactgggacaaggagggacttgcctctcttctcattattgtgtcctttgctttagtgtcagtcctggacttgtgcaggcctgttttgtgtagatctgttttggaagatggcatggtctaggtggttgaaggatgtagtagaaggatggatggtggaaggtggggacgttggtggctggctgaggtgcatggcccccacacaggacagctggagaatgggccgtccacttggcctcgttctgcgaggggctcatgggtctgagagcccccacccactaggcttgattgcatccctgttgtgccctttaagagacatgtttccaccccacccccaaccttgtcccaagtgccctggactaaatttcctgtgccagtgactgcagttggccaagggacaatgtggaaaacccagtgtccatctttccaccctccctgatctccagaaccttcgactgacccccttgtctttatgctgatgttgagttttgggattgttactggttgaagtgggggcagatgcctgtcaccaaggtgttgactgtgtgagaaaagcagtttgggtgacaaatcctgtgtggcacaagttggatcgcttcctagaaataagcaacacctctcccaaaaagcagcccacaaggcaggggcccagcagcccagccatcactcatctttgaggaaatgagttggtagcctctgtgcactgtttggtggccacatcacaggtgatgtcctgttcacatacctgcttgtatttaaagccctcagtctgtcctgttgtgtggggcgaagtgatggactctgccaggtggacatgctgtgggtggatgttcccggcgtgtgccgggccctgaatggacaggggccacttcacagcatgtcagggaaaatcactgtcacacaattccaatggattttgtgctctttttgaaaaaaaaaaattctttagcgtaaacatgaattttttttccaatgtagcccctggggaatgaatgaaattttgagcttcttcaatacgtaaaattaaatttataccactgagggagagaccctttctgaaagaagtatggccaaaagcactttaatgctgctgacattgttgtttttatgttcatttgctggagcgcaagacgtgctgacacagtgagttttctctgatgtatttaaggtgatgtatttgcttgagttactcctgtatcattgctcataatattggaaactaaaataaaacctagttggaaatccaaaaaaaa

SEQ ID NO: 5752 - DNA, 946 bp, Homo sapiens
tttttttttttttttaaagggttatcataaaaaacattttattttatttcacccacacctccctccgttcctccctgccctttctcgccctggtgatcatcagggatgctggagtctggcccccccccacaccaccagagctgaagccgacattcaaggtggacgtggcgcgtggagagcaagggaaggcccagctcctctccttcgtccccactctctgtgggctcaggaaacacacgctgaccggaggcagtggccaggagaggcaggctagggtgcaggctcacgccattggtgcagtccttctggggcagaaaactcaacacgggctccggcttcccatcattgccagggcccgtccgtgttcccacacagagacagccccgctcgtgctgccactcactaggaactgcccggtcgggtccagatcgaagtagatgcgctgattggtggtcacctctcgacccagggaccacagtgggtaaccagactgccggagatcccagcacaggagctcagcatccttgcgggctcctgagaagaagcggttgccatcgggatgaaagcagaggtgggtgatgcccccttggtgccctcccagcaaggcgagaggggagccatcatcccaggcatacagacccagggagcggccgtaggaccacaggcatagaggggctgggctgggctgaaggctatgcaggagatgatgccgctctggccctgcttttttgcaaatgtggctcggacctcgcagtctcgccaggccgggccgtggaaaaaacacgcacagtccggttgaagccacagaagagctgggagccatccggggagaagcagagcgaatgggctgccgtcagctcatccaggtggttgtaggcgcgaaaggaagcccggagctctccagtgaatgcgtcccagatatgaatcgggttctcccggtgctgct

SEQ ID NO: 5753 - DNA, 594 bp, Homo sapiens
  misc_feature (1)...(594): n = a,t,c or g
aggccctggatgtgccctgggtggtcttgctgtccatggactccttctacaagcctcccccaccaggtgctgactgagcagcagcaggaacaggccgcacacaacaacttcaacttcgaccacccagatgcctttgacttcgacctcatcatttccaccctcaagaagcttgaagcaggggaagagtgtcaaggtgcccatttatgacttcaccacgcacagccggaagaaggactggaaaacactgtatggtgcaaacgtcatcatctttgagggcatcatggcctttgctgacaagacactgttggagctcctggacatgaagatctttgtggacacagactccgacatccgcctggtacggcggctgcgccgggacatcagtgagcgcggccgggacatcgagggtgtcatcaagcagtacaacaagtttgtcaagccctccttcgaccagtacatccagcccaccatgcgcctggcagacatcgtggtccccagagggagcggcaacacggtgggccatcgaccttgattgttgcagcacgtgcacagccagctggaggagcgtgaactcagcgtnagggctgcgctggc

SEQ ID NO: 5754 - DNA, 796 bp, Homo sapiens
tttcatttttctaaagctttatttattttataaaatgcatagaataaattatactagtaacattttaaaaattaacatctttgtattcagcagtcctgggtcaggaggcaggaggagggtggtggggacgggatggctcactgggcagctaacccgtgtaggccacttcctcctcgtcactgccatcggggaccgcgtctgtcccaaagtagcggtcgccaaagttcccaatgcctgggatgatgcggaaaaggtcattgacccgcttgtcccaccgccgtggtgatgattctcactcgcggaaatgcataggccactgagtgcacgcccatctctgccatgagcagcgacacgaaaaagatcttgtcctcaggcacgtcgtggtccaggagcacgcgcactgccatcatggccgccgcgcccgtggacacggtgcagtccatgaggatcacgtggtcatcgctgatgtccttgggcagcctcaggtagtggagctcgggctccccggtaagctggttggtctggatgaggatggtgccgatgcgcacgtctttgcacacagcgcgcagcgcgggctccatggtttcaccggcgcgcagaatggacacaccggtgatctgcttccccgcatagcacttgcccgcatagtcctgcccctgcggggtctgtacgacgcagtcctgaaagggcaggaaggagagcgcgtgctcgatgagcagccgcatcagtctcttggagtagaagatgtactcgtctcgcctgtgctccctgttctccaggactgctctggctgcgg

SEQ ID NO: 5755 - DNA, 615 bp, Homo sapiens
ttttgcacagttaaataccatgtttaatcatcccacaatggacagtagtgcagtagtagaaattataagtgtctctttaaaaagtcactcccccaaagtttccattccccaatacccagataaccatggtggaacagggccagggtgagggggactcaggaagtcttggttccaaggagatgaaagtctttccaagtcaaatttgccttgtgagcagccaagagcccaatgagttgatgcatacgcgctcactctaacacgcacacatgcaagggacacagaacacatacagatggagggacagagaggggaccacagcggggccatcgcacacatgcgctctcatgccacaacattccagtccatctggggctatctcctctggggacagggagcggtggcctaagccccgaagcagcaggtgccggtcagatggagaggagggaggccgtctgtccagcctggctgctctgacaagggccctggcagcgagagaggccacccgccatccctgacacagtcaatcctccctaatctcgggccggatgggagaagggagtggggctccagtgttaagggggggccagatatcatttctttttctttttttttttc

SEQ ID NO: 5756 - DNA, 2331 bp, Homo sapiens
ccgccgccaccgctaccgaggccgagcggagccgttagcgccgcgccgccgccgcctcccgcccgccccggagcagccccgggcccgcccgcccgcatccagatttttgaaaaatacaatgtctaatggttatgaagaccacatggccgaagactgcaggggtgacatcgggagaacgaatttgatcgtcaactacctccctcagaacatgacccaggatgagttacgaagcctgttcagcagcattggtgaagttgaatctgcaaaacttattcgggataaagtagcaggacacagcttgggctacggctttgtgaactacgtgaccgcgaaggatgcagagagagcgatcaacacgctgaacggcttgaggctccagtcaaaaaccattaaggtgtcgtatgctcgcccgagctcagaggtgatcaaagacgccaacttgtacatcagcgggctcccgcggaccatgacccagaaggacgtagaagacatgttctctcggtttgggcggatcatcaactcgcgggtcctcgtggatcagactacaggtttgtccagaggggttgcgtttatccggtttgacaaaccggtcggaggcagaagaggcaattaccagtttcaatggtcataaacccccaggttcctctgagcccatcgcagtgaagtttgcagccaaccccaaccagaacaaaaacgtggcactcctctcgcagctgtaccactcgccagcgcgacggttcggaggccccgttcaccaccaggcgcagagattcaggttctcccccatgggcgtcgatcacatgagcggggctctctggcgtcaacgtgccaggaaacgcctcctccggctggtgcattttcatctacaacctggggcaggatgccgacgaggggatcctctggcagatgtttgggccgtttggtgccgtcaccaatgtgaaagtgatccgcgacttcaacaccaacaagtgcaaagggtttggctttgtgaccatgacaaactatgaagaagccgcgatggccatagccagcctgaacggctaccgcctgggggacaaaatcttacaggtttccttcaaaaccaacaagtcccacaaataactcgctcatgctttttttgtacggaatagataattaagagtgaaggagttgaaacttttcttgttagtgtacaactcattttgcgccaattttcacaagtgtttgtctttgtctgaatgagaagtgagaaggtttttatactctgggatgcaaccgacatgttcaaatgtttgaaatcccacaatgttagaccaatcttaagtttcgtaagttatttcctttaagatatatattaaacagaaatctaagtagaactgcattgactaaccagtccctctggatggtggtgaacctgaagcatgctttaacctctaagactgtctaacacgcgtttcattcaatgtctccacagactgggtagcaaaaaaatcaccttttagttttagtttttaatctaaagatgttagacagatgctgagtgtgcgttttctcaaccgcttcaacattgtaagcgatgtatgctttggttgacaggaagttccttttccaggcaggtcccgttgccacctcctgctcactcagtcccggggctctgccgagtggtcctgggaatggcggcgggcccgtccagcgtgggccaccactggggccgggggccacggggctgcatgctgggcggggccctccagagaaggacacaaacgtgtttcgtaagcccaggcaccaatgggaatggaccaaagagtttcagggaaactccagtatattccagagtcagatctaagctccaggcacgcctgaagatgtgttgctactctgacatcccgagtttctgtccacacattgcatgcacagcgccccacacattggatactgttggttcacgataatttctcccgttttccagagcatttaacatagcttggaggcgtaaaatggctctgtattttaataacacagaaacatttgagcattgtatttctcgcatcccttctcgtgagcgcttagacctttttctattttagtcggattttgttttggaattttgcttttgtatgaacactcagcagaaaagtacttacttcttgccagttatctattaaccaaaacctttgatttgtagttttaaagattaaccctcaaagttctcttcataactgccttgacattttgggttgttctgttctgttaattttcttttgcttttttgtgttttttgtttgtttttacttttgcatttaagaccattaaatttgattttgttttgctcgaaaaaaaaaaaaaaaaaaa

SEQ ID NO: 5757 - DNA, 1665 bp, Homo sapiens
tcaaactgaaggcagccagtgtgctaaaacatttataaatctgatgactcatatctgcaaagaacagaccgttcagtatatactaactatggtggatgatatgctgcaggaaaatcatcagcgtgttagcattttctttgactatgcaagatgtagcaagaacactgcgtggccctactttctgccaatgttgaatcgccaggatcccttcactgttcatatggcagcaagaattattgccaagttagcagcttggggaaaagaactgatggaaggcagtgacttaaattactatttcaattggataaaaactcagctgagttcacagaaactgcgtggtagcggtgttgctgttgaaacaggaacagtctcttcaagtgatagttcgcagtatgtgcagtgcgtggccgggtgtttgcagctgatgctccgggtcaatgagtaccgctttgcttgggtggaagcagatggggtaaattgcataatgggagtgttgagtaacaagtgtggctttcagctccagtatcaaatgattttttcaatatggctcctggcattcagtcctcaaatgtgtgaacaccctgcggcgctataatatcattccagttctgtctgatatccttcaggagtctgtcaaagagaaagtaacaagaatcattcttgcagcatttcgtaactttttagaaaaatcaactgaaagagaaactcgccaagaatatgccctggctatgattcagtgcaaagttctgaaacagttggagaacttggaacagcagaagtacgatgatgaagatatcagcgaagatatcaaatttcttttggaaaaacttggagagagtgtccaggaccttagttcatttgatgaatacagttcagaacttaaatctggaaggttggaatggagtcctgtgcacaaatctgagaaattttggagagagaatgctgtgaggttaaatgagaagaattatgaactcttgaaaatcttgacaaaacttttggaagtgtcagatgatccccaagtcttagctgttgctgctcacgatgttggagaatatgtgcggcattatccacgaggcaaacgggtcatcgagcagctcggtgggaagcagctggtcatgaaccacatgcatcatgaagaccagcaggtccgctataatgctctgctggccgtgcagaagctcatggtgcacaactgggaataccttggcaagcagctccagtccgagcagccccagacccgtgccgcccgaagctaagcctgcctctggccttcccctccgcctcaatgcagaaccagtagtgggagcactgtgtttagagttaagagtgaacactgtttgattttacttggaatttcctctgttatatagcttttcccaatgctaatttccaaacaacaacaacaaaataacatgtttgcctgttaagttgtataaaagtaggtgattctgtatttaaagaaaatattactgttacatatactgcttgcaatttctgtatttattgttctctggaaataaatatagttattaaaggattctcactccaaacatggcctctctctttacttggactttgaacaaaagtcaactgttgtctcttttcaaaccaaattgggagaattgttgcaaagtagtgaatggcaaataaatgttttaaaatcta

SEQ ID NO: 5758 - DNA, 743 bp, Homo sapiens
  misc_feature (1)...(743): n = a,t,c or g
ggcttggcgtgtatctggtcctagtgaagaggaaggcctgtgtagcagaaaggctttgggcctgagaggttaaggccacagcctgttgacacctgttttggtcctgcgaccctttactggtctccgctggctttgaatcttcctctgggctctactctggagaacataagggctgctgtggttgagtctggctagcactgtctgtggttggcagtgtgtacacccctccgttcagttccttgggggtatttttcagaaatccaaaggcaacccttcgtgcagtgctcacttttttaagtacagttgattacccttgcctgctggggggcctagccatgggccagagatggaggagccccagtggctgacagggcagcctcactcaggcacgtacctgctgaccagtcagccactgccaacccatgggcccagccactgtgtgcattagcagggaggtttgtaggccatggaggaaatgaggagacaccacctagtggagacattgggggccctgctggggggatggtgtctatagctggctctgctggctccctcaggccctgcttaccaagctctggaggaggggagtgctgcattactgagcaccttccttgttntttcctcataggacactgatgttactgtcactttagttatgctaaagtggaggtttcagcctccagaaggacagcagagccttctagggtcaccttaagaataggttttagctaggctggggtttt

SEQ ID NO: 5759 - DNA, 545 bp, Homo sapiens
gggaacctggctctggggagaagccgcgtgagatccgcgcgggtgctagctagtcctttctcgtcgctgctcggctcgcggcccgtggggtcggccccgccaccgttgccgccatgcccatgaagggccgcttccccatccgccgcaccctgcaatatctgagccaggggaacgtggtgttcaaggactccgtgaaggtcatgacagtgaattacaacacgcatggggagctgggcgagggcgccaggaagtttgtgtttttcaacatacctcagattcaatacaaaaacccttgggtgcaagatcatgaatgtttaagaacatgacgccgtcacccttcctgcgattctacttagattctggggagcaggtcctggtggatgtggagaccaagagcaataaggagatcatggagcacatcagaaaaatcttggggaagaatgaggaaaccctcagggaagaggaggaggagaaaaagcagctttctcacccagccaacttcggccctcgaaagtactgcctgcgggaatgcatctgtgaagtgg

SEQ ID NO: 5760 - DNA, 475 bp, Homo sapiens
gtcggaactcgtgtgtaagaaaaactaggactgtgtggtgtaaataactacaattctcttaactccgtagcagttgccaactcagtccttgtacttcgttaacacgaatctgtttcagagctctcctaccttgctcactgccttaatcagaccgatttcctgcccacctgaccagcccagcgtggtaaacctctgtatattgagaccttggcataattggtgatcctgaagaaagaggtctctctcctaagtctctgtcagaattgagcttcacaattgctaatggttgttttctgtgagtcctataaaaagcaaggatatgcatgattcagggaatgaaggaatcacagggcttgggcagtgttaaacactgtggcctatggtccccgtgtgatccaccctggcttcttcttccaggggggaccattaggggccgttgcatgttacttcaggtgttccacaggcagttcagttc

SEQ ID NO: 5761 - DNA, 852 bp, Homo sapiens
  misc_feature (1)...(852): n = a,t,c or g
tgtgtccgaagtggtgcttggaaagattcacagataccaagaggggcccacccaggccccagcttgatttaggagtgtaagttacactcagcactcagcccacgctgagtctgatgcccacaggtaaagggtaatgctggccatcgaaatacaaaagctaaaggaagcacaacattctctctgcctccctgccttgcacctggcctccttatctgtctcccagacttgaaagatcagtgtatacacatcaacgcggtagaccagggggagtctgacaatgaaaggagagacagccatgagatcagggtgggactggtaagggagctcttctctgaatccaaaatactttatcaccaaagatttcatgaaatgacatttattgtttaaaaaagcgtgagtctggaattagatagtcggtgatggttgaacaagtttgtgaatttactaaaaccactcaattgtacgcttaaaaaaaaaagcaagcttgagctgcctaagtcccgctcacacacactggacttgtactaaatgctcaacgattccattctctcagactatggaacattctgtcacatttttttccttcaggagatttccctaagaagagctgtttgcaaaatattgcacttaatttgaatccagggggacctgatgtctcctggaagaaaacgtacacttcacatgccttcctgcctgcagcaggatggcgggagtggtgggacaaggggctcaacagcagtttccatggaacattgttttccatcttcccctttgtttatacacacaggggacacagtttttaaaggggaagttttcntcgggggttnaggccggttgattgggtttccccca

SEQ ID NO: 5762 - DNA, 1365 bp, Homo sapiens
  misc_feature (1)...(1365): n = a,t,c or g
aaattaggtgtagtggctagggtaccaccctatgagtggaagggtccattttgaagtcagtggagtaagctttatgccagtttggatggtttcacaagttctattgagtgctattcagaataggaacaaggttctaatagaaaaagatggcaatttgaagtagctataaaattagactaatctacattgcttttctcctgcagagtctaataccttttatgctttgataattagcagtttgtctacttggtcactaggaatgaaactacatggtaataggcttaacaggtgtaatagcccacttactcctgaatctttaagcatttgtgcatttgaaaaatgcttttcgcgatcttcctgctgggattacaggcatgagcacttgtgcctgacctcccatatgtaaaagtgtctaaaggtttttttttggttataaaaggaaaatttttgcttaagtttgaaggataggtaaaattaaaggacatgctttctgtttgtgtgatggtttttaaaatttttttttaaaatggagttcttgttgcccaggctaaaatgcaatggcaaaatnnnnnnnnnnnnnnnnnnnnnnnnnnnnnnnnnnnnnnnnnnnnnnnnnnnnnnnnnnnnnnnnnnnnnnnnnnnnnnnnnnnnnnnnnnnnnnnnnnnnnnnnnnnnnnnnnnnnnnnnnnnnnnnnnnnnnnnnnnnnnnnnnnnnnnnnnnnnngcctcnnnnnnnnnnnnnnnnnnnnnnnnnnnnnnnnnnnnnnnnnnnnnnnnnagggacatgtgttcttaaggacatgctaagcaggagttaaagcagcccaagagataaggcctctttaaagtgactggcaatgtgtattgctcaagattcaaaggtacttgaattggccatagacaagtctgtaatgaagtgttatcgttttccctcatctgagtctgaattagataaaatgccttcccatcaggccagtgctctgaggtatcaagtctaaattgaactagagatttttgtccttagtttctttgctatctaatgtttacacaagtaaatagtctaagatttgctggatgacagaaaaaacaggtaaggcctttaatagatggccaatagatgccctgataatgaaagttgacacctgtaagatttaccagtagagaattcttgacatgcaaggaagcaagatttaactgaaaaattgttcccactggaagcaggaatgagtcagtttacttgcatatactgagattgagattaacttcctgtgaaacccagtgtcttagacaactgtgggcttgagcaccacctgctggtattcattacaaacttgctcactacaataaatgaattttaagctttaa

SEQ ID NO: 5763 - DNA, 983 bp, Homo sapiens
  misc_feature (1)...(983): n = a,t,c or g
gatggaagctgaggacttattccgctttccacaccgaacactaaatgtggaccagtatcaagaaccctcctgtccccacgcagtgtaaacccagtggcttctctgacctggagctgatgggccgtgaagggggcccatttttctccaaaggccatccttttggggccacctggctccaaggagcatcgctggtcttggggacgggaagggaaccctcttccaggagctctaagggtacttgggaatcaattgtgtccattctgaggtctctccagtgggagggcggcagctcctagtccctgggttcaggctgtgcttctggaagcatcgaaatgggatgtctgagccttgaggaaaagcagcagggttagcattaaagtcaagaggggcagctcaggatgctaccagggagcacatcgtttctggtgcctcatctaaaggtaaaacctcccctacattcaccagccggatgtcccaaatccctttagccagattgctttttgcaaccaaagctgtggaccagaaaagcctccttaagtgagctgaggggacaggaaatccaatcagatgacctttgtgttcgtaatcggggcttgagccagaggctggggagctgagtcccagccaaacctcactggcccttttgcttttcaacgccccagggctcagtggcccaggaagtgtgctgggcagcctgttccttactccagctcaacccattgggtgttggctgtttttggttttagttgttgttttgtattttgttgttttannnnnnnnnnnnnnnnnnnnnnnnnnnnnnnnnnnnnnnnnnnnnnnnnnnnnnnnnnggattcccatatccctcctctgctttgcatatttccccctgtaattagcatgttgcattagcatggcactttgttacaactgatgaacttgtattcattattagctacagtgttcatagtttatattaaagttcactctttgtgttgtgcaaa

SEQ ID NO: 5764 - DNA, 1359 bp, Homo sapiens
  misc_feature (1)...(1359): n = a,t,c or g
caactgccctgatcaccccccgtcccagcccttgagtgaacgtccttctgagcggcttcctggggtcctccccacgtcccaaaggccggcaagatggtgtcctggatgatctgtcgcctggtggtgctggtgtttgggatgctgtgtccagcttatgcttcctataaggctgtgaagaccaagaacattcgtgaatatgtgcggtggatgatgtactggattgtttttgcactcttcatggcagcagagatcgttacagacatttttatctcctggttccctttctactatgagatcaagatggccttcgtgctgtggctgctctcaccctacaccaagggcgccagctgnctttaccgcaagtttgtccacccgtccctgtcccgccatgagaaggagatcgacgcgtacatcgtgcaggccaaggagcgcagctacgagaccgtgctcagcttcgggaagcggggcctcaacattgccgcctccgctgctgtgcaggctgccaccaagagtcagggggcgctggccggcaggctgcggagcttctccatgcaggacctgcgctccatctctgacgcacctgcccctgcctaccatgaccccctctacctggaggaccaggtgtcccaccggaggccacccattgggtaccgggccgggggcctgcaggacagcgacaccgaggatgagtgttggtcagatactgaggcagtcccccggggcgccagcccggccccgagagaagcccctaatccgcagccagagcctgcgtgtggtcaagaggaagccaccggtgcgggagggcacctcgcgctccctgaaggttcggacgaggaaaaagactgtgccctcagacgtggacagctagggtctgctgcatctgcccccttcttacctcgtgccctgcagggctccagggctatttggagggaccttgggctgcacatctggcctgcctgcaccagctgcctgggccccaccctcctgactcctgctgatggttaagggccgggagcagatgctgccaaggccacatgcagggatgcacccacaatgtaccaaagcaggctgggcccagggttctatttattgccttgctctgccctctcccttccccggttgtgggacaagagccctccctgaacccctgcaaccctccctgaacccctgcaaatgaaaccaaacgtccacctgggtgtgttcattccttcctgtccttcaaagtacttgatagcctttcataaggcctggcacatgtgtcctggttgtgtgtgtgtgtgttggtgagtgaggtcaggtttgcgagtgttttgataaataaatacataaaggggcaaaaaaaaaaaaaaaaaaaaaaaa

SEQ ID NO: 5765 - DNA, 628 bp, Homo sapiens
gcaacgccacccagagcttcacggccccacggacaaaccaggacatccctgctcctgccaacttctcccagaggggctactatctcacactgagggccaaccgggtgctgtaccagaccagaggccagctccatgtcctccgcgtcggcaatgatacccactgccaaccaacaaaaattggctgcaaccatcccctaccaggacccggcccctacagggtgaagttcctggtgatgaatgacgaaggacccgtggctgaaacaaagtggtccagcgacactcgcctgcagcaagcccagggcactttcgggctgttccccgggcccccagagcccgggcaccgtggtcatcatcgccatcctgtctatcctcctggccgtcctcctcacggtcctcctggctgtgctcatatacacctgcttcaacagctgcaggagcacttccctatcaggcccagaggaggcagggagtgtgagaagatacaccacgcacctcgcgttcagcactcctgccgagggggcttcctgaggggttccagaggggcccacgtgtccctccacctcctccctggcccaggctgcagagcctgagctgggacacgccctgaagcttctggacccgcgagaga

SEQ ID NO: 5766 - DNA, 47 bp, Homo sapiens
tcggcaaaggggaaacaggaagagaaatagaactggaagtaaagcat

SEQ ID NO: 5767 - DNA, 510 bp, Homo sapiens
gcagcatttcacaccacccaccaaccctcagtgaaacaacctcctcccttagcttttatgacaccacaagtctctggattctcagagaatccagaaaaacaagtctctggattctctcctcttacctctcagcccacacaggctgagctgtccttgaaacctagatgggggaaatgtctgtggctgtctgtggtctcttcttttcaggagttgggtagggaggaagaatcacagctgctcctgcttcctctgtctgtctctctatttcctgagtcccttccttttcctgaactcagttctcctcatgccaaccatgtttatgagctcctgctgggaggacagcatctgtgagtccttccctctgtctctcccagacaacacagaggttttagcctgtttgctaagagaccccatctaagtcagcccaagggtgtggattaggttttacagcatccaggccgcagtctggctaaactggattaccaggctggtgggcagctcctcaccatg

SEQ ID NO: 5768 - DNA, 1142 bp, Homo sapiens
ctagtctcgcgttttttttttttttttttaagttttttgacttttattaaatctttacaaaacagaatacaaaattccggcattgacagttggtgtaaaggaaaacttctgagctccgtcagttcacctggtacattggaattaaagtgcttggatgtttttcccccactttaaaaaaacttttgaggtttttttttttttttgtcttttaaaaacatcgtaacattaacacatggccgttcaccgtcccccagcgatgggagctggcctgggccagggtcctccaggatcttcactcattcacagtaacggttctgaccagtcctccaggtcgcacgtggatgcgacaggggtggggagggaggaggaagtgactgtcccaccttcagaaaaaaaaaaaaaaacaaacaaacaaacgctgctagccactcagctttagagacccgatggctatgggcgcctgcagcgggcgggggtccatttgcttgttctttgatacaaaaaggcagagaatcccccgttacgaaacatggaatcactgacaggcgagaagtgatgggggaaaggggtgggcggaatgccccaccccccccaggggtctttggaaggggcagtccacagatatgggcagtggggaccagggaaggcagagcacccccacggccaccggactgtgaccatcatacgagattcaggaggggcagcagggccaggcagacggtctccgaggcccccacccccaggccccccgacattcaagtattcttcaagaacagggaagcaaagtccatcgatgtgttgtttttttttaaggaaaaactaaaaaactaaacaggaggaagaatcccgaccgcggatttagaagccagaggggctgccccagctgtggagctcgggcgtgcgccgggaagggcgggcggtgaccctagccgcgcgcacttctaaagtggaaccctgtattgcatagaacgtccccacccgcggggagggggcagcagcgtccgcagcccccgggggttggagcatggagggtggggggactgagcagacccccgcattcctgggtgcccgaaggaaggccgaggccgcagccgttttcctgaaggtggcagaccaaaaacactgccctgggggtgaggatg

SEQ ID NO: 5769 - DNA, 623 bp, Homo sapiens
gggaagtgagtgctgtgtcccaggaagctgctcacactcttaaaatggaagtgtccgttaagccctgggaagacgttctggatagttcttctttcccaaccagggctcatgtctgattctctaatgcgaaaagccttattctaagacccaaggtttggatctgctaccaccagactcctaacatagaaaacttgaattgtcacatacattttacagtttggacttttaagaaaacatggatactactgggaacttcccccagctgagttacatggtcactttttcagtgcaagccacatatcaacacaggtttttaggtggttccctgctggcacagcgtggacctcgtggtcgcgcagatgccgattctgagcagtgtagactcaggggtccctgtggaggtgctgaagccccacagtttccacacagggcagcaggggagccgcaaggctcagggtcaggatggacaccactccatgccgagcattgacctttttttttttgctttacaatttaatctttcacatgaggggggagattgagctgttctttcccactaaaaattgctgctgtagaagttggaagtggagctggtgactggctgagctgctgtggcccgggct

SEQ ID NO: 5770 - DNA, 1287 bp, Homo sapiens
tttttattaagtgccttgaaaaaatgaagaaaaatgtattttccctttatgtaaaaattagtgaatatcttatgaattaaggcattcctctttccctaaccccgatggctccattcccaagtaccccaactcactgctgatcctattaaaggaatgagtcctgctacccgagtggtagtcatagccctagatgactctcaactactcttcaaagggaggcatcaggaatagaatgaaactgtgtgaaggataagattgttcgcatcaagatccaaatcttgatttcatattaacgcctaaggattgcctgtgtgctggaaatatatttgaaactcaaccagtatggcccagcctattgcatatcattgtcagaccatttttgctgctgtgggtcacccacgatttcatttgtcttatacccaggtgaaaggggaagggtgaatgggactggctggttcctttaaatgttaacttatggaaatgctagttcaaatggtaatgtcacagtgttttgtatgcagagagcaagagttcaaccaacagctgtttattcatgtgtgtgtgtctttgctgctttgagttctctgtatctactgtgtatgtgaatggtcatgtggggactcagtggtggtgttgtgactttgacctagggtcccgagtgtcacagctgatcttggcactcggcactcattggcacagtggtagttagaggtgaaaagtagagctgtcaagccccaagggccttagctttagggctcctcctgagttcggcccacagtagaagcaagattttaactagccccttttcctcttcaccctcccatgatgcgcagtgttcagaaagctggtaagtcctagggatttccagaagtagcctgcagaagaaggtaagtttgaaagccactccaggggtcctgatgctgtcatggctcagtgagcccattttacagttctccaaagtctagccctgtttcggacctgcacttcacctctaagttatgtacaactcaacctgcatccctctaaaagtccctatatccaataattcaccattggctaaatttgaaggccctgagtggcctttggaatgctaaaaaggaagcaggggtacggagggctaccatgttggataccacaccaaggctggaggctggtctgtcataagacagaaagaaagacgctgggccccaattttgacttggccagggggacaccttggtgtgttttgttatctttatctgtgggtaggctaagcctgacccatctccttgagtcattccctttggg

SEQ ID NO: 5771 - DNA, 573 bp, Homo sapiens
tttttttagttattaatgacaactttaatatgaacatgtgcttaaccctcaagaaattgtcacaactgaaagacgggagcaagctgacactgcaaggaacacatgatgctttggaatgggtggcctgcgtattcaaacacatcaaagcagcagttacttgaacaatcggaacttcttcaaatactggcccacttcttccttggggtagggccggagagcaatacaagtggcgatattctctggttgctcaagccacagcatgtggtcaatgttcttctgttgcagggtctcggccagctcctttagggtggtctcatctggggcctcgaggaccactttgcgcatgcgccccagctcttggaggtaagcggctgtgtgcgggtggtcgcggtgagtgtgcaaggccgcggtggccgcgtgacaagcctgcgctaccagtgcgcccgccggccaggagaacggagcttgtgatagatcctttcgtaacaccaagtattgtaccaggacctactgccgcccagaggccgccatcttccgtcggacggccgcgaatttagtagtagtaggggccgc

SEQ ID NO: 5772 - DNA, 980 bp, Homo sapiens
gacaattttcctttaactggcaacccatctcttaatccgtcagtatctctcccagggtcattaatagccacctcatctaccgctgccacctccacatctctccctcatcctagctcaacggcagctgttctctcagggctttctgcttcagcaccagtctcagcagcacctttccccctcaacctgtccactgctgttccctcacttttctctgttactcaaggacctctgtcatcttcaaatccctcctatccaggcttttctgtctctaataccccaagcgttacccctgctcttccctcattcccggggctgcaggcgccctctacagtcgcagctgtcacaccactacctgtgggctggccacagccccatccccagctccagtcctcccaggattcgcctcagcattcagttccaatttcaactccgctcttggttgcacaagccggtttatcatctggacttcaagctgcaggcagttctgtttttccaggccttttgtccctcccgggtatccctgggtttcctcagaatccttcacaatcatccttgcaagaattacagcataatgcggctgcgcagtcagcattgttacagcaggtccattcagcttcggctctggaaagctatccagctcagcctgatgggtttcctagttatccttcagcgccaggaacaccattttctttgcaaccaagcctgtcccagagtgggtggcagtgaatacttttaacttttattctccttcagagcaacatcagaattgcctgagaactgcaatgaacaatctgacaaatgtgaagctggccaaaagtcggaaaatgagaatgagggtaatcctggagaaattgtgacaacaatttgaaaattgtggttgcattttaaagtgtgaacactcccctatgtaaatatgctgacaataaattgtatggagaatggtatttaaaaagtgtttggagacttttcacctgcctata

SEQ ID NO: 5773 - DNA, 1596 bp, Homo sapiens
tttttttttttttaaaacacattaaaaactttattgtaagtatcaacatctaaatttgcatcaatttgatacatcgttgctcattttgcagaacataacagttgcacattgcaagagtcaacttgcttcgggtcttttcatgctcatggcggtccacccctgccttccctctccctgacctgcatcctgtcctccacagtctgccctgcctcctgtcgccacaggttgaagacccaagccctgaggagaacctgctgccagggggctgggctggctgcgagccaggagggccaggcagttagccctgccacagggaggggcaggcaagggatcgtttctcctcttcctgggctgagcccatgccaggccagccacagagtgccctagtcagcccatgtggctccaggaagcctgctgttgttcttctccatcccatttcacccgcagcctagtggctaactctggatactctgagcaaaattaacccaagtttcatggagaactccagaaccttgaaccagtgcatggttatcaccattctttgttactagatgtaggagaaggtactgcagagtcctctggcctggaacagcttgggggaggattcagctccctgtttctccctcactcccaggagattcgaaaacaagtttgagagaaaaaacagtaactaaaaaagtccatgaagaaggatctgacatgtcctttgtgaagtaacattaccctctccccatcacgacgcaggagatgacatgttacagtaagagggttacagcaattccccatctggagtgccattcaactgcctgcagaaatcttccattttaatgcattttaaacacattcaaaacgagtgctgactctccaacctagggaaaatgcccaataaaaaatatagatagaaaatacatgctaatgtaatggcaaacttatctccacactaaaacggcaacagtcttgcggttgagggcaggggtgcggtggaacctccctcttcccacaagaacatcagcaccagagatgctcggtccccgggctgatctgatggtggggaccacgcactgtcactcggctgccggtccggtcccagtgttggcctgggactatcagtgctgcagcagggaagttggtggcgacattgaggtcattgtttgaagctctcagggcttccaaagcatcacctctggaaaatcccatctccatgagccggggcgacctgttcctcagaaacttctagagggggcgctgctggctcagactgccgaccgccctgatagtttacgttttgtcgctgacgtaaaggaggaaaaagacgattccaattgatcattcctccctgctgctgtctctgtcgcctcccttgtgcaaactgagagaacatcagctgccggtccagcagctccattctctgctgtctctggatgtccagcgtggctcccatcccaattctggcttcgctggtgggttctgaagaagagaagatgggttcaagtgtccaagaaaagaattttgccatccagctggggatgcagagcacctgatgcacctggaacattttgctgtcgtagcacatgaccgacataagtccacttatgg

SEQ ID NO: 5774 - DNA, 410 bp, Homo sapiens
tggccaaagtctttgcccagcccaacctggctgagatgattcagaaaggtgagcagctattcctggagccagagctggtcatcccccaccgccagcaccgactcttcacggcccccacattcactgggagcttcctgtcaccctggccaccagcggtcactgatgcctccttcaaggtgaagagccacgtctacagcctggagggcaggactgcaagtacaccccgatgtttgggcccgagcgcaaccctggtcctgcgcctcgctcagctcatcacacaggccaaacacacagccaagtccatctccgaccagtgtgcggagagcccggctggccactccttcctctcatggctgggctttagctccatggacaccagtggctcctacacagccaacgacctggacgag

SEQ ID NO: 5775 - DNA, 1285 bp, Homo sapiens
  misc_feature (1)...(1285): n = a,t,c or g
tgttttttcagaagcgaggacgtgtttattcagatccgtggtgatgtacaagcttgcattgttggtgagaggccctagaatgcgagtagtctcagtttacatcagaatacgaagcccaacatttacaatttcagaaacattaaagcaaacccccaaaaccccacaccgaaaacaaaggcttggtttggaaatcaccactgagatgctgttctccctcgcatgtcgcctgtggggtgaatgaaggtgaagaccccgtgctggtttctgtcagagaatctgtagttgtatattttgaatacttaagtaccactgaacggttgccatgtctttgagcacttgatgttactgaagtgacaatgcttctgaccatctttggctgcagagcagaaactggcagaatccgaccccatcgacccagcagtgtccccaacgcctgaggaccagcacccatctgtgacaaggcacaggggtccgcgatgttggccactgcctttgggtgatgtgctcaatggcttggggtcctgcggtgaagcccctgggctctgggagggtcttggctcctgaaacatggaattcctacggcccagtcttggaacagctgggcagaacatgaagaacgcccctcacagtgaagaatcaggacagccactctctggttttctcacaactctagaaactttgattctttcctggagtgganacttaagccaccgtcctggtcccacacagagagaggaggcgccacaacccactctgccaacctcaaggccagccagtggggaggcccaggccccaggtggctgttggcaggctggctcccaagcttggtgcagcagagtagccaaatgggcactggaaaaaaggccccgagagctggcttggccgtgagtccttggcggagggagggaaaggccgggcgctgagctctgcgctgtcacagagcgtagctgttgagccctggcagctactcctttgctggggcccacctgccttcctttcttggttgcgtttcctccagatgcctctgcggctgcaggaaccccgctccagaagcccgaggatgaccgtgttccctcctggaggggcttcccaggtcctctcagcccaagggtggggctgtgtggcaaatccctccagcctgctctgaaggcagctgacaccttcagggctggtgcagcttcccccgctcggtcagcagtgtcatggcagaggcgtagaggacatagcccagggtgagcagcagcgtgcatgggaggggcccgacgcagaacagagaggccacgaa

SEQ ID NO: 5776 - DNA, 2332 bp, Homo sapiens
gcattgtctcccgtgaccggaaggtttctcccaagtcagagtttaccagcagggattcacagagctccgacaagcagattctaaacatctatgacctgtgcaacaagttcatagcctatagcaccgtctttgaggatgtagtggatgtgcttgctgagtggggctccctgtacgtgctgacgcgggatgggcgggtccacgcactgcaggagaaggacacacagaccaaactggagatgctgtttaagaagaacctatttgagatggcgattaaccttgccaagagccagcatctggacagtgatgggctggcccagattttcatgcagtatggagaccatctctacagcaagggcaaccacgatggggctgtccagcaaatatatccgaaccattggaaagttggagccatcctacgtgatccgcaagtttctggatgcccagcgcattcacaacctgactgcctacctgcagaccctgcaccgacaatccctggccaatgccgaccataccaccctgctcctcaactgctataccaagctcaaggacagctcgaagctggaggagttcatcaagaaaaagagtgagagtgaagtccactttgatgtggagacagccatcaaggtcctccggcagctggctactactcccatgccctgtatctggcggagaaccatgcacatcatgagtggtacctgaagatccagctagaagacattaagaattatcaggaagcccttcgatacatcggcaagctgccttttgagcaggcagagagcaacatgaagcgctacggcaagatcctcatgcaccacataccagagcagacaactcagttgctgaagggactttgtacttgattatcggcccagcctcgaaggccgcagcgatagggaggccccaggcttgcagggccaactctgaggagtttcatccccatctttgccaataacccgcgagactgaaaccttcctagagcacatgagtgaagtgcagccagactcaccccaggggatctacgacacactccttgagctgcgactgagaactgggcccacgagaaggatccacaggtcaaagagaagcttcacgcagaggccatttccctgctgaagagtggtcgcttctgtgacgtctttgacaaggccctggtcctgtgccagatgcacgacttccaggatggtgtcctttacctttatgagcaggggaagctgttccagcagatcatgcactaccacatgcagcacgagcagtaccggcaggtcaatcagcgtgtgtgagcgccatggggagcaggacccctccttgtgggagcaggccctcagctacttcgctcgcaaggaggaggacttcaaggagtatgtggcagctgtcctcaagcatatcgagaacaagaacctcatgccacctcttctagtgggtgcagaccctggcccacaactccacagccacactctccgtcatcagggactacctggtccaaaaactacagaaacagagcccagcagattgcacaggatgagctgcgggtgcggcggtaccgagaggagaccacccgtatccgccaggagatccaagagctcaaggccagtcctaagattttccaaaagaccaagtgcagcatctgtaacagtgccttggagttgccctcagtccacttcctgtgtggccactccttccaccaacactgctttgagagttactcggaaagtgatgctgactgccccacctgcctccctgaaaaccggaaggtcatggatatgatccgggcccaggaacagaaacgagatctccatgatcaattccagcatcagcttcaggtgctccaatgacagcttttctgtgattgctgactactttggcagaggtgttttcaacaaattgactctgctgaccgaccctcccacagccagactgacctccagcctggaggctgggctgcaacgcgacctactcatgcactccaggaggggcacttaagcagcctggaggaagatgtgggcaacagtggaggaccaagagaacagacacaatgggacctgggcgggcgttacacagaaggctggctgacatgcccagggctccactctcatctaatgtcacagccctcagaactaaagcggactttctttccctgccttcttatttagtcagcttgccatccctcctcttcactagcagtgtagatcattccagatcagtgggggagggcacctcagcaacctctgagtgtggacaatagctgctttcttctctatccaagagcaccaggctgtgcttgggtccttgctctcagagtctataaataaaagaatataatgatttgggaaaa

SEQ ID NO: 5777 - DNA, 2520 bp, Homo sapiens
gccgtgttctccttctgcgtgggcgtggcgggccgcgcgcgggtctccgtggaagtccgtttcgtgagcagcgccaagggaaaggggctgtttgccacacagctcatccggaagggggagaccatcttcgtagaacggcccctggtggctgcacagtttctctggaatgcactttatcgctaccgagcctgtgaccactgccttagggcactagagaaggcagaggagaatgcccagaggctgaccgggaaaccaggccaggttctgcctcacccagagctgtgcactgtgcgcaaagacctccaccagaactgtccccattgccaagtgatgtactgcagtgcagaatgtcggttggcagccactgagcaataccaccaggtcctgtgcccaggcccctcccaggatgaccccttgcatcctctcaataagcttcaggaggcatggaggagtattcactacccacctgagactgcaagcatcatgttgatggctaggatggtggccacagtgaagcaggcgaaggacaaggaccgttggatcagactcttttcccagttttgtaacaaaacagccaatgaagaggaggaaattgtccataaacttctgggagacaaattcaagggccaactggaacttctgcggagactcttcacagaggccctctatgaggaagcagtcagccagtggttcactccagatggattccggtctctctttgctcttgttgggaccaatggccaaggaatcgggaccagctccctaagccagtgggtccatgcctgtgacactctggagttgaagcctcaggaccgtgagcacgttgacgccttcattgaccagctatacaaggacatcgaggcagcaactggagagtttcttaactgtgaaggatctggcctctttgtgcttcagagctgctgcaaccacagttgtgtgcccaatgcagagacctcctttccagaaaacaacttccttttgcatgtcactgctctggaggatattaagccaggagaggaaatttgtatcagctacttggactgctgtcagcgggagcgcagccgccacagccgccacaagatcctcagggagaactatctatttgtctgttcctgtcccaaatgcctggcagaggctgatgaacccaatgtgacctcagaagaggaagaggaagaggaggaggaggaggaaggagagccagaagatgcagagctgggggatgagatgactgatgtgtgatgttgccctgcccagaaagggccctgccctagaccctgccagaaaagggggctcttcccccagagaagtggcttggagggaacttcccactcccattgcctgctttccccattccagccctctctgctagagggtaggagagagcctggatctctggccccaacccccaccagacctcatgccctggacactgctgctgagttggctcagactctgcactggcactgagcctttcacaactggcctccccttgaggttcctccactctagggtttgaggggctggaatcagggccagggcctaacagtgtttcttcccctcggccccacggcccatactcaccccttcacctgaggcttctcccctctcaacttgctgttgatttcttttgaggggtaaaagaaagaccgagttcattgaagcagagatgggaggtggtgaggcgtcctcacctccccccaccacagctgtggctggtaaggcaactgcttgaccactggcccagcaagcagaggcgggcaggaggatctgggcatcctgagccccttccctgaggctgtctcctgggaatgctggaccagggggattacttcccccacccacacccccatttggacatctggggaagtggagattaaccctcccccagactcgtgccttgcctctcaggacctggcacagtggctggccttatggagtatggaaaaggcctctgccttcctcaggagggacacatagtgggtcatcaccctttctcacacctgcttcccaatgagcactcagcagcatggctgagacctggggcttgacaggcctgcgctccttagattaggatgctctggtattcctggggccagttaaaatgggtcagtgaggggctctcctggcctcaatctccatctttagggtctccacagactaacattgaagtcttccagaaacctcgaggagctgggctagatacttcgagagtagccctgtcttgtcccctcctacccccagattagcaccacccctctcactcttgggttggatgctatgggaattacaacccatcactcccaatgcctccctttcctggaggagcctgctgcattctcctgctgagggatcccagagagggcaggtgcccaccccacaggccctttcctggaccatggagccaggtgaaacctgtctggccccttacccattgggttcttactccttcacaacggtcagcactcctctcccagcccccctgcccactgttctcaataaaatgtgagtggtgaaaaaaaa

SEQ ID NO: 5778 - DNA, 1140 bp, Homo sapiens
ccgccagactggcacctgacagacaaagccaactaggagggaggggagtgagggagaaggtcccacaggtgaccaatgccctggccccttcatgacagcagggggctagggctgtcccacagggactagagagaggtgtggaaggcaggggactttccccataatgctccctcctctcagtgcacaagtgtgctatgttgagaaatggggcaaaagaacaaacagtccttgccacagagggagacaggcagcagccttatcaaacaagataaggagacccggatgatgtgccttttgaggccccctggtggtggaggaggattgagccaggtgaatgggaaaggaagaaaagatgaacccatcttggagtgttgtactttggttgctggagagccaacagtggagactggagacaaatatttaagtcattccggcaggccccatgtacgtgcctcacaatctaacaccgcccaccttggccagaaaggaaggcttcctatggaggtgctgccctgctcagtctgtcttctcaggctttctccaggacttgcgggtctccaggaagatcttgaccagggacaggaggatgggcacagccataggcaggaagagtgggatgtagatggcaaacttctggtcatcagggaaataaaggaggtggaggagtgacgggtcaaagaaggcaagctcagaggatgtcacagcttcctggctggcgacaaaggcagatgcccaggtgcccagacgccaactcttctgccgacttctggacggcagctacagccttgtacacctcagatgccacgtcgtccttaatgacaatgttgctgatcttgcccagaagctgcgcccagggaggtaagggtggtggtggctgtggcccaggttctccactgaccgagcccagagcagccggtctagctcccaggtcattagcccttcactcgtaggccctgaaagcaggcattttggaggcagctggggctgagcaatcccaaagagcaaccgcaactgtgccaggaacacctccatcactcgcaccatgtccacctcgactctcactggcagcactgaggcattataggttttggagtcaacattatataccataatgcccacccagcggggactatggaaggc

SEQ ID NO: 5779 - DNA, 535 bp, Homo sapiens
ttttttttttaccaaaactagctttaatttgtccaaaagccacacagagttgtgtagaaactgatcctgggagggaagctgagagagtccatgatgcgcagggccaaggtgcctctagaagttctccagcaagcccaggatgcgcttttgctcgttctcccggaactccgggctccggccgtccccgatgttctctgcatactccttgatgatatgcctgacaattttgatggagcttcctcgcatgtttaggatctggtgaaccctctggcgaatctgggggacattggcattgcagatctcggccatgatgtagcagatgtgctggagaacaaagagccccgcatccaggcgccggaggtagaactcctcctcggtgtcattgtcgatgatctctcctcgccggaccatgtcgtgtttttccccttcaatcttcttgtccgccacctgcattgcacccagatatttaaaatgcaactccattagtctgtcaaccttctcactgtcattttcagtgaatttattcagaagccgg

SEQ ID NO: 5780 - DNA, 731 bp, Homo sapiens
ttttttttcagaactgcagagtaaatttattgggtggttgtcggttaaaatgacaaatgatgatctgaattcaatacattaaattgctgatagaattgcaaatttcaactgaatttacattgaggcctagcagtggtagttggctacaactggaacagtttatcacctcagggtatttgagggcaaggaagatacagaaaaaaaaaaaattaggggtatgcaacacagtttaagtgctcagaaataaattttaccacagtgagaacgaaaccacaatgacatgttactaacactgtgcagacgtcatggttgaatgcctgcgttctgttccttcctggtggcagccgccttggttcattagttctcatgtttgcagctccttcacatgccccggagcttcccaagtgtgccactcaaaggaaacagcacagtgagtggaggccagcagacccacccggcccaaaacagagccttctcagttatgagacttttctacagaagggacttcaaagtcttaacagtccagagagagttaaaaagatcctgctgcttcttagggaagttcaaaggtacattgtgacacctaagtgggaaacaattctgttttaggaaaagtgccaactgcaatccgggtacaaaatttcaacaaaaagaaaagtaaaactgaatgatctccccctcattccctaattcatagaaaaatagtaggtgtgacttttgtctcgtgccgc

SEQ ID NO: 5781 - DNA, 803 bp, Homo sapiens
gaggacttccctcgcttgaactgttacacatacgatgtgtgtgtcacatcacatattgtgcagctgttggttttcatgtagtgccctgcgatggaaattagatatatttcatgtatttttccattgaaggtggagtttttcaatgatcatgtgttttgtcctcctaaacagtataccaaagtttgtttttatagttgaggattgtattgataaccactggggttccgcattgaagcaggaacaaattgcctctttttctggccttctctgtgggacctctgcttttgtgaagcaactatttatttgaagaccagggtatgggcacttttgccttctctcctctctgacttttgagggtattgagggcgcccttagtcatagtctcgactccgccattgccttctcctcggcgtcctcacaactcttaattgggcctagtgaaaatgggggcaggtgagaagtccattttgagaatcagcatagtaaattacatttctaatcccagaggacttaatattttcttttgtcaccccagaggtgaaaaatcagcagttgaagcctgacaggcctcagtggtgaccaggaacagaagcagccttcctgttagtagatgggggtacttctgtggtgggcagaagccttactaaaggggaagacagactttgaagtttctagacgagaaggaggctagcttctagccgtgggtggccattattccaaaaggtcattgtttctcactagaccccagggcaccagatgaatttccaagtttaaactctttcctgcaggtgattactttgaaa

SEQ ID NO: 5782 - DNA, 1196 bp, Homo sapiens
  misc_feature (1)...(1196): n = a,t,c or g
tctttttttttttttttttaatcaaccaacacccattctatttaaggttccaaaaggaagtagctggacccggctgcagagcacactcccaccttgcttctgtcccaaaagtacatcccctacgtgtggttctccttaaacaattttaatgtctgggttggggaagcaggtagagcgcgtagacgcagctgctagaggctggttgctgactccaggccgcgttccaggaaatatcggtgggaagaacggggacgggcttgggacccttcattgaggaagtaggatgtgatcttcctgagtccctcctgattctcggatgctgagtcctcccatataacatcttccgcctctttctccaggatggtctgggccgtgcgccagctgaaccggacaaactgggggaagccgaacacaggctccacgtgctccttcaaccacgcttttgtcttgggatcattggggtagcctgagccataatcagtatccaagtcctgcagtttctccacgaactgccatttcttcacggcctggtcccgggccaccttggcacagatgctggcagcactaaccaccgggtagagggcatctgctttggccttgaccgtcacctcaatcccgggaaaactttgctgcagccgcgcctggtatgtctctggcaatcctacggtgtccacgaatacctgggtgacgttcaccgccctggtccaatgcatactgtataagcccagtggctgtatcatgtgacagggagttcaggttgtatttgacccgcccaagcatgctggtagagatgaggtttggagacagcacatccagcgcccagccgacaaagtccgtgtcctcccattttcgcaaaacagcctttcccgctcgctctccaatagggtctttgagtctgccactttcagcgcctccagatctgcccaggcgaggcaggggacaataacagatggcgtagaccatggggcccatgcacggggcccctgcccgcctcatcgacgcccaggacgcaaggcctccttgcggcacaccgcgggcacaggcgaactcaggcgacagcggcctgtattgtctctctccagctcgctgagatccatgccgcctcagccgccaccaccagctgcaagaactaatactgcaggagcgggtctcggcgccgttttccgcgggcctcgaagcggcgcctgctntcggcc

SEQ ID NO: 5783 - DNA, 1089 bp, Homo sapiens
gagcccacccgcctttggaggaaagagccagacttctcagaggtcagtctgttcaacaagtgggaccccagggccttctgtatgttcagcaaagagagcttgcagtgacctccccaaaggatggctccatctccattctgggttctgatgatgccactacttgtcacattgtggtcctgaggcacacaggtaatggggccacctgcttgacacattgtgacggaaccgacaccaaagctgaggtccccttgatcatgaactccataaaatccttttctgaccacgctcaatgtggaaggtgagatctacgctgctctcataggctggaagtacaccttgttggaggcttcagtgacgacaggcagttgtcacaaaaactcactcatcaacttcttagtgaatttgacaggcaagaagatgacattcacttagtgacattatgtgtgacagaattaaatgaccgggaagaaaacgaaaaccactttccagtaatatatggcattgctgtcaacattaagactgcagagatttacagagcatcctttcaagatcggggtccggaggagcagcttcgtgctgcgcgaactttagcaggaggaccaatgattagcatttatgatgcagagacagaacaacttcgtataggaccgtactcctggacaccatttccacatgtggatttctggttgcaccaagatgacaagcaaatactagagaatctttccacttcgcctctggctgagccaccccactttgttgaacatattagatctaccttgatgtttttaaaaaaacacccatctccagctaacacactgtttcctggaaataaagccctactctacaaaaaaaatgaagatggcttgtgggaaaagatctcttctccaggaagttaaaaaacatgaattaccaaagaaagcaccttcttggcctgacagaccattggtggggctggcacgaatccagatctggatcctacatctgttgggtcttaggcctccttccctcctcagtgtctttcaaatgactttcatcaaatgactttcaaaataaaaccttattttggcaaaggcaaaaaaaaaaaaaaaa

SEQ ID NO: 5784 - DNA, 448 bp, Homo sapiens
gggactaagctatttaccagtcctgctggacagggccttggggtgcttgaacaattcatacctttgcagctggacgaatatggttgtcccagagccaccactgtccgcagaagagacctggaactgctaaagcaagcttcaaaagcacattagagactaactgtaacttaagtgctgggggaaaaaaaatgtgaactaacttatttaatttatggcattttaaaatgacactgttaacccaacggaaccattttccagtttgatacagaatggggagaaaagaaagcgtttgaaattattgcttggataccagcttcatgcaccttctagttgtacaaaatgttaaagacgttgtttgtatttgtaaggctggtgtgtattcagagagcagatctcttattcctcactttccacccccgtattttgtaatgaccatgagcaatgtttt

SEQ ID NO: 5785 - DNA, 1741 bp, Homo sapiens
tggaaatgtggcagccacgtgaatctggaaacccagaggaggagaaggttgcagctgagatgtggcagagttacctgatcttaacagcgcctctttcacaacggttatgtgaagagcttcgtctcatattagagcctacccaggcagccaagctgaaaggagactatcgaactgggaaacgactaaacatacggaaagtcattccatacattgctagtcaatttcggaaagacaagatttggcttcgaaggaccaagcccagtaaacgccagtatcagatttgtttggctatcgatgactcttctagtatggtagacaatcataccaagcagcttgcatttgaatctttggctgtgattggaaatgctctaaccctcctggaagtgggtcagattgcagtgtgtagttttggagaatctgtaaagctgttacacccatttcatgagcagttcagtgattactctgggtcccagattctacgtctctgcaaattccaacaaaagaaaaccaagattgctcagtttctagagtctgttgccaacatgtttgcagctgctcagcagctctcgcagaacatcagttcagaaactgcacaactcctcctggtagtctctgatgggcgaggccttttccttgagggcaaagaaagagtcctggcagcagttcaggctgcccggaatgcaaatatctttgtcatctttgttgtattggacaatcccagttcacgggattctatcttggacattaaagtaccgatatttaaaggacctggagagatgcctgaaatccgatcctacatgggaagagttcccattcccatactatatcattcttcgagatgtaaacgcacttcctgagacactcaggcgatgccctcagacagtggtttgagttggtgacagcctctgaccacccatagaacagaaagaagagtccaaagtgagacttaactgtggtcagaaggtcacattgcttacccaggtgctcccttttgggacaactacaaaaaattttattgtaatatttttattttacaacgtgatcttacagcctacagaatgctctctgggctcccggctttgcctgggctgaggtttttataccaaacctggaagcagcagcaggtgcctgaactcgtaactagagaagagttatccttcttccctgccttggaagccctggcctgggaggaggtcataccccaccgttggagcccagctgcctgttttcttttgcaggggatctgggcacctgtgccttgaggagatgctgccaggagcatgggactctgacagtcctttgtataaaggactaaagggagctgcccttttgaccctgttctaagctctgccttgccaagcccatagtgtgtgcccaaaagctgtcaagtggccaagacagctcgtttctggagagtatgagggtgtgttttcttattgtgaaaggaactaccttctcttagagggtaggaagaatgtggtgtgtgtgtgttctcataaagcaactggacattataggtgcccaggtcatctataaaaacgatccttgggctgtgtaaaaatgaagtggcttttcagtatcctctttcacacttgctgcttcgggagactatgcaattgatgggaaggtgattgcccctttatttcattcaagtgccatggtcccctgttgttgtagtaatttatttgtttagttcatttttttttttcttaacagtcaaggggaagagtgattcctcaca

SEQ ID NO: 5786 - DNA, 423 bp, Homo sapiens
  misc_feature (1)...(423): n = a,t,c or g
gcacagatgtggaatacaagaagaagcaggacccctacttgctgaagacaggccgctttgaagaggcggcgggtgccgcgccgtgccgcctggccctctcccccaacgcccaggtcttggccttggccagtggcagtagtattcatctctacaatacccggcggggcgagaaggaggagtgctttgagcgggtccatggcgagtgtatcgccaacttgtcctttgacatcactggccgctttctggcctcctgtggggaccgggcggtgcggctgtttcacaacactcctggccaccgagccctgcttcttcccattgaaactactcttgnctacttaggtctctctcttcttgctggctgtgactcctccctgactagtggccaaaggtgcttttcttctcccaggcccagtgggtggaatc

SEQ ID NO: 5787 - DNA, 728 bp, Homo sapiens
atttttttttttctggttttgctagtttatttcaaaaattacaattgtttgagtcaaatctatacttgatattcattgttgggtttctttaggtcattctgctgttctctcagtttcccaggtgttttgtgtgtcttccttgtgctattaattttcctgtggccttgttggtcagatccacagaggtaaatgcaagtgtttttccttgcttcagaacatgtgctgtaatcactatatcttctcctaattttgcaggtgacatgtacgttatgttcatatcgacactgactccggggtgctcccctttccgtgcatagcagagccattgttgatatgttatctactaacgtggctgtcaaaccgccgtggagagtgcctattgcattggtatgctcttcttctactttcatttcacaaatcactttcccaggagcagcagagacaagagtaatctttcccaaaactctctcaaaattgcgagccttggtcatggcctttatcacctcccgcagagactgagtcatgctggtcatcgtggacggttttcccagcctttgggctttgcgcaagaacgaacttcggaagagctggaaagtccagaagttagtgaaagaaggaggacacaaagggcgaagagcccgcacccttctccgcccctaggagcgcaagaggccgggagtcaggcgagctggcagccccggtggtccgcgatttgctcactgactttc

SEQ ID NO: 5788 - DNA, 70 bp, Homo sapiens
ggctaggtgtcattggggactgtccagagctagttcagcgctccttcctggtggctagtgttctgcctgg

SEQ ID NO: 5789 - DNA, 358 bp, Homo sapiens
aaccattgatgtgaaacggaacatctttgacctgtgtacagacaccaaagactgctatcttgctgtcattgagaatcaaggcagcatggatgccctgaacatggacacagtatgcaggctgtatgaagtgggcaggcagcgtctggcagaggatgaggatgaagaggaggaccaggaagaggaagaacaggaggaagaagatgatgatgaagatgatgatgacaccgatgatttagatgagcttgacactgaccagttgctggaggcggagttggaggaggacgacaataatgagaacgcaggggaagatggggacaatgacttctctccctctgatgaggagctagcaaacctttct

SEQ ID NO: 5790 - DNA, 849 bp, Homo sapiens
taatgtaaagtgtatttatttaaaaaaaatacaaaataaactacaagtctgtctttgtttatggcctttccctattttcttttaccgaagtggggtgtgtcccttttttgcagctctagccaggccatagagaagacaccttccaggagaggcaaggagagcatgttctgcccacatagagcactccagggaggaaagtagcttatactcacagtgtctgcccctgccgtgtagctctctcatggggagggcctgtttttgtaagggtaatgtggagagagaggtcagggctttgttccctgtggacgcagctctctgttgtcatgttctggatccagcaggctgctcccaagtacagatttggtagaactggaaagggaggtattctgggaagttttggaggatggagttggcaaagctaaggagtgaaagcatttcggccgtctctgtagctggggcagcggccactaatgttttctgaaagggattgtgacagtggacttgagcatcctggcaggttaggggtagtggagcttgtctgcgtttgtagaaagatacttcagaggcccctaaaattggcctatggttaaactgtgtaaccaccaggcaaggtaccagggatttccaccttttcactcacccgccccaccctgttttccttcccacaataaatagaagaccatagtctctttcttcctttgattttgcccaaataacagctgctcagtttgttacataggtattatccagctaaagtgacttctctcccttaacagagagaagaggggacaaatttggttgtgaagtaaacaagaaacacaagacggctaaaactctccaggggcaggt

SEQ ID NO: 5791 - DNA, 509 bp, Homo sapiens
  misc_feature (1)...(509): n = a,t,c or g
acttgataactttgagggtttgattgtgttataaggtggattcagtagactggttttgtttctggaaaattttaggcagccagtgctcagctcccagctcctgggctgtgtgctctaactctgggagacttgtactgggccccaattttgctctctggctcctcaaggtcgtcaactcattgcgctgggggggcctatgtgctcctggacagctggtcactacactctgatggatggtgccagccataccattttgtaggatggtggcagcagatccatccttgcttgcatgtgccagcagcggcagtggtggtggagtggcagtgtggaggggtgcagacttgtcagctgtggaagggtgctagcaggtgtcagggtgcctgtctccctgtgggcattcacagcagcagcagagacagaatggctcagggagcgggggccctccactggcaactgtgcatgtgggtcctgctggtggtggtgttaagcacagggtnaagcacttgtgg

SEQ ID NO: 5792 - DNA, 527 bp, Homo sapiens
tattatgttgagattatcttctgatcaggaagtttgagtgctatgcaaataacatagtagtaatttctctttgcatgccatgtgtaatatacctagccaaaaccagatgcggtgactttctttttttgtaaagcaaattacttaagaaaatacaattcacttgaatttgacaaactgaaacagatgggttttctgggttctctgataacctatgggaatgtttggatgccagttgggctagtgaatcgccactgtactgtaataatggttatttacctctgtgctgttttaattacctaacgtctgtgtaactgctgatttgagtagtgattagcatttagataatgtaacaggattttagagagcactttgaaagataacattttattatgatggtgctagggtaaaaaattgtaaagactgggatggttgtgtggaaaacttttcttgagagaacctattggaaagggaatttgttgtcaccttcttaactaggattagttgttggaaggtaccgcttaagccat

SEQ ID NO: 5793 - DNA, 724 bp, Homo sapiens
gccgagttccgggcgcgaggcggccaccgtggagagcagagcgcggcggctggaagctgctaagtcagagccgcgatgttccggattgagggcctcgcgccgaagctggacccggaggagatgaaacggaagatgcgcgaggatgtgatctcctccatacggaactttctcatctacgtggccctcctgcgagtcactccatttatcttaaagaaattggacagcatatgaagacaggacatcacatatgaatgcacgatatgaagagcctggttacagtttcgactcctctctgcaagtgaataggcccagaaaggtgtaagagactctttgaatggacataaaattctgcttgttaagaacaagtttggctctggtaactgaccttcaaagctaaaatataaaactatttgggaagtatgaaacgatgtctcgtgatctggtgtacccttatccctgtgacgtttggcctctgacaatactggtataattgtaaataatgtcaaactccgttttctagcaagtattaagggagctgtgtctgaaatggcactgtcttgtcagtcatttctgtttacctttttcttctgcccagagtgtatttgtgaagagtctcttatattatgttttgtggaaatcagcacacaaccacaatgacatttaagcacaggatcattattagtctatgtttttaataaacatatcaattaagaaaaaaaaaaaa

SEQ ID NO: 5794 - DNA, 927 bp, Homo sapiens
  misc_feature (1)...(927): n = a,t,c or g
gggtaagtgctttggtaggaaaaatgcgggtttccatcaaagtacatggcagggatacctaaatctggtctatgagtcactaaagacttcctggatatgatggtatctcagacgtaaaggtgggtagaaggtagcaagggcaggggagaagagaacaggatctggagacactccatgaagactcttctctactgcagaaattgtcatagacctaatttttaaaaaaatgaatctgaaggagtaattcaacaaatatttattgccctcaagtataatagctcagggcctgcaagcctggtaaggaggggtgtgggcagggaatggggaatagcagagcctgggaaggcagatcaccgtgttcctttatacttcccactgcctgagtcccagagtcatgggacacaaacactcccagtcccccactgtctctctagcctctgatatgcattctttccctgtgtatatacatgccttttcccataaaatgcaccagtctctcaccacactaattctgagtacttcagagtctcacaggtcattctgggtctagaataggctccccaactcagtgattataagtaggaagaggaaaagcaacacatggggattctgagccagggtttatgacaactaattcctgctggagagaagagtcctgatgatggggctgtctccagattcctatcttatcttcatgccattgtatgggctataacctctgcctgtaactctctctgctaatttttattntggcagttttaattaacccacaattgctgagggcaattaatacctaaaaganagtttgattcctcttcctaagatatcctaggtagtggtcatttctaaagaagacttggtgatcactgcttggtaatagnccattttcacaagtgctatgaagattctacctgatactgggtaatt

SEQ ID NO: 5795 - DNA, 956 bp, Homo sapiens
taaagatcaacaaacattttattaattctgattccttttatcatgtgcttttttatacaaagcactttcaaatacattacattatcttaaatttataataggagtttctttcggattcagtttaaaaatgacaaatagcattcgttgtgcccaagttagaattacaccaaaattaccatgtgctggcacataccatcatcccactggtggctggaaaactgggttgcaggagtgtctgtcactgagatgggccaccaccccagtggccatatggtagagatgagggaaggatggactagaagcaagctgggtcttctgggtcgtctctactcctttttcacttcatcaccgttttccccactgagcttgaacacaggaatctgctgaccatccttgagctctaaaaagacctcgtcaaggtgccacctctgaaaggggccacctctggatgagtggacgtagagaaggccctctgatttggatccagagacaggaatcttcaacttggcatcaacaatgtccacgaagttttccctgtcgatgagcttgagataatggatgttgagaggagggcccagagcttcctgtgcctcgggatggctctgcagctgctccactgccaacttgtaatataaagccctggaatgaaacttttgaatgaggtaatacacaatggcaaagccccccggcatagaacacaccgtggaaaaggatccttgctcccagaggcattgaccgcctgcttcctgcatacttttgccacatcatagcacaactctcttgaaaatcatcaaaggcaagttgtcctgccgctgagttggaagacaacagctgctaatacacgaagcctcagaaagccctcgccaggactcagagattctctcgagtgactcgtgtggcaaacatcctgtgagcaacagaagcaccacgctacaaagagcatgacgagttcttct

SEQ ID NO: 5796 - DNA, 1869 bp, Homo sapiens
acaaagtgaactttttaattaaatccaagtacatcttagaatgtttctggagttgaaaggcacagtgcaaatagaaattactacaatcaacaaaattgattttaaaaagtatttttagcacaaaaaagttttctttatatcatactaaattcagagcattacatcattcccagaatacctagtttgaagcttatttttttttccattcacttgcaagctggattaagacattaactataataatatggaatgttcagcatttatgtttggtaaccagatgtatatggtttgtataaccatactttagaatttagttcagataaattggttttggtatactttgactacagaaagtgatttcaacataagatgtgatgaaggaagtctcccatgaaaaacttagtaaggatcaactgatgctatggacaaaacctaaaaaaagagatttgtagatgctttcaaggctttgactatgaaatatagaaaactggatgggcattcttactgaccggatgcttacaatttcaaatgaagaaactactagccactctaaaaattggattagggaaaaaagtgattttagaacagtcttccatttaaaaaatttttcactgaaaagaaaatatggaataatttaatatattcaatgtctgtgaaacacaaagtagaaagtaatcttttaaaaacatggaatacatatttatttctactttaaaatctccatttatatcttataagctttgaaatgcaagtacagctttaaagcatcataatgactaattataggtgaataataatacagacagtctatattctaggaggcagctgtaggcgttttaattggaaataagcattctgagataatgataatagcagtgtagaaaaatgaagttaaaaaaattcaaagtgttgagaatcctcctgtccttctgggatttttattttaatcatctcctccacagagaacaagcagtactttcctgtagtctccagatgtgtcacccttgatgaacgagtacagagactttccatagagtctcttgaagtgtgcccggatatccaacatgtcaatttctgctcgagaaaccatcactctgatgagggtgttatcatcggtgcccaagcccttcatcgatttatagagcttttcagcaaaatatgcagatttgttcctcatgcactttactatagccagcagagcatcttcaaagctaccagatgtttcagatttaatactctgttcaatatccttctgtgatatcctttggtattcatcaaacacatgcaacaggtgatttcggccccggcgaaagagaacagttagaaatttcacctcatctgtcccccattttctctcttcaggcccaataaggtcctgggcatctcgttccacagagcaagtgcagataatttccttcatccctcccaccagctgacagagacaccagcactcgctggaacatgaacgatgtgtcaagagcgaatgtcatcttcaaggctccgtccatattgctgctggtaggtttggcttatgcgccggatctcctcaggggtccgggaggccaggatctcaattaggcagccctcatcagtgccggctcccttcatggcccttcgcagctcttgcacgtcatacagcaccgtgggcatcatcatccccacaatcacctgctcggaagttgccactcgagttcctgacttcaggtcgtctatcaagtccctgccgatggtgctcttgtaggctgtcctgatctcctggcgctgggcggtgttgcggtaggcaaggacgctaataatggcgtcttcatcggtgccgagccctttcatggccttcctcagggtctgggcatcttccatggcattgaatcc

SEQ ID NO: 5797 - DNA, 258 bp, Homo sapiens
tgcagaccattccattttaagaatagaaacttgttattgtaaagataaaggtaattcctaccattgaaaatctctgaattgcttttatttgtggtagacattatgactaaagaacttattttgttttcttcattttggtttcatttaagtttcatctacaattattttgtgtattatttaaatctgcagctacaggattgggcagtgccttgaagtggaaaagcatactgagttagttgggggaaaaatgaggtatct

SEQ ID NO: 5798 - DNA, 1416 bp, Homo sapiens
tttttttttgtcaaaaaggatcaaacactttattcatctacatataacatatataaaagcaagcaaaatcaggatgttttcctcagccaccctttccacattttgtgcagttttagtgaactataaatcactgacttcttcaggccagcagtaaaaatgcctttcgtgctctgtcttatactagacggttctcacgattgctgaaagcccctagttcgcaccacatctccacagtcgggatcatgagccacttggaataaagtttcttccacatctctgttttttccagggagggtcccataatatgatttatctgttgctgtaaggttttgggcaatgtcatcagctgaggtgaactgtccttctggggcttttatctatctccaggccaggccttgctggccttttaaaacacccacttgaggattttcctgtagtatgctgccatagagctctcgaaagtgggctatattgggcttcacaatattcaacacttttgttttatcttctccaaccaccatccgaaagtcacctgaataggagagaccggcaatctctatgaagaggtcttcttcagaaaagctttcggggagcatgaggaaagcagcggtcacagcactcttcagatttctatcgagggctgatctaagagtgacatcctcgttcactgagataattttcaccggtttttggagtcgtccagcaatgtataagttattccagttgaggagatcttcaatcagaacgttagtgctaataactccatatttgataagcctaccattacacatgatcaatgaattgtagtaaactcccagcgcccatagttaatcctggaatggacgtgaataatccttgggcccctaaaacttttaggaaagaagtagtgactcccaatttttcttcaggttcctttgaatgcccatgcgacagggtccatcctactgtgaacacaaagtccagcatagcattcgcactcagcatagggatcagatcaggggcacaggagggagaaattctcctagagatgacaaatctgagtcttgaaggacacgtgaattaaacagacttgctggaagcactgggggaagcacagggaagggtagggagccgtgttggaggaaagtgctctgtggatatgggagccagcatgttctggaagctgccgtcagatatgacttctggtctgaactgggccctgcctggcggtacaccccggagccgtagacgaaagccagactcagctcctcggggaagtgagacaggatcttgcggaaggtcacccacgagctctgcagcgtctgcagcgccatggggtcgaggctaacaggggacactcagcgcagcagggcgaggacaaccgggcggggaacagacaccgggtaggcggtttagggtgggaaatggaagtcggag

SEQ ID NO: 5799 - DNA, 44 bp, Homo sapiens
gttaaaatcaccctgaagttcgaccacttagagataaccaccac

SEQ ID NO: 5800 - DNA, 376 bp, Homo sapiens
gtcttttatttattctttattatcgttagaatttaacttacataattatatttatgatttactaatatttaattctgtttttaataaggccacattcaaagtgtttcatttaaaaaaataataatggtagagtcaaccaataaagtgatgatatgcaggtttccagctcctaggtagtagcattcttacagggaagatgtttcactgcacaaacgaactaaccctcaggaagcttgaggatcctgtgaagggaccacacaccgtctaatcatgtcaggacggatgtaaggtgtgccaatggatggaaatttttgatggggggagggaagtccctggcctactcaccctcccttctttaggggtgtcctccataaca

SEQ ID NO: 5801 - DNA, 1418 bp, Homo sapiens
  misc_feature (1)...(1418): n = a,t,c or g
gaatgctcatttgtacaaatatggaggacctgcgagagcagacccataccaggcactatgagctttacaggcgctgcaaactggaggaaatgggctttacagatgtgggcccagaaaacaagccagtcagtgttcaagagacctatgaagccaaaagacatgagttccatggtgaacgtcagaggaaggaagaagaaatgaaacagatgtttgtgcagcgagtaaaggagaaagaagccatattgaaagaagctgagagagagctacaggccaaatttgagcaccttaagagacttcaccaagaagagagaatgaagcttgaagaaaagagaagacttttggaagaagaaataattgctttctctaaaaagaaagctacctccgagatatttcacagccagtcctttctggcaacaggcagcaacctgaggaaggacaaggaccgtaagaactccaattttttgtaaaacagaagttccagagcacagaaggtcatcatcacaagcaaactttattaaaaaaaaactagaagtgtgctttgattttgctgttatttgttttatcacttctatatttggtgaacagccacagttactgatatttatggaaaagtactttcaagtacaaggtcaatacataagccagagtgaatgatactacaagttgagcatctctaattcaaaaatctgaaatccagaagcttcaaaatctgaatctttttgagcactgacttgaccccacaagtggaaaattccccacccgacacctttgctttctgatggttcagtttaaacagattttgtttcttgcacaaaatttttgtataaattactttcaggctatatgtataaggtggatgtgaaacatgaattatgtaattagagtcgggtcccgttgtgtatatgcagatattccaaacctgaaatccaaaacacttctgnnnnnnnnnnnnnnnnnnnnnnnnnnnnnnngcttgtacctatatattcatatatattcactgttgttagaaatggtttaagttgctgttctgtgatgaatctaaatcttttctcttgctaccaagctattgtcactgcagtgcattataccaaagagcgaagtcagtgccactgaaaatacagaacccattaatatcgtggctatctgattacatttatattccaagatgaacctttttttatatatgctaaaaattttggggaatatgttttgggatgtattatggagctaaaactctaacctcttaatagttttatagaacttaaaaattttttatacaattacccaattggtgatatgatcttaagcttttgtgtcagattatttaatatgatgacttcatgctttattatgccttattatggctgacgtattactgtgggtgaaacaaaatatctttaaaagttaaaacatcc

SEQ ID NO: 5802 - DNA, 1409 bp, Homo sapiens
ggcacgaggaaaatattaggggcaacacacttcatcaaggcagcaggaatgagagagagcagagaagatcaaggatgaagtcttgggtactgaaaaattcagtgctgggcagaaaaactgacagggcagtacaagtaacaaacagaatccaagtggggtggcccttgtgcacagagctccaggtgacctctggagagacatgggcattcacatggaaagctaaaacggaagctcaagtttcatactcaacataatcttctgtgtgacaaaggacaagccatgtagcctctctgtgcctatttcttcatgcataaactgggactcataatatttgtaaaatgtattgatactctcagggcaaattcactatattgctatacagttgagatcagtgttgtaaaattaaactgatctggttctaattcctcaaaaggccaaagccccaggccatttgaaatggaaagaagcagagaggaggctgacttagctgattggtatggaaacagttggccaagagccagaatttccctttgtagcaacacggctagttttactttgagaagctctgctcagctgctttataacattaagtctggcggaatggatgtcactgtgcacaataaagttttcacaagtataaacaatggtgatgtaagtcaacattgctgtagccaggtgtgaaggttgtatggtgtgtgacgaatgtacatcatgtttgtaggtttggatgctaatcttgaattgtagcttaaaaaatacgtatttttgtaactctttgaaagtttatgaagactgacagctttccttgtaagcactaagagaaaaaaaaagaaagagggacatttgacaattttaaagaaacaacaagaaattagaatgaaaatctgtgacaaacagcgtcagtgtggccatgtccacattcctacatgtctctctctacaagcacctctctaagaagcctgacatcccggtggactctttatagtcatgtacacttgattccagatgagctctggtcttatctggatgctcagataagaggtttctatgctgagcatccagatgttccctcaggttccaagacatttcaccccaggccctgggttcactctggaattcgtaggcttcacgtctctctagaaatgacgtgtaaaatttaagaccagacctcagccatcagcgtccagaccatcctagaagtctttcccaatctcacagagaaagccctagtatttcccagtgaccccaggattccacgttggggtggccaaagaaataggtctctcagggctttgccacagcctccagcccatccttcagaggcacacacagcacctctcggctgctccagctctgtaggatagcctcccctggggtccgtgggacgcgggccacagtgttgaggtaga

SEQ ID NO: 5803 - DNA, 791 bp, Homo sapiens
gctcattcctctcagtgactatcctagaggatcagtgtatttgagaaatatttagaagtaaagttgacaggacaggatgattgattaaaagaggggagcaagggaatttgaaataattccagggtttctggtttgggagatcagatgaacaagtgcataagcctgggatgctggtggaggactggagagacatgccagatgctacctgcacacttttggtaatattctgtgtgatgggatatgaaatggtccatagaaaaaaaccggaaaaatacgccaaggttaggttcattctaagagtctaaaaatttcaaaaaccaaaacaacattataaatggtgtttctcaaggacctttcactacctttttagattgtgcttgtgattttcaggcaagctaaatgtctgatgaagactgctcttcttttgttctgtgtctgacctactaattcctgcccatgcttcaaactcagttcagaaatcactgaaggaaccatccactgccggcctgcctgcaaccacagctgacagctgagttagttaggttttcctgtccctattatttaccagtttgtactgaaatgctttcatgggctgtgcttccagattatgagttctgtggaatcaggaagtatgtctctgtattcttgtattctttggcttttttgtgtagtaaagggactcaagtaatgtttgacagtgaaggatacaacttcattccttgcctgctttgataaattttagtaataaattcccaaaactatcatgttgattaaaaataaaaagtaaccgt

SEQ ID NO: 5804 - DNA, 440 bp, Homo sapiens
gtggaagataggagatagatagaacagtgattaggattttgttttctcatatctactgcctgcaaaagaggcatcaataagaagctctctaaaagacttaaaatcctgaggcacctctgaaagctggatgtgggtggggtcgaaacagttgcctggtatgtcaagaagagatggcttgtaatcatcttctattcataagaaccatttgaaatatgtcattaccataaattcaaatggtaccaggtaaggcattagtttactcttccaccttcccatccatgtcagctgttgtgtacatgcacaagtacacttctctgctttgagactgtcatcagaaatagatgactcctatcccctaacagcagaaatagtaaacagcatgattactaaaacactacaagataatcactgctagattataaaatgttcaaaagtctacc

SEQ ID NO: 5805 - DNA, 408 bp, Homo sapiens
gagcacagacaaggacgagcctccaaaggacgtctttgatgaattatttaagctggctccggagaaagtgaacgcagtgaaagaggccatcgtgaactttgtcaaccagaagctggaccgcctgggcctgtctgtgcagaatctggacacccagtttgcagatggggtcatcttactcttgctgattggacaacttgaaggcttcttcctgcacttaaaggaattctacctcactcccaactctcctgcagaaatgctgcacaacgtcaccctggcgctggagctgctgaaggacgagggcctgctcagctgccctgtcagccctgaagatatcgtgaacaaggatgccaagagcacactgcgggtgctctatgggctgttctgcaagcacacccccaaagggcacac

SEQ ID NO: 5806 - DNA, 361 bp, Homo sapiens
  misc_feature (1)...(361): n = a,t,c or g
gccttctacctggaatgttctccacattccctcctttccagctgccacctgctttctctagctaacacctactcaaacgtaaaggttcagttcagatgttactacctccataaaacccttggattctctcatcccttttccccttccctgtctggcctggcacagggccccatctgcatgctaccctagcaccaaggcatatacctaccacaacattaggctacaaggacagtgaacccaactgtttcacccatcagtctcccctgaaaggttactaatggaaatttcacatcggctagggccatgttccttgtgtcagtaggcctaagggcttangcacaaggcaggaactgggggtaca

SEQ ID NO: 5807 - DNA, 442 bp, Homo sapiens
  misc_feature (1)...(442): n = a,t,c or g
ggaagccagaactgggaggtgctgcagccctcagaggtgtgtccaccttcacagagggttccagaggccagaaatgggaggtgctgtagcccacagagctgtgtctgccttcacagagggttccagaggccagaaatgggaagtccagccacaaataaacccactaaattgataataagaaagaagatttgacacagaaaaagaagatttctaaaagcacactattaaatctccaatgtgctgaagtctggtgtctgaggagggagggctgacacttcctctcagagcttgagaacggcgtgggcacgggcccttgccattcattgntgcacggggaagtctgcatttgggaccccttgnttgatggtaaccnaaccccaactttccnnttaaaaccagggaccattggcttgggggcncccgttgcctccntgcaggcacc

SEQ ID NO: 5808 - DNA, 283 bp, Homo sapiens
  misc_feature (1)...(283): n = a,t,c or g
ccagttaatttgaccatgagaagaaaactgcgcaaacacaattgccttcagaggagatgtatgcctctccattcacgagtacccttcccctgagatgagannnnnnnnnnnnnnnnnnnnnnnnnnnnnnnnnnnnnnnnnnnnnnnnnnnnnnnnnnnnnnnnnnnnnnnnnnnnnnnnnnnnnnnnnnnnnnnnnnnnagagcactcacggccacacctgactaatctttgtatttttttgtagagatggagtatcgccatgttgcccagcttcctttgag

SEQ ID NO: 5809 - DNA, 348 bp, Homo sapiens
ttgaagaggcaatttaattgaccaagttgagaaaagtcattgtgaatgagtgtatacatgattgtggccagttactcatttaaaaagaaactaaaacaaagccagaaggaataacatcctagaaagtgacaaatgactcctgcaagatacataaacctaaccttctagatacatacacagaaccttccatattgttttctgcaagaaacaatatgctctggcccatgatacttctgcagagcagcctccgtttttggcaaattcacttcaaattcagcccagctttatgaccccccgtctggttggtcctgtaaaatctgatagccgatatactgaacacctcctgtg

SEQ ID NO: 5810 - DNA, 406 bp, Homo sapiens
ggatgctgcagctctttctgtgtcccgcactgcattctgagctccttgaaggcagcaaccatgcttttacttgtttttgtatcttttgtgcccagcttcagcacttaagcacttaataatgaagtacattcgggacaaactggcatgcatctatactcacagctatgtggatgtcagaagcattcaccatgggtacatttctgagggtcatatcacaacaaggttatcaacagagcaggcgggatgttttggcaggaccttaaggtagatcaatgcctttcaaacttcaatgtgcaaatgcattgtctgaggacttgttctgattcagtgggtctgcaggttctgattcagtgggtctgggtagggccctgtcgttctaaaaactacatcccaggtgatgcccaag

SEQ ID NO: 5811 - DNA, 419 bp, Homo sapiens
  misc_feature (1)...(419): n = a,t,c or g
ggtcgctcagtacattaagtttaattctttcaggattctgaaggagaatcccaccaagctataggaagcctccctctccgcctcttccagagaaatggatgggtgggtacctagctccttggcgccgagtcaggaagggtggggtgcgtgtcgcagtgcatcaggccctggccctcccgtctcagctttcctttctcccacccctcagatcttgtttctcttcaagctgcacctttgctgaatgacactgtaggggaggaaaattatcttctctttctacccatttaggttcactggctggggccctgtatttagattaacaaaagacagattaaggagaagaacaaacagaagtttgttaacacttgcatcatgcatgccctttggaatatccagggatgaatggncagaatttggct

SEQ ID NO: 5812 - DNA, 625 bp, Homo sapiens
gagcgtgaggtgtgggtgttcgtttctcaggtaaaacatggctaaaagcttacggagtaagtggaaaagaaagatgcgtgctgaaaagagaaaaaagaatgccccaaaggaggccagcaggcttaaaagtattctcaaactagacggtgatgttttaatgaaagatgttcaagagatagcaactgtggtggtacccaaacccaaacattgccaagagaaaatgcaatgtgaggtaaaagatgaaaaagatgacatgaaaatggagactgatattaagagaaacaaaaagactcttctagaccagcatggacagtacccaatatggatgaaccaaaggcaaagaaaaaggctgaaggcaaagcgagagaaaagaaaggggaaaagcaaagcaaaagcagtgaaagtggcaaagggtttggcctggtagactcttaaaaccttggaaaatgccacatgggatagatgacggattagaatgtatacacatgtatactttgatttcaactgccaccaaatgaaaaccatttgttttcctattttaacttggccttttttcttcaattcaaacccagcataactcctcaagtttgttttgggaacttgaataaaatattttctttgatac

SEQ ID NO: 5813 - DNA, 698 bp, Homo sapiens
gcacgagagagagctagcaccatgagcttcaataccctgacactagtccttcaatgtaaataaggctaagagagaaaaataaacttaataaaaaccctgacaactgtaggtctatagcatgctcagcatataatagacactctatgaattgtagcaattattttattactgagtcagggattttaattgattgtctcagcatagatggcttgttattaagtagtaagacataaagcagctttctcatccttacttatgaaaagcttcttgaaacaataatgatttttgggaattcacataaaattaatttgggtggaaatagtcagccttgagtatagataaggtacgcaggtgaggggagcgcaggctcatgtcagtgactcaaaatgtgtccctaaaacaattgtgaaggagaagtcggtgcctatcctacaaatccctttagtaaagttccttcagtcttcagctgaaaaatgaagagactggcctaatgtaaaaaattctcagaagttctttctggttctaataccatgattcactaactgctattctgcagtacatcctgcctgaccgctattgaaagcaagcaagggcaaccctggggcagctggaaccggcccagcaacatcagcaatacacaccctaggcagtgtttctcaaattgtgttgctcagaatagtaataagtgtcccctacta

SEQ ID NO: 5814 - DNA, 661 bp, Homo sapiens
gaacaaatggccacccttggagagaggacgttcaactgttgctacccaggttgccacttcaaaactgtccatggcatgaaagacttggaccgccatctcagaatccacacgggagacaaaccgcacaagtgtgagttctgtgacaagtgcttcagccggaaggacaacctgaccatgcacatgcggtgccacaccagtgtgaagccacacaagtgtcacctgtgtgactacgctgccgtggacagcagtagcctcaagaagcacctgcggatccactctgatgagcggccgtacaaatgccagctctgcccctatgccagccgcaactccagccagctcaccgtccacctgcgatctcacacgggggatacccccttccagtgctggctctgtagcgccaagttcaaaatcagctcggacttgaaaaggcacatgatcgtgcactcgggggagaagcctttcaagtgcgagttctgcgacgtccgctgcaccatgaaggcgaatctcaaatcgcacatccgcatcaagcacaccttcaaatgtctgcactgtgccttccagggccgggaccgggctgacctcctggagcacagccggctgcaccaggccgaccacccggagaagtgtccagagtgcagctactcctgctccagcgcggcgc

SEQ ID NO: 5815 - DNA, 128 bp, Homo sapiens
  misc_feature (1)...(128): n = a,t,c or g
ctgattccatattcgcagttgtaagtagaactgctgagacgtggaagtaccacatggactcacagaggagctgctgtatgtagcacagcattgcacaagagcttatttcagtctagtaacnttatagg

SEQ ID NO: 5816 - DNA, 1238 bp, Homo sapiens
aaaacaaaagaaggagctctgccgaattggcacgagcggcacgagtcgagttttttttttttttttttgcagtggcaggtagattttattggcctgggacacacaggggataccctcacccacgatggggtggggggtgtggtgttgaagatataatctgatggtcacttgtggtagaatcgcgggttctggctgtgttggatgaaggggagccgagggccaggttggctggtagctgcaaacgccgactttcctgctggctgcatctgcacagggagctggggggaagcaaggagtccaggggctggatgcagagcctgggggtgcatggggcgcagagaggatgagtcggagaagccagtctgctggttagcatgttccatctgcttttgcaaggacagggcaccaccaggctggaggaaacctgtctgagtgggctgaaagtggccatgcacagcatagggctgtggctgtggctgagataggtactgcactgcagggaatgccgaaggagctctgagctgctgactaggactataagctggctgtgtgggcccatagtgaggtgggggctgagcagtcccataggcaccaccaggactgccttggaattgtccatgctctggtgtccctgcaaaagcagctgctgagcccacgtagtgccgggtcgtaagcacttggggtccaaacatttgtttggctctgtcagctgccatgagggtgcctgggcgattgtgtcctccagggctcccctgcatgctgaggagatgagttcctgtgtgaacagtcaggctctgctggtatgcagctgatgttagggtggtcaggtcactctgttcctttcgcctccgtttttcttcctcatgtaaaactttcttgagctgcaggaaaagctggtgcttctcttcctgtagagccaaaagcttctcctccaacttcagaatttgttccttggtctcctctaatgacattctctcttccatctcctttttcttccttctctcctgttcttccttcatcttctgttccatcatcttatccacctcttcttcctcctgccgcttgcgctcccgctccatcataatgtgccggtgcagcgccctggccatggcgttggaaagcttggggcgctccaggagtgcgggcatggtgctgccgtgggcgctcgggccgtgggcgcccggctgtctctgactgccagacctcagacggggtcccgtccttctctgcgctttctc

SEQ ID NO: 5817 - DNA, 909 bp, Homo sapiens
  misc_feature (1)...(909): n = a,t,c or g
gctaaattaattcaacttctggatgtcggttatgttttttttgagacaggatctcgctctgctgtcacccggccctggagttcagtggagggatctctgcaccgtcaacttcctgggctannnnnnnnnnnnnnnnnnnnnnnnnnnnnnnnnnnnnnnnnnnnnnnnnnnnnnnnnnnnnnnnnnnnnnnnngtaaaatttcttttgtagagatggtgaacttgctctgtggcccangctggtcttcgaaatcctggactcaagcgatcctcctgcctggggcctcctaaagattcagctgcttttggatcaaccgatcgccttaagaccttttaactcgaacacctgtcacatcctaggatccgcgaaggactgaaacagagtttctgaagcgtccctcggcgcagtagctccgctccacctcccattcgcgctaccaccgcggccgcagcgcccaggagtcgccgcggagccagcgtcgccctccagctgttgcgcgtcggaagccggaagcagggactgagcgacagactaggaaacgccggtttctccggggctccccagcgccccacctttaccccggaggccgccctcttccatttgctcttgggcgtcagggcggtaccccactccgctcgaccctttggatccgctcgcacttcctcccgtccagagtcaaaggccccggaagtgacgtttacgcgccgccgtaaacgtgcgttcgctggcggtgcgggggcggggcgagcaggagggtgggtgtgaggcgggagctgggccgcgganccagacctacccgggcgaagggncgaagcggtngttttgacgccggcgagaagcnggcaagttngttaagnaggaagaagatgagcttnaagtttgaacgncgaggatttnatttngatcaa

SEQ ID NO: 5818 - DNA, 190 bp, Homo sapiens
gattattttagcgtagcataggtattcagaatgtacaccaataatgagccaaaaggacagcttctctgttagatttgggagattttgtgtaggattatttcagataattaatgtgtagtcccatgaatcaagcagtgttacactgaaggtcctttgggttatagtaaaagctccatccgtggtaacctga

SEQ ID NO: 5819 - DNA, 1494 bp, Homo sapiens
gtcctaatttattatgactacatagcccacattcctctgcccacgcatccgtggagtccagagcccagaaagcctcctgctgccctgccagaccgttgagctcctcaagagcgaagtgttgggcacaggctgatcagctcatgccagaatggcagggccttcagctgcccaagtgtgtgcgtagccagagcacagcattcatgaagctgtctgactccacctccacctctgataatgcgtgggtgcttttgggatagaggcaggagcccgaacaggcacattccgggtcttgagggcacggtaatactccatggccctgcttgaagggggacacgcccggtcctcctggcccaacatcagtaacagtgggtgtcttcacctgagggatgtatctgatgggcgatttgtccagcatctcagcccacacgctgaggtctggcaggcagtcactgctgaaaggaaagccagcctccaccacgcaccagtcagggatgtcagtggagcccaacatggaggcgatgttgatcacggggttccgggccacgcaggccctgtaggtctctgggtactgaccaatcaagtggcaggaaatgaagccaccatgggaaccacccataagggccacatggcttgcatcaaagtgttcctcctggagcacctgttccactgcaaactggacatccttcaacatcctggtggcccacattgcctgggagggagaggatgctgtcctgggccaaagcccgtggagccacgatagttcactagtagtaccgcaaagcccatcttgcaaagcatggctgggaacagcatccaggcagtgacaaaggatgaaatgggggcccccgtggggcatgaccaccatgggcacttgggtcttatctggagggctgccaggctgcagcaggattgcttcaaagtcaaggccagcatactgcacattctcttgctctgggggtggctgtagcacccggatgccccagtggatgtcgggaatgggctcggcctcctccagggacacccacaacactgactgctccttccctgcagaaggcaggaacccaactttcagggttggaggtaggctgggtgtggaaaactgtgccaccatgaggtcctggtcaattgtgagcaacttccagctcccacctgaccctccagctgtgagggaggtcacagtgcccacttgggtgtccacagcaaacaggtcctgcccgctgcgctgagccgagtcaaagaccactctctggctgtcagctgaccagcatcccaaaggcagaaggctgcagtagatcccagagaagttctctcccagctgccgaggcacaacatctaccaccactgaggtaaccttggtataccagtcatacaggcacagctggctgcattggtgatgggggatcagagatgggtactgcaggtagacaatgcgacattggtctgggctcagccggggagaagagacagccagggagtcatccgagaggagctccc

SEQ ID NO: 5820 - DNA, 426 bp, Homo sapiens
gacgggagtgagctggggagctgttgatctttcactatacaggctgggaagtgtgttgatgaccactgagccaggcttttctcaggagcttcaatgagtatggccgacagacatggacaaggagctgtgttcaccatcggactcatgtgcagtcagcttttttcctgttggtttcatttgaataatcagatgctggtgttgagaccaagtatgattgacataatcattcatttcgacccctcctgcccctctctctctctctcctctcccctttgtggattctttttggaaactgagcgaaatccaagatgctggcaccaagcgtattccgtgtggccctttggatggacatgctacctgaaacccagtgcccagaatatactagaatcaccgcatttcagtggactcctgaagttgtacttgtgt

SEQ ID NO: 5821 - DNA, 456 bp, Homo sapiens
cttagccttgggtgtctagaactagagccaatgtctgatgttaaagtgataacatttatttggaagataagtccagggcagcaatggccaggacatgtggaaattgaggcaaagcaaatgtgaaaccatgtcttgtgatgtatgatatgactctgctgatgaccacttcacaatgagatgagagagacagcatggtggtcatcagatgcgtggacttgactcccagtacttttccagaagggctgcaaggggaaaccacagccggcattagtccacggaagagaaagagaagagaaaatgtatctgctcagctgtcttctgtcttctatttcccattggccagggtttccctgaggcagaactaccatctctgctgttctgcgttccatcatccagtcccttggtggtagttatgaaagccaacctcatgcccccagtgtggtgttcattgaagtc

SEQ ID NO: 5822 - DNA, 445 bp, Homo sapiens
  misc_feature (1)...(445): n = a,t,c or g
gttttatttttacaactcttgaaaaacgtaaagccattcccagtcctatggtttatcaaactctgttgtcagtgactgctttcacacattaaaggcagagttgagtagttgtgacaagatactatatggcctgcaaagcctaaaatatttattaattgaccgtttatagaaaaagtttcccaaatcctggtctaggtaaccactctggacccaattacttttactggtttattttttactctttggcttttcaaactatgttttcttccccattttaatgtctgatattaacagtgacaactttgttgaaataggttatttgctttcataatattgatttgtatgagtcctagtatcagccagtaatcaaaactggttgggttatttaagttggataagctggtttgggcaatttccttttgntttagcagataattaataggaa

SEQ ID NO: 5823 - DNA, 2069 bp, Homo sapiens
ggataaagcacggggacctgagatgcgtgcgcgatgaaggaatgcccatctacaaagcacccctggaaaaagggattctgatcatacagtttttagtaatctttcctgaaaaaccactggctttgtctgggaaaagcttccttcagctggaagctttactccctcctcgacagaaagtgaggattacagatgacatggatcaggtggagctgaaggagttttgtcccaatgagcagaactggcgtcagcacagggaggcctacgaggaggacgaagacgggccccaggctggagtgcagtgccagacggcatgacgtggtgcggggcagcgtggccccaccggactagcacatgatgaatgtaaagttggcacaatgaaaatgacatcgctttaatggccttgtgtttgggatgtcctgtgtatgtgttcagcattcttaattgctgagtgtctttttggcttttcttttggttgtaacttaagttatagcttaatttatatttaaatgttttaagtataaatcacctctagtctgcatatggaatctgttcatttctattttcaggatatacttttgagatgtcagtgattgcaccaacactttgtgcttctagtggctttgccataattcagtgtcaccaataaggcacagcccagttagcagcttagcccccctagcaaaccccaaggcacaaagtgggcatcctgactcatctctaggtctgtggtttctcccctcttcccttggcagagttattgagggcatgatctcagggctgctaagataacatttctgaggattctagatgatcctcttaaagaataaaagcacatccgtggatcggacatggctgcatgtgcctgcttaacagggccaacttagttcctactgttctgtgcccttcagtggatggaacgtgagtgtctgatcatctctcttggaagttttctgaaccttccaagctctgtggtgaggacaaaccagtgtttgaatcatatgctgataactgtttgcctgtgaccctcacaccttgttcttcagggttttaatgattttctgttgacaacttttgcaatgctttcccaccaaagtgcttacttgtaaagaaaactaaatccttctgtgtccccggcagcctcagtgcagcaacagaagccaagggagaatgctgctggtttggcccatggcacagccagcttctctgaccagtaatccggggtgacttgagggtctgcaaaggcatagaactccccagtgttttccacctcattctcccagattgagctcccttccaaaggatcgttcctctcattgcacaggccatattacaaagggtttcctgctcaagtgatgttttggtaagaacttcgctgagttccactgtggattacagtttgtatggactactactgtaaattatagcttgtttggagggatattagtcattattttattcatgacaggtagactacaattcgaacttagggttacctcagtctttagccattactgcttatttcttttccccaagtcacaaaaaacttgtaagctgctgggttaaagcagaggccacctgtcagatctaccctacccttatttggttacatggcacctgagagtttcactcagaccagggatcttccttaggagggtcaaagtgcagatcagaccatgcaggtaaggtgaaccagctgcacggaccaggttcccgcaaaacattgccagctagtgaggcataatttgctcaaagtatagaaacagcccacctgtgcccactttgaccattggtgaggatagatataaaatcacttcttccaacgaagcctaggtgaaaatctatttataaatggaccacaactctggggtgtcgtttttgtgctgtgacttcctaattattgctaaagaactactgtttagttggtaatggtgtaaaattacattcagctccttcttgtcatataaaaggaatttggagggtgtcgcttaaaattttattccacctgtacatttgtcactttaaaattaaaattgagctggtatgagagataaaaaaaaaaaaaaaaaaaa

SEQ ID NO: 5824 - DNA, 130 bp, Homo sapiens
taaaaattaagagatctgaatttgaaccagccctctgagtctgggcttggcaaacactgagcctgagggtcaaaccctgcgtgctatttcccttttacaaataagctaaagggaatctaggccagatgta

SEQ ID NO: 5825 - DNA, 815 bp, Homo sapiens
gtctgtattatataagaaaagaactgataaatatttataaaatgacaaacttggaccacaggctttcttgaccttgtacagtatagtaaaaataccctttacttctgacattaaggtcacgtcctatagtttgggggctcttttacttcaaaggtgtgtttctgccctcttttggttgtatcaaatttatttgaaaattgttttgtgctgtactttatgacttgtttccctatggtggtaaagaatgatgccatagtcagttttattgacattgttagatgaaagaaaagtagctgtcaacaagggggaaagtgaaattgagcaattcactgtttcaggatacttgaggatctttagtgtactgctgactctttttcttgttttgtctgccattcttgaaagtgcatcttgagagcccccatttgttgtgtagagatatagcagctgaagcaggacttcattccagatagctgtgtgcatttatgtcatgccaattactataacatttccaaagtatgaaaggtctttcaggcttatgcatgatattgtgggtgacttcatgccccagcctttctccccagcatacagtgagctgccttttggggagcaatgccaatgataaggagcatacgtgcatgttttccgtactttcagaatagagtgccttagctaggccagagctccgtattgtgtttctgctgaccaaagttgcatacacctgtaagaagtgtctttttaggttatggtattaaaaaagtcgtttcaggcttatcagataataattctcccaaaatttgaggggggcatgggataaa

SEQ ID NO: 5826 - DNA, 752 bp, Homo sapiens
gcggcacgagttcaataccctgactggcacttgaattggttcctgcctgagttactccttctattctcccttctctacactccatcacttccaggagaacatgagctccaaagtctgccagctgctttaactttcctttcagaagtcgcagagtgcagccttctttgtaaataaggtcaaggactcacaacccccacatttgcaaacttttccaaagctgtccttgacagagttccaagtccttggtgtcctggtggggctgtgtgagagtgcaagtcaagaagacctgaccttgaattctggctctatcaccctggggcgaatagtagctcctaccttctaggttgtgtgagaattaaaagagataatgcatattaaaggcaaaccacagtacctggcttatagtaagcactcaacaaaccttagcttgaacaaaacgaagcagctttaaaaagcatcaggagagcagaggaaaacccctttctccatgtgccagtttctccttggtcccctccaggtctgagacatcttccagggacttcgccaatgctggtttttcttggcgtgctctcaagtgatgactcttaaatgttaactttaggtgaggttttttccttggttgttttgtgtatattttttaaggtatggtttaaatggtaaaaattgtttatgtgactacaaaggatatttcattctgagacttggaagtataggttaaatagatgccccaagtagattttcaattattcagc

SEQ ID NO: 5827 - DNA, 696 bp, Homo sapiens
ccttaaacccccaggccccaagaaattgcgaggccctcatccgcttttttgaacagcgagcagcgggacctagcgctgcagagacacaagcaccacatggcgtccgctatattgaggtgtataaagcggacaggggaggagtttgtaaagattgcagggggcacatcactagaggtggctcgtttcttgtcacgggaagaccaagtgagtctgcggctgcggggactgcccttctcggctgggccaacggacgtgcttggcttcctggggccagagtgcccagtgactgggggtaccgaggggctgctctttgtgcgccatcctgatggccggccgactggtgatgccttcgccctctttgcttgtgaggagctggcacaggctgcactgcgcaggcacaagggcatgctgggtaagcgatacattgaactcttccggagcactgcagccgaagtgcagcaggtcttgaaccgctatgcatccggcccactccttcctacactgactgccccactgctgcccatccccttcccactggcacctgggactgggagggactgtgtacgcctccgaggcctgccctacacggccaccattgaagacatcctgagctttctgggggaggcagcagctgacattcggccccacggtgtacacatggtgctcaaccagcagggccggccatcgggcgatgcc

SEQ ID NO: 5828 - DNA, 392 bp, Homo sapiens
  misc_feature (1)...(392): n = a,t,c or g
tagtgctggaacagcctgaaaaattcagctgngtctcaatttttttccctcatacatttttctattctaatatttaatatttaacatgtaatatttttctaattagctttagattattagaattctgatttatggcttgtaggaggacacatcttctttcttccaaacattttataacatgtgaatactagagaaatttcattaggacacattaggacacattatttttcctgtatgttcattttctgaggtcaaagccttacttttcgtccccaggtttctccgaaagaactgtagtgtctggatttgttggcgtatcccaggatctaaccttggatttttgaactctctcctcattttcagtgctcgttggcctccaagcgcttgcatag

SEQ ID NO: 5829 - DNA, 967 bp, Homo sapiens
tttttttttttttaatatagaacagtcaggttttattacttttaagtaataaagagccttttccttgcttttcttttttccctttttttcttttcttttttcttttcttacaacatacattaagtcgtgaatcagatgttaggggatgtggagatggaaggaaaattggtgacatcacaatatttttacaactttacaacaaatataaatctgagtttgttgcatctaccagtgtctagcaagggtggaaagcaaaggcacactcgggtttatgggaccctcccccccacacacagtggggaaaaaaactggggagaaatacttaaatgcagaagacccagctcaatacatgtgggtattttagggttaacaccagaagtgatgggttgtgggggtgtaggaatgtggatgtaagttttgacacaggtctccttaacagctgaggcagtgatgccctacaaacactggacaagacagccgcttacgtcaatgatgggtgctgcactgccagtactctcgggagtcaagcatgggaaagaagggggcagggggatacagaccccatcaccttcctaatttctgcatttctagagaaaattcaaggaagaaaacaatatttcaggttctaggaaatacttcagggtttcaggagacagagttcacaggatgtgaacatggattccattacaaaagccaaaaaaaaaaaaagtaaaaacaacaacaaccacctactcctaaacaacagcaaaactaatggacttttggaacaaagggctctcacccaccctcagctaagtactcaggtctgaaggcaaccacactgattatggaggctccactttttcactatccaactcaaaactgtcattgtcagtctttttttgaattctttttaaagacaaaactaaacccagaagatcgaactggaaataaaagcagacaaagagaccaccaaatatactgttta

SEQ ID NO: 5830 - DNA, 403 bp, Homo sapiens
  misc_feature (1)...(403): n = a,t,c or g
ggggagacctgagttgggaggattgcttgtgtaacatttagtacttaacccttacgtaattatgaatgcaagttttttgtcctaggtgcaagattatatttatttgagagtatcaggtgaacaagtttacatttaaaggcgagaattgtgttaagcatttggtattgacattatagttttagtaaaaccatcaagttatctcgatagagtttgaaactaagctctttggtggactgctactgtttattaagtaggtatcacatttctatagcaagacatagttgagttttgtaaatctacttgngngaaaattatttggcttttggcaatctttctgaataganancgtgcntgngcaaattgcnntntggctnttangggggnaaatttngtgaccccctaa

SEQ ID NO: 5831 - DNA, 607 bp, Homo sapiens
gccgaggagtgggggtgaccttggggttcctaatcctacgtgaccctcctcttctcttctctgcaggtttgcaatagcaaccataactgccactgtgctccaggctgggctccacccttctgtgacaagccaggctttggtggcagcatggacagtggccctgtgcaggctgaaaaccatgacaccttcctgctggccatgctcctcagcatcctgctgcctctgctcccaggcgccggcctggcctggtgttgctaccgactcccaggagcccatctgcagcgatgcagctggggctgcagacagggaccctgcgtgcagtggccccaaagatggcccacacagggaccaccccctgggcggcgttcaccccacggagttgggccccacagccactggacagtcctggcccctggaccctgagaactctcatgagcccagcagccaccctgagaagcctctgccagcagtctcgcctgacccccaagcagatcaagtccagatgccaagatcctgcctctggtgagaggtagctcctaaaatgaacagatttaaagacaggtggccactgacagccactccaggaacttgaactgcaggggcagag

SEQ ID NO: 5832 - DNA, 438 bp, Homo sapiens
gggaagaaggtagcattgttcccagaagcctgtccccacctgcaccattggtactactgctgagtatttgtgtgttgagtgctgggctgggagcaggaaccagccatggccttgtcctcagggccttggagcttagtggtaggtagtactagttatgagaaaactagccaagttacaggtacattaagacaaagcttccattgttgagagaatcctgcatcatttgcttagatctttacatggcctttacctgctaatcacttgctaacctcccctaactttaagcttttggaagaattacaagggataccactgtgaattgcagcctttgctgatgtagtcgcatgtcctcctccagtctgtggacattctatatctcttgctgtctcctcctcctggcatgataatgttttgtcagttcattcgttacttcgatgt

SEQ ID NO: 5833 - DNA, 595 bp, Homo sapiens
  misc_feature (1)...(595): n = a,t,c or g
gaagtgtacttgtagtttctgtattagtcacctgccgtgcactcacagtaaactacattactcaactgagtattacccagttatacccaatccctgatgaagtattaaaatgttattagttttattaactctctacacttgaatgtgtgttttttaaaatattctgtgtgatgacatgggtagtgtgcataaagtacctctgtgtctgaagtatgatagttgtcttgaggaaaagcacttgtgtgattgaattgtgaggtaaactacctgatttttttttgttgttacatggaagaatgactgacaaatctttaaagtatttacaatatcactccagaaaagaaaacaaatcaaataaatattgactcaaaactctccaagtacatatcaaaatctcaggaagggaaaaaagagtctaaagaacaaaatataacactattttatttcagtcatgttagttcagtttccacagtttgaactgggtatagattaatatctaaaaccaaaaaatgaacatgtgtatagtgatgctgaaaaatgtgcattatttnttatttatattttaggnataataaagttagttattaaagaattt

SEQ ID NO: 5834 - DNA, 1052 bp, Homo sapiens
gagagatagcacgttcattgtagagatttggggattagcaataacacagtcaggtctctagcacatactatgtattcaatgattggtggctaatatttttccttcacaaaatttgggcctactccactggactcctcagggaagaaggagaaagggccaacccctgaagaagcaatacagaaactgaaggagacagagaagatactgatcaagaaacaggaatttttggagcagaagattcaacaggagctacaaacagccaagaagtatgggaccaagaataagagagctgccctacaggctttgcggaggaagaaaagattcgaacagcagctggcacaaactgacgggacattatccaccctggagtttcagcgtgaggccattgagaatgccactaccaatgcagaagtccttcgtaccatggagcttgctgcccaaagcatgaagaaggcctaccaggacatggacattgacaaggtagatgaactgatgactgacatcacggaacaacaggaggtggcccagcagatctcagatgccatttctcggcctatgggctttggagatgatgtggatgaggatgaactgctggaggagctagaggagctggagcaggaggaattggcccaggagttgttaaatgtgggcgacaaggaagaagaaccctcagtcaaattgcctagtgtaccttctactcatctgccggcagggccagctcccaaagtggatgaagatgaagaagcactaaagcagttggctgagtgggtatcctgataaatctgggcttgtcttcctaatgctacctttgttggtcctttcttccttaagtgccaagtgctgagctaaaggaggataactttttggggaagtcatgctgagggtggtagtgtgaccctgcctgaaaaaagggtctcttaccctcccagccctggctcaactctgaagaaggatcttgctacagaaggagcccttgggctcccttctctttgatagcagttataatgcccttgttcccaataaaactgggcagatggaaaaaaaaaaaaaaa

SEQ ID NO: 5835 - DNA, 1169 bp, Homo sapiens
acaaaatgtgtatattaatagctttgcacaaatattttaaagacaaattcagctagtctaagaacttcatgaaaataaaacaggtggataaatacttcatgtgcacaatgcactccatcagacgtcgtcggctgggagaggaggtatgttgatccttggccttgtgaagaatgctatcttctccctaaaggtctgcacttggatgggctctttgtggctctgcccacgcagctggtagatctccttggaggccttcttcagcatcttctcagccgcctgctcatgacggtagtcaagtttggtctgtcttgtctgccgctcggcctcccgcagcaggccacggagccgctcgtcccgaagcacccagggtgggaggtcagtctggccacggagctgggcgtcctccaaaccctgccgcagctcacggagggcgcagagctcctcattcagctgcctctgccgtgttctcgacgcctggagatccagctccaagtccagggaggtgcgggccatgagctcagccagggaagacctgcatgactgcttatagcgaagggttcgtctttccaaagtatttcggacaaagggggacttccggggcagcgttgaactgtcgctgtcactacgataaagtctgcaaacatactggcttcgtgctccaggcgagaatgtctgggaacggacaatcgtgccactccgaacaaaaggcgaccctcgggccccggtgggccgctccttcacgaggctggctgcttcttccagaaagagatcttccgtgttggtttccttatcaaccttaagaggcgagggctgaaatttctcggggctgtaaggccctgcctgagcagcaaatgggtggcccaggatggagtcgatacccatgcaacagggctctgggtacggagggctggtctgggtgcagttgctacagccgctatccaccgagtccgcttgccaactcctgaaggcggacattgcagaagcccaaatggtcaccaaacgggatgtatttcatgctactcttagagcacagtagtagaggtaatgcaatacaacctatttctttccaatgattgaagactgttgcatctctcataaagtaaaagggcgcttctgttttccagggaagatggctcttgaaggactgttcttaagaggggctttctctc

SEQ ID NO: 5836 - DNA, 496 bp, Homo sapiens
gggcggtggcgggcgctggtgaaggagtctcgctgagctcgaggaggtggcgcgatggagggactggaagagaatggaggtgttgtccaagttggagaattgttaccttgcaagatttgtggaagaacattctttccagtagcattaaaaaaacatggacccatttgccagaagactgcaactaaaaaacggaagacttttgattcaagcagacagagagctgaaggaactgatattccaacagtaaaacctctcaaaccgaggccagaaccaccaaagaaaccatctaattggagaaggaaacatgaagaattcattgctaccataagagcagctaaaggccttgatcaggccctcaaagagggtggcaaacttcctcctcctcctccaccttcttatgatcctgattatattcaattgtccatattgtcagaggagattcaatgaaaatgcagctgatagacatataaatttctgtaaagaacaggcagcacgt

SEQ ID NO: 5837 - DNA, 1594 bp, Homo sapiens
ttttttttttttccttaaaaggtaacccctaaacacagctaaaactatgccatcagctgactccaaggtacacacagtcctgtatctggaactactgagtggcaggcatctttctctgcctctgacagtggagtccccatcactgcagagcatagccaaaggagtcaaaggtctcagcgggtcactgccttatcaaccctcaccagtcccttatgttttttaatattttataatcttgacatgacaccaagatgctttaataaaaaagcacctctaactcggtcttgtattcacttaccttgagcctgggacttctctaggctcctgaggcaaaaacaggtagaggggagatggtggaacataaaacacaattttgcttggcacccaccttggcgtctgtccccatgaccaggtctttcaattcgatgattttgtcattgatggaggagcgatatcgtttctcaatgatattatgggttgtccgcctttctccttctttggggggctcaagctgcttgactcccccaggtacctgcttaatgggcactttctcttgccccatcattacaggcattgtggtcagaatggtcccactgctgcccaccagggttggtacttgaagggcagccgtctggataggggtggtgagggcggtgagggccgggttctggaccgcagccataacagggctgccatctgtcttcagtgtggtcaaaacaagggaatctgtcttgatgatctgaggctggaccaggaccgggacctgctgcacctgtggcgcagcaactgtctgcaccgtagccggggcaagggtctgcagcgtgccattggccgtttgtgtcagcacccgctgggcctgtactgtctgcacctgctgctgaatggtgaccggctgtacctgggaggatgtcaccaggctttggacttgaggctgaaggacttgaaagctagtagctgcattctggtatatcaaaggctgctggatgatcctcgtctgcggagtggtgctgaatgttggcgtgatcattaccgtctgttgttgcagctgagtttgaggttgaggctggggctgggggcggggctgaagaataggagttgccctgggtgtggtgggaactgaggtgggagaaaccttgacttgcagagttggagcctgtggggaggccgccgagggagagaaggaaggtaatgtgacctgggtgaatgaccgttgcactgaagggtccacagctccgctgctgctgcccctgccattgctgctgctgctgctgctgccactgctgccgctgctgctaccactaccaccactgccaggaaaggagctacacagctgttctgaaaacaagtcagggaactctcccacttgattactgacaaattgcagcatctcgtcgatgtctcccagggtcagctcgtcgcccagctccgtgagggtctccatggtctccagaccacccagctcgccgctgtcgtccatcgcccggctcagcgcagaagccccccctgccgtcccgctcagggagacgcgggggcggtgccgtcgccaccgcccatgacacccgacaacccccgcccggcaccgcctcaccgacgg

SEQ ID NO: 5838 - DNA, 797 bp, Homo sapiens
ccgcctgcctgctggtgtggggacccggtctttcctcactgccaagtggactcctcctgggggaggccctgacctcctggtgactggagacaatggcgactttacccttcgactagaggatgtgagccaggcccaggctgggacctacacctgccatatccatctgcaggaacagcagctcaatgccactgtcacattggcaatcatcacagtgactcccaaatcctttgggtcacctggatccctggggaagctgctttgtgaggtgactccagtatctggacaagaacgctttgtgtggagctctctggacaccccatcccagaggagtttctcaggaccttggctggaggcacaggaggcccagctcctttcccagccttggcaatgccagctgtaccagggggagaggcttcttggagcagcagtgtacttcacagagctgtctagcccaggtgcccaacgctctgggagagccccaggtgccctcccagcaggccacctcctgctgtttctcacccttggtgtcctttctctgctccttttggtgactggagcctttggctttcacctttggagaagacagtggcgaccaagacgattttctgccttagagcaagggattcaccctcgccaggctcagagcaagatagaggagctggagcaagaaccggagccggagccggagccggaaccggagcccgagcccgagcccgagccggagcagctctgacctggagctgaggcagccagcagatctcagcagcccagtccaaataaacgtcctgtctagcagc

SEQ ID NO: 5839 - DNA, 671 bp, Homo sapiens
tccgccgggcgggccaggggtcgctgtactccctggaggccaccctggaggagccaccctgcaacgaccccatggtgtgccggctccccgtgtccaagaaaaccctgctctgcagcttccaagtcctggatgagctcggaagacacgtgctgctgcggaaggactgtggtcccagtggacaccaaggttccaggtgctggggagcccaagtcagccttcactcagggctcagccatgatttcttctctgtcccaaaaccatccagacaacagaaacgagactttcagctcagtcatttccctgttgaatgaggatcccctgtcccagggacttgcctgtgaagatggcttcaatcttcaagaactttgtcattacctataaccggacatatgagtcaaaggaagaagcccggtggcgcctgtccgtctttgtcaataacatggtgcgagcacagaagatccaggccctggaccgtggcacagctcagtatggagtcaccaagttcagtgatctcacagaggaggagttccgcactatctacctgaatactctcctgagaaaagagcctggcaacaagatgaagcaagccaagtctgtgggtgacctcgccccacctgaatgggactggaggagtaagggggctgtcacaaaagtcaaagaccagggcatgt

SEQ ID NO: 5840 - DNA, 1309 bp, Homo sapiens
ttttttttttgtgtttgtataaaagatatttacttcaattatcacacctagggtgctagtgaataataatacatggtgtgagtctcatacagtgatattgcttctccgtattatatagggaccgttgtacagtgctgagaacaaacatcgtatggctaaccaaagacagagggacaacaccaaggggccgacgggtgcctcccccacccccacgccagccaggtcaactttgactcttaatgtagaaaaacaaatagcaagaaataaaatgttaccagagagatgtcacacagcaacacaccagaggcatctcaaagcgatttgtacaaaaaaaaaaaaaaaagacgactttttttttttccttttttcttttttggtcaattgggtctctgtgaggattggagaaaaaaaatctgtgattgtgaggatgaacaaacaagctctagaaagatctaagacttggtgcgttacagaaaatataaaatactgctaaaatgtaagacgtgacaaaacgctagagtgggggtggggtggggggagctgagcttatagagagttttccggaagattccgccaccctgtgagtgcgtcttgtgctgttagtagtctggacaggagcgtggtgctacccgctctcaaggcaagcagcaaagagttattgcacaaacgcaaagaactaggtctcttattcaatgcaaagggatgtggggaaaaccaccttctttttacccccagcttttattttataacaagctattctccaatgttttaagaattttgggtgaattctcacatctccagaatacacgggattttttttttccaagaggtctcagatgggggtacgtgagatgcccgttttctcaagggaagaggcagaagatggtttgagagagagaaatgcatagactaattagagaaaaatgaaaaaaaaaaaggcttctggggagatggggaccattgtttcggtggagggtttctttcaaagagagaacaaaatcagggcccccggcaatcttggagaaggggaggtgatgatatggaaagagatgctcttcccagcctaccttggggtgagcagggcccttgccttggcctggggtaagtttccttctgctgggcccatgggatcaaggcagggcgcctcaccttcacacctgattggcaacaactgggtgtcctgctggctgagcttggggccacagcaagcaatctccacacccaaccttcctccacgttgaaccacctataggggaaaggggccctctgcctatgatctcctaggtgagccctcaagccacagcctggt

SEQ ID NO: 5841 - DNA, 294 bp, Homo sapiens
  misc_feature (1)...(294): n = a,t,c or g
gcgaatctgtgtttgaaaatccatcatcattaaattacaaagtgattcctattttaaaaggtaggatccttcagtgtctgttagatgcaagttaccgtggcaacctaatagcaaactgcaaatcccaggtcatgctcagcaaataaaaaacattctcagcaaataaaaaacatcgtcatcatgtagtgtttgggtgtactgtcttctatatagaatctcacattccttgtgagaagcgtatcacattttccctagtgcgttatccattagcctatgtcctgagttgcttgntaa

SEQ ID NO: 5842 - DNA, 470 bp, Homo sapiens
gcggcacgagcaaaaggctgaccatctacacctaatggtgacacaaaacacaccttaaatatttagaaagatctataatggtcttacctacaaagccttgtgctaatttttttttaattttcaggctgaataattatcagaacttaattattaaggaataacagtaacagctcagctaatatgtaacattcactgtgtgccaggcattgctcctctaagtgcttatatttaactacattaactattttgcagcaataaaaaacacatctgtcataatatgacaaagctgctgttttcagaacaaaaaaactttcaataaaaagttcatgattttaaaaaattaaggtaatgttcattaaaaatgcttatactttaaaactcaccgttttctgaaggtattttgcccaatgtacaagcagagcaggttgaaggccatgtttttcctgggctcttagagtgtttatttcatg

SEQ ID NO: 5843 - DNA, 443 bp, Homo sapiens
tttttttttcaactttttgcaaagcagcatagcaacaatcgtgattgtagcacttgcctgaggttgtggtcacaaccaacgtagtaaacatcatttgcatatcagtaagaaaaagaaaacaggaggagatgagttcttacaaaacaaagcagattctagagatttcactgtgtctgcattgctccttccacgcaagttctcccttagctgaccgcaatcttgttttcttccaggaagtgaggaaactggtgtttgggaacgccgtcagtagcacttggtttttccacatctgcactgatacccgactgggagccatccatcttggagacagtggcgttattcacaacggaggtggcccccaaggaaaccgggagggtaggaacctaccccactctggattcacagagatctcattggtcttcacggccagaccgccattgagc

SEQ ID NO: 5844 - DNA, 237 bp, Homo sapiens
aaaagctatggaaggaaaatggataacagatcagttgagatggaaaataatcccctgcaagatgaggattgacagttaaaacaaacaatatgtaaaggagatgaggaaatggagacaaattccgaaggccttctcaaaaccaaggaaaagaatcagaagcttcacagtcgagcacaacggcaccaagagaaaaggagagattcagaggcataatcgcaaactttggtaccctgtagg

SEQ ID NO: 5845 - DNA, 441 bp, Homo sapiens
  misc_feature (1)...(441): n = a,t,c or g
caggcatattgggattgccaataaagatgtcacttgtttccacgttggggttctccttattgactcatgagcaccacaatagagtctatacacagacttagtttggggttcttggttgggatttcagcattagaaatagatgcagcactcatggaaaaacatcatgagtgcatctgagccaattttagatgatttcattaattctgcataccttctctttgacccattgatgcaggcccacatctatccagccccaactgtcttatttgcctttaacccattctggaattacccagtatgacttatattatttctatgcacatgagaatccaaggttttagaaacctggcatgcttataactactggctgacagtccctcatagtcaggggcttaaagcgccaaaatacacgggaaacatangagaaaaaggtcccccagt

SEQ ID NO: 5846 - DNA, 843 bp, Homo sapiens
ccttctcaaggattactcttaatctttaatggcagctgcattctcaacttaatacaacattcaacaaataaaaaagacaactgcttctgagcccaatattatacattaggtaaggaacacgatactcctcattactgttctgtctcaggatataagtttgcaaattcttctcctgatctcagtcaacataaaagcagaattacagtttagagtgggcaatgagaaagatggaatcaaaatagacacagggaaggccataaagagttcgcaagcataaatgcctgatagcaaaaacgatcacagaagattccaaaaccacaatcctgcacaaaggccatctcaatcttacacaaaaaatacttctgcaatgcctgccgagcacctgcctgtccaacctgggactggtgtcacctttgttactgatccttgtagtcaaaaataattatctcaaaacaattatgtaaccctcctcatttttcctttaaagacctttgtcttcctctatctcccaggatacacacagttaactatcgcatgcattttctcattgcagtgctctattcctgaataaatgccattttcttttagagagcctctctctgttcgttatttaagttgacagcaacaaacagtttaggtttttggcaacaaatcaccaatatttacttaaaaacaaacaaaacacttacaacacaggtaggaacaacaggttattttggaaagagtttaatatattctctattgttaagtgcaccagatgctggacttctgaaacaacaattatgcttctgcataatagctttttctacatatttctgttcatgttgctccttgtgccgaatt

SEQ ID NO: 5847 - DNA, 400 bp, Homo sapiens
gcccatgatgatgtaagaggaaagaacatttttttgtgattcaccatacatcactttaaacttggtgatgagtttaaatccagtagctaatcccttcctgagactcaaagatcgtgacgctggttggaatttctgactgtgccctttagggcctcctgagtttcaaaaggaggaagtgttcgtgcttgtgtccctgaagttccctgttgcatgagcctgcgacaggacctcacccccaccaccaggcttctatttgggattcacatcagtattagtatccgtaggctacaccaatgttcaggcttctctttttgtttttttacctagaaattgggctcagtggtcttcaacttgaggacgagggtgattttcctaagaaatcagccaaagagggaaggca

SEQ ID NO: 5848 - DNA, 1968 bp, Homo sapiens
tggagatttccatcatggcggcgtccatttcgggctacaccttcagtgctgtgtgtttccacagcgccaacagcaacgcggaccacgaaggatttttactgggagaggtaagacaagaggaaacgtttagcatcagtgactcacaaatcagcaacacagaatttctgcaagtaattcaaatctataaccatcagccttgttcaaaactttttagtttttatgactacgcaagcaaagtgaatgaggagagtttggacaggattcttaaagatcggagaaagaaagtcattgggtggtacagattccggcgcaatacgcagcagcagatgtcctacagagagcaggttcttcacaagcagctcacccgcatcctcgggggtgcccgacctcgtctttcttctcttcagcttcatctccactgccaacaattccactcacgctttagaatatgtgctcttcagaccaaatagaaggtataatcagaggatatcactcgctattcccaatctaggaaatactagccagcaagagtacaaagtgtcttcagtgccaaatacttctcagagttatgccaaagtgattaaagaacatggtactgacttttttgacaaggatggagtaatgaaagacatcagggcgatttatcaggtttataatgcacttcaggagaaagttcaggcagtgtgtgcagatgttgaaaagagtgagcgagttgttgaatcttgtcaggcagaagtgaacaaattaagaagacaaatcactcagaggaaaaatgaaaaggaacaagaaagaagattgcagcaggcagtgttaagcagacagatgccgtctgaaagcttggacccagcgttcagtcctcggatgccgtcctctgggtttgcagctgaaggcagaagtacacttggagatgcagaggcctcggatcctcctcccccttactctgattttcacccaaacaatcaagaaagtactttgagccactctcgcatggaaaggagtgtctttatgcctcgacctcaagctgtggggctcttccaattatgcttccaccagtgccggactgaagtatcctggaagtggggctgaccttcctcctccccaaagagcagctggagacagtggtgaggattcagacgacagtgattatgaaaatttgattgaccctacagagccttctaatagtgaatactcacattcaaaggattctcgacccatggcacatcccgacgaggaccccaggaacactcagacctcccagatttaactaaacaaaagaaactctccacctagcactgtttttcttcattgcttactgagagggtttttgagaacttaatctggggggagaactgctttctcagataccttaactcccgagaagagagttccttgtgcacagaacttgtgggagcctccatccgctgctctttacctttggatacagtgtgcaagtttcatgacagaatcattaagataatcaaattgtcctaattctggtgcgattcatggatatactggtaaatttaggcaaagtgaaacttatcagcgtagtttctgttctttaaaataaattggaaattagagactaagcacaattagtctataaatgttctataaatcaaaaacttacctcttgcactatcatgccttgaaatttactttttcaaagggaaacaagtttagcagcagccttcaaagaacttctttctatgatgagcccaaattcatctttgccagaaaagaaattttgataattccaagaagcctgattagaacaaatcagatataccttctcttgtctgcatgactttgtgagataaaagagagggcttccaacttttttctactagcttgatatgtattatcacttaaaatggttgcctttaaaaaaaaaaagtagagatactaattaccagtaagtaatcatccaaataaatacgtcataaaataaattaattattttttctt

SEQ ID NO: 5849 - DNA, 307 bp, Homo sapiens
  misc_feature (1)...(307): n = a,t,c or g
atataataagcaaaaggtaacaacaaccaagctggcaatttggttgatgaatgaataaacaaaatgtgctgtatccatacagtggaagtgttggtgcctactacatgtggatggaccttggaaacatcacgctaagtgagagagagccttggtattgtctcatnnnnnnnnnnnnnnnnnnnnnnnnnnnnnnnnnnnnnnnnnnnnacaagcaatggatatggttgggtgcagatgaaataatgcagccaggggcaggagggatgtctcattgacnatgactgtttgtggatgccaagcaggggtg

SEQ ID NO: 5850 - DNA, 435 bp, Homo sapiens
  misc_feature (1)...(435): n = a,t,c or g
atttcggcatgagcataatacagatttcactcctggtctcatcaccagtatatgaattgttcttactgcattttaaaaaaaacatgttttaatataagcaaacaggtcattctttgatattgcatagctaacccaaggcatggttattattcctttgttgtgttttttttttccaacaacctttgtaaattgcgcaaaatacggaacaatgcacaaatttgcgtgtaatctttgcataggggccatgctaatctatatcatccaatttttagtatatgtgctgctgaagggggcaccgttattcctttgggacatgggctggcacaaactcacaaaccactggaattggtacttatgggtggcagctctagggctgttatttggcaacagtgctagggggtaaattattcttccccggggggtctttcaggncca

SEQ ID NO: 5851 - DNA, 1676 bp, Homo sapiens
gtttcagaaagtttttgtcatgccaaacatggatgatgtttatatcactataatgcactcagccatggaccctcgctctacttcctgcctcctgaaagacccacctgtgaggctgctgatcagcatgatgggtgatgtcagatgttccccatattgtgacatcgagctggatgtgtggggttcttggccgccatctgtactgtaggcactggcctctgtgccacagctactgtttcttaaaggactgcttctgccctctgcctgccagtgcccattccactgtgaggtgtcattccctgcatctagtgacaactgtctggattgcctgctgcaaacgtttgatttggcaaaggagaccatggaagaatcatggtggatccagaagttatacgtgacccacaccatggcttttaaaagtctacccatgtttgtggcagcaaatgagcacagtaagagcaaagctgaacaacttgcctcctctactcctccaaagcttttcttcaggcagccggtgcacagtggactttttcacttctatactttgtatgcggccttccacacttccagagaatgtcagtgtgcaatgtgtctggagggtggggagaggaattctgtgagccttttcatttcggtgacagaagagatgggcagagcaacttattttccacattaaattgtgcatttgggaagcaagtagccatagtacacacacaacacgctatcagcttgggtaaggacagtgggatttatgtgaacatcaggcaaagccatgagatcaaaccatcccaagcctttcaccaatgaggtacaaccacctgggggcctagctaatcttgaatgttttcctgagacaggagcgtatgtgaaaacatcaaacactgcacatgacaggatgggtcctctcatacagatgggatggggttagaaagccagagccagtttttccatctggcgtttcctgtgtcctccaggtttatatgggaatcgaaacagtttgttaatctgattgggagagttccatgggcagatttcccttcctgaaggccaaaacggagaactgctctctttaattatttcaagagtcaagaccaaaagtttgctcagcatcacactacatctcaaaattaatgttgccaacttaattttgtgcatttgtgtcagaatgtttagtttacaaggttgggggctctctttgcttcgagaagtaaacctaataccatttttttattgtttaaagctgcattcaacgtcaaaattaccttgggtaacttttgataacttacatgtgtggacaaagctaatagtggttttttaaacagcaccttgcctgaacatgactttaaagaaattaatatattgaaaacatgtttgaacccttattttaattgcaccattaaaacatttgacttaaattgtttgaccattccagttggtgtactgttctgatttttcgttgtgtaggccgatctgcctgtcagagtccacgtgtcctggtcactggtctttataattgttgtgcaataactaaaggctaaggactagatgcactatcgtgtaaagagattacacatgactgtaccatgttgcacttaatcaaatagtatgtggggatttaaaatcgcttgcattgtttcacaaaataaatatctcaatgtcaaatactaaaaaaaaaaaaa

SEQ ID NO: 5852 - DNA, 401 bp, Homo sapiens
ggagctagcaccatgagcttcaataccctgcccccatctgactggaccagtgatgggcacctggagcaaaggcagccagcccaacagggacttatgttgggaatctgaatgagaaatatggaagttccaaagaactggcaataggagtagaagcctaaagcttgcaagatagtaagaggcgtaaagaaccatgatgggccaaagttccaagggcgcaatagctataagaccagggaagccaactgcactgttgggtgcaacaccctcaggactttgtgtgtgtgtgtgtgtgtcctttttctctccagcttcatcactggataggaagatttcaccagcactcccccagggtttgccttttttccagcctcttgtttaaaaagttgtttccctgtgtttaa

SEQ ID NO: 5853 - DNA, 1227 bp, Homo sapiens
tttttttttttcacaaaaaaactgtatgttctttattgtcctaaaattgcatagtacttttgattgtgcacgcttttaaatagagagcagagttgcccacttgaaactactctcttgcatgggatatttcaagctgttttactatgggcaaggagcagggaccaaaatgctgccagggcttaaaaagagccgtgatcagattaaacagaagttggagaagtggagggatgtgggccacacacgagaagaaaatgttgaaggaggctgagatttcaactggacttataggaggcataggtggatgcaggaggggctccacggatgtcagagaacaggattcaggagcagcctagagaggaaagaaaaggagaaaggagtccagagggccaatgccttgtgctcacatctgagatgaatgccacctgccaggagcaagcctggacacagagcatgggtagctaggatgaacagtttggccgttatcacggctacagaaagccacatactagaaaaataacttaaaagctataccagtcgtcattataaatatcttgtctttttaaaactaactctagtgttggttataaaaggttcacagttactctgaagagagctgtatctctattgcacagtagtggagaagtctgctctgatccccatgtgtaaacaatgattcccttctcctctggcgacttcaggacacagagaaacagtatctgctgtaagcaaaagcacttgggtagaaggcacgtggaagctgtcaagctctacaggagcacgcagaacatgtgggatgtccacttctcttcccatgtagcatccctgctgttgggacaggtctggaatcagatgaaaggtggtgatggtcttgtcacggtctcagcctcattccacagttacagacttggccagatttctggggaagtcaacctaaaatgaaagaaagtgactgttcaggaccccaaagatctcagcaacatgctacctctcacagacaattttcagagtacttaaaaacaagagacagatgttcaccatggtcaccaacctagagacctgcgtcttggaggcagattccttagtccagaagcctcatttaaccgtataaggtttagtccctcaataaacatttactgtgcacctgatgtgtgtcatgatctgttaacatgatttaaagaataaggttcatgcttttaaacacaggtaacttggtgtgtactgttaaaa

SEQ ID NO: 5854 - DNA, 429 bp, Homo sapiens
  misc_feature (1)...(429): n = a,t,c or g
gatcaactctgcccatagctttctagaaaaaaaatccttagtgtgatgattagagaaatgaaaaaagagagaggctcaaaggacagtagtaaactgtttatgtcctaaattggtcatcattagcacttatatagtttggtggaaattgctgtgttaaagccaaatttctgtttacaaaaagaaattgatgctagtagagaatgaattgtactgcatatattcaagatatgaggagtcactgtggtaccagtaatattaccatgttgaaaaaaaattagcagtaaagatatacattgaacatttaacagaattttgctattactttgataatatcttaataaagaacatngaaacatagggctgatagaagaagtgttatatgtaattgcccactggctaagtcatatagtacaaaattacactgaatcc

SEQ ID NO: 5855 - DNA, 958 bp, Homo sapiens
gggagcgagtccactggtacacttgtcccaacggccatccttgctccgtgggagagtgtggcaggccgatggaacagagcatctgcattgactgccatgcgccgattggaggcattgaccacaaacctcgggacggctttcatctggtcaaagacaaggcagacagaacgcagaccggccatgtgctgggcaacccgcagcggagagacgtggtgacatgtgaccgagggctgcccccagtggtcttcctccttatccggctactcactcacttggctctgcttctgggagcgtcccagagttcccaggctctgataaacatcattaagcctccagtgagggatccaaaaggctttctgcagcagcacatcctgaaggacctggagcagttggccaagatgctgggacacagtgccgacgagaccatcggcgtggtccacctcgtcctgcgcagggttctccaagagcagcaccagctctctagcagaagtgaggaaagggccaagggctggccggggatcacacagcacaacggcagcgcaagcaggctcgctgtcttgtggccaccccacacacagccagtctgagctctgtctgtgctgttgctggaaagaatgagagaacacacagagagaaaaccgtgtctagggaaggcgatgcctggggctggaaaaaggaagcactctgcttgcccagaggctggaaggagctgctctgttccctccattcacccctgcctggctaagcactgcggtattcgggagcgtctgcacgcaagtgttcagtgtgcatatatggggagtcttcagttccgaagtcagccacgtaggtcattcccctaccatgctgggagcacgtgtcgtccacacagagcgtgcgtgtcaaaggatcaatcaccatcacagttgtgtgctgatttattaaatgtttatatgtccacagttatgttaaaaaaaaa

SEQ ID NO: 5856 - DNA, 193 bp, Homo sapiens
gcatagggttagattttttttatccttttctagttcagttaattcatcctgttgaattgcaccatcgtgaaaagatgggaaaaatcgtgatgatgggtaaggggaaaacttcccggaaggcaatggggcaaggaaaaagaaagcctatgggaaatggctgtgctcccaacatagctttgcagatgatgtgggg

SEQ ID NO: 5857 - DNA, 443 bp, Homo sapiens
tttgcgagtaacagtgagctttattttcatgtcaccgctctaggttcattcacctgttgccaacaacatgagggagtttctccacagcccttgattcctgaattgttcaacaaatcaacagtcaccaatacattgacttaaggagtaaacaagcagcttttctctacacaccaccgggcaccccaggaaggcgcagctccctgctccacccccgcctcttggtgcctgtatccagcagaaggacccagcaggaggctgaatccaagcactgctctcaggccactctatcctcatccctggatcctccagggaacaagataaaaaaaaaaaaatcctgttttcctgctttccaaaatggagggccttaacatcaaccaaagttacaaaacaaaaacaaaacacaggagctagctgggcgcggtggctcgcgatctagaacttag

SEQ ID NO: 5858 - DNA, 401 bp, Homo sapiens
gtaaatttcctctacattatcaaagatctttttattttgaataccgttttccaaatttcattttttctttgactcataaaatctagtgttttgaaaacttcttatatggagctttcttttgatttttaatatgaaataactactatgtatttgtttgagacctcctgtgtatctcgttctgtactaggatgctatgggtaggactggaaagggaaatgtggacattttctaccgggccctcaaaggaattaggtcatttaggtggggagaaaaggtagttgatatgatgatagaaaaccaattgtaagtattaagggatattcaatgacagttggatgtctttgatttttttccattcagtcctaatttcatgtattccttcatgctatcatattggataa

SEQ ID NO: 5859 - DNA, 682 bp, Homo sapiens
ttttttttttaaacaaagaatggctacttcataggcagagcagccacttttggctaatttttaacatccaaagctaataaataatcaagaagaaatagagaacattaacaaaataaattatgttctatttgggaatacctaatatcagatactaacaagtacagtgataagaataaaaaagataataatcacacataccttctaggttagtagaaaagttaggaaaagatattaaatttaaagaaacaatattttgcatgcacacaaaaaacaaagaacttcgctcatgatgtggaaatcatgacccagcagcaatccgtcttcctggtccagatcactggaaggcccgggtggggcccccctgggggcagccacggcagaacctgctggacttaactcgccagaaaaatcaccacccagttcaggaagtttgcagagggaaacctaccaatgggtccacggatatgactttccctggctcctggagggctccctctggaagaggcttgcagcattccagtcatagaatgtgggtgagcactacagcgggcagcctcccacacctgcttggctgtaggcccaggaagcccccggaggcccctctggctgaagagatcagactcagcttggagccctggagttgatgcagcaagaccatgtttaatgaacaccaaagctggcc

SEQ ID NO: 5860 - DNA, 387 bp, Homo sapiens
ggtccaaacactgtgtatcaacatttgccaaagaagcaagagggaaagacattacttaatacgacaattctgacaagacatgtatccagtatttttcaacaatgcacacatcaaatatttctgataagtgcaaaaaaagcaaaaagaagaaaaataggaaaaaaaattccacacaggcaaatctactgccttgttagtccaagtaacaaaccaatcaattatattctatccaaacctgacaagcaaaaggcaactttttgcagtgacaagcttatagaaaggacaatatagctgttctcctttactttatgtactctatcgagagtttaatccacatttttaaaatcacacttataaaagaggtttccgggattgcctcccgaggac

SEQ ID NO: 5861 - DNA, 1809 bp, Homo sapiens
tttttttttttttttttacattttaaaaaattatctttatttaggtttctgattcagcacatgtatcaaagactaatcaacataaaggagtaaataagacattaattgaaagtcttacatctctctaaactctgaccaagaatgtcaagattgccactattaccagaactccaacctagtcaagttgtagacaagctatcatgaacaacatacagtgtgcacagatatgcagaggcaaaaggcatgctagcgcttggctctcctcttttccttgttgacatctttctgttggacagtccactttcgctttccaggctaagttccaaatcaagtccaaagaaggctcagggtcaacctgaccagatactcttctggaggaatgcattcttaaactgttgtgcctgcaactttgtttttgccaggatgaagttcagaccgagatgtacaatacaatctagatgacggtgcagactaagtcaagaactaaagttgtgcagtaacccgagttaaggcatgaatgcagacacacacatgcacacacacagcacccatgctatcaagacacaggattttttcagttgcctcatgagaggcaacctgggcttggcagttaatcagaactgcctgagcattccagaaaatgccccccacgactttatgctaacagctgtgtgtatgttttaatcaaaaaattaaagaagaaaaaaaaaccctaaaaaacaaagaaaaaaacaaacaaaaaatcaccaaaaacctagaaaccccttaatctcttacaatggctcttgagcatggaactcatgtagcagcatcaatggctggctctttaacaatttggaaataaaaggttgttttactatgtatttctttggtagtcatcactacaaagttttcagtgttggttacctataagacaagtactagacagaagatcaagttacacagaaatatttcttctgtactgataagatacaaatattgagctctcaaagcacaagttactatgctttttcttgccttattgggcattctctaaaagcaaggctttgtgcaggaaaagttcatgtctacctaacaaagggtgatacatgttctattttcctacaagtgaacaattaacaaaaattcacattatcaattatttctggttgaatctgttagaagccaattacaaagggacagtagcacttggtgtcaaagccactttctggtcacacattcattccatggttgctagtcagtatctcaggagctcagaatttaaaactcctttcagtcaacgaaggagtaagttcaattaaaggcttccactgtctgccaaatttctagaattctgtctagagtgcctagcatgcttgatgagagaaagcagttcagagcccaaagaggtgtcaggtattaggtaagttaatttggttttgtataaaaggcatggtaatctggcaacagagtacttatcctattagcagcacagtggtagccaagggtctctgtctgcaagacaggaaaatgaagctactgaagcccctgttgctcccacctgcctgcaggatggctactgattttacaaaggccttctgggagccaatccagggctcacctgggagagtgggtaacagaatggcaggaaccatgttcagcccccatgagaagtgcccgactgagggaagtcagcttcccataggtgagggggctgttgccattatgggctcagaatctaaatcttactgatccctagtagtaagaccatttgccagaaattggttccaagcaggtactacccaagtgttacaggctctgcagtcgacg

SEQ ID NO: 5862 - DNA, 456 bp, Homo sapiens
  misc_feature (1)...(456): n = a,t,c or g
gaccggtaccgtggtggaagcgcgccctgggctgccgggggcgcggccgcggtggcacttggacccgaggaggcggcaggtgagaggttccggagctttccaggcgctctggggtccagcaggagctggtgcccgggccggttgggtctcaggcctgagaagaacgcagacgtctcgcctcatcgtcgctctgtggctttaccggcgtgagactacatttcccgccggccctcgcggcgtgcgctttctggcgccccctttcttgctttccagccttcatagcccagggtgcatgggaccccttaagctctaaccgttcgcaggactctgcccttccccaagagaggaaccagaaggaggacctatcagcccttgaaattctaaaagtcatgtcccttgggtcagaattgttcagggatgtggccatagtctttcccaagaagaatggcngnggtg

SEQ ID NO: 5863 - DNA, 1355 bp, Homo sapiens
gaaattgtaagtaaaattacttttattttcataaataaaaagacaacccattatacacttttagttgaagtaacatgttagttgtcactgcctagtatgaaatccatgtaatagttaacaaacagttacacctctctataaccttcatgcaacttctatacatttgataattccccaaaatttccaacatttcaaaaaacattatatataatgggatactttagtcacaaagtgtcaacctttgctgagtcaacaaaatatttatatgctcatgtcaaagatgcctactgatgtaaagtaaataccagttattgctgcattttacagaagcactgagcatattacattttccatttcgtatatggtagtatcatccccaaaaatgtcaatgtgaaaatttagtaagtagattaataagcacaagtacctaaaagaaacaggtcccacagccacagagtagagagctggcatccaggtacgggtttaaagttttgcccagtaagtggcacacaacaaacagacaagtgattctgtaataaagacaacataaaatacagggagatttaataagtgttttttccatagatattgaaataaaattaaatgtctgtttagttattactccacttattctggaaactgcagcttccaatatcaatattatactgcaagcagtatttagtacttctgtatgttaagaaaaaaacctcactgaatttatgtacctttttttaaggagtgtaaactatgatatatgatttaagtaatcacttatttgaatgcaatattgattcagataggcataatctattcatttttcataatgaaatgtatattcctatttcaacactttatgcagattttacttatttcttacagggactgctgtgtggattcaatggcttatctatgtaagtgtccagcacagtatctggcacatagtaagcttttagtgtatgctacttatttatattaagtgagtcaatctgtcacttataatagaaaaactatctaatgcctcaggagaataatcaaaagataaacctacagatgtgtgacttctgttaaagtattatgcatccactatttcccaaattactaaactaattgtttaaaatgttacaatctatttttaagatcatatttgttctctatgtttttgctatggcctttggcctaaaccaatacaattctgacaggacattatcagaaaaccacataaaaacaatgtacactgaaaatcagggtaacaaaggcatcttactataacttctttaataatgaagtagagagttaccagtgtaattcaggacaacctactcatttaagtttaaagttttttctttacatcatgc

SEQ ID NO: 5864 - DNA, 404 bp, Homo sapiens
gcggcacgagcaacaatcatgtgtaagtgggagggaaaacctctgagtgtagtgtgaagagcacttcctcatagtgtttctgtctgtttatcacagaccatgctgagccactctgaggagtcttctgtttgagccctcggaatttcttgtccctggagtgtgtatactatatgacagttctggcctcagtgtgacttaactggtttggggactttttaggctctactttttctgactctcctcttcaacagaaacaagcttgagtgtttgaatgatcatgtggtactccaccaacaaccagtcattaacgatgtgtccaaaattgctgaaatacttctcacaacttctgtctagcattgtggtcaaactacctgaattcatttttgagctctaccatttactac

SEQ ID NO: 5865 - DNA, 968 bp, Homo sapiens
gcataaatagctgttaaatatgtgactttacagattttgatatgttcagattgtaaaaaatgaatagtttatttcattaattgatgggcagtcaagaatctccctcccttcagtagggctgacacttaggagttaggtcatggttgtggttacttggcatggctaatcagattttgttctggtcagaatttgcccaagatcaatacccagcagaaactggagttaggctataaaaaaccattcatgtttccgagtgatcatttcagtcagcgattcatgttttacagtgtttagttgttgattattagaaaaagtaatattttcttccctttatgattacatcattataaatcaagtccttccatgaacacatttaaggtgtgtggagatgagatgtctgaatccatttggggatgggctgcatttttggggaactctatgcctgtccagtgaagagtgcctaaaacattaattatagatcaaagatgttctgttgagggacaaagcttgatggtcatcaaacacaaggctttgtaaaaatacgaccacctattccacttactggatctgtcaggtgtgtaaaacttctctcgccagttcatcatgcttccatgagccctcaggactgggatttgagccttcctggctcttttatcccttgggggcagacatggaaccatctctgagggaccaggtggatgctgaagctcacccagtcagggcccctctcctagctccttttacactgaaattaatctgaaagctttcatagccaaggctttgcctaggtgctattattccagctgggccaaagagaagtcttgggccagattgggattctcaatggattttatagacataattcccctgcaaacttaaaaaaataaataacccctactttataggactaattgtttgaattgtatctttctctgtatgttaaaccagatttaaaactattttataac

SEQ ID NO: 5866 - DNA, 405 bp, Homo sapiens
attcggcacagagtttacagatggttttatattcatgatctcccttattttctccatttccccaaagaagaagctgggcataaagagtgattttctcagggtctcataatcagtaacggagcagaattcaactacaggacctccctgggaacctgttctctttccttgtcctgatgtgttactcttataggccaatttttgcctttgtgttgtgcctaaatggtgtaattaccccgttttgggaaggtggtattatcccgttttatcttgcggaaactgagggttaagaggaatgttatgattttgtgactatttgtgacagctttttaatattaggtcacttttgaaacctatagcttctctcttctagaccacatggttgagaaaggagaaagagaaaatgat

SEQ ID NO: 5867 - DNA, 1075 bp, Homo sapiens
ttccacaactaacagacttaaaataacagtgtccttcgtattaatatctgtgccattcatttagaattagcagagctaatatggaggggctgaactagtagccacatcttgttcatcacatagactaatagaaaggaggctgtgggctaaagcagaaatggaacttccggatctgaaattagccaatataatgttcttttgtatttgggtatttttcatcttaatttttacagcatatactcttcttaccagtatccttagaatccaaatgtctagataagttgaggacacatacctgcattgttgagcttctctactgggggacgccccggcattattttattcccaagccaggcagaccggcccagacaggccaggctgtggctgggtccagaccaactgctatggtggaaaatgcagcttccaggtcccactaccctgacatttccgtggaaggaagaacctggtggctcgtggaggaaaccagctttctatgagaaaggactgaaggattgcgcaccctgcacaagtacagattgaccaggaaaagacaagtgtcttctgtgtgtcacagggaaagccaggagtggccttctctgcaggccagcaagcctgcagcagcaggtgcccccacgtcaggtgctgactgtccgctgtccgctcctgtagaaggtagggagcacaatacctagggactaagggatgttcgccggttgtggtttgtttttttttttttttccttggttaagaaatcaaattttgcagaatttaatctacaagttgtattatgctttgaaaactcccatcccctccctaagaatccttaaaaaacttgaaatgctcgccaaatgtccccatgggatttttgaccaaaagtaaggtgataactgaagaaatttttagttctttgatcacttcagtgacaatacccattaatgaatcttctccatcccaggatatggaatccagcaccacagtgcacaggtcagggctcggagggagcctctgtgcagatgtgctttctttacagtggctgtaaaaagtttgtatttattatgtataaaatgttgaataa

SEQ ID NO: 5868 - DNA, 248 bp, Homo sapiens
tagatatttgctgtaatgttaacagttaatttatgccctgtaaatgaatattgaatatgaaacactgttacagggaaaactgtatagtctgcacaataaatgctgtataggaaacaagccttactccaaataattttttttgctagttcacacctctgagtagttggctctataggtgtgaagaatctagagaatgtataatttcagtgataaactagattataaagtaagtttaattgctgaaaaga

SEQ ID NO: 5869 - DNA, 449 bp, Homo sapiens
aagcttggcacgaggacattttttaagtaccttaaataaaagaataaaggcatcattataaaactttaattttttttaaaccaaaccaaagggatttaaagttacatatttttaatgtgtattttaatagactgttagtggcactgtccttcatctgagatattaattcaaggccttttcagcttttctccctaaactttctgagtgggcacagaggatccagagtgtttatgtaagcagtaaaagaaagtcctggtatttccaccagaatcccctgcttaacagaaatatgtcccagcatccttatcctgaaactccctgacttagctgccacaaaaagaccctccatgttcctcaaaagccaccacccccatcatgtaactcaggcctgagaaaattgtgtcctatcaaagagaagatgttgtgcaaaataaagtccttttgtgctc

SEQ ID NO: 5870 - DNA, 476 bp, Homo sapiens
  misc_feature (1)...(476): n = a,t,c or g
tgtaatatgagtgaattactcagctctgctgantgaggacttatgttgattatctaacctactgtatggacagtgcagatacagaacacttctatcatcacagcaagtactactggacaaagctgatatagtaagcatggttttcttttcttaggaaaactaaattttatttttattaaaaaatctttccttagttctaaacagattttttttgtgaaagacaagaagatttattaaagttttattaaactatctcttaactcatcacaaaaatgagccctgtaaattcacacatgcttcttggatgagtaatggtgaggccagtaagcccaagaacttaaatgaacattcttatacttcagtttgcattctcagagctggggaactgtctgtaggcacagaaatggaaaagggattttctggtctggtttctgactttaaagttacacatttttaaaaagtactctggaagacac

SEQ ID NO: 5871 - DNA, 397 bp, Homo sapiens
gcaggacactctgcttcccctcttgtagctgaacttaactccactgaggttttctggggcccgagatctcggttcaggggagtccagcaacaaacattagaccagggttggaacggctggcacagtaacatcaatggaaagggacagagtttgagagttcaaacgtgatgcactcagcagccaccgccagcacatcctccacaccgtctcgtgcaggggcccacccatctctgtgtctttccagcacacaacagtcacccacactgggcattccattcagaggtgggagagaggaggacacccctcctggcccaggagcagaggccatcaaggtgtccccggaacttagagtagatacattgccaaaaggtgatatcctcattctcagggattctgg

SEQ ID NO: 5872 - DNA, 616 bp, Homo sapiens
gatttttagctgccatgcagttgataaccccaaaccccactcggagctcgagatgctcagacagtatggaccaaatgtgcctgagcccatccttcagaagcttgtggctgcctttggagagctgaggagtttggctgaccaagggattattaactatccttattctaccagagaagttgtcaacatagtcaaacatttacagaaatttccgactgaaggtctctccagtgtagttcgaaatgtgtttgactttgattcctacaacaatgacatgagggagatattgattaacactttacacaaatacgggatacctatcggagcaaagcctaccagtgtgcagctggcaaaggagtaaggcaaattcagtactcttctgattcttaaatgctgatagttcttgatttatcattccattctacaaaactgagttgctatggaaattactttccatgagtaagcttttcaaatacatgtatatgttgctgtttgctggctgcttttcagttaaatagcattatttataggcctgtaaattgaaaattttgattattatgtatgtcccatgagtagatgtaataaataaagggaaatatttgtttctttaaaaaaaaaa

SEQ ID NO: 5873 - DNA, 416 bp, Homo sapiens
  misc_feature (1)...(416): n = a,t,c or g
gctggaaggtgattgtaccaagtttctgttctctctgagcccagtgtcctcttacctctgctctcttctcttcctgcagatctgcttctcaccttctcaaaggttaaggtttcccacagcacttgagtttgcacagcatcacttcaagagtctgtcctagagtgactcgcttttctcaattccaaattccccagagaaggaccctgattaccctgtcttgggcagcgtccacacccagaaatgagattagagacattcagtactttgaaaactggagaataaatgaatcccaacatgacatgactgagtgaaggtgcagccagcaagtgatggaggactctggagaaactgaggagtaaataagtcccttggtgngctgagatccatcctaaagactgaattctgaaagtcaacaa

SEQ ID NO: 5874 - DNA, 572 bp, Homo sapiens
  misc_feature (1)...(572): n = a,t,c or g
gcggcacgaggaagctctcaaccttgattctgcatagactcggtggattgcccaaggccactcaaccagttaatatcagagccagctctgctgtttgaccagtatattattttcaccatgctgtatctgcttctcagtcaccaaaagcaccagctaaaattgtatatagactgattaggggacttccaacctaagattgtcctggaaacttaattcttatcttggctcatctcttcaaaacagatgcctctttcgttggtgacctcagatacactgttcagaagtactcaaagtattccttttttctcacatttgagagtcactctagcattttaatgagttaagcaagccagccctgcatttccaaacccttcccagaagtctaaccttactttgatctgatgacatggggctttttaaaagattactattttttttgggaggtgggggtctcactatgtttgcccagggttggtanataatgggccatttcacagggcaccatttagggggtggcactaactgnccctgnaactccgggggctcnaaggccanctttcctngcccacaac

SEQ ID NO: 5875 - DNA, 93 bp, Homo sapiens
atgtaatataagctatagtaactatgctgtggatataaattagaatatattcgtatcttttatttgcaataaatgtaaagctgaatcttaaaa

SEQ ID NO: 5876 - DNA, 404 bp, Homo sapiens
  misc_feature (1)...(404): n = a,t,c or g
gtaactattggaattctactgcgagatctagggctccttacccaagtacatatcctgtaagaccagaattgcaaggccagagtttgaattcttatacaaatggagcgtatggtccaacataccccccaggccctggggcaaatactgcctcatactcaggggcttattatgcacctggttatactcagaccagttactccacagaagttccaagtacttaccgttcatctggcaacagcccaactccagtctctcgttggatctatccccagcaggactgtcagactgaagcaccccctcttagggggcaggttccaggatatccgccttcacagaaccctggaatgaccctgcccattatccttatggagatggtaatcgtaatggtncacaatcaggaccga

SEQ ID NO: 5877 - DNA, 256 bp, Homo sapiens
ttttttttttttttatcgatgttataagtaaaggacattgaaaagaccttatttgaggatcttcggtggtttaatatttgatagcaataattagctaagatattgtagaggtgagcctaatacaatgtgttatctgatgtgaaaaacaaaaatatttatagcttaaaacagtaaactttacatactgtatatactactataactttctctcctgaacctaattaggaaaaaataagttattgtacagattttcagc

SEQ ID NO: 5878 - DNA, 1054 bp, Homo sapiens
  misc_feature (1)...(1054): n = a,t,c or g
gagcagagcctactccagcctcccccgtccaatgtatgaaagccccagctgatctgtaagcctgggagcgtgataaatgcttagtagtgcatgccatggagttccagggtggtttattacacggcaatatctagctaaatacatttaacttgctgcagctctctggatccagcctggttaccaggaagacaaaaactgggctccaccaggaaccagtcttctgccttcccaaccatcacctctggctgcatcagcgatctctcccagcgaaatagctgcttggtcttgtgtgaatcctgtactttaacacagtggaccaagtgtcagtcattgaaaatgaccatgagtaaccctgtggactctctgcagcttggttcctttgccccttaacaggtgggtatgaatcgtgtcttcagtgccagggctgaatgagaaagggcattcctttttgaaggaatctgatactaaacacaaagcatgagaaaaatcaggacttgttggagttatatttttaaaatatatattttaacagttatatatattagatataatatataatagtatatataaataannnnnnnnnnnnnnnnnnnnnnnnnnnnnnnnnnnnnnnnnnnnnnnnnnnnnnnnnnnnnnnnnnnnnnnnnnnnnnnnnnnnnnnnnnnnnnnnnnnnnnnnnnnggagttctttacatttattttataatcaatgctgttttattaaatgcggattttattttggattacaggatgtagaatgccatatttttcttagatcatagggcctttcacatttgtaatttggccttgtatgagttaccctgcaatccctttgttttccccataacccttccaaaggaaggccgcaatagaaacacaaagagaaacaaaataattaggattattttttaacttctaaagtttcaaggttttgggctaagtctggnttaggaggcacntttggcctaggccctttccttcccaccaggggggaaagtcttcccttaggacaggnggcgaggggctcctcagagtcagtnccgggntggggtct

SEQ ID NO: 5879 - DNA, 753 bp, Homo sapiens
tttgggaaatgaggcactattttttttttttaaaagacaacttacccacctgagtcctgaaacagtttgtctctccagttttctggcctatactctagttagctctgatccaagtttacaggacaacagccttgctttaagccatgtcctgttgtgggcacgataatagcaactgagctgtcacagcctaccagcaggctggttaacacctccagggtctcttgggctagagcagatttcttaggcagctgactagggactttcagtcattgggaagcctatgaggcctttacatttttggtgtgagatggggaagaaacataaaatgccactttacaacttcaataatagcctgtaatttatatttactgtgtgaatttttagtcctatattttaataatttgtaaattgatctcttattccaagaatcctttgaacttgtagaacatctgggagtccacttccctgtcctcttcctgatccctgctttctggactgtttaaatcctctttgggatggatcagagagtctagagaggccactcataggtccagctgctggcctcctgactctccaaagccttcactggaattgggacatttgctccagccctagctgtgaacatgaccagagacattatttataattcagccatttaagatatacctgtactcaaaaagtcctgtatatttttaaaaagttttatttttcaggtgaacaaaaatacatcctaagaactctgcctaaaaaaaa

SEQ ID NO: 5880 - DNA, 1677 bp, Homo sapiens
  misc_feature (1)...(1677): n = a,t,c or g
gaattccctgaggcgggagaccggtggtctgcaccgtcctggagggagatatgagtggctggactctcagccagccactgggatgtgttcgggctttggaccttgaggccggagagagctcccgagaggaggcggcgccacgttcgttcttctgaggggacggtagatttgggggtttttcctctaggattctcgcgccgtttcctctgaagaaacagaaccagagagggaaggtgacctgaaagtcactgaataatttttttagagctgaacaagaatccaagcctgcaactgcaactgcagagacgagagatctttctgctgtctatactcttggaaagcacatcctaagatctttgcagattatctgtggaaggagaatgcctaaagtcaaacgaagccggaaagcaccccaggatggctgggagttgattgagccaacactggatcaattagatcaaaagatgagagaagctgaaacagaaccgcatgagggaaagaggaaagtggaatctctgtggcccatcttcaggatccaccaccagaaaacccgctacatcttcgacctcttttacaagcggaaagcctacagcagagaactcttagatatatgttataaagaagggctatgcagacaaaaacctgttggcaaaatggaaaaagcaaggtataggaaacttgtgctgcctgcggtgcattcagacacgggacaccaacgttcgggacgaactggcncttgccgccgtgcccaaaagccaacttggaagtgggccgcatcatcgagttgcacacactgtggctgccgtggctgctctggctgaggctgggcgcgctccaccctggactctggacttcgcaggttccttgcctgtcacgccacccccttcctgggagcagcgaagcagtgccccaggcccgaagttggagcacggtctctatggggaaaggcttcgctgtctaatcagctgtgatttgtaaaaataaaatctttaaatctctcgagccccaacgtctcttctttcagagcatcggcctatggaacccggcgggcggcccaggccccagggaccagatgccccagcccccttgtggtgtgtgaaggtgacacacaaaggtagctggagctggaagtccccgtgaaggtgacacgcaaaggtggctggagctgcattggaacctgctgggagaacaggcaccttgggcctagtgtgtgtcctcaccaacacctgtgacacgctgcggctgttcctcagggcctggctcttcccccaggcaggaggtgacaccagctcacttgtcctggggctcccacagagcactgggggccgagcacattgttccagctgtgctcccatcacctgcccccaagggcacatccgtcatcagcctccttgccggtgtcctggtccccctggggcttggtccggaacttctgccaggggtgcggggtttcctctgcgggcatcactgtcagccactgcttgtaataggctcggaagccgtcaatcttctccaggtaggtgttcttcccttggtaccggtcaaaggtgggagggtactgggctgcaaactccagctggcggatgaccacttcgttcaccgggaccctgttctgcttcatgtccttcaagatgctgatgagataggtgtagttcagcttcctgatggccgcgttgc

SEQ ID NO: 5881 - DNA, 338 bp, Homo sapiens
tttgcatgttgagactcttatttgctctgtgataaagaaaatcggaattttctttcatctttttgctcagatctgccgtgtgtggggctaaaagacatggattagatggattccttttcaagttttttttccaactcagtttttgggtgaccttcatctaatacctagacaaattgaaaagtgaaatttgccatctatcattggttcggatcaaatcacacaatcataattaataaatcggacagatttgctttttttttaacgacaaattctttttggccaatgaaccactggcctttatttctaaaaagtgcaggtattccagggaggccctgact

SEQ ID NO: 5882 - DNA, 236 bp, Homo sapiens
gatcgtaccgtgcgcctctggccgctgtacaactacggcgacgggaccagcgagacggccccacgcctcgtctacacccagcaccgcaagagcgtcttcttcgtgggccagcttgaggccccgcagcacgtggtgagctgtgacggggctgtgcacgtctgggaccccttcacagggaagacccttcgcacagtggagccgctggacagccgggtgcccctgactgcggtggctgt

SEQ ID NO: 5883 - DNA, 559 bp, Homo sapiens
gggtgttgggagactcaggtgttgggaaatcttcgttagtccatctcctaatgccaaaaatcaaagtgctgggaaatccatcatggactgtgggctgctcagtggatgtcagagttcatgattacaaagaaggaaccccagaagagaagacctactacatagaattatgggatgttggaggctctgtgggcagtgccagcagcgtgaaaagcacaagagcagtattctacaactccgtaaatggtattattttcgtacacgacttaacaaataagaagtcctcccaaaacttgcgtcgttggtcattggaagctctcaacagggatttggtgccaactggagtcttggtgacaaatggggattatgatcaagaacagtttgctgataaccaaataccactgttggtaatagggactaaactggaccagattcatgaaacaaagcgccatgaagttttaactaggactgctttcctggctgaggatttcaatccagaagaaattaatttggactgcacaaatccacggtacttagctgcaggttcttccaatgctgtcaa

SEQ ID NO: 5884 - DNA, 740 bp, Homo sapiens
attttaaataaagtaggcaacggtatagtaatatccttcccccaagacacagagttaaggcaacttaatatgtttgtatgtaagaggggaaaaaaaggtgacacagatgtaaaccggaaggcccaaggttcttatctttgggcagaggattacatctgggtgctttttattttccatttgctcatcggttttctgaaatttccacagcagactgttaccttggtagtgagaaacaaaatgatacttgatttttcaaagagggtcatttatacctgtccccagcctcttccgcctcccaagtgaaatggggcttgccaggctgattcatttatgttctttcttgttttctaagttagtatattgctcaaaacagcccttgcgagctctaggagctcaggagcagtttggtgtcctcaaagcagccccttcccctaaagctacagcctctgggttaaggacatgtagcagaggtactagtgtgagatgtctgggttttctggtttgttcttggacccacaaagcgcagagagctcccaaacatgttctcaggatgggcgaggatagaaggtgtaagtcttggtgcctatctgcaagtgaaggtgtttttaagacaccatgtgcgtgagcatgtgacccatgtggtttatgatgctgactttttcctctggggaaatgcgaaatacttaaagctcttatctgtctgtactgattttgaaagccaagagcctaagattttgaca

SEQ ID NO: 5885 - DNA, 57 bp, Homo sapiens
aagtgtccaaattcttactccaaaactgaactttgggctgggcgccatggctcacac

SEQ ID NO: 5886 - DNA, 55 bp, Homo sapiens
ctgtgtcccttacccttaagggaagaagccttgccatctaccctcgtgtcccaca

SEQ ID NO: 5887 - DNA, 384 bp, Homo sapiens
gattatcaattcacataaaatgtgaagtatttttattcagcaaacatcttcatcaagaaagccttccttgtttctacccatttcattctactgtccaaggaaacaaggtagttctttgtctcttaagtgcctcaatatttgaaaattaattattccagatagccctagggcagcatagactagtgcagggttcttggacttttttcatcataaattcctcttacaatttaaaaacaaataaataaataaaaagccctctcagctcagaaaaatgcattgtgcacctacatgcaattttgtgttcactttcaggggagttatacatctgaggactctattccgagatataccaactattgatcaaatgtctattacatcctcgtg

SEQ ID NO: 5888 - DNA, 458 bp, Homo sapiens
cagtgccataagtgagaaatgactctcacaactttctcataatgtttaaatttgagcataatgcctttattctgggtgcaagccagagctcctgaccacttggtggcctggttaacacttgtacacaaactcttgttttcttggtcttaccgtttggacctctgaatcatttccttcttgctgataggcttgttcttctggacagccagggaagactaaggaagagaagaaagggttttcagtggacagtgacttaacccagaggtgttgggtgcaagagctggggagaggggagctgctagggcttgggtgcccctaccctgagctgggcaagacttgagtggggggagcaatggacccaaggcaagccaggggttagacttagggggtaaccagggacagcagccttaaggccccttaaggaccctaacacttcttttaggcaaagacttagggct

SEQ ID NO: 5889 - DNA, 559 bp, Homo sapiens
  misc_feature (1)...(559): n = a,t,c or g
ggccaacgaggtcttttataacccggtgcaggaattcaatcgggacctgacatgtgctgtgatcaccgagtttgctcgcattcagcttggggccaaaggaatccagatcaaggttccaggagagaaggacacgcaaaaagtggtcgtggacttgtcagagcaagaggaggaaaaggttgaactgaaagagagtgaaaacctggcctcaggagaccaacctcgcacagcggccgtgggggagatctgtgaggaaggcctgcatgtgctggaaggcctggcagcttcaggcctacgttccattcgatttgccctagaggtgcctgggctcagatctgtggttgcaaacgatgcctccacccgggctgtggatctcatacgccggaatgtccagctcaatgacgtggcccacctggtacagccgagccaagcagatgcccggtatgctgatgtaccagcaccagagngtgtcggagaggtttnacgtcatcgatctngacccctaatggnannccaagccaactttcctgggtngcagctgttnnaggctgttaagttaagg

SEQ ID NO: 5890 - DNA, 2778 bp, Homo sapiens
gcagcgggcggcagctgcggcgcaaccggctccggagctgcctggcgcggccgggcgggcggcgccgctcaggctcgggctccggctgggcccggcgcggcctcggggctgcccatcgcgcgcggcgggccgggccggtgacgccggacgcccatggacgcctctgaggagccgctgccgccggtgatctacaccatggagaacaagcccatcgtcacctgtgctggagatcagaatttatttacctctgtttatccaacgctctctcagcagcttccaagagaaccaatggaatggagaaggtcctatggccgggctccgaagatgattcacctagagtctaactttgttcaattcaaagaggagctgctgcccaaagaaggaaacaaagctctgctcacgtttcccttcctccatatttactggacagagtgctgtgataccgaagtgtataaagctacagtaaaagatgacctcaccaagtggcagaatgttctgaaggctcatagctctgtggactggttaatagtgatagttgaaaatgatgccaagaaaaaaaacaaaaccaacatccttccccgaacctctattgtggacaaaataagaaatgatttttgtaataaacagagtgacaggtgtgttgtgctctccgaccccttgaaggactcttctcgaactcaggaatcctggaatgccttcctgaccaaactcaggacattgcttcttatgtcttttaccaaaaacctaggcaagtttgaggatgacatgagaaccttgagggagaagaggactgagccaggctggagcttttgtgaatatttcatggttcaggaggagcttgcctttgttttcgagatgctgcagcagttcgaggacgccctggtgcagtacgacgaactggacgccctcttctctcagtatgtggtcaacttcggggccggggatggtgccaactggctgacttttttctgccagccagtgaagagctggaacggattgatcctccgaaaacccatagatatggagaagcgggaatcgatccagaggcgagaagccaccctgttagatctgcgcagttacctgttctctcgccagtgcaccttgctgctcttcctgcagaggccgtgggaggtggcccagcgcgccctagagctgctgcacaactgcgtgcaggaactgaagctcttagaagtctctgtcccacctggtgctctggactgctgggtgtttctgagctgtctggaggtgttgcagaggatagaaggctgctgtgaccgggcacagatcgactcaaacattgcccacactgtggggctatggagctatgccacagaaaagttaaagtccttgggctatctatgtggacttgtgtcagagaaaggacctaactcagaagatctcaacaggacagttgaccttttggcaggtttgggagctgagcgaccagaaacagccaacacagctcagagtccttataagaaactgaaagaagcattatcgtcagtggaagcttttgaaaaacactacttagatttgtcccatgccaccattgaaatgtatacaagcattgggaggattcgatctgctaagtttgttggaaaagatctggcagagttttacatgaggaaaaaggctccacaaaaggcagaaatctatcttcaaggagcactgaaaaactacctggctgagggctgggcactccccatcacacacacaaggaagcagctggccgaatgtcaaaagcaccttggacaaattgaaaactacctgcagaccagcagcctcttagccagtgaccaccacctcactgaagaggagcgcaagcacttctgccaggagatacttgactttgccagccagccgtcagacagcccaggtcataagatagtgctacccatgcattcctttgcacaactgcgagatctccattttgatccctccaatgccgtggtccacgtgggcggcgttttgtgcgttgagataaccatgtacagccagatgcctgtgcctgttcacgtggagcagattgtggtcaatgtccacttcagcattgagaaaaacagctaccggaagactgcggagtggcttaccaagcacaagacgtccaatgggatcattaactttccacccgagaccgcacctttccctgtatcccaaaacagtttgcccgcgctggagttgtatgaaatgtttgagagaagcccatctgataactccttgaacacgactgggattatctgcagaaacgtccacatgctcctgagaaggcaggagagcagctcctctctagagatgccctcaggggtggctctggaggaggtgcccacatgctgaggtgcagccacgtgaccctgtaaccaggggccaaccagataacattcaggactcaggccaaggaacctggaacgtatacactcaggcagctgtgcgcctcggtgggctccgtgtggttcgtcctccctcacatctaccccattgtgcagtacgacgtgtactcacaggagccccagctgcacgtggagccgctggctggtgagtggggtccccagcctttgaggaggcgtgctgctggggcagttctgaggagacctgctgagatgccaggcttctcataagttttagctgtgtctgcctttaagagatattttgggtaacataatggaaattttgcctgggaactagctgactgcctcttttgtttatctgaatgtttgctttcctgtaattgctttttcatgtttaataaacatggtgtatctgaaaataagaaaaaaaaaa

SEQ ID NO: 5891 - DNA, 934 bp, Homo sapiens
  misc_feature (1)...(934): n = a,t,c or g
tttttcatttcaggctttgtttaatgtagttggcatgcaaacttttatcaagtttcagatagaaagacattacaaatatattcattggtttatattattttatataaatgatgcaaaaatattaaaaagtttatataatttagatatagaactcagaagctaaaatttcccttttctacatttaattaaaatgaaaccctaaagaagccaattacctttctcaaagctgggcagaaattaaagaaaagtcgatggttacatgctttgaatctttcaggaagatgccagttctgaattatttcttcatcagaaatcacatgatgatccagcgctttgagaggccatatactgttaacaagaacatgtctatatccttttttaaggcttactggacaatcaaacatagtgagggcaatgagggttggacaggcagataatacacatatattctttaactttgcaaacccattgtcatgaagatagagtagttttaggttcttcaaccccattcccaaaatttgggtatttggtagactctttatctgatttccatggagatcaagtttgattaattttataccaactttgaagtggatgaatatctgtaataaaattgtttgagaagatgcatactctaagagagatgcaagactgcaaattttccatagactttaaatgaaggccattgaacttcacaaaaacaaaatctttttgacctgctcttatgttttcattatagtgactccattcttcatgactggttagctcttctgtgactgttccatgaaacatcgggtcaacctggctgcaagcccttatgagttggagacaagtggcccagccccaacacagtcagacaaatcgctgggcggccatctgctcctgagaccgttgctagagaaacaagacaacatntcaagttctccacatcatg

SEQ ID NO: 5892 - DNA, 676 bp, Homo sapiens
ccgcgtcgacggaattcatttcacaggtagtgtttcagactctgaaagccctgacttggttcttggcttctactgtactagttactagttactggtactgttgccaagcaatctgcttggaatttgtggatccctgctgttccctaatcccaccccctgccctgagacagtgaatgtagtccgtgaagggagtgcctctctgggaccccctgtgttgttacaggctgtgcagtgcaacaattccagcaaaaataccctatccccgcacttagtcattcgtggtaactaacaattttgaaatactcatataaaatgaacaggaaagtgttagtgattgggtgatttgagctacatcttgttgagcaaggggagtgaaaccacagaaactgttaaattgaacgtaaataactttggaaaacagttttgacactagaacaaggtcgcttctcttttcctcttctctcccaacctgttaacctagtgctagatagtcagctgctgttgcaggtagaaaagctcaccaatgccacatttgttcattctgttcaacctgttttgacctcccaggcatctgaacaggatgacatcatcttattatatcttactttacacatacgtgtatgtacacacacacacacaatacaagacatttttcctgttttagaaaatatagccc

SEQ ID NO: 5893 - DNA, 519 bp, Homo sapiens
tttttttttaatttttctgttcagcttttaagatgaatggctttccacttgaaacctctgtgttgaaaccaactgataaatagactggtattcaagttactacccaactgagagaacttaactgttctcttgtctggtcaagattgaggcagtgtatctagttggcaatatctgttttaggagtattcctaaatgcaaatatttagctgagtattatttgttaagataatctagtgaacagcaatgtttaggacctatctataagagcctgggtcaagatgaagaggcacaatatggtttgctctctaaacggacttaaaaatccctggatacctttcctcctttcctagttatagtctgttcatccctaaggttaaggggtagcacagaggaaaacctttctgacaggaaaaaggtaaagcagaaaaatcactttcatcaatccaaactggtaactgacatttagcatggaatcaattccaaaactctcaacctcttccagcatgcagaccagccctc

SEQ ID NO: 5894 - DNA, 992 bp, Homo sapiens
gcaaaagggcacccccaccaaggagactgggagagaggtccggcctcaagcctcccttgaggaaagcagcagtgaggcagcaaaaggccccgcaggaggtggaggaggacgacggtaggagcggagcgggagaggacccccccatgccagcttctcggggctcttaccacctcgactgggacaaaatggatgacccaaacttcatcccgttcggaggtgacaccaagtctggttgcagtgaggcccagcccccagaaagccctgagaccaggctgggccagccagcggctgaacagttgcatgctgggcctgccacggaggagccaggtccctgtctgaagccagcagctgcattcagcctcagcggaggacacgcctgtggtgcagttgggcagccgagaccccaacagcagagagcaaggagagagccttgaactctgccagcacctcgcttcccacaagctgtccaggcagtgagccagtgcccacccatcagcaggggcagcctgccttggagctgaaagaggagagcttcagagaccccgctgaggttctaggcacgggcgcggaggtggattacctggagcagtttggaacttcctcgtttaaggagtcggccttgaggaagcagtccttatacctcaagttcgaccccctcctgagggacagtcctggtagaccagtgcccgtggccaccgagaccagcagcatgcacggtgcaaatgagactccctcaggacgtccgcgggaagccaagcttgtggagttcgatttcttgggagcactggacattcctgtgccaggcccacccccaggtgttcccgcgcctgggggcccacccctgtccaccggacctatagtggacctgctccagtacagccagaaggacctggatgcagtggtaaaggcgacacaggaggagaaccgggagctgaggagcaggtgttaagaacttcacgggaagaacctggaactggggaagatcatggaca

SEQ ID NO: 5895 - DNA, 431 bp, Homo sapiens
ggagagctagcaccatgagctcaataccctgacctcttcaggacagccacccttgatttcctccccatgcaccttacatctagtacagcaagctgccgccaaccctgtgcacagacctctggcattgcacctaccaggccgttctgttcctgtcttctatttgactcccctcagcctgagcagatgcaggtgagtgattctgaaccttcagatccttatgtctacagagaaactggtacctagtaagtggtcaatacattttggctccgtgaataaataagtgaatattcgattctcttctgactgctggggatggccttatctgacagctaacgtctaaacaagtttcctagagtgattaacacaagcaggcaaggatgaaagaaagaaatgcaaaacacagtgatctgaggcccagagaacccaaacag

SEQ ID NO: 5896 - DNA, 432 bp, Homo sapiens
  misc_feature (1)...(432): n = a,t,c or g
gaacaagacgatgacatgctggaggctgccaaggcatcactgggcatctacttaacactgaccagaggatgtgaagccactgaaagcttgactcagggaaaagaaatgtgggaccatcacacacatgaaaatggctataatcctcactgtattttcttgttcttcttgaaaaatataggatttgattccacagttcttcttgactttttgatttcatcagaaacctgttttcttgaatattttgttaggatatttaaaattactggcaaaagggactggggataattttttcaccattttggcaataactttggatggcaactggaatcttaaatatggacattaggtatttgtgggcctgtgtccccctncacttgttcccaggacccaaggctcccaacccaaaccattacccccttcgttttggactgg

SEQ ID NO: 5897 - DNA, 127 bp, Homo sapiens
tggttaaagtgacataatgtctatgatattctagattggcagttgcaaactagtggtcctcagcgtgctttttatgacacctacaaggtctgaagactttgatttcatattaaaaatctggatttca

SEQ ID NO: 5898 - DNA, 423 bp, Homo sapiens
gctcattcttaacttctcgtatggatgtactaacgggaggcctgtgcctgttgggctgtccacagctactcaaaccttgagattagattggacgctatctaatctcatttcctgttacacaataacttctgcatggcacttgcttttaatcatgacaactgccatacactcagctttacaaaatcatgtcattgtggaaaggaagttccctccatctaacattcaaatttaactatcctgagctggtagtttgcaaggtgtccaacagatgtcactgtgtttccttcgcaaattctctaaaatagtctgctgtgtcccggggcatagtagatattcaagaaatggtggctatgagttttatcacaattctctcctactgggtgagcagctgtttgcaagactaaaattcgggcgaggcacagc

SEQ ID NO: 5899 - DNA, 465 bp, Homo sapiens
tccaagttcaccttctgtccgaaggcagctttttgtcacagttgtgaagacatccaatgccaccacaacaacagtcacaaccacggcaagcaacaacaacactgcacccacaaatgccacatatcctatgcctactgccaaagaacactatccagtatcatccccatcttccccatcaccaccagcccagccaggaggggtttctagaaacagccctttggattgtggatcagcatctccaaataaagtggcatcttcctccgaacaggaagcaggtagtccaccagtagtagaaacaacaaacactagacctccaaacagcagcagttcttctgggagttcatcagctcattctaatcagcaacaacctccgggatctgtttctcaggaaccaagaccacctcttcagcagtctcaggttcctcccccggaagttagaatgactgttcctcctttagcaacaag

SEQ ID NO: 5900 - DNA, 1837 bp, Homo sapiens
agattatgatcgcctgaggcccctctcctacccagataccgatgttatactgatgtgtttttcctttttttttttttttttttaagtaattaagggtagttaaattatttaaagtatacaaagtccaaacagccaggggtaaggtctccaagaggccttcccagggtaagggagtgcggagaggccccggtcgccacccgcggtgcccatggagcgggtgaagatgatcaacgtgcagcgtctgctggaggctgccgagtttttggagcgccgggagcgagagtgtgaacatggctacgcctcttcattcccgtccatgccgagcccccgactgcagcattcaaagcccccacggaggttgagccgggcacagaaacacagcagcgggacgagcaacaccagcactgccaacagatctacacacaatgagctggaaaagaatcgacgagctcatctgcgcctttgtttagaacgcttaaaagttctgattccactaggaccagactgcacccggcacacaacacttggtttgctcaacaaagccaaagcacacatcaagaaacttgaagaagctgaaagaaaaagccagcaccagctcgagaatttggaacgagaacagagatttttaaagtggcgactggaacagctgcagggtcctcaggagatggaacgaatacgaatggacagcattggatcaactatttcttcagatcgttctgattcagagcgagaggagattgaagtggatgttgaaagcacagagttctcccatggagaagtggacaatataagtaccaccagcatcagtgacattgatgaccacagcagcctgccgagtattgggagtgacgagggttactccagtgccagtgtcaaactttcattcacttcatatagaacccagcatgacataacagtgcagggcaaaatattcactgggccaattcaatacaaacaatctcttaaattgggttcatgatgcagtctcctctttaaaacaaaacaaaacaaaacaaaactatacttgaacaaaagggtcagaggacctgtatttaagcaaatacttagcaaaaagtggggcagagcctcccaaggagaacaaatattcagaatattcatattggaaaaatcacaatttttaatggcagcagaaaacttgtgtgaaattttcttgatttgagttgattgagaagaggacattggagatgccatcctctttctcttttctagtttgctcatactacattgagtagacacatttaaggatgggggttatgaacccttcctgagctttatggtcctaaaagcaaaataaaaactatttgaatgaaaagacaagaaaatcaggtattaatcttggatagctaataatgagctattaaaactcagcctgggacagtttatcatgaagcctgtgggatgatcaatcctttattattatttttttttttttgaaaaaagctcatttcatggctctgcaaaagggagagactcccatgaagccttttgaaagggatcatcatgcagctcaactttctgttggattccatgctaagcaagctaaccttatcctgcattgttagcactagggcacccagctgccacctctccatcctgctgcccttaggccacatgggagcagtcccatgcatgacagcctctatcctacaaggcctatgagtatggattgggggggccaaaagggaaaaagctccatgtgcctctttgtctgcgtggggttcaggaagggttgtggcacggcagattaggcaggccaagggttttgaggccacagcaggctttttattttcagttttgataactgtttatatgtgtt

SEQ ID NO: 5901 - DNA, 317 bp, Homo sapiens
gggagtttggctggtgctgggcctgagccaggggggccgggacacccttgtttccggtggtcttcccgttgtgggagcaggtggagggtggagacctaaactttggggtccagctgccttcagcccccctcccccagactaacagacccttggaggcaggggctgtggaaataaatctctgcctgctggctgcctgtgtgtgttccgtgccgggatgccatcctctcctgccttcaaatgttcttcctcggctacaccgtcctgtcgggagtgcggggaattggagaggacccactttctgggctcatgaacgtggg

SEQ ID NO: 5902 - DNA, 183 bp, Homo sapiens
gcgcgtctggtggcggcggcgtgatgttctcggcaggagcggagagtttgctccaccaggccaggtacgggggagctgcggccccggccctccttcctgcatctctccctaggggcacacgggggtgggtctcacagggcaggggcttgggcgccagccttgcaggaacccgactggactcgc

SEQ ID NO: 5903 - DNA, 412 bp, Homo sapiens
  misc_feature (1)...(412): n = a,t,c or g
gagccgggacgttgtacttcggtcgcggggctggctgaggtcactacctgcacagccgactgttggaagttctgcggtataccagctgaatggccttgaacaagtcccatctccactcggagcctccgtttccgcatctgtagaatggggatatgtgggcctaactcacagcgttgtgagaattcaacaagaacacatcaagcagctgtgaatgtagcaagccggcatttgattaaatgttagttttcgtcctaagaaaaatagctaatatttctgagcacttacggccgagccctgagctaacatttacttcnnnnnnnnnnnnnnnnnnnnnnnnnnnnnnnnnnnnnnnnnnnnnnnnnnnnnnnnnnnnnnnnnnnnnnnnnnnnnnnnnnnnnnnnnaaaaaaaacc

SEQ ID NO: 5904 - DNA, 346 bp, Homo sapiens
gcaacaaagttacagctaataagccaacaaaaagaagaaggctaacaatggaataagaaaaaatattcaattattccaaaaaaaaagcaggaggagagggaagggggaaacaaataactgataggacaaagagaaaacaaataataggatgatagagttaaacctaattacatggataatcgtattaaatgcaaatggtctaaacatcccaaataaaaggcagagattgttagactggcttttaaaacctgacaagactcaactatatgctgccttaagaaaatgcactttgaataaaaaagacatgaagaggttaaaagtaaaaggatagaaagatataccatgc

SEQ ID NO: 5905 - DNA, 2726 bp, Homo sapiens
cgaagatgggcggcggcgacagcgacggcgctgagggagttcgtggcggtgacgggcgccgaggaggaccgggcccgcttctttctcgagtcggccggctgggacttgcagatcgcgctagagccttcttatgaggacggaggggatgaagacattgtgaccatttcgcaggcaacccccagttcagtgtccagaggcacagcccccagtgataatagagtgacatccttcagagacctcattcatgaccaagatgaagatgaggaggaagaggaaggccagaggagcaggttttatgctgggggctcagagagaagtggacagcagattgttggccctcccaggaagaaaagtcccaacgagctggtggatgatctctttaaaggtgccaaagagcatggagctgtagctgtggagcgagtgaccaagagccctggagagaccagtaaaccgagaccatttgcaggaggtggctaccgccttggggcagcaccagaggaagagtctgcctatgtggcaggagaaaagaggcagcattccagccaagatgttcatgtagtattgaaactctggaagagtggattcagcctggataatggagaactcagaagctaccaagacccatccaatgcccagtttctggagtctatccgcagaggggaggtgccagcagagcttcggaggctagctcacggtggacaggtgaacttggatatggaggaccatcgggacgaggactttgtgaagcccaaaggagccttcaaagccttcactggcgagggtcagaaactgggcagcactgccccccaggtgttgagtaccagctctccagcccaacaggcagaaaatgaagccaaagccagctcttccatcttaatcgacgaatcagagcctaccacaaacatccaaattcggcttgcagacggcgggaggctggtgcagaaatttaaccacagccacaggatcagcgacatccgactcttcatcgtggatgcccggccagccatggctgccaccagctttatcctcatgactactttcccgaacaaagagctggctgatgagagccagaccctgaaggaagccaacctgctcaatgctgtcatcgtgcagcggttaacataaccgcccagccagctgcctggcctccctcctgtgtttcccatggccagtggccatgccccatggggatcgcccctcctgcccccttgtgcacacccagcagtccagtgcaacgtctcctccatagctctgggttcttagatcttggttggacgtttgttttctccttagttgcatttcctgggtttttgtgatgatcaatggactttaatgaaaaaaaaaataaaaacaaccaaaaaaattgaaggaatatcaccagcatgttgtacggaaactctcccactgaagcaggctttaattgctttaaaattatatttatcttggggcctgtgggaggaaacttccttccatcttctctgcataaaaacttgtggcacacaatgcttattcactagtgtgtcccacccgccagccccacagatgactggaggaaggaggggaaatgtgtagaaagaggcttcgccaccacttgttcccacgagaatatatcacttgcccagataaaactgggcggcagcaggagttccctgaagtgggaagtcagagctacatgcacacagtgtcttcagaaggtgaaaataaatatttccctgtgctccttttactcaacccctgggatatctaatcttgccaggtcttggccagttgagattctgtttccacctgcctgcctggccctttcctccattaccatccagactgctcgcctcctggggattctcaggggctccattatggcttgatttactccacgtgcagaagtcttgagtggacctaggaggtaggtgggatattttttttcactaggatacagctcatgccaacccatcctaagtgagttcagaatcagggtatcttgccctataagataaacagtcaaaatgccaccgagctgttcattagtgatgtgtgggcaaatcaaatcaactgttgaagaaggggtgagttttctgtgctacaagcacctgtcactgttggtacttgcaggaggcttctgctgggtatgttttggaagtgagtgtcactacttgggctttgcttagcaggttctgcttcacacttgttctttgacctgctgacttgtgacttgcagaaacataggcagtagtcctagcctggtaaagaccctccaccacccctataagtttgattgctatgcaggtttgggagaggaggcctattgggctcttggatggaaccctttcccgtattaaacaaaccagagacagaatcagtgctgactcaggatctcctggtttggaatcgtaatgtgcctcaatcctctttccaagcaggcctcaccagtctctttctctttcctgcttcacccctgcaatgagccaagaaccaacactacatccacctagaactgcagaagggcttgtggtttcaaccaagacccatcctgagcaagggacttggcttggtgcttttgatcccaaagttcccacaccggcagtggcctgctggggcaatggcatctgtcacggtgttttctccagcaggtggagattatggaacctacatatgggtctggaaaaactgtacactgttgtcaccttgaccattaaaaaccagaatgaggacaaaaaaaaaaaaaaaaa

SEQ ID NO: 5906 - DNA, 595 bp, Homo sapiens
attcggaacgaggccagcctgttctctgtatcttaaatcaactctgtgccaaagcagttctgtcccctgactcccacccctacccaccaaaaagtggtagacatgaagggcaggtaagggaacagaaaatgtctccttgcagctatatatattttaaacgaactgtgtaataagtatgagctaaggagacagaaagacagtagatgagaaaagaagagtacctatacctacaaggggcaaaatgaatgcaatccttcatttgataagagagaactgaaagagaatattatttttctacaataaagcaagctgtcctctcaggataaagtggaatttcgacatggattatggacttcttccaactcccattgacattgcttcttaccacacatggggaagggctgcctttcctgaaaggggaagaaggcactgtcctttcagacaaagtttgtacaaattcctgaactgcagatttgctaatgtgaccgcgtatacttatattcataatttaagtgattgtttatggtcagatacatattgttaaacttgaaaatgttttattacattacatcaaataaagtctatttgtagctga

SEQ ID NO: 5907 - DNA, 323 bp, Homo sapiens
  misc_feature (1)...(323): n = a,t,c or g
accataaaaagggctggactttgagcatggggaagagggggaagcttcaaaaaacttcaaacctgaatataagggattgaatgggagtttgctagatgggaaatgcgaagaggcaacacaggagtaaaacgtggaatactcccaactctggagcttagaatgtatgtgggaaagtagtagtagaggggcaggtgaaacagccagattgtgaggggatcttcagtgtcacattgagacatttggactttgatatgggaaagtccagttaaaggacgttaaagcagttggatttgatgtgggntttctttttaggaagggagggc

SEQ ID NO: 5908 - DNA, 1089 bp, Homo sapiens
  misc_feature (1)...(1089): n = a,t,c or g
ttttttttacaaatccaagaagtttattgctgacactagaaacacacattcctctaagagcagcaaactttctgtacagggtcagtcagtacatatctcagatgtggtgagcctagtgatctctgtcacaactactcaactctgccattgtaaccccaaagcaaccataaacaacatgtaatgaatgggtgttgctgtgtttctataagattatttgcaaaatcagtctgaggaccagattccgcccactggccatattacaccaacccctgaactacagaatattattctatgtctctgttcagtgtttcactcatcacaaattagggaaagcaaactattctcccagtataagcaaagtggcttttggtgcttctccagaatggcttgagatagccctttaaaaaagtaggtatatattttcagacagtcatctttgccacttacatgcagagactgcctgggaacaaagataatgtaaataaaacacgaaccagtcccaagattttcccatttctgctgagccataccacagccttctcagttatgtgcttcatgtacttttagtcaggtctctgtcacttataaccaagaatcctaaacaatcagctaatcgaatttccacttacctgagaactaccacttagattattttaccagttaaattatttaccataatttctatgttttattttgactatctttaatgccaatccttcacaaatttgttacatacttctccgtaggctcaagcagagattaacattttaaagtcatttaaagaataatcagcattataaataagtaatagaatgatattttacatttgtatagaaccttgaagtgtaaaatattccttttttttttttgagtacagagtctcactctgtttcccgggctggnagtgcagtaggtgtgatcatgggctcactgtaggcctcgnacctcccggggctcagggtgatcctcctgttctcagncttcctgaggtaggctgggggaccacagggccattacatcaccacggcctaggctaatgttttttttcttttgtaggtggacagggttctgtgttgcccagccgggggt

SEQ ID NO: 5909 - DNA, 865 bp, Homo sapiens
gtattttttatagagaccggatttcactccacaggtattgacttagtgtattacatgaccataggcactaactgctggccactcctgtcaacctcaagtgaggtatcagtagtaaagttcatccggactgtgtttacacactattccaaagggaaaattaaagtatccagaagagtttaaagagtctcaaaaactattttgaatgcaaactggtagtaatgaaagtgtacacattattttcagatgaaatcttcaaaacagacgcacttttgaacttagcatccccagtttgatgcacctggatacatgggctgtgcctgacctaaaacgtgtgtctgttcgtttctgaaaataggactgtgttgttctacagctatagcctacctccttggtcctctcctacatccatttgaaaaatctttgaaaatgggaagagatttttaaaactcagacaacggtcaacttgaggttcaaactggttctagtttgaagttctaaaattaactttctttaaaagaaactcagcatgatcagatttttaggctagcaagctaaatgtgctgcaatgtactgtggaaactatgatgactgtgcttttatctataaattcaatctcctgtaacattcaccaagactacgaaaagcaatcacctgagcaggccacccattttctctctactattctttcaaaacaggaatattaaaatatggtacaacacagaatcatctttactgtgaattacatgttctgctaagtaacttgcaaaaaaaaaaatcaaactggcagtaactttactaaagatacaaatgcttatatgctatattttcttattctgaatagaatattaaaatttattacctctaa

SEQ ID NO: 5910 - DNA, 655 bp, Homo sapiens
gtcagctgctactggaaacaccactactgcttctagtcaaggagaaccggaagacagcacttcaaaaggagaggagaaaggaaatgagaatgaagacgagaacaaagactctgagaaaagcacagatgctgtttcggctgctgactctgcgaatggatctgttggtgctgctactgccccggctggattgccctcaaacccgctagccttcaaccctttcctcctgtccacaatggccccgggcctcttctacccatccatgtttctacctccaggactggggggattgacgctgcctgggttcccagcattggcaggacttcagaatgccgtgggctccagcgaagaaaaggctgctgacaaggctgagggaggaccctttaaagatggagagacccttgaaggcagcgatgccgaggagagcctggataagactgcagagtcctccctcttagaagacgaaatagcacagggtgaagagctagactcacttgatgggggggatgaaatagaaaacaatgaaaatgatgaataaccagtaccagttccagttcaagtgtttaaaacttttgacaagtggtagtcctactgtttacactcacagttaatgttcatacctagtttttataagcctgttcctgtaacatagtgtagc

SEQ ID NO: 5911 - DNA, 750 bp, Homo sapiens
tttatttttttttttttaaagaggccaaacaatacatttattattttcatttaagttgcttatcagggcaaccttccccatctgggaacaatctagcagtcatgtaagaagcacatgcccccacaattagtttgaactccatcctggaattgcagctggttgtgattctaaggtacaggcatgccaggagcctgggatttgaatagtcagtgggattttgtcacttagtggaatggataataagccaaccaatggtcatcagtctcacacataaggagtgcaggctcgtagggtatacacagtactttctcaaaagcattgcaaatgactgatttctctatgttgaaatttgaaaacccaacatctatctctctaacaccaaaggattgagccttccttgcctggctggtgagtaagagtgagcctctataccaaggatgtaccctttggctgtgtgaggttttcagaagtatcagaagctgtatacatttcctgtggttgctgtaacaagtgacccaccaatttgttggagccttaaaacaagaaagatttattctctctccgttctggggaccagaagtctaaagtcaagacgtcagaggggccaagattgctctgaggggtataagggagaatccctcccgcctgtcccagctcctggtggctccaggcattgcctggcatgcggtggcatcactccagtctccgcctgcatcatcacacgaatatcttgtcctctgtactcaaatc

SEQ ID NO: 5912 - DNA, 481 bp, Homo sapiens
ggaccttaacctgcctttggaagctcccccaatttcaaaggtcagagtgcatattcagggtgctcaggttgaaagtcaagaggtcactatacacagcatagtgacaccagagtttgtagatctctcagtacccaggactttttccactcagattgtgcgggaatcagagatccccactgtcagagattcaaacaccttcgtacggattttccttattaaaagtgaaaatcccagagccccacacagcaggctagagtgtacacaacaatgactcaacactctaggactcaggagggcacagaagaggctcccatacaagccaccccaggagtagactccatttctggagatctccagcctgacactggagaaccaatttgagatgatctcttccagcgtcaatgtactgggaagccggtggccagaaggaacttcaaatgtgagtgtttgctgtcccagtacattgacgctggaagagatc

SEQ ID NO: 5913 - DNA, 1157 bp, Homo sapiens
  misc_feature (1)...(1157): n = a,t,c or g
cagaactgcctaaaaaacaggagaaggcaggctggttccgatttcccaaattagggttctcctcatctcctaccaagaaaagcaaaagcaccgaagatggggcagagctggaagaacaaaaacttcaagaagaaacaatcacgttttttgatgcccgagaaagtttctcccctgaagagaaggaagagggtgaactgatcgggcctgtgggcactgggctggactccagagtgatggtgacatccgcggcaagaacagagttaatcctgcccgagcaggacagaaaagctgacgatgaaagcaaagggtcaggcctgggaccaaatgaaggctgagaggtatggctcatcggtacaagagagatgcaaaaaactaagttggaaagtaaaggctacacacacatatggagcaccccatcccacagcacattacatccacctcacttcacagaacggagaacagagcagaaatgaccagaacacctttgtcaccatcacacagccctcctaaaatggaaccaaagcttcccagctccctcaaagctttggatgcaaagaaggcaccctgacttccacaagacaccagaattcacacggtactcagaggcactgctggggaagtttgttggtctttattagataaatttccagagacctgtccataatacccaacagaacatgactgtttctttgaggaaacgggttataatgtctgtggtgtacaagtcgtttttcggtataacttctttcctggctgctgctgcttcccggcaaacatagttttcctatttcaggcagagtgcggtatattcccagggaacactgtttcctacttcactttagcttacttctttgttgaatgcctcactaatggcaagtttcaagatgttttgggtgacaatgcacacatgcctgggcaaaagggtgatggccagtggctggcagctggggccagcagaagctaggacatctgtgagttgtcattctcatctatccatgtccactggcctgccagcatccgccagtgccttgccagtgtgcacggtcccacactggnggcccctgagtcccctaatgtacacgctgcagccagaatgcagatggagctggcttggctgttccctggatgggcaataaagaaagtgctgcatcccacac

SEQ ID NO: 5914 - DNA, 879 bp, Homo sapiens
ttttttcaacattaaatgactatttatttttcaggtttaaaagatttcaaaatacatatgtacaagataaataaactacacaaaaattatgtcatcaaatatatttaaaaaaaaattcaaggtaggcaacttagatcaccttggcaaagaacacattaactaagatgaaccagggacaagtcccctaaacatcaggatgaaatttcttttctatgcctactagctgactggccttccttttctgtgttgagttgtgtactctggagtcaccaggcctctggtagattatcaagcatctcttcctcatcagccttttgtttctgtcttgcatgcttctctgtccactgtctggcattcttgagggaagggctggcttattatatttaaattctgaggatatgtcagccatgagcgggtcatcagggttgggttctgacatgagcagctggaatagaggtcaacacagttgcgatgttgagggatgggtctcccaagcaccttttggtgggcaatttgagaacatccagacaaatccttccagcagaatcaatgtttggatgataaattgggagtgagaaatcggatctgaggaggttcaaatgggtacctctcaggaatgataacttctagcttaaaaacacctttctcataaggtgtgttggctccacctaatatttgagctcgcaggtcatccatttggtctttatcttgccaacatgtgatgcctgggggtggctctgtggctaacatgtgcagctctctcttcagacgcgaagctctctgcatgatccccaagtagaaggaaccacacacagttcactgctccacactaagagctgcctgggatgcactgagctgacacccctcacaacgcagcaa

SEQ ID NO: 5915 - DNA, 354 bp, Homo sapiens
aaaacatcaccagtacagctacagccccgctgtgggtcttttcttcctgaaataaccactgcgctgaatgcagcatttttgttgaaactaaaatgggtttctgaggaccaaataggacatggagttccaggtataagttgggcccttggcttcttgccctgcctaccagcctgaacttgtttgagggcagggtctgctcttgcctccctcccttctgcttgatgccttgtgtacttgggcccttcacaaatgttgattagattagtaatagctcttacccagggctggtcctggaaagcaagtggcactgtgtattctcaaagggacagagttttgctttaaaggacatttggg

SEQ ID NO: 5916 - DNA, 558 bp, Homo sapiens
gggccaaggcggccgctgatgccaagaagcagaaggagctggaggatgcctactggaaggacgacgacaaacacgtcatgaggaaggagcagcgcaaggaggagaaggagaagcggcgcctcgaccagctggaacgtaagaaggagacgcagcgcctactggaggaggaggactccaagctcaagggcggcaaggcgccgcgggtggccacgtccagcaaggtcacccgggcccagatcgaggacacgctgcgccgagaccatcagctcagggaggccccggacacagccgagaaagccaagagccatctggaggtgccgctggaggagaacgtgaaccgccgcgtgctggaggagggcagcgtggaggcgcgcaccatcgaggacgccattgcagtgctcagcgtggcggaggaggcggccgaccggcacccagaaagacgcatgcgggcagccttcacagcctttgaggaagcccagctgccgcggctcaaacaagagaacctcaacatgcggctgtcgcagctgaaacaagtgcctcaagaaggagttgctccct

SEQ ID NO: 5917 - DNA, 137 bp, Homo sapiens
  misc_feature (1)...(137): n = a,t,c or g
gatctaaaggatcttcgtatatgactactatcctcttggattattttaacagttaaaatatacaaagtggcccattaaaaacagagttgacttttcaccattgctgtttttctgggtgagacatgtggganagggag

SEQ ID NO: 5918 - DNA, 399 bp, Homo sapiens
attttaggtgaactagacttcattgaaggaggtgggagccttatggagagagagtatatgattatctctatttgtatttaattaccatttcatctaaccattcagaacatatttcaagaataattttaattcaagttgtagataaaacttactataccattttcattttgacgctttccaagaatgagatacacggtattttaaagacaaagattgatcttacatgttactattaaaaaaaacacgataattttgttctacatttatacttttaatttttctgtggataataagaaatgccaagagtcgattgtgtccatgctgggcaagtgggcctaaataaattgtccttttatttgggtgggtcctcagagtgggcagttaaacatcttgctattc

SEQ ID NO: 5919 - DNA, 877 bp, Homo sapiens
  misc_feature (1)...(877): n = a,t,c or g
gggggatgaatgattccccagcccagtgggaaggggtgatggatgatgaaccctggcaagtcacaggactatggacttggctgtatgttgcatgtatgtgtaagatctgagttgagacctttgatttttgcccagaaagtccagctaacatactatataagccaaaaggccttacaaatatttcagagcagaggcagcatttttgcactggataaacaaaggtacggtaatttcttcatagtttattttcattacaagtaattcttttcctgaagaaaaatttatatttcagatttatttcccctctcaaaggggaggggagttataatattctgtttccatagcaccattcctcaagatcaaacccaggcaggcatttttacagcacacacttccacatgtcattgctaatcctcgcaaccttgaggaaactgaggtgcaaaggggttgaggaatgtgttcaccatcccaaagccaacgaagtgccagaacccaaatccaagcttggctgctcatccccaaggacgtactctttatgccgttccttatgacttttcatgcagcaggcgcaaggcagcaagaatttggctcttctgacatttatcaggcacctggtatgtgccaggcctactgtaaaccccaagatgacatggtccatgtctatccattcagcatcagagagactgttattcaggacttgaggcctgagacacagccctgaatcagatgcaggcctctggtgttttgcaaaggatgcgtggagtatgtgttatgtgttatggcgtgcattgtgtgtagggggtgtgttgtatgttgggggttgggggggcaggaaattgctcccntggaactgttggggtntttaagggcagatctt

SEQ ID NO: 5920 - DNA, 432 bp, Homo sapiens
ggcacagttgtatgtacacaggggagggcctggcagggagccttagctaaatgctgtatgtcatagatcatctggttcttgtggggtgtgtgtgtcagaatcacatgggaaacaccttcagagggtaggggcctgggctcagcgtggggagtctgaggcagcaggtgcagagtgggaggagctgggcactgcacttgtgctttggctgagctcccgctgactctgaggggagcttggtgacattcttcatggtccacaggaccttgctcagaaagaactatgttctcatttaggagagctttgaggcagttgggaagcattgttggtaaggatgttgaggcttgagaatgtaatgcttttttctttactatggcccacactcagcaaataattgcctctgggataaatccccgacccatgcccaccccgatc

SEQ ID NO: 5921 - DNA, 931 bp, Homo sapiens
cacgtgaaatagcaaattttactttactagcgtcaatggtaagaatatcacatgcaagaccatggatgaaacattactcttaaatttaatattttcatttatatcactcccaaaatattcattttcttcaaaatccaatttaatagctaaactttcaagacaaaaaactagagctcaaaaagatctactcacttagtattcatcataaggcgttttacagatacagtaaagctttgtgtccttcttagtttcctttgaggtagtagagatcattttctttttcttggactttgagctggagtctttttcctcttcccgcttcctcttctgggaagcagcaggtaaggtgggcgtggacagaaggcctgtgtgttgcacagcaggtggagggggaggtgaaggtggaggggctggaggggctggaggagctggtgtcactggggggcagggtgcagctactgctgtggcctgagccaactgcatcaggtctttttctttcttaattttcaggtctctcttcagctcttcctgcacttcaatttgcagatccttgtccaggagtgctctcttcttcaggatctcggctctgagctgctctttgtgcttgaagagcagagctgacagcttagtggcattctgcttgctacgtttctgctccacactctcttcacgcttccgtttttttgctgcctgtttttcttctttatctatcttatccaaaatatacttcatcacctggttacagacaatcattctttgattctcttctctttcagctggagtcatgctctttttctgttttaaatgttctattacagcattatgcttcatcaccacctggggttgtgactgtggctggccttgggaaggtatctgaagagatgtatgtggttgaattggaatcggttgtgaggttgtagtctgaacctgg

SEQ ID NO: 5922 - DNA, 973 bp, Homo sapiens
tttttttttttgtaatcaatgatttttatctctgaaaatggaagcaagtgttttgacagaacactatggccactctataagagccgacctaggagtaattcactgtcctcttctgggatgtcatggcttaaaaaaaaaaaaaaaaaagacaaaacaggaaaataatccacaatgctttgggcgcctactctgagcttggctgggcatccattcattaaataagtcataagctacaaactaagatcagggtaactttcccttgccctcctgcttctctttgaaccacatgccctacggtgtttcaccaccatcaacaactttacttcattaattcgatatcagaaccttaaaacactactgaatcttagacaaaaggtcctcagcagattacattgataaagaaacaaatacagatttgaatataagtcattgccattattgttttctttacatctcatgatccacttcaatattaaacacatacatacacacacacaaaaccacatcaaacattcagatgccctgaaattgtggagacagcactcccagtattggctggataagaacatggtcctttttctacacggacattactccaagttcggctgtcaccacactctgccctcaccctggctccctgcatacagacgtttccagccagtcccatgcccacaccagcacgagcatgtgcaagaattcccttcgtggtcccaatggcactacacatttcacgttcaatcacagacagcccttccaaaacagaggctccttaaatcttgtttcccaagcatgcactataagaaactggaaacggggcaaagttccagctaaccgaggaatgaacaggtgaccagagctcagtctctggccccctccgagtccggggagcctctgtgctttgacgcagccttggtgcgagatggagaggcagggcaggttagttgtgcggagggacatgtttgtatgcattaaa

SEQ ID NO: 5923 - DNA, 428 bp, Homo sapiens
  misc_feature (1)...(428): n = a,t,c or g
gcgacaccttcctcccaggaagctgagacctttgtggtctgagcataagggagtgccagggaaggtttgaggtttgatgagtgaatattctggctggcgaactcctacacatccttcaaaacccacctggtactgttccagcatcttccctggatggctggaggaactccagaaaatatccatcttctttttgtggctgctaatggcagaagtgcctgtgctagagttccaactgtggatgcatccgtcccgtttgagtcaaagtcttacttccctgctctcacctactcacagacgggatgctaagcagtgcacctgcagtgggtttaatgggcagataagctccgtctggcagttccagggccagccaggaaactcctgtgttccacataggaggttgacgtggaggaantatcttttcaggccca

SEQ ID NO: 5924 - DNA, 545 bp, Homo sapiens
ggttgatccacagggcgctggtcagaaagcccaggaaagcaaagagccagtgaagcctggggggctggctgtcagatgtggcaaaaaaggtcactgaagccaaggctgtgcctgcgatcaccaccacgacccagacgggaacgaggccgcctatctcatagacaccataggtccccgactgcagggtcaggaccacaaccagggggctgataaccagatgcagacagttgaggggccgtttccagttctggtcatccttgtccgggtccacgacggggactgtgaggagcagcaggaactccacaggcagcttgaacaccttgagggctttccagtatgctgatttccttctccacttcatgtaatccaggggattgagggcccggaccaggatctgagccgtggtctcctggtagaagaacagcggccggtactcatcaccgtagtcatagctgttggtattagaagatacccggtcctcctcggagtctgagaggatctctggagtaactggcatggggcagaacagagatcctctccgttga

SEQ ID NO: 5925 - DNA, 959 bp, Homo sapiens
tgcggccgcaagacccgccacgacccgctggccaaatccaagatcgagcgagtgaacatgccgcccgcggtggaccctgcggagttcttcgtgctgatggagcgttaccagcactaccgccagaccgtgcgcgccctcaggatggagttcgtgtccgaggtgcagaggaaggtgcacgagggcccgagccggggtttctggcggagcgcaaaggccctgaaggacgccgccgagcaccgcgagctgatggcctgggaaccaggcggagaaccggcggctgcacgagctgcggatagcgaggctgcggcaggaggagcgggagcaggagcagcggcaggcgttggagcaggcccgcaaggccgaagaggtgcaggcctgggcgcagcgcaaggagcgggaagtgctgcagctgcaggaagaggtgaaaaacttcatcacccgagagaacctggaggcacgggtggaagcagcattggactcccggaagaactacaactgggccatcaccagagaggggctggtggtcaggccacaacgcagggactcctaggggcccagtaaggacagtgcccgccagggaccatgtatgtatcatggcggaagagttggccctgacctggaataaagcagttggtgttgcttatgaggaaggttcagccttatccagcacagccttcacgttttgccctctgctgtcaccacttggtcagaaacttccaaacgcagtgccctgttctgccggtgtgtaaagcctcagcgcaccaggagaccctagagtggtttccatctcacagagaatcagacagggccacagcccccctcaggcagccaggtcatctgagtatcattaagagtagtgatgggaagattacagtctgagggccaaacgtgcctgcttcctgtttttgtaaataaagttttgttggaacacaaaaaaaaaaaaaaaaaaaaaaaccgcg

SEQ ID NO: 5926 - DNA, 770 bp, Homo sapiens
gcagggcccagcacaggagaaggtggcccctgtgagatactggtgggctatataggcgttttctgaggggctttgggaggcatgaacaaaggtggaaacattgctgttggcttcggcagtatctgaatttactgtgagatggagggtttaaatctaaccccatggaatgcaggagtccatgaattatctaaatcgatcattttgatctttaatcaactctgcaattatgtgtaccttgtttgctcaattaaaccctgaactatttgagaatgaaagctatgctgttcctctagtgcaagcctcagggcctgtcctgtgcctacaggatgtccccattctgccaaaacctgtccctcttccagagactcctacttcaatgtctcttgctagaaacacatccctttcctcacacatccagtcactcatcaagtgtaatctgtctcctaaatatctctggaacctatcttcttttctccaagttaccatcacctcttgtctaaactgctacggaaacttcctaacctgttctcccatttccacttctgacttccatgctgcaatgagagtcagctatgaaaaacaaacctaaacatcgaactttccttagcttcttcagtggcttccaactgcttttggaataaagtcctaaattcaaagatcttgtataaatcagggctcatctcgcaacacccctctttgttctctatggcctagacacactggctttcagttcattacatgtcttggctcaggaccctcacacattgttc

SEQ ID NO: 5927 - DNA, 457 bp, Homo sapiens
aaggaaagggcaaaaagcaaattaaaatccgacaatgagaatgacgggtatgtccccgatgtggaaatgagtgactcagagagtgaggcatcagaaaagaaatgtatacacaccagcagcactatcagcagaaggacagacattatcaggagaagcatcttggcttcttgatgcaacagagatgatgcggaagccctttgggcttcgtcattgggtttgctagaggagagctctgatgtgggggagaagcagaaacccattaatcctgagctacacaaacacatttacttgcaattcagattaatttttttccagagtcatttttaaatcatttttgtgagaagtttgtgttatttgcaacttgttgaggaaacagaagagtagattgtaaccataagacactgctaagactagaacccgaactgaacactaaaataaaaatgaaatgttttaaaga

SEQ ID NO: 5928 - DNA, 88 bp, Homo sapiens
ggctggacaggcacacggcatggccctcggctagagcagggtctgtgatggcctcacctggcagccctctggcctagttcccaccaca

SEQ ID NO: 5929 - DNA, 1384 bp, Homo sapiens
  misc_feature (1)...(1384): n = a,t,c or g
agtgattataaatagtatatttacctccaaaaaatttaacactgtgccctaatgcaagaaaaatctgtggtataccaatgtactcatgttctgtagctctttactgaaggcctcatgtcaaaggcggggaaggaaagcaattctgtggctctgcacttctacccaagtctgaagagaagtgagccaagttaaatgaaggtcaaggatgctcctcctggtcctctcaggggctggtaaagtcttatatgacgttttctggggagtcattactctgtccaaagtcgaggtagctcagaggccttcaggccgctgatacttccagaaggccacctccccatcatcactgcaggaggccagtagccctggctccttggggttccaggccacacagttgacatcctgggaatgggcctgatgcaagtgggctgtcagggagaaggtgggctgctgtggatccgagttgggatcctcctgaaacacggcggatgcgtcatccccacaagctgtggccagagcccctgtcagctgacaccaagcaatgtcataaatggtccttgagtggaagccggacaaagtacagatacatttccaactggggtcagagccgctgcatgccaccccttgttcattgcctggtagatactgacgccagatacgcacagtacggtcatcactacaagacgccaggcgctggccactcgggtcaaaggccaagctccacacagtggattcatggccctcaagggtggcacagcatacccagtcatcctcttcctcccagtacagcttcactgtgtcatcatagctgggcagaagctaagagttttgacttgggtgccaaaccacatgcttgacatcctgtgtgtgggagttgagaacactgacacattcatactcatcctcttcatcaacttcccagacccaaacgctcttatctcggctgcaagtggccaggaggttgccagatggggncccaagccactgacttgacctcattttcatggccctcgagagtggttacacactcaaagtcatcctggttcttcttccaaatgcaagtggtagcatcaaagctggcagaggccaggtaattaccgcagggggaccaggctaccttccgcacggtgcgctggtggccttcagaaaggacagactcgcagatccagctgtcaccctccgtgccccagatgcggattctccggtcgccgccgcacgaggccagcagggtccccgcggggttccaggccaggaaccagcagcgggagtccgggtgcgccgggacacggcccagcagcaccagcgagtccttcatgtcggcccgacgcagggggaggtgggggcgcgcagagtccgctgagcagacagcgggtctcaccgcgcgcgt

SEQ ID NO: 5930 - DNA, 733 bp, Homo sapiens
tcgacccccctcattatgatggcatagaagcactaaccattcaaggggataacctatttagtgggtctagagataatggaatcaagaaatgggacttaactcaaaaagaccttcttcagcaagttccaaatgcacataaggattgggtctgtgccctgggagtggtgccagaccacccagttttgctcagtggctgcagagggggcattttgaaagtctggaacatggatacttttatgccagtgggagagatgaaggatcatgatagtcctatcaatgccatatgtgttaattccacccacatttttactgcagctgatgatcgaactgtgagaatttggaaggctcgcaatttgcaagatggtcagatctctgacacaggagatctgggggaagatattgccagtaattaaacatgaatgaagataggttgtaaactgaatgctgtgataatactctgtattctttatggaaaatgttgtcctgtacttactaggcaaaacgtatgaatcggattaactggaaaatatatctgaattcaactgctgactataaatggtattctaataaaattgtgtactatcctgtgtgcttagttttaagatcaaccaatagatatatatcctacaattgatatattgctttattcacacttttattgtggctgaatttttgtgcctatctataaaacacactttcaaattatttgaattaccaagacgtctgcttttgt

SEQ ID NO: 5931 - DNA, 1191 bp, Homo sapiens
ctggtgttccttacggccctctcaggggcttttgtggccagggctagatgctgggcttgtttataactcctttcccaaaatggggagaatcctggaatcccggaggacctctttaccttctcccccatcctgaggaatgtttttgagaatcccaccatggtgcagtttgatcaccggattctgggaatcacttcagtcactgccattacagtgctctacttcctctctcggagaattccccttcctagaaggaccaagatggcagcagtgactctgctggctttggcgtatacacagggccctgtcttattcaaccttacttttaaaatcagtgatttggatgaaggcatcagaaacatctgatttgaggatggagcaacccaatattgctaatataatagatgacagtggcaactgaaaacagtcccagaatgaccccatcgagatgaaattaaacagattagaaatgtaacatactcatttaaattaaataagttgtataagtttgggctgaagaaacctggccttatatcatttcatataaaaaagacgggattttagttgtcctcaggttcaatatgaaccaagtagtattcatgttgttattatatgataacagaaaaattagtggtacttcaggttttatcagtagaagtgtcacagccatagtcaaaatacccctaacatactgcatttcactctgggtaccaaatttaagcaagatattgatggccactaagtgtgtatccagaagaagagatcagaatgatgacgtccagaacccctgtcacacagggaataggtgaaggaactagggatatttaactggagcagagaacatctggagagagagcaagattcctgtccttgagaagttgaagccgtctcatgcagaagagggaatgagcttccattatgctgcagagctggcagcaatggatgaaagttgcaggaagttagttttagttctgtagaaggcaagagtagggtagaccaaatcaaatgctcactggggtcaggctgatggagacagtaacactggcgagcaggtgccccagctcggactatactgctgagttctggtctgttgctgccactctacaggtccagggttgttagatcttctgggtttttgttttgctttttgaaataaggaaaataagcttatcttaagtttattttccttatttc

SEQ ID NO: 5932 - DNA, 1751 bp, Homo sapiens
  misc_feature (1)...(1751): n = a,t,c or g
ttttaacaaacatgtttattagaaaagtaaaaaatattgcataggtcttaatacttgaacatcaagtgtattcatgaacagtgagtatcttatcttcatgtaaacagttctagatggaagacccagatggcactcctcccggggagtggttccagcccccacccatctcagcccctcccctgccagctcaactctgcagttacacgatgggggaaggcttaaacggcagctgccaggtgtaatttttcaagtgtcaaagatcccaagtgatccctgacacccaccccttcctactcttacattcatgcgtctgtaagatagctgcctacaacaggtcagtagtgatgctccgatcagaaaaacaagatacaaaacaaacaacaaacacacttggtcccttcagaccagtaagatacacaaaccacctccacgacctccgacctcccccctccctccggctgctctgaggagcacgtgcctcttccttcaccctgggccatgctggtgcgggagagnccccagctgctctctggatgtcacacactgttaactgtcagtaacaaaaataataagggtacatgctacacacacatccagctggaagccttgttggcccctaagcctttgtttcatgctacagtactgagggggtatgtggtccccaatgcacagccacccgcacacaactcaatgagcttcctgggaaacactattcccccaccatcaccttaggtggctgcctcagttttccaaccactggaatcagtccctcagctcctgcctctagtctccaccccaaaagttcagtcgtctctgtcttggacgcactgtcggccccctcaggttgaagttcaacactcctcaatgagcagctgttccgagctgtacagcttcttcttgatgactcggaagccagtgctcagcgtcagggactggctgaagccgggnaggaagggagagttggcggagctaaacagcccctggatcttgggccagagtcgtgagtccaggcgcagcacgagggtcagctggaaggtgggcaccaggctggggtcgagtgccagctggcccacgctgtggcagctcttgccctgctccacgcagacgtccagcagcgccccccgcaggccgcacggctcgctgtaggccaggcgcagtagttctttgcccacctggcttaccaactggctaggcatcagcaggcgcgcagggcgtcgagagcccagccgcgcctgggccaggctctcctgcagcagctgccatcaggttggcacacaagtgttcatcctcagggtcactgagcagctcgaagtcgggcaacgacaccccatccaggtaagccgtgtcttcctccggcccgaagccactgttgctgctgtcccagggactcgcagtccgagctctcccaggctcgtggagcggtcaaacccctcctcccgggtcgccgaccccccaggctgagcgcggcggccgatctggggtgggagttcggggcaaggacgagggcgaagaggaggtggacgacgacgagaagcggtcccaaaggctaggcatggtgaggacaagagccagggcgtttgctgatgaactcagagtgccggagcgtagaagccgcagtagcgcggtcagcgagaactgctaagacaagtgcgtcctgccgcttgaatgggtgtgcgaacccgtgccaaccaccgagagccgcccagacccgtcccaggtccacgctcgcacctcccccccnnntgcccgaa

SEQ ID NO: 5933 - DNA, 669 bp, Homo sapiens
  misc_feature (1)...(669): n = a,t,c or g
gacaagcttacaggacaaccactgcagtgtatcgacacgggctcccaagtgtgcaatctggcctggtccaagcacgccaacgagctggtgagcacgcacggctactcacagaaccagatccttgtctggaagtacccctccctgacccaggtggccaagctgaccgggcactcctaccgcgtgctgtacctggcaatgtcccctgatggggaggccatcgtcactggtgctggagacgagaccctgaggttctggaacgtctttagcaaaacccgttcgacaaaggagtctgtgtctgtgctcaacctcttcaccaggatccggtaaacctgccaggcaggaccgtgccacaccagctgtccagagtcggaggaccccagctcctcagcttgcatggactctgccttcccagcgcttgtcccccgaggaaggcggctgggcgggcggggagctgggcctggaggatcctggagtctcattaaatgcctgattgtgaaccatgtccaccagtatctggggtgggcacgtggtcggggaccctcagcagcaggggctctgtctccctttcccaaagggcgagaaccacattgggacggtcccggctcagaccgtctgtactcagagcgacggatgccccctggggaccctcattgcctccgtnttgtttca

SEQ ID NO: 5934 - DNA, 275 bp, Homo sapiens
acaacactccccttgaaatacagggcaggaaagagctgaggttcttggtggtgtctcccattcccctggctaatttcagacagctgtggtcaagggattttacttgggatcaacttttccttttttccttgacattaattttagagaagtcatcaagtcatgtgatttgtttagcacataggtttatttatggtttgattttttttaggcagttatattactagattaagcttgtgagggaatgaaaatgttttttatttgttatctacacactc

SEQ ID NO: 5935 - DNA, 377 bp, Homo sapiens
catgaatacatttatcatatattcttccagggtttttcttaactgactatagagagtggctgtaagttctggggcaaagcttgattgtattttcagtgatgtatagttacattgtttcatgttaaaatcatcgtgcatggaaagtgaaatgtgcgtatgattttaaattattgtaatatgtactatacccttcccctaaacttctttcattgatgatacacagaattcctctatttttgcttgaaaatagtcctttagattggagtagccttttcttagatccctctatggttccatgagatgaggtgatacctgcaaagcacttttaaagatatttttttaggctaaatgtccaagatacagcattgaggaggcag

SEQ ID NO: 5936 - DNA, 1275 bp, Homo sapiens
ttttttttttttttttttgacagaagtaaaaatatttattttatcttaaaaatctggtcccgcaaaaaggccaacacttttttcagttcacggtcttgacctttcaaagaagaaatctttcaactgagaggtgagttaataaaaggaatgtcagaggtgctttcagatttcttataaaccagtaaaccaagcaaccctggacttctagtttactgagctccttcttctagccattcacagttcctgaaggagaaaagaagttgtttgcagataaggcactttagaaaccaccaaagagaaaacccaagtctgccaggagctgcactgtgaacatgtgagccgagagggccaccagcagacagagtgccaactcccacagctccatgacaacagcatccaccttcctgccccaacactgttccgtctggcttccagcacccgccttggctctgtgttgcctacctggcctagaatacatggaaaccagacaactggccagagatgaacactgctgcctgaagctcagggcagctgcccacagtgaggaatcccttcagaggccccagctggggccaccgcccgagggagcagttccttttgcaaagatgagttagtgcggatcagcacattagcaaagcaaaatatttaaacatttttaaaagctgctaatccttccaatttccctcctgattgtagctcaagctgcagcctctaaacctgctaaaaatcaggaagaaacccctcctctggaggggcagatggactgaagtggctacagcccagtgtgggtacggaaagcctcccgctgaactgtgatcatgtgacacctgcagaccctgggaagggctgatctgaatcctggcagcaaactcaacctcttcttttgcttggggggcttgtgtttaatacaggtcattgcgatggaagaagtctcagagtctctctcacatcaagaggacagatggggacagggatccctggagcttttcttctcctgtgttctggttgcatacttgaatcccaggaaacagtgtgaacacggtgccaatttactgccaaacatgcccggtttgtcaacagagccagacaaggaggagaggagagattcatgccccaaacacaggccagctgaggagggcttcgtcctccttcctttggcccagatgagggagcgccttgcccagaagtcacatgaggaaaaaccgtgctcaggtcagaactggacccagcctgtgcctggctgggtctggctggaagttgatcctgtagatttgg

SEQ ID NO: 5937 - DNA, 1382 bp, Homo sapiens
tttttttttttttttaaaagtgcacatattttattgaaagatatccagtttcagctttgaagatataggctcaaagtctgttcttggctcttccagaaattctgcttctagagtgttcataatttcaaccaaaacttagaaagtttttctaaatcagacttttcaacctgctgaacagaactcatgtctatacttcgatgtttattttggcagcatttgtctctgtgaagcatatcaaaatcactcaaacatcaaaactgctgatctgatagaatgatttattttcccattacaggtaagtcatgaatggcttgttctgaggtatgtttctgagctatgaaggacacctactagaaagctccacacttgaagggttctcttaaggtggtaacattttatggctggacagtctctgcaggtaccagattccctgttgtatccaactgcatacatttacacgtgcatgcagacacagggcactctgcatggtccctgaaccaactaagcatatgtccagcatgtccaccgtgcctgcaattatgacaccatgtaaaccagttgttaaattgggctaattttttgtccttgctcaagtccactttttcatctgatttggttcctccaggacagctagaaactggtgttcccatattaatgagacaaagcgcacatcgaggaagtggttttcgacagccaggacaacttgtgactttagatttcgttggtgagccactcacaccatactgactaaaacctctgccctgatgaggcacagctgaacagctgtaggagattgacttgccacagaaattgcaactcacaaaaacttgtgctaaaggcttggaactgggatccaacttactcctgtgaatatcaaattcagctcgtttatgccaaaacctccaggcatctaataaatttctataattctcaatccagtactgaaccctttcatctttaagaacatctaaaggtgaaccctgtaacatacagtaacttgctgtttgaacatctccagttctatcaacataactctccattaagtccactccatctttagtaaggcctgtaagcaaaattccttccaaatttccagcctctttcatttcattggtcaacttttcgatgtatctatttaactgagtatcactaaggaatttacaagcaaatgccactctgtcacgtactgcaactttgttttcatacaaaactccatcgtaagatcctgtttcacttgtcagaaatgcaaacatgacacacaaatacgggttatttagctgtaatcgcagtgtgctacacatttctctccaaagggagttcttctcatccgtataacccgataaagccattgctaccacattgagattcagatctcctttttc

SEQ ID NO: 5938 - DNA, 746 bp, Homo sapiens
tttttttaaaaaataaatttcaagctaaaacacctgaaatataatccctccattcaaacgttatctggtccctcttaaagtcggtctgccccctgaggacacatacaaaggcttaagctacattcactaatcaataagaacttatcataagcagatgagacagatggaacttcagcaccctgtttatttgaaaattttccatactgactcagcttcatgatatgttcagcccctcaaagattaatgcctctcctagccattgattctagaatgtcaaggaaaccagttcctagtacatacagtgactgtgtagccaacttaatagtcaacattattacattaagaatattcaagatgtatgtaagcctcccaacaaaaagttctagttgtgctttgtacaactgagtgaactatttatctcacaactcttcacctacagccttactatgcacactttactttctccttcctcatctgaaatcaaatttaggcagcatttctttgatgttaacaaagccattaaaaatgaacatatttcagtatattacatgtggtctctgtgaggacaattgctttaaaaagtcttgtactattctagacaaattaatggatattttggcatactatgtacagtattaatgttgtgatgaggataaagtctcattaaaaattgaaaataaatattatgcacttgagttattttcccttcaatcttcatccaagatgaaaaagaataaaacaaggtt

SEQ ID NO: 5939 - DNA, 576 bp, Homo sapiens
gcagaaaaggcccctaaggactgggtgcgtcagtaaaaaagaggaagaaaatgaagagccataagttagaagaagaatttgagtggctaaagaaatctgaagtcttgtactacactgtagagaagaaggggaatataagttcccagcttaaacactataacccttggagcatgacatgtcaccagcaacagttacagagaatgaaggagaatgcaaagcatcgggaaccagtacaaatttatcttactggaaaacctgacttcccgctatgaggtgccttgtgtccttgacctcaagatgggcacacgacaacatggtgatgatgcttcagaggagaaggcagccaaccagatccgaaaatgtcagcagagcacatctgcagtcattggtgtgcgtgtgtgtggcatgcaggtgtaccaagcaggcagtgggcagctcatgttcatgaacaagtaccatggacggaagctatcggtgcagggcttcaaggaggcacttttccagttcttccacaatgggcggtacctgcgccgtgaactccatgggctctgggaccctaccccttcccaacaccac

SEQ ID NO: 5940 - DNA, 431 bp, Homo sapiens
tgtgaggtcagatagtcggccaccggggccgggtctgtgaccgtgacggccaccagggctctctgcgcagccctgcaaatcccaccacacaggtcttctcctccagatgcagaagcaccttggccagctccacgctcacctcccgagtggctgtggggctcctgtagaccaggccctcaagggcccgcagggctgcctcccagcgctctatgtcctcagacgtggtcagggcttccacgcagtcccggacgtaggcaggagccttgctgctcttcagctctctgtcccccgacatgtcgtaggggacaaactcatcatcgctgtccaggtccgagtcagagcccgccagctgtgcttgggggacgccgccatccacgatctctgcgggggtctctgcaggggctctgccgtggctggaacgagggacgtgc

SEQ ID NO: 5941 - DNA, 350 bp, Homo sapiens
cctcgtgccacagccggcgacccggagccgagagcgggcggcggagcctgagctggacgcggccacgccggcgcggcgggatatgtggtgcctgtcataagctccagagagctgccttccacaagaccagcagaagagtgggcaaacatgaaatccaatcctgctatccaggctgccattgacctcacagcgggggctgcaggaggtacagcatgtgtactgaccgggcagcccttttgacacaatgaaaagtgaagatgcagacgttccctgacctgtacaagggcctcaccgactggttcctgaagacatacgcccaagtgggtctccggggcttctacaagggcacg

SEQ ID NO: 5942 - DNA, 388 bp, Homo sapiens
ctcttctggaattgcatcttatgcgcctttccccacccatccccacagcccctgcaatacccagtttggcctcttttgcttgtaataacgcagatcccagcgccacggcaccttaggaacagacctttttctttctcgcgtgggggcctggactccttcagtggaagcctctccacgccctctatctgcagggtccccagcctggggtaaagatggccccatgggcccccgaagggcctagtcccagctgtgctctggggcctcagcctcttcctcaacctcccaggacctatctggctccagccctctccacctccccagtcttctcccccgcctcagccccatccgtgtcatacctgccggggactggttgacagctttaacaagg

SEQ ID NO: 5943 - DNA, 1610 bp, Homo sapiens
ctgattcctctatcctccttctcctaacagcacttcaggggcaaccttctcctctatcttttctccactcaccatcaaagaagccctcaatttcccaggattctaggacatttccctaaggtgggggtggtgggacaggtagtaagactgatgccttttaactttccaagacctttctttatttcctgagatgaataaataagtggcaatggggtgtggggatgtggtgaacacagaacaggaactggcagcatgcagctggcaggagggagctgtgatggccccacccctgtgaggaccacctcaatcctaaggcagggggccaaagctctagcagccaccattaaggaaaaacttttgaaattcacacattgtgaagcctgccagtccccgccagggtgaagagctcatggtatccaaccttcagggctaacttttttaccccaaggggccttgtctgcccgggcctgggtacctgggctgctctgtaaaggcaggtaaggggtgctttaccccacttctcaaaaaataaaccaagcttgtcctgagtgtcccagccaggagggcagcccaagctctgggggcagcgtgggtgggaggaggtcctacaggtggtggccgcgattatctgcccttgatgaagccctccagcacacggtcactgcgctctgacaaccagtagccagtcatggccgccacagccccaatgaagatggcggtgaacaccaagtcgcccttagcagccagcgtggccagtgcacagatgatgatgccaaagaacatctgctgcagcaccaccaactcgtcttctgtcatctctgagaagaagcctgctgactctgggatctgctccttcacacagatgccttccatctgcttgtagccctcggcacagatgcagcgataaccgccctcggtgttttcacactgcttgttctctcccggacacacctctgtctcacactcatccacatcgagacacttggagcccacctgctgatagccagggctacacttcttacagcgacctggccctgcccccatgcagcctaggcaggccttggcacagtctcggcactcataggagccctcagtgttcacgcagaattggtcagctccacagttggctccctctgtgccacactcatcaatgtctacacacttgaggtgatgccagggcccagcccttcttgcattgcaaacagtttgattcctcaggtcctgagcatcgggcacaggggccaaaacaagccgaacataccagatggctggcgttgcgttctgcctcaaagtagccaaggccacactggccacaggcctcacccccgtagccggcttggcagtcacagtgcccgctgccccctcgtgtcccttctccttcacactgcccgtagccaccgcagggcctctctgttcccccaggacagggaaggcaggagggcccgaaggctgcctgcggggcagcagagcttcagggaatctgagcacagccactggaagaggtccggggcctcctgctgcttgtgaaaccaccagctctccaccagctcctcactcagctccagcaggcggtggcactcgaagtctgacttgctgcacacaccctccag

SEQ ID NO: 5944 - DNA, 789 bp, Homo sapiens
  misc_feature (1)...(789): n = a,t,c or g
tgttacaggtgtgagccaccacagctcgnccaacatgtggctttcagttcttacttgaagacagctgctctagctagaaacttcctatcggcatctgagccagctggtagagggcattacctcccccacccccaagaacacttcttggaagttacacacaatacataaacttcaatttcaaacagttgcttggtcccactagccatgaagctggatgggacgtaatattctatctgggttgtcatgggccaaattaacattttgagattctgttaggaagacgagaattggataatgggcacctctaacagtgtctgtcagagttgacatacattgtgtatctcctgcaccaaagcatttttgagatcaagtgttcttccagctgagcagaaatttggaaggctattcagtgctgcttagtgtagcagctaataatgttccaacttctatatgatagtttgctttttgttttttgtttttttctagagacagagtctcgttggcccagggctggtctccaattcctggggttcaagcaatcctcctgactcagcctcctaaatgctggggattacagggcatgaaccactgtgcccagtctatatataatagattttagaagaaatttctgccactcagtgactgctttaaattctagagacagaggctgagagaaacttagtagcctgcctgcgcatactgcaagtacagactatataacaagttgaaagagaatcaccctgggtatataatattttaaaacatggaaaaggcattactattgttctg

SEQ ID NO: 5945 - DNA, 257 bp, Homo sapiens
aattgcttagatctagaaccagttgagattagtactgtacaatggtatgctttgattgtatttatagaaatataacataaaacatggaccatgttttgaaatcttagaggaattctggtttaaaatctgaaatactttaaagttttctatccttttactgattatgcagcttcttataacccccaaggtacagattatttcagcttaaaagaaataattggcaccatgttctgagaaagattttgagatatacattg

SEQ ID NO: 5946 - DNA, 545 bp, Homo sapiens
ccgctggaggtgtgtccatggcggcgcttgacctgcgagcggactgcgacttcgctggtcctgcagctgcttggggacctggaggagctggaggggaaacgaacggtgttgaacgcccgggtggaggagggctggctctcgctcgccaaggctcgctacgcgatgggcgccaagtcggtagggcccctgcagtatgcttcccacatggagccccaggtctgcctccacgccagcgaggcccaggagggactccagaagttcaaggtggtgagagctggtgtccacgccccagaggaggtggggcctcgcgaagcaggttctgcggaggcgcaagggccccactaagaccccagaaccggagtcctctgaggcccctcaggaccccctgaactggtttggaatcctagttcctcacagtctacgtcaggctcaagcaagcttccgggatggcctgcagctggccgcagacatagccagcctccagaaccgcattgactggggtcgaagccagctccggggactccaagagaaactcaagcagctgg

SEQ ID NO: 5947 - DNA, 2865 bp, Homo sapiens
cttaaagtctgaataataaaacaaatcccagcagtaatacatttcttaaacctcacagtgcatgatatatcttttcattctgatcctgtgtttgcaaaaatatacacatgtatatcatagttcctcactttttattcatttgttttcctattacctgtagtaaatatattagttagtacatggaatttatagcatcagctacccccaggaacagcacctgacaggcgggggattttttttcaagttgttctacatttgcataaattatttctattattattcatgtatgttatttatttctgaatcacactagtcctgtgaaagtacaactgaaggcagaaagtgttaggattttgcatctaatgttcattatcatggtattgatggacctaagaaaataaaaattagactaagcccccaaataagctgcatgcatttgtaacatgattagtagatttgaatatatagatgtagtattttgggtatctaggtgttttatcattatgtaaaggaattaaagtaaaggactttgtagttgtttttattaaatatgcatatagtagagtgcaaaaatatagcaaaaataaaaactaaaggtagaaaagcattttagatatgccttaatttagaaactgtgccagggtggccctcggaatagatgccaggccagagacccagtgcctgggtggtgcctcctcttgtctgccctcatgaagaagcttccctcacgtgatgtagtgccctcgtaggtgtcatgtggagtagtgggaacaggcagtactgttgagaggagagcagtgtgagagtttttctgtagaagcagaactgtcagcttgtgccttgaggcttccagaacgtgtcagatggagaagtccaagtttccatgcttcaggcaacttagctgtgtacagaagcaatccagtgtggtaataaaaagcaaggattgcctgtataatttattataaaataaaagggattttaacaaccaacaattcccaacacctcaaaagcttgttgcattttttggtatttgaggtttttatctgaaggttaaagggcaagtgtttggtatagaagagcagtatgtgttaagaaaagaaaaatattggttcacgtagagtgcaaattagaactagaaagttttatacgattatcattttgagatgtgttaaagtaggttttcactgtaaaatgtattagtgtttctgcattgccatagggcctggttaaaactttctcttaggtttcaggaagactgtcacatacagtaagcttttttccttctgacttataatagaaaatgttttgaaagtaaaaaaaaaaaaatctaatttggaaatttgacttgttagtttctgtgtttgaaatcatggttctagaaatgtagaaattgtgtatatcagatactcatctaggctgtgtgaaccagcccaagatgaccaacatccccacacctctacatctctgtcccctgtatctcttcctttctaccactaaagtgttccctgctacccatcctgggcttgtccacatggtgctctccatcttcctccacatcatgggaccacaggtgtggcctgtctaggcctgggccaccactcccaacttgacctagccacattcatctagagatggttcctgatgctggggcacagactgtgctcatgggcacccattagaaatgcctctagcatctttgtatgcatcttgatttttaaaccaagtcattgtacagagcattcagttttggctgtggtaccaagagaaaaactaatcaagaatataaaccacattccaggctgctgttttctctccatctacaggccacacttttactgtatttcttcatacttgaaattcattctgctattttcatatcagggtacagacttataagggtgcatgttccttaaaggtgcataattattcttattccgtttgcttatattgctacagaatgctctgttttggtgctttgagttctgcagacccaagaagcagtgtggaaattcactgcctgggacacagtcttataagaatgttggcaggtgactttgtatcagatgttgcttctcttttctctgtacacagattgagagttaccacagtggcctgtcgggtccaccctgtgggtgcagcacagctctctgaaagcaagaaccttcctacctattctaacgtttttgccctctaagaaaaatggcctcaggtatggtatagacatagcaagaggggaagggctgtctcactctagcaaccatccctccattacacacagaaagccctcttgaagcaaaagaagaagaaagaaagaaagcttatctctaaggctactgtcttcagaatgctctgagctgaatgctcttgctcctttcccaagaggcagatgaaaatatagccagtttatctatacccttcctatctgaggaggagaatagaaaagtagggtaaatatgtaacgtaaaatatgtcattcaaggaccaccaaaactttaagtaccctatcattaaaaatctggttttaaaagtagctcaagtaagggatgctttgtgacccagggtttctgaagtcagatagccattcttacctgccccttactctgacttattgggaaagggagaactgcagtggtgtttctgttgcagtggcaaaggtaacatgtcagaaaattcagagggttgcataccaataatcctttggaaactgggatgtcttactgggtgctagaatgaaaatgtaggtatttattgtcagatgatgaagttcattggtttttttcaaaattgggtgttgaaatatcactgtccaatgtgttcactttatgtggaaagctaaattgaatgaggccaaaagagccaatagtt

SEQ ID NO: 5948 - DNA, 483 bp, Homo sapiens
  misc_feature (1)...(483): n = a,t,c or g
ctcagagcaagaagctgctctttgccggctcccgctctcagctggtgcagctgcccgtggccgactgcatgaagtatcgctcctgtgcagactgtgtcctcgcccgggacccctattgcgcctggagcgtcaacaccagccgctgtgtggccgtgggtggccactctggatctctactgatccagcatgtgatgacctcggacacttcaggcatctgcaacctccgtggcagtaagaaagtcaggcccactcccaaaaacatcacggtggtggcgggcacagacctggtgctgccctgccacctctcctccaacttggccatgcccgctggacctttgggggccgggacctgctgcggaacagcccgggtccttcctctacgatgcccggctccaggccctggttgtgatggctgccagccccgccatgccggggcctacactgttttanaggagcagggggcgcggctggctgctgaaagta

SEQ ID NO: 5949 - DNA, 915 bp, Homo sapiens
  misc_feature (1)...(915): n = a,t,c or g
cgctaaggtcattgggaacacgagacatacacccagctgtttgggattcagtgaactgggaattgtccactacttactttactatggcaactctacagcaagattatgctccgttatctagaaaagctcaggagcagattgagaaagaagtcagtgaggccatgatgaagtccctaaaatactgcgatgtggattcagtgtctgctcgacagcccctttgtcagtatcgagctgcaaccatccatcacaggctggcctccatgtaccacagctgtctgaggaatcaggttggtgatgaacaccttaggaaacaacaccgggtgctggcagatcttcattacagcaaggccgcaaagctgtttcagctgctgaaagatgctccctgcgaactgcttagagtacagctagagagagtagcatttgctgaatttcagatgaccagtcagaatagcaatgttggaaagttgaaaacactatctggggctcttgatataatggtgagaactgagcacgcattccagcttatccagaaggagcttatagaagaatttggccagcctaagagtggtgacgccgctgcagctgctgatgcttctcctagtctcaatcgagaagaagtgatgaaactcctcagtatatttgagtctcggttgtcatttcttctccttcagtccattaaactgctatcttcaactaaaaagaaaacaaggcaataacatcgaagngaaccacaattcttcaaaaccaacaagcacattttactcccagcttttgaggaggcaantgcaaataaaaccgcgattttctgggaaaggattcaacntttttcgtccacctgctggggcccgcttgccgccgcgttgcagcgaggagcaatgccntttcgtgantgcacggagcntgttcccggcggtt

SEQ ID NO: 5950 - DNA, 192 bp, Homo sapiens
gggcctcgctgtacctgcacggtaggtgctttcacggggcctgcggcactgtgtgtcggtgcagactcccaccaggaccccaggccggccccaccgtctggaaccacctagaggtgtcccgccctcctcagtcctggggccttctccttacccagccgtctctgggttggtcacctcgtgccacgtgtgccg

SEQ ID NO: 5951 - DNA, 2425 bp, Homo sapiens
gtcgacagaaaatatattttgaaacctgttctgctatgaacagagataacatatctttttactatgctattggtttttaggttaagcttcctaatgcataatagcatagtaaaaagatatgttatctctgttcatagcagaacaggtttcaaaatatattttcttttaaatgtattcagtcagtacacaatcctttataaaagttgtatatatttttttctgtcaataccttcattacatttataaatacaagatttacacagcaccccatcaaaaaaaaaaatttaaaaccctttacaaatatctacatatatttcatacctataaaactttcaaaggggtgctctgttaaaggtgggccctagttaatggtccatttactggtgcagcaaaatacatataaatctgtaaagttttctttgtccataaaacatctcaaaaaatagcaagacacttatcgtgaaactcactcagcttcataaaaccttattttagaaaggaacttaatgtgcgtattcccatgcgattcaaaagttaaacagattgaaataaagatgaattgaaaacaaatgcatactcagagcagttaaggcaggagtgtgatggatgagaaaaactttgagaagcaggacatggaagacatgggaagaagcaaatcataataatgcctttgagtctgaacttggatataaacttcactcgtatccagttactaactctcatcctacttaggaatttccaaattgttaataactttcttagaagcagcctacaatctctatgttgccaccagaatgcttgagttgtttttttcttctgtaaaatcaccttggacccaaccaggacaccaggtccaggaatctgagttgttgagttttacatgatttaagtttgtaatgaaaatttctttcatctagtaaaggtaattactattcaatattattatgtccagaagtgtatatatgctgagtttcattctagctaagaatagaaagtagaataaaaggagactaggtttttatttgacctttgaacaaagacagtagatccctgatactgagtgactctttaagagtggccactcatcaacacctatgggctgattcagagaaacaggaaggtagaaattaagaagaagattctttacctgaaatcttgccagagatggcagtcccgctactgttctgtgcctctgctgaaaagggcatggaaagattgctgccactcttactctatagtcattacaggaaagccatcctttctaccagagagatgactttttctatttgagtttcaccttgggagttgcacattatttgcaaggaagtatttcaaatcttatcttgttctaatgtataaacaggaaaaaaaaaaagaatgtaagagaaaaaaaaaaacaggaggaggatgagcagaatgatggcggtggtatttatcaaacttggccctgaaggatgccgctagcgtctcccatccagcaccatgaagtcaccaggggtgtggctccctccatggctctcagagatggcgtatgcagaatcccactttctgccgagtttacagctcagtgcactgattcccaggctcctcaaatgaagagagctcccagatgctgctgtcttgcagtagtggctcaatgtcctcatcactgccccgttctggggtgttggtcaggctggccgctgctgctgttactgtgtttttgaactccactggctttactgtattcaggaatgaataaggcaaccagaaaagacataaggactatacatgccccaaataaaaacggcgggcctgggatgacagctccctgcaggggaacgttgttagaattcaatttcgggcccaactcagtcagttccacatggaacatgtagaatatgaagccatacagtgctgcccaggccattgcatagtcctcttattccagttatgatcccctgggcaactccttgctgatctgactctgcattccgagagacgagggcactgattgccggaaacgtgatgctggacatggcagccacggtccctgctgcccacatcatccaggcctgtgatccaaaaccgtaccaggctaactggagcatctggaagcccaagccaaggaggacagtattcttatttcctaatgatctcatcaagatgctaagaaaggccgtctgagccacaatagacagaattcctaccatagctatgaatgctgcaattttaacagatccaaaacctatgacctgcctgagatagagaaaaaaaacttgaatactgtccagcttcaggaaggtatgaaagaaacacggtgatgcagattagtaagacagtagaatcttttccaactttcttcaacgacgcaaaagggtctgcttgtttccaagaaatctgagctccccaggaaaccggtctcattttctcaggcagagattct

SEQ ID NO: 5952 - DNA, 936 bp, Homo sapiens
gctgtgctgatgtaccattaataatttaagccagtggttcttggcaggtgatcccaagacctgcagcttcagcatcacttgagaagttgttaggaatgcatactagtgggccccgcccccagacatagtgaatcagaaaccaacagggaggcgcctagcattgtttttttaacaagtgctgggttattctgatgcacagtctagtttaagaaccactactttgggtaaacgttttgactgtttaaagtttatggcggtgaagtgggcgtcttcaaagactagtacttacacagtttagaagatttcaaggtactgctgacagtagtttattatgtcagtatacatacatgtgtagagatcataatttagttcccttcttaatgttacaatttcttagtttacttttcctaaagggccatagcataaattcttgattcctggtggaaatcttttctgaggtgtgggggtgggcaaggtgtggattgctgtttacgatagtgccttcattagttttagttctgtctgttttcattcattattgactcaaaggtattagaacaggcccttatctttttcctattagatttatttttgttttttactttatgtaagtccagaatccttttttaagtgatgactactgatgaaataatgttactagtagctgaattttagacttgatgctatgttgattaatatttaaatggtgaaagtaattaggcaaaataagcaattctgcttttctgttgctttcagaatttttaggctgtaaaattgtctcaggcaggaagtcagtctatatctctctcaagttcttattgtaggtcatttttttttcagcacagctctaatttttaaatatttggtataacagcttctggcatgtgacctagttaatgttgaaaattaactgatgaaaacccttgtagatctgct

SEQ ID NO: 5953 - DNA, 560 bp, Homo sapiens
aggttgcttgagcccaggcgtttagaccagcctggcaacatagcagaccccatctcaaaaaaaaggggggggcagtgattgtacctaacaagggaagagaatctttcagatgaagggtcaacagaaaataaagaccctaaacacttctaaaagtagaacgcagttgaattttgcataactaatctgggaatggagtaaaagaaacaaggttacagaatgtagtgctttagggactttagaaattaggggcagtatgtatgagaatgtgtgctggacactggaggtgtcccaggagctttgaagcactaggtttggttcaatcccgacaaactcccagccatgtgcaagcactgcctcacggggtgcccagagccatgaattcttttcatctgagttggcatccggtcagctgagcatggaacatggggccaccccaaacgccgtacagcacaaccattaccaacactgtctattgctagagcacagcttcctgcatacataggacactgggcttctgactgcaagtttctcctttccaaaagccagctctaagacttgtc

SEQ ID NO: 5954 - DNA, 1712 bp, Homo sapiens
  misc_feature (1)...(1712): n = a,t,c or g
ggacgatgtccccgagcggggtctcatcagtgacgcccagtccctctacgtggagctgctgtcagagacacctgccaatcccctgctgttaagccttcgatttgaagcctttgaggaggatcgctgcttcgcccccttcctggcacatggaaatgtcactaccacggaccctgagtatcgcccagggggcactggcaaccttctcgtgcctcccaggatatgccctgggagccccctgggggcccccaatgccatcgaatgtgtggatcccacagaaccccactggaacgacacagagccggcctgcaaagccatgtgtggaggggagctgtcggaaccagctggcgtggtcctctctcccgactggccccagagctatagcccgggccaagactgcgtgtggggcgttgcacgtccagggaagagaagcgcatctttgcttccaagttgagatattgaatgtgcgggaaggggacatgctgacgctgttcgacggggacggtcccagcgcccgagtcttgggcccagctgcggggacctcagccgcgccgccgccttctctcctctgggcccgacctcacactgcagtttcaggcaccgcccgggcccccaaatccaggcctgggccaggggcttcgtattgcacttcaaagaggtcccgaggaacgacacgtgccccgagctgccacctccggagtggggctggagaacggcatcccacggggacctgatccggggcacggtgctcacctaccagtgcgagcctgggttacgagctgctaggctccgacattctcacttgccagtgggacctgtcttggagcgccgcgccgcccgcctgccaaaagatcatgacttgtgctgaccctggcgagattgccaacgggcaccgcaccgcctcggacgccggcttccccgttggctcccacgtccagtaccgctgcctgccagggtacagcctcgagggggcagccatgcttcacctgctacagccgggacacaggcacacccaagtggagcgatagggtccccaaatgcgccttgaagtacgagccgtgccttgaacccgggggttcccgagaatggctaccagacgctgtacaagcaccactaccaggcgggcgagtctctgcgcttcttctgctatgagggctttgagcttatcggcgaggtcaccatcacctgtgtgcccggccacccctcccagtggaccagccagcccccactctggcaaagttgcctatgaggagctcctggacaaccgaaaactggaagtgacccagaccacagatccatcacggcagctggaaggggggaacctggccctggcatacctgctgcctctaggcttggtccttgtcctcgggcagtggcgttttacatcttactacaccaagcttcagggaaagtcccttttcggcttctcggggctcccactcctacagccccatcaccgtggagtcggacttcagcaacccgctgtatgaagctggggataccncgggagtatgaagtttccatctgaaccccaagactacagctgcaggacccaggacgcccctcccctcctcattcgggcagagggaaatacgggacccggtctctgcctcctggctgccctcctccctggctgtgtaaatagtctccctatccacgagggggctttgatggccctggagatcctacagtaaataaaccanatcctgccgccc

SEQ ID NO: 5955 - DNA, 1123 bp, Homo sapiens
tttcttcaaatgtttttattggatttaaaattcatttaaggggtatacagatatacaactagtttgatcagctactaatatattttggtgtccctttatttttgtacccaagagccagttcactttttctccatgttcaatatttagcttcggtaaaatgttgccatgttcttcctcatctgttactgaagcgttagtatttccaccctgcttggtgcaagttcctcttttaggtttcttcctgtgggtacgttttgtgggactcttctgttttttctcaacttcactgtttgcatcccacaacgtgatcttcccatcattccctccagtaagcagcaaataggattctgggagaaagcagacctgggatacccctgaagtgtggcccttaaatcccagttcctggttcacacttaactcccatcacccgaaagattcgaaccttaccatcttctgcaccacaactaaaaatattaccacacgaagccacagagatagaatgggctagggcagggtttaagagctgaccaggtgactgtgggccttccatttcttctgtttcatcctcctgtaaatttgtaatccagagtggtcgggctttttgaagactccacagcatcacctgcatatccagtccacatgacaccaggctctgagcctctgaggccgaaaagccactgaggagcagatattggaatgtctcttcaaggattctgataactttcttgttttccaagtctaggattttgattgccccagagtcgtcagcagaagccagcaggttttccgtttgattcaatgaaagacaattgatttcttcttcattcacatgaaaatggtccaaggaatctttgagggacctgacatccagtacactaatggtttctccatgtgaggcatagagcttggtgggacaggagggagaaaataagacactggtaacatcatcagccccttggaaccgcgtgtgtcctaatggagttccatcttcaccccaagccgtgagatctccgccctctgctccagaagccagcagcccttctttacttgcattcaggcagaggacaggagaagaatgcccacccgtccacttgactgccataatggtcccggagactctgcg

SEQ ID NO: 5956 - DNA, 262 bp, Homo sapiens
gcgagctacagaagcttcagtactgcgtgggcatgtgcggagacggtgccaatgactgtggggccctgaaggcggctgatgtcggcatctcgctgtcccaggcagaagcctcagtggtctcacccttcacctcgagcatggccagtattgagtgcgtgcccatggtcatcagggagggcggctgttcccttgacacttcgttcagcgtcttcaagtacatggctctgtacagcctgacccagttcatctccgtcctgatcct

SEQ ID NO: 5957 - DNA, 1570 bp, Homo sapiens
gtcgactttttttttatatttgtaaacatagcattttattaacaaaatgtttacacccttcttacaacaaaacagtgatttagcatgttatactctataaaagtgtattatagaatattcaagctaaaacaatattatttaaaagtatggcaaatcaactttcatttgcaaactatctactatgagcataggcatgaaaacaaaaatcttacaacaaaaaacaaaaggtctagttttcttttgtcagcatctataaacaatacaggcatcatatggtttacatacacttaggtccagcccaagggttaagactgcaaaaataaagtcttcaaacatccacagaaggcttgggccaaaccaccactgcagcattccatgacaggtaaccaggccatgtgtcatgcagtaagtccaaggccataaatttgggctgtttataatagtgctacaaagcggccaaaactgtaagcaactgaattttactttcgtaatagatgctattataaaaaggcacaaatatcttattcctttcatccaggtcttgagaaggcatgacattcttaggagaaagagagattgctggtaggacggcttagctttttttttttgaaaaatgtctaggctcattgccatagctgtttttcttcaagacttttaatttggacttttacacgcttaacaaatgctttattacaaattcagcgaagttctgaccacttatgttaactatcttattaccaatggtaaaacaaaacaaaacaaaaaaccaaaacccattttgttaactggccgtgttcccacggtaagcgagcgctgctattctctttctgaagcagcggagttcttcacctaacactggcctctgtgtttcttattttatttgttttaatgctctggccggtttttttttctttcaaaaatgttaaattaagagttgtacatgtctttgaggtgcctatgatattttgatacctgtatcgaatgtgtaatggactgaatgagggtaactgggatttccttcacctcgcttatcttttctttgtgttgggaatattcttattcttctagctgttttcaaatatacaatcaattattgttaaatgcagtctccctactgtaatatcgaatgctggaactattccttctatctaactgtatttctgtgcccactaatcaacttctgttcatccccaacccccaggcctgcgcatttctgactgtgcttgttagaaaagccccagctggagggggtgagcagtccctgttgctgtgaccacggaaggccgcaggggaaggcagattacatatgtgaaggaggtgtctgtggccatgtgtctttaagggagagcccacagaaaaatgagcctaagggaaataaagcgagaagtctgcttcaatcacagagacggtaaggtgtaaattcttaagaaggtcagaggaatgattgacaattatgtgagtgactcacaaagtgaaatgatggaaagactgaactgcatgagagttaaaaaaaaaatcttttccagggcaataaagctctgtctacacagcgtaacgaatggtttaaaaa

SEQ ID NO: 5958 - DNA, 3341 bp, Homo sapiens
  misc_feature (1)...(3341): n = a,t,c or g
cgcggggaaccggaaacctaggaatcccaaccgctccttcagggtgttttccgcgattctccgagtggagttaggggcgtgcagacacttccctaaccttggaggcccgggagtggattttcatgaatgaacggagccgggactgactttgcctacggcaaagaaggaaaaacggtgccctactgtcttcagacgtcgcaaggatcaagaaaatttctttcttcatgaccctgcccttgccagaatttcctgcgctgttccacctcattcaacttcagcttgccttgcgccatggactggcagccagacgagcagggcctgcagcaggtcctgcagctgctcaaagactcacagtcgcccaacacagccactcaccgcatcgtgcgggataaactcaaacaactcaatcagtttcctgacttcaacaactacctgattttcgtcctgaccagactcaagtcagaagatgagccaacgcgctctctcagtggcctcatcctcaagaacaacgtgaaggcacactatcagagcttcccaccccctgtggcagacttcatcaaacaggagtgtctcaacaacattggcgatgcctcctcgctcatccgagccaccattggcattctcatcaccaccatcgcttccaagggtgagctgcagatgtgggcccgagctgctgccccagctctgcaacctgcttaactcggaggattacaacacttgtgagggagcctttggagccctgcagaagatctgtgaagactcatcagagcttctggacagtgacgccctcaacaggcccctcaacatcatgatccccaagttcctgcagttcttcaagcactgcagtcccaagatccggtcccacgccatcggctgcgtgaaccagttcatcatggaccggggcccaggcgctgatggacaatattgacaccttcatcgagcacctatttgccctggctgtggatgatgaccccgaggtgcggaagaatgtgtgccgtgccctggtgatgcttctggaagtgcggattgacaggctcatcccccacatgcacagcatcatccagtacatgctgcagaggacccaggaccatgatgagaacgttgcccttgaggcctgtgagttctggctgacgctggccgagcagcccatctgcaaggaagtcctggcctcccatctggtccagttgatccccatcttggtgaatgggatgaagtactcggaaattgacatcatcctgctcaagggggatgtggaggaggatgaggctgtccccgacagtgagcaggacatcaagccacgcttccacaagtcacgcacggtcacactgccccacgaggctgagcggcctgatggctccgaggacgcggaggatgacgatgatgatgatgctctgtccgactggaatttgaggaagtgctcagcggctgcactggacgtcctcgccaatgtcttccgggaggaactgctgccccacctactcccactactcaaaggcctcctcttccaccccgagtgggtggtcaaggagtcgggcatcctggtgctgggcgccattgctgagggctgcatgcagggcatggtgccctacctgcctgagctgatcccgcacctgatccagtgcctgtcggataagaaagccttggtccgctccatcgcctgctggacgctgagccgctatgcccactgggtggtcagccagccacccgacatgcacctcaagcccctgatgacagagctgctcaaacgcatcctggatggcaacaagaaggtacaggaggcggcctgcattgcttttgccaccctggaagaaaaggcctgtacggagctggtgccctacctcagctacatcctggacacccttgtctttgcctttgggaaataccagcacaagaacctgctcatcctctatgacgccattggcaccctggccgactctgttggccaccacctcaaccagccggaatacatccagaagctgatgcccccactgatccagaagtggaatgagctcaaggacgaagacaaggacctcttccccctgctggagtgtctgtcatcggtggccaccgccctgcagagtggcttcctgccttactgtgagcccgtctaccagtgctgtgtcaccctggtgcagaagacactggctcaggccatgatgtacacccagcaccctgagcagtatgaggctcccgacaaggactttatgatagtagcactggatctgttcagcggcctggccgagggcttgggaggtcacgtggagcagctggtggcccgcagcaacatcatgacattgttgttccagtgcatgcaggactcgatgcctgaggtccggcagagttcttttgccttcttgggagacttcaccaaagcctgttcatcccatgtcaagccctgtatcgccgagttcatgcccattctgggcaccaacctgaacccagagttcatctccgtctgcaacaacgccacctgggccattggtgaaatttgcatgcagatgggggcagagatgcagccttatgtgcagatggtcctcaacaacctggtggaaatcattaaccgacccaacacacccaagacactgctggaaaacacagccatcaccatcggccgcttgggctacgtgtgcccccaggaggtggcacccatgctgcagcagttcatccggccttggtgcacgtccctcaggaacatcagggacaacgaggagaaggactcagccttccgcggcatctgcatgatgatcggtgtcaacccggggggcgttgtgcaggactttattttattctgcgatgctgtagcctcctgggtgagcccgaaggatgaccttcgggacatgttttataagattctccacggcttcaaagaccaagttggggaagataactggcagcagttctctgagcaattcccgccgctgctcaaggagaggctggcggctttctatggggtctaggtgatcatggagactgccaggtttctgtctgcgtcgtcgtcggagggattactggggagtgcgctgcatccggaagtcgctgtgccctggttgaggggggttagggaggagtgagtgggactcaaatccagatnccttccccgtccgtccgtccgtccgtccatccgtccacttnccctcctggcaggtgggtggggccaccatgctcatcctacaaacggggaggtgggggggacttctggtgggcaagggcccctgggctctaatagggtcatctctggcagcccacttgggccagctacgtgggagggaggaattacacagctgaccgaatccggcttcggatgaggtgagggaggagcaggtctctggaagccatttgtt

SEQ ID NO: 5959 - DNA, 955 bp, Homo sapiens
agcttggcacgagggtgaccttgggagtcgccctgtcagcacgcacatgcttgggacccactccacacactccctgccagctttgttgcagcctcagctggtggtgtctccgtccttatcctagcctagctcgcagggtgagaaccactggagtggctggggctggccagaggtcaccgtttctccttcctgtgtgctccagtggcttttgaagacactgggttgggacctttttcctgaagagagctgggtgtagccagagctactggcacctaccccgagcatctctctctgtaagcagcttcaggggcagtccgtttctctgtgcttctgaaacccccttctcacgtttcaggccccagttttaactcaaggcctggggcaggggccgtttaattgatgatgacagaggacacaggtttttgccagcaaaaaggaaaaccaaggcttggtggaagggaaaggtggtgtgtcccctgttccctattccatctcccctgggacttcctgctcatcatagtacccagtgagcccagagatcctactagactgggtcagcaattctagagaaccttccggaatagtctgggaacatggtcaaggtggaaggggctcccctagagagggtgggggtgtagttacttcccagttggccagaaaactgggccttgcagacccccttagcattttttccctttttttccttccctgctttctacttctttggggagccccttgtgttttggagtctgactggagtctcgcatcctggggcctgctccatccatccctcctgggcgccagaccctccatccaagccctgtgtctttccatagtcagggtcaggccctgcatctattccaaggggcactcagtacacattccataaattagctgggtgtccctgcacgcccaccccatgaaactcgagcaggtctctggaagccatttgtta

SEQ ID NO: 5960 - DNA, 1419 bp, Homo sapiens
gtttttttttccatggcaaaacagccctttatcaagagttgcaggataaaaatagtctttgcagccagacatccctccaggcatgtcttctgacctgagaggggccagtgtcctgtacagtagaagccggggtttccgtgctgcacccgcagcaccagggcacgcaccgtggggaggcagccttgggctgtgccgcgcacagggcccctgcatgctgagcaacagcctcacatgagcaggcagcacggcctcctctccacgggagcctccaccgccggggctgtgagcttgagcaggggtgggtccccgcctgccctgaagccacagtcaggctggggggtcaccgtgtcaccaggcaggccaggctcagctgtctcagggctctcgggcccctcaggtgggggtcgctgcagcttggcagcagctcgctgggcgcttcaggtcagccagggtgtggtgggcttgtcgtggaccagggtgtggggggtggtgctgtccagggggctcagctggtaggagacactccggtctagtcgcttggagtatagatgccgcactggagccccctactcggccattgtgcggcctgaccacttcggggttgtcctctccgggggcggcggcctgagctctgcgctgtctggcggtcatcgttgtcctcgggcggctccgggctggtgggcggcggctgttgccacacgatggctcctgggcgtgctgcttgcggtacaggtcggtgcgctgggttagctcacccgcctcaccaccttcccgcggctgccggcgctggaggtgcggcggcgcagcaaggagcgctggcggctctgggcgcgcaggagggcgtcgtgcttgtgcttcagctccagcagcttggcccgcacctcctcgtccccgcacacatcaaggggcgtctcgtccatcagggactttgcgttcaggtcggccccgtgcgccacgagcagctccaccaggggcacctggccccagtaggccgcggcgtgcagcggctcccagccgtcttggtccttagcgctcaggctggctcggtgttccagcagcagggcagccgcctcgctgaacccgttggcggctgcgacgtgcagcagcgtggccccgtggtccaggggggcatggaggtctgccccggcctgcagccggctccggatgtcgtccagcatgcgcagttctggcacggcccgggcggcctcgatgctgtcctgggtgatgccacggtcggccatggcagtctccaggcagtccagcgtctgctcatcatcacacaggtcatagggcatgttcccgtcggtgttgaccgccaggagattggcgccactggcgatgagcagctccaccaggtgcaggtggccgcaggtggccgcagcatgcagaggcgtccagcactcactgtcacaggcattg

SEQ ID NO: 5961 - DNA, 355 bp, Homo sapiens
tttttttttaaaattacttaaaatcactaatggaagaacagttgataaaatatctgaatcccatcaatttacatgtaaatgacgttaataatacaggttgatctagtaaaataatacaagttgatctagttcatgggatgaataagaagaataaaaatgagaccaaaataatgattataaaatggtcaaatgagaaccaaatgagagctgggcggaattttagacgctacctaaactaattctcttgttccctagagaatgagaaaaatggaggcaccacgagataaaatgccttatccaaagttacacagctaactgcaaaagagaggcaagagtagaagtcaagtttcctgac

SEQ ID NO: 5962 - DNA, 860 bp, Homo sapiens
cctatacttgactgtgcttcattttaataaaggataatttgatctgagtgttctgagcatcagactaattctgaagcatatttgctagaggagctactttgcttttcacaatggggtggagaggattctttcacttgtcccattaaccctcttctagtctagatgagatgaaatctgttaatgtgtgtgtagaagaaaacgtatgttcttctactcagcattgcccttttccacctcctcacttcacctccgagtagcttgtttatcaagaatgaatgaatgtctttgtcttaaattttgcccatgtgttaaaagatgtaattctcagaatgggagagaaatgactacctttgttcctactcttttatataattatccttttagggaaagacttggtcaactctaatatatctagaaggaagactatatctggtgtagactaatatgagatgttttagaagagttaacctgaacactttgagggagagattattcttgccagcaaaaagctagccagggaatgagcctaccacattatttgagaatatcaaacctcaggcctggggggatgaggggaagaagattaccagaagtgcaggaaagagaagtttgaggaacacccttgggcttagcaacatgtgataatgcaaagctgttataacctgttaatcctacgtactatgtgttctgtacctttacatgtttttaaatttaagatagtttgtaaggaactgtacaaaaaatgcttctggagatttctttgggcagaaatgcctttcatctataatttcatggagaactgcttttaattaggcctagggtgaaaagtaagtcctagcagtgttaaatatgtataattg

SEQ ID NO: 5963 - DNA, 537 bp, Homo sapiens
tttttttttttttttttgacacttaagtattagcattttatttcaagcacttatgctcatccttgagtttaaaaagtctaacaaaatctaagaacccgggttcctttaaacatgtttacctacttgtggagacaccaacaggaaccagcaaaccattgtttatttatttacataatgtatctcccatggagacctatttggcttaccactcttcataggcctagtacaatctcatagagcaccctagggatttcactgatcaatacctaatggcacctaaaagtacctatgcttcttttcttgttccatgaatccgtgaaagtctgcagatcctcccagctctagaagcagtcatgttttttaccaaaatcagcattttgctttatggaaacacaggcaacatctgatagcgaagagggcattaagatttgacttaaccaaaattgcctgacaacgaaaaagtcatttcatcattctgcttggcaatataggtcttcaggaaatcaactgtgataaaaaagccggggaataactgtt

SEQ ID NO: 5964 - DNA, 297 bp, Homo sapiens
gcacagcagggtgctcagcgacctcacccacctggcggctctggcctacaagtgcctggctccggaggagttgcggagtggctgcacctggacgatgatgggggtccgcccgaggggctgcagggaggaggtgggcccagccctgccccctgcagcgcctccggccccagccagtctgccctctgccattgggggcggagaggacgaggaggaggccaccgactatggagggacctcagtgccgactgccggggaggccgtgcgggggctagaaacagctctgcggtggctggagaa

SEQ ID NO: 5965 - DNA, 290 bp, Homo sapiens
cctggctgtgggtgtggtcttctccatgatgactgtggtctgccgcacccggagctcctccaggtcccggggctctgcatcctgagctatccaacaccactgtactttgggacccgtgggcagtttcgctgcaacctggagtggcacctggggctcggagaaggagaaaaggtgaaggagcttggtttaggagggatgtggatcctcagggagtgggaggcaggtgggtgttctgagggggatccttgtgctcaaggggtgcatgttcatgctgtgtttcgggagtggtg

SEQ ID NO: 5966 - DNA, 154 bp, Homo sapiens
tgggacctcagacctggctaccgtggagtcctacgaccccgtgactaacacgtggcagccggaggtgtccatgggcacaaggcgaagctgcctgggtgtggccgccttgcatggactcctgtactcggccggcggctatgacggggccttcttg

SEQ ID NO: 5967 - DNA, 1808 bp, Homo sapiens
agagctggattggctggggatatggtataacgagcctgagccttctgtacgtgtctgacactagcactgtcaggcagctttcggctggggctcacccatcccataggaggcctatgtggagcattaactgtggccaaaggaggcagcgggaacaggctgcttgctatctggaaagatgacatatttgtgccatgcttgttttttcacccaggtttttccctctttgtgagatctgagctttagtggaatgtagaatgtggcaatcttaaggtcaccaatcagtttttgttcttttttcctggatctaccctcatggtcgttttcaacatagcgggttagagttcttatactgttccagttcaattccaagaattgcaaatgtttattggacccctccatcttgatgatatataaaaattggaagccaaaccagttcttaaatgctacatgcaactcccagattccaaaggattcaagttctaattataacctttgaagcgtatagaatggaactcattcagtttgattcagttcttacctctgtcaggaggaatacagttcctgttcatcctgtgttctaagatctccattgaacagcactgatttcctttcattaggcaaagtgatctttgtctctgttctaaaatggaggcagtagggagcaaaactattcttctcaagcatcctttacaccatactttacttctggtatggtttattaaccacacacacacacaaaagtgaaaaactgtgttgggggggagacactactcctacttatcttgctcataaagccttttctggtgggatattaaggccctggtgtcttacagaaaccatcacgtatgtcgcagcagcatttcacccctgaagtctctaaactctgagcctgaaaagatttgtatttaatacacataacattttttagttcattctgcctttcctatttgttccagtttttgcttggttttagtttggaggggaacttaagtacacagatccttatctctccccatcccctagcctcacaaaacacagttgagagtcttttaagtacctgagctctcgaagctacccagaactgaactagactcccctaccttagactgggtaccctcaaacacaggactgaagcttaattgggaatttggctttatggagaaaagaatctttttcaaagtttgtgtcggaaggggagggtgaggtttgcccactgtctctgcaggaaggctccggcttaatctaggaagtagattccagctgcacgatgaggaacacattagcttttgggatcaaaccaggaatatgaatctgtaattattaagctcattgccaacccacaagatatgtttctgaaaacctgtagtttcttaatttaagtccatccccttcattaacgctacagttgtgactcacactgatcccaaacttttaagtgctaaatattaacatttagcattaactgtcttgtcaagcgaaaggccttctctacaacctagtccatctcacttctggtgctacctgagttggacagaattctagctcatggttgctaggaaagctaggcctctgatcatagaagcagatagcttcagtcccagtctaggcctagataaatgactcttattaccacaacccttattattttccaatttcctttctcacatactgtacacaggtagtattttcaatgtgaatccaaagcttgtctggttctctgaaaataattttttcccctttaggttctttacattgtgataatgctgtatttaaagagaatatttaaatgtaatattaaagaaatattc

SEQ ID NO: 5968 - DNA, 2231 bp, Homo sapiens
  misc_feature (1)...(2231): n = a,t,c or g
ggccctcagtcccaggntttgtgtggtgtagtgatggacaggagcctcgtccagggagagctggtgacggcctccaaggccatcattgaaaaggagtaccagccccacgtcattgtgagcaccacgggccccaaccccttcaccacactcacagaccgtgagctggaggagtaccgcagggaggtggagaggaagcagaagggctctgaagagaatctggacgaggctagagaacagaaagaaaagagtcctccagaccagcctgcggtcccccacccgcctcccagcactcccatcaagctggaggaagaccttgtgccggagccgactactggagatgacagtgatgctgccacctttaagccaactctccccgatctgtcccctgatgaaccttcagaagcactcggcttcccaatgttagagaaggaggaggaagcccatagacccccaagccccactgaggcccctactgaggccagccccgagccagccccagacccagccccggtggctgaagaggctgccccctcagctgtcgaggagggggccgccgcggaccctggcagcgatgggtctccaggcaagtccccgtccaaaaagaagaagaagttccgtaccccgtcctttctgaagaagagcaagaagaagagtgactcctgaaagccctgcgctaacactgtcctgtccggagcgaccctggctctgccagcgtccccggccacgtctgtgctctgtccttgtgtaatggaatgcaaaaaagccaagccctccgcctagaggtcccctcacgtgaccagccccgtgtagccccgggctgacccagtgtgtgctcagcagccccaccccaccctgccccttgtcctctcagagcctcagcttctgggggagacatgctctccccacaggggggaggcactaagtcatggtcctggctggaaggtactgaaggcttctgcagctttggctgcacgtcaccctcctgagcctcacctttcctgccgtccctcctgttgtgaaatcaccacattctgtctctgcttggcttcccctccaccctaaagtctcaggtgacggactcagactcctggcttcatgtggcattctctctgctcagtgatctcacttaaatctatatacaaagccttggtcccgtgaaaacactcgtgtgcccaccagcggccttgaagaggcaggtctgggccagatgctgggcaggaaaccccagcggcagatgggcctgtgtgcacccaacgtgatgctatgcatgtctgaccgacgatccctcgaccagaatcagattcaggagctcagtttctttttcacttgggtctctggattcctgtcatagggaaggtatatcaggaggggaagaggcctttctagaattttctttgagcaggtttacaatttagcttacatttttcgactgtgaacgtgaataggctgctttttgctttcttctttccagaccccacagtagagcacttttcacttatttgggggaggcttcaggggactgttctcaccttaactcagccagaaagatgccctagttgtgatcaaaggtaactcgaggtggagggtagccctggggcccctcgacatcaccgtcattgatggagcctgaaccgtgtgctcctcggcagatgctgttgttgttacttccctccaagaggctggaaaagggctcagagctgctgagcaggaaccggagggtgacccatttcaggaggtgccggtaccagcctgactaggtacaggcaagcttgtgtgggcccaacaggcccttggtagagctggtgccagatgtgggctcagatcctgggcatgatgggccgagccacctcgggatcccactgattgggccagccgagcgagaaccaggctgctgcatggcactgaccgccgcttccagcttcctctgagccgcagggcctgctacgcgggcaagcgtgctgcctctcttctgtgtcgttttgttgccaaggcagaatgaaaagtccttaaccgtggactcttcctttatcccctcctttaccccacatatgcaatgacttttaattttcacttttgtagtttaatcctttgtattacaacatgaaatatagttgcatatatggacaccgacttgggaggacaggtcctgaatgtcctttctccagtgtaacatgttttactcacaaataaaattctttcagcaagttccttgtctaaaaaaaaaaaaaaaa

SEQ ID NO: 5969 - DNA, 573 bp, Homo sapiens
gcgacatgttggtagaaaaggctgaccggcgggagttcattgacctgttgaagaagatgctgaccattgatgctgacaagagaatcactccaatcgaaaccctgaaccatccctttgtcaccatgacacacttactcgattttccccacagcacacacgtcaaatcatgtttccagaacatggagatctgcaagcgtcgggtgaatatgtatgacacggtgaaccagagcaaaacccctttcatcacgcacgtggcccccagcacgtccaccaacctgaccatgacctttaacaaccagctgaccactgtccacaaccagccctcagcggcatccatggctgcagtggcccagcggagcatgcccctgcagacaggaacagcccagatttgtgcccggcctgacccgttccagcaagctctcatcgtgtgtccccccggcttccaaggcttgcaggcctctccctctaagcacgctggctactcggtgcgaatggaaaatgcagttcccatcgtcactcaagccccaggagctcagcctcttcagatccaaccaggtctgcttgccagcaggg

SEQ ID NO: 5970 - DNA, 2084 bp, Homo sapiens
  misc_feature (1)...(2084): n = a,t,c or g
tgccatttgaaacatttatttcaggaaatacattttcaacactttgtcatttatacaaaaagacaaatttcttgggaggcacgtagcaaaagcccnattgaggaacagagcctgatgaaacgaacaatttttcaaagtctggttacagagaaggaaagtgaagcatctcaaggctgggatgctgctgcccacccccaccccaccccgccgccaagtgacattgagggctggggcagggccacatggcctggggcccctgggcgcctgggccactgcatttccttcaaaatcttggttttggcaaaaacatggcaagtcggcaaagtaaactgtctcgccagtgcggggtggtgaaggggtccttcctctcttgggccgggaggggagtcagacgcccagtgccccaacttccatgcacacacactcacactcatacactccttctcgctgaccttctcctggctgcaagcagccaagcccggtgccctggaanatttacctggtgatgtgttgcacctgagtggagtctcatcaggcccctctttctccccaggagcaaagacaggtaacaggaagcaggaagggactttggtcatctgtgccctgcaaagacatgcccccactgggtcccctcgtggggacagagggtgaggggccgggccgtgctgccacgaaaccttgctcttcagctgtggactgtgcacccctgacgcccgttctctcctttctaggggttcgttaccatgggctctgaggggaggggcccaggcacgggtagatcaacagagtcaggctcgcctggcctcccacctccccagctcagagagtcagcaaggcctgggcccaggaggggtgagtggcaggggtggctggctgggcattaatgtaactacagcccagtcttgggccaaacccagacactagacagacagacggacacgcatacacatggacacacacacacttccctggtcacttgggcagggcaggcgccgggccatcacgccactctgaccagcccaagccacggcccacacgtgcccccggccaaacctttccttctggcacctttccatggctccctccctcagctcctccaccagactcacttgcttagaccttttcaaaactgggggatgagggggtaggggtcatctctccttcctttttatcctcaatcagatcccagcgcatcagcagcacctgcagcccggtgggggcgggggtggcgtgagagggggatggcagggagatgaagacgcctccctcattccagcctgtccccgcatctggccgagcagtctgcggatggctgagataaaggcactttctgctccaggaggggcagctgccagggggcttggagtggctgggcagtcggtggcaggggacccctgggagttttctacccttaggagcagggcaggggtaggggctgagtgatggccacaccatgtggcgggcagggggtcccaggtgctcctggtggggctgcattctcccctgggctctgacacactccaggggacagggccgatggggatggaggggagcgtgcagcccactgggctcctctgcaagtgcgaggcctggcccccaccctcatactccggcactgagaaccccacacggacggatgatctgcacaccgaagctgctcttctgagccctcggggagccaggcctggggacagagggtcatgtcaattcagtgggtgctctcaccccctgcctgtggctccagtgcagcctccccacaacctcggcggaggccgcggcctcatcactgactcactcggagggaggccccttcccttgtttcctggcagcatgtcgaaggggtggggaacgatgacaaatggagaaaatcatataaaataaaatggggtggtgggagggcctgggggggggacggaaatgacttgggggcaggatcccgggggtgggcagggcggcgtctacatctccggggcttctggctccttctccttccacncgttggccatggcgctgctgccctcgttgaggcgcttcacacggtacgcctcgaagtggatgctgctggtgatgtccttgatgttctg

SEQ ID NO: 5971 - DNA, 217 bp, Homo sapiens
tctatattgaggattcgcagtgaagcgacagctgctattcattctttctttaaggacagtggctttgtacatattcatactccaataatcacatccaatgactctgagggagctggagaactttttcaacttgaaccttcaggcaaacttaaggtacctgaggagaatttcttcaatgttcctgctttcttaactgtctcaggacaacttcatctag

SEQ ID NO: 5972 - DNA, 842 bp, Homo sapiens
atttttttctgcaatgtttaatgaagtactgaaaatgagataaggatttatcacaaagtatatggcaagggagaaaagatgcaacattattttatttcgagctactagatggttctcacaaattacacagggagtgatttaatgattatagacaacgtaaaatacattatctcattctgttttagagtttaaaagaaactttgagactaattcaatttcttcatttcttaattgaggtaatggatttgagagtccccttgctataagtacctcttcttgcgggactcatccttacgtgaaataccctcaactttctaagaaaatcacaaccacttatattttttctatgatatcttatggcacaacaattacatattgaaatctgcatttctaaaatccaaacatgcattctgctgtatggcccattcatgtgccggtgtctctgccatggggggtgcttttccttaaccaatcttccagctataaaaggcatgaatgaggaaaccttgggaaagggataacatctttgatattgtcaacacccataaccttcatgtggcacagatccaaatcgacgaaggtccagataccattggtagacttctgtaagtcccgatctggctaagcgctcctctaagaaatggtatcgttcttctctgaggcctcctccaaagagttccccaactccaggaaccagaagatcaacagcagcaaccgtgtgctgagggccatcttcattatccctcatgtagaaaggcttgagtgttaatggataattaataacgaagacaggtatgttgccacagtgcttcaccaggtacttttcatgttcagtccgtagg

SEQ ID NO: 5973 - DNA, 786 bp, Homo sapiens
tgggaactttgcaaatatgagcatcatatgtgttaaggctgtatcatttaatgctatgagatacattgttttctccctatgccaaacaggtgaacaaacgtagttgttttttactgatactaaatgttggctacctgtgattttatagtatgcacatgtcagaaaaaggcaagacaaatggcctcttgtactgaatacttcggcaaacttattggggtcttcattttctgacagacaggatttgactcaatatttgtagagcttgcgtaggaatgggattacatgggtagtgatgcactggtagaaatggtttttagttattgactcagaattcatctcaggatgaatcttttatgtctttttattgtaagcatatctgaatttactttataaagatggttttagaaagctttgtctaaaaatttggcctaggaatggtaacttcattttcagttgccaaggggtagaaaaataatatgtgtgttgttatgtttatgttaacatattattaggtactatctatgaatgtatttaaatatttttcatattctgtgacaagcatttataatttgcaacaagtggagtccatttagcccagtgggaaagtcttggaactcagggttacccttgaagggatatgctggcagccatctctttgatctgtgcttaaactgtaatttatagaccagctaaatccctaacttggatctggaatgcattagttatgaccttgtaccattcccagaatttcaggggcatccgtggggttgggtctaagtgaattgt

SEQ ID NO: 5974 - DNA, 289 bp, Homo sapiens
gcctggatgatgttaaaaatcatacatacaatgaattatttgtatctggaggttttatcgtatctgatgaatcaattctaaacccagaggttgtcacagttgagaaccttaaaaattttttgacattccttgaggaacttagtactccagaaggaaaatggcaatggaaagtccactgtaaatttcagaagaaactaaaggaactaggcagattgaatgctaaagctctaagtctgttgacgcttctgaatgtctatcagaagaaacatctggttgaaattttgtcata

SEQ ID NO: 5975 - DNA, 951 bp, Homo sapiens
aatgagaaaggagagtatgaggtggcagagggaattggttccactgtgtttcgagcgattctggattactataaaacaggaataatccgttgtcctgatggcatatctattcctgaactgagagaagcatgtgactatctttgtatctcttttgaatatagcactattaaatgtagagatctcagtgccctaatgcatgagttatcaaatgatggtgctcgtagacaatttgaattttatctggaagaaatgatcctccctctcatggtaggctagtgcccagagtggggaacgggaatgtcatatagtggtgcttacagatgatgatgtggttgattgggatgaagaatatccacccacagatgggagaagaatattcacaaattatttatagcacaaaattatatagatttttcaagtatattgaaaacagagatgtggccaagtcagttttgaaggagaggggtcttaagaagattagattgggaatagaaggttatcctacctacaaagaaaaagtaaagaaaaggcctggaggcgcaccagaagtgatctacaactatgtccaaagaccctttattcgaatgtcctggggagaaggaagaaggaaagagtcggcatgtagactttcagtgtgtaaagagtaaatctatcaccaatcttgcagcagctgcagcagacattccccagggaccagctggtagtcatgcatcccacttccacaagtgggatgagctggatattctccctatccatcccccttctgggcaacagtggacctcgatcctgatgcacagaatccaatgctgtgatgctgatcttccttgaaaccatagcatgctactcttcacagtgacgttgtactctcctcattctggcactgcaagggccactcttcttcattgtgagatgcacataacaatgtttaggatattgcagtgtagctttttt

SEQ ID NO: 5976 - DNA, 674 bp, Homo sapiens
  misc_feature (1)...(674): n = a,t,c or g
gtttttaaacaaaaacattttatttcaaagggcagataagtattttgctagacacaactgaaaaaaacagccagagaacaattggagtttgtcttaataaataacaaaatgccatttatgtctcttaaacttcatatgacacaatacacatcttaaataaataacccagtctgttgctatgtattaaaaacagtcccaggtgtggtgtgtgttgtggagcgaagccggttgctgggcttggacccgccaatcccagtgccggtggggagaccgcttcccaaacctctgctgtgcccctgtgcctgagctgaacagcagcgccatggccccggagggcggcaggaaggccaggggctgggatgacggtgacttcggggcgctctgtggctggcaagcctgggtgccctccaaccggaggtgcttcctgcctcctcacccttggcttctcgacaattagtttttaggtcagtccggaacatcatgggtgctggaaaagcctctggggcgatgtggtgggtctgagctccgtcttggtttccaacctggttgtcggccttcttgatgttgtgtggcgctggctctctgcttctctgctggccggcactgtctggtgggctctggtgtcctgtntttccacgtggcacatacaggttctctgaagccacagccagcgc

SEQ ID NO: 5977 - DNA, 455 bp, Homo sapiens
  misc_feature (1)...(455): n = a,t,c or g
atcttagattattatgaaaatccagccatcaaagaggatgtatcaacattaataggtgatgatttggcatcttgcaaagatgagactgatgaaagctcaaaagaagaaactgagcctcaagtgctgaagtttagagtcacatgcaacagggcaggagagaaacattgctttacctcaaatgaggctgcaagagattttggggggtgctgttcaagattattttaagtggaaggccgacatgaccaactttgatgtggaggttcttttgaacatccatgataatgaagtcattgtgggcattgcattgactgaagagagtctccaccgaagaaatatnacacattttgggacctacaactcttagatcaactcttgcctatgggatgctcaggctctgtggatcctctaccttatgatattaatagtcggatccaatgtgtggaactgggcaatac

SEQ ID NO: 5978 - DNA, 789 bp, Homo sapiens
agtgtgatgcagaaggctgcattcgaggctctccaggtgaagaaggacctggcgcatcggcagatcaggaaccagattaagttaatagaaactgagttattgcagctgacacagctggagttaaagaggaagtccctggacacagagtcactccaggagatgatctcggagcagcgctgggccctcagctccctgctccagcagcgtgctcaaagagaagcagcagcgagaggaagagctccgggaaatcctgacggagttagaagccaaaagtgaaaccaggcaggaaaattactggctgattcagtatcaacggcttttgaaccagaagcccttgtccttgaagctgcaagaagaggggatggagcgccagctggtggccctcctggaggagctgtcggctgagcactacctgcccatctttgcgcaccaccacccgagcctgggagccagcgtcccagcctaatcacggatctgctgcctcccagctgtcttgactgaaggccaccgcccctgcaggagcttgggtcctcatctgggggccatgcacaggcccgtcccaccctgcatgtgggaagggagcaggagggcctggctgggtgaggggaggccttcctgggaaggcgtgtggtgcaggcctgtgctcacagtggcaccagcaaccctgggtctccctctctgctgctccccagaaccccggggccctcctgctctccacaactgtccctccttaccccatgtagctcgatccgaagcaggagtgtcaataaacctgtcttcagtgaaaaa

SEQ ID NO: 5979 - DNA, 851 bp, Homo sapiens
tttaggcatgggtcaatgattgtttattgaataaatttactactggagtaagaagtggcttagagtccagtgtaacatggtggctgggagtgtgagtggatgaatggggggcccgatataggaactggggcctcggggatgaggccgagttccatcctgccttcttccacgaccatccttaccttcccacccccaccgctcccattctgcagatgagaaaaccgaggctccgaaaggaaaaaccactgcctggattcccacgcctcttctttaactcatttgcaggtgagggcagggaaggaaaatcctagggtcagcattggggagggggggactctcctaaatttattgggcaacaggctgcaggtgagggggctgacaggaggagggtcggggtgtaataacttaaaaaccgtaggtgacagcggcagctcctcaagagacctttgcagaggggagggtgtggggtatttacaaggatttgtacaaagtgccccgcgccagcctggggcaggaagtgggggtttgagcgtgaggggacgggaggggaaggaatctgcctctctgacccccactcccagtcccccagattctccagtctttaggctcagcagctctccctgcccctgcccaaggcctaattttgagctgttgggaggaatggaagatttcctcagtttccctccctgcccctgccctgtccccaaagtctcctcaggtgccctcttggtagggcgagggaggacaggactggctggaggctccaggaaggtgccagctccccccgctgagccccctcatccttcttctgtgctgagcggccccagagaacagcagaggggacaatcttt

SEQ ID NO: 5980 - DNA, 404 bp, Homo sapiens
gctgctgagagttggtaaagaggatggtcgagtgagatggtgttgacctccctggatcttatgtcactacatcctggacctcaagagggtcatccaagctttttgaaagctgaactccttgactggagaaacctagacaagaggcggggccaggtgcttgatatctaggaggcattcttcctcttcccttgccaccatggagctgggcacagtaagccatattgtttcctgaagcaggagtcccagggccttggcttagagagggaacagatgtctaacaaaaagagaagcaattcgaggaattgatgaagcacaattcaaaatcctctctgggctagtagctctctgggcttctgtttcattttgaaggattaaatcttggctggacagttggggaaggcacc

SEQ ID NO: 5981 - DNA, 425 bp, Homo sapiens
gcaccagctcctgcacacgggcgagcggccttccgctgcgtggactgtggcaaggcttcgccaaggcgccagtgctgctcagccaccggcgcattcacacgggcgagaagccttcgtgtgtacgcagtgtggccgcgccttccgtgagcgcccggccctcttccaccaccagaggatccataccggcgagaagaccgtccggcgatccagggccagcctgcacccccaggccaggtctgttgccggggcatcatcagaaggtgcgccacgaacggaaaccgagcccactcccgcctcgggcccagccgccgtctcgcagccagcggaggtctgaggtcacaggttgcagccctggccttctgtgaatcccttccacagctaaagggcatatgtcctctgcagatccacagcagagaaaaagtccc

SEQ ID NO: 5982 - DNA, 1541 bp, Homo sapiens
taagaataagacccacacacgtttatatatattgggattaagaaaatgaatcacaagccatataaaattgagataaattggaaaactctaaggtaagtaccatgtctattcccagctgcctagaacaaagatccattaaaaatccatggtgtgaatttccaccatgggtcagaaggatggaagactaaggttttcctgcaactttcccaaccgcctcccaccagtgcagcgagtgctcccctgggctgagaatcaaatacaggtgtgtttctaaacgctggaacgaagcagtcttgctgccacacgagtgggagcccggagctaggattctgaaatccaaacccaggcctgccatcaccaggctgcgtggagaatgaagacagggagccaggcagacggtttctccgtgcatccatcttaagatgcagccatgggaaggaaactgactgggatgggagttgtgttcctccccaaaactcatttctttgggttgcccgatgtcaactcctgccttagacacccatcccaaaccctccttctccttcatttttatcccttcatgttacaatgacgcagtgaatgctgcttcattgtcttaaaactgaaacagaaacggggaggtaggtagcatggatgggggagtgcacgaactctataggtacaggatgaggatgccccgcactagctgctatgaaacctgagtcctctgttcactctgcacacacatcacagagggctgctgccggtggccaaggcatttggtgagggccccatctcatggaccctccagatgccccttcatcctctctgagcttgaacactggggcttgaaaggtggccaaagagctggcgaggacacaaatatggggcattcaaactcctaggaaagatcacaattttgctcccactcccaaggggactaggagtggggtgaaagagcccatcgtactagagcgaatgtgaatccttatccccagaggtagaatcattttacccagtaccggaaacacgagcttccagttcttgtttttacagtaactcctgatagcagaccttgcctcctcccacttccagtaccctctgccccttgcaaaggggccacaaagtgcatgcacggctaaccgtgtggatgctgcccacagccacggccactcacccctcgctcgtgtgcacagcctccccacatatacacgggtacacgtaacgccatggtggccagagagacatttacagtgtgagtgtgaggcccggcttaggcctgcatccttgggcagggtctgcccttggtcccaggggtcctaaggcctgctctgcagccagccccgtgccttagtgtttgatctcgaggatggagggattgtggtccaggatggcgaggataatcttgtccatgtactgcctcagccggaagttgatctcctcctgctccttcagggcttccattagctcattcgcgcgaggcggtgtctatctccgcagccagagactgggctttagtctgggcagcaaagaggttttttgcttcgtagaggctgaggctc

SEQ ID NO: 5983 - DNA, 1923 bp, Homo sapiens
ttttttttcactaaaatactttcattagtgctcatttattatttatgtagaaaagtttaaaatgctcccaatgagttcatcagttatcaagctcacatgagttaggacacaatcacctttggtttttcatctcataataagtcagcaaaagttgacatttatcttactagacatttcccattagccctaactgaaacagatatcaaacaacctagattctcttcagtgcaaagtatctggagtcacagcaattttagagacaaggctagtgcaaatctagtaattttcatagtcgcagaaactgaggcctagaagtgatttgtacatgtgagcagctagaaccaggacaagaactccagaacctgggaccacgtgagagtaaaaagaaagggcaccgagtacaggaacaacaactgacacatttcaggtggaaaaaacaagtcacataactgaaaaccaaaatcacagttacataactattttatattagcttcctacatataaagtataaaaactcagctatacatgttatgaaattgtacaaacttacacttgtttatggcctaaaatttgtataaggacacacttatacagatttcataaacaatggccatttttagaaaaagttatatttgtccctgaacataatattcataatttgctttcaaaacaaactcgaagtaaggattggactttaagcttccaagctgatccgcttgtagcaggtctttcacctccggtaagtactcactgagctgaatgccatcttttaaaagtttctgtaagatcttcacaaatatactgtctttagatacttcaattggatcatctttgccatcagaactggaccagttatctctctgaagagctttgcaaaggatttccagttttagatcatttatatttatatcttcttcctcatcaatatattccaacaagtccaaagctttcttgaaatcatattcattagctcttctattttcttcacagatatatagaccaatgagttgtggtgcagtcaatactggcatcgcactgagatttagctgtttctccgccagcagctgttcaggtagggtctcctgatgcagtagaaagcgctcctgcctcagcccatttcttcaattttttcttgtagcatatcctctgaaaagtctgaagctaatgcagccaatttactcaagccaagaagggttttcttctttgcaaagtaacgagtttccatatttgccaaacccagaagtgttgcatgagccttttctaattcttggctattaatttcatgtaaccagctgagatgttcatgagcttgcaaaaaatttgccaactgtccatgctgagaaatgggctgagataataatttgcctcgctttcctttctccagataccaacggaagagaaagtctgaaaaattctgatcagcaaactgggtcatgtagcgctggagtcggctctggttgtcagtctgctcacacatttgtaccaatatatcaaagtcacagtatttctctgctagagaagcagcccacaggtactggcctagtgaaagaagaggagataagagatctgatcttttctgtaggtattccatctccagattgtcatatctttcccgattactggatttatccacagacttaagctgagaaacataaccatccaggaagcaatcgatgcagggctaccagctgctcggtcacgatgtttcggaggttgctgtctgcctgtggataagccaccttcaggacaatctcatgctggcgtattattaccgttcggatgccaccaggaccacttgttgccgtccatggaacatattcaggttctttttctagtgattcttctcttctatacaaagagtttctattttggcgataatgactagcagcctgcagcatatcctggaaaaaaagttaatgtgtt

SEQ ID NO: 5984 - DNA, 565 bp, Homo sapiens
accagatcatgaaggagaagggcaagaggtcatctgagcacatccagcgcatcgaccgggacgtaagcgggacattaaggaagcatatattcttcagggatcgatacggaaccaagcagcgggaactactccacatcctcctggcatatgaggagtataacccggaggtgggctactgcagggacctgagccacatcgccgccttgttcctcctctatcttcctgaggaggatgcattctgggcactggtgcagctgctggccagtgagaggcactccctgcagggatttcacagcccaaatggcgggaccgtccaggggctccaagaccaacaggagcatgtggtagccacgtcacaacccaagaccatggggcatcaggacaagaaagatctatgtgggcagtgttccccgttaggctgcctcatccggatattgattgacgggatctctctcgggctcaccctgcgcctgtgggacgtgtatctggtagaaggcgaacaggcgttgatgccgataacaagaatcgctttaaggtcaacagaagcgcctcacgaaacgtcagg

SEQ ID NO: 5985 - DNA, 501 bp, Homo sapiens
gtttcagaaagtgctttctctctgtggacatgaggattggattagaggagtggaatgggcagcctttggtagagatcttttcctagcaagctgttcacaagattgcctgataagaatatggaagctgtatataaagtcaacatctttagaaactcaggatgacgataacataagactgaaagaaaatacttttaccatagaaaatgaaagtgttaaaatagcatttgctgttactctggagacagtgctagccggtcatgaaaactgggtaaatgcagttcactggcaacctgtgttttacaaagatggtgtcctacagcagccaatgagattattatctgcttccatggataaaaccatgattctctgggctccagatgaagagtcaggagtttggctagaacaggttcgagtaggtgaagtaggtgggaatactttgggattttatgattgccagttcaatgaagatggctccatgatcattgctcatgctttccacgg

SEQ ID NO: 5986 - DNA, 318 bp, Homo sapiens
gcaatatttctttctgtataaaaagaggaagcatgtaggcagattcgaatttagtttttggtctgtttaattgcattaatatgctctttctgccatcttttgggaccttttcagtagctattgttaactcctttaaagggtggaggtgagattcacattatgccattttgcgaagtgttggtagaagggtaggtaattcagtctactgaggtttgagggtggtttatctggttctctctgtgtccactgaaaagatgtaattacgagttgactgtcttttatagagcttagaaaataggtctgctgcaggtggctgta

SEQ ID NO: 5987 - DNA, 528 bp, Homo sapiens
  misc_feature (1)...(528): n = a,t,c or g
gacaagtaaatgggggccgttgggacggcgggtgcctggagggcagctctgggctcagcgggcagtgcttagagcacaggcccctctgttgggggatggggaggagagcagtctgcccttgggagcgtaggccccagggagacttctaaagccccccctgtcgtctgctcttcacccagcaccacagaggcacctgctgcacacacaagcatctcactcggcccacggagggggccaggcttcctttgcctgaagctgttttgggaagggtctccacacaggcactgatctcccaagctttggtcatgatgtcttttaccatttgataattttaaacattgtttttaaacccaaaacatttagtggtccgtttgcctctgaaagatgttaaacaaacaaatacactattttctggggaacattttatattggaggattctttgtggctattggtgtgtctcacaggcaaaatttgatttggctaaaataggctcaatgnattcgtgtnccgngtggtgngtntgtccc

SEQ ID NO: 5988 - DNA, 1244 bp, Homo sapiens
cccagatcaaccaagtggtgagtcatccaaaccagcctctcaccatcaccgcccacgacgacaggggcatccgcttcctggacaatcggacaggtaagccggtgcactccatggttgcacacctggacgcagtcacctgcctagccgtggaccccaacggcgcattcctgatgtcaggaagccatgactgctccctgcgtctctggagcctggacaacaaaacgtgcgtgcaggagatcacggcccaccgcaagaagcacgaggaggccatccacgctgttgcctgccaccccagcaaggccctcattgccagtgctggcgctgatgccctggccaaggtcttcgtatgatgcccacctggccctgccctggccgccacgctggctggggtgtagggccgggcaggtggggctgaggggactcccagcctcgctggaggtgcagaggcctggcctctgtctgtttgccatggagcctggtggtgctaacggccctttccccaggaatccctccccaacggctgccttccccaagcatccagcctggggatgggcccctttcaggaatcacccccgaggatggcctcggggtttccccctgtgccctgacagccgctcctggtatcagagctgctttccagagggcagcacagccagggccgggtgtctttagggatcagtttttccaagactccagaaggtgccaggttctccccttgagctcctgctcccccatcccccatcctcccagacctgggcaggagctgtgctgggagaaagggtggcagccgggagcctcagagctgagccccggcctggctgcccctcccctccggccctctccactgctttccagacactaaccaaggcttccaggccagggattgcccaacactcctagggcagccctcccagcgccccatggggtcgcccatgggtagagacggctttcttgtgcccctccctggggcatggagggtggagtgggcctcgggtccccctgaactccctgtatatctgtataaataacgggattttcatggcgccgccccacccgcattatcactgtgtgatggtctcagtcagtctcctccctgtctccactctttccctctatttatttcactctcttgtttggttctaccctgcaccctcggtccccttccaggttcctgtttataagccccaacccctctgtccccatcttgtatgtgaaaacttgtctcaataaaccctttggagtaa

SEQ ID NO: 5989 - DNA, 947 bp, Homo sapiens
  misc_feature (1)...(947): n = a,t,c or g
gccagaagtgcaaggacaagcaggctgctgctaagtgagctggcaccttgtggggctcttgggatgggcgggcacccaagccctggcttgtccttcccagaaggtacccctgaggttggcgtcttcctacgtcccagaagcagcccccaccccacacatgacccacaccgccctcacgtgtaagctgggctgagagccctttctcccatccattggaggtcccaggagtgtcacccatggagaggctatgcgacatggctagggctggttctgccatctgagtttggtttcctggaatgaaaaggcattgccatctccattcctctgccctcttgagccagcacaggaaggtgaggccctgggatagcgcgcctgctcagataacacagagctagttagctagtagcaaccgtgttttctccagatctgtctagatacaaaggtcagaaatcttatttttatacttttatattgtggaagaacagcatgcaacactcacatgtagtgtgtggatttacttgaacatgttctttttaacatgtagttatgaaaatctccttttttgcctctactggtgaggaaacatgaggatcagaggccacatttttaattattgttagtgtatttggaagtctgaattggagatgtttgtacctctgtctaaacagttcccttgagaacttccaagcctccggcatcttttcctggtgagtgtttctcctgtgcttggttgtgtataatggagctaactcctaagcggtggggtgaatgtggccgccttagttctgaagctactccagttatgttctgtttcttcaagctgtgatccagaaagatttttgtgcccccagatgcctcttgataggagangcaacatactccaaatagttgggttcttcagggaagctattagaaactcaggtgacttgttagagcactaacttggg

SEQ ID NO: 5990 - DNA, 501 bp, Homo sapiens
  misc_feature (1)...(501): n = a,t,c or g
catacctatatcagacttaatccttaaaagaagattaattcatggaggacagatgttaaatggattggcaggtccaactgtaatgaatgcagcaccatttctctctacgacgtggttttctgcagatgaaagggccacagccacagctattgcatcaatgctcagttatcttgggggagcatgtgcatttttagttggaccacttgttgttccagctcccaatgggacatcacctcttcttgctgcagagagcagcagggcgcatattaaagatcgcatagaggctgtgttatatgcagaatttggagttgtctgcttaatattttctgcaacactagcttatttcccaccccgacctcctcttcctcccagtgttgctgcagctaggccagcgcgtgagttatcggagaagcgtttgtagattattaagcaattttcgatttttgatgattgctttancatatgccataccacttggtgtatttgctggctggtctggag

SEQ ID NO: 5991 - DNA, 511 bp, Homo sapiens
  misc_feature (1)...(511): n = a,t,c or g
aaatgctagaactactgtagaactgtatgccagacactaagagagactatgtaacattccaggatataaaggaatgtatgttgtcactgggcagcaaaccacaccctaaagacaattcagaaagagtccgagggagaggaatataggccaggcaatctgctggctgcagatccctgccccttcattaagctgagtgcctcctgattctgtctgagtattcgcctttgtaagcccaggccagtaatcaaggggcagggcattgttgtgtgttaaccttgaaggccttctggggagagacagtacagggacctcaaatgaaaccaaaggggaaacggggactgggcacccacctccccaatctcgttttgtttttgtttttgttaagacaggatcttgccatcttgcctagggttggcatcaaactccttgagggcaggagantcgttttgaacccgggaggcggaagtttncagttgagnccaagtnccgtgctatttgtnacttcccagct

SEQ ID NO: 5992 - DNA, 379 bp, Homo sapiens
ctgtgtaggggtagattttcgctgcagtgttccccgagcctgttagacgcagcgcgccgggagactgagagaggaaaggatagaggaagtgctgccctaggctgcatgagtcgaagcaagcgtgtttccttcccgccaggcaagtgcccttagaaaccgggccccgcccccttcctggcctgcattcccatcccctctcccggggcggaggtgaggacctccttggttcctttggttctgtcagtgagccccttccttggccatgaagctcgtgaggaagaacatcgagaaggacaatgcgggccaggtgaccctggtccccgaggagcctgaggacatgtggcacacttacaaccttcgtgcaaggtgggcgacaact

SEQ ID NO: 5993 - DNA, 1816 bp, Homo sapiens
cggcccgggccctggataagaacaagatcccttacaagggcttcatcccggaagatctggaggcgttcatcgaactgcactgacctgcccagaacgcctgcaccctcacctctcccctctcctgctgagatgggggaaatccggctgcggcatagcagatgctcgttcttgcctccttcaggcaccaatcaggagaagggttctgcctcccatcccctctacctgcagacagggtcggaggtgttagcgagcctttggtgctagaagcctgcggggtcatgtgctaagaggacagtctttctccgggagcccgctcactcattctgagttaggaaaagacacaagaccttccccacatcctgtctgcctgggttagggaggcctttgccttgttacctagaggcggagggactgaagccattgcgtttccttccctgctagaaacacaggaagaagttgaggacggtctgccttccctcgtccctttacctgggccagataactccagccgctggaatacagtgttaggactgggggctcctgagatgagagtttgagattcagggaatgagaccacctctcatttcttccagcatgatcgcgccctgctcccgtgccaccgtagtccctggcagacaggcagggctctgccaggggcagcctggccacttgcatagctttcggttggtttggtgttctgtttatttaataagtgggcaggttgcaagctttcacagaaattctgagattttactgccttttttttttttttttaagaaagttgtttgttggactccataagtgaatttcaagcagtgaggattttgtggtgcctgagatggccgagggcacagggagtgagctgtatgtgtgaggaatttggtgagcgagataaaagtccacggtgtcaacccctaaaacatgggtgaccgtacatttttatacatctccactctacggccttttacaggctttccgattttacaggcctttccaagtttccattctccttagagagagaactgtgcttccaaacagaaatcaggagtgaccacaaagcctgaaaacactttgccacccagcaaagaactggcacaattggtttgggtctgcattgccatagtgcccgagttaaaactgcaggccactctgccttggcaaacctcacgtgggcctctgatttcattgtggggtgcatccacaggtggggcccgagctgttctttcagctgctccaaggattgagacccaagtcatcatgaaaaaggcccaagtacagtcttaatgcgataaatccactagctaagacgtcgagtgccaagaccagccttccagccgaggtttggacaaagtctcaggttcccgtgactcagggtaaggtgctggggctgccagaggacctgccccagcaagatttttgtcaagagcgagactccatcagcccaggcagacgggagcaggttcttggccagcgtagacagcagcaaacagcagcagggaagccattctcactgcatcctccctgcagtagccacggccaggcccttaggaggagcagtgaccgggagtgtccagaaatatcctgtccctggatggaaactaggtctcgtttggattttttttttttttttgccgtgttaggaaattatttattaatttacaagacaggttttaactcagccgaggtgggaaatggtgtccctgtccctcccaaagcacagagcacagaaatgaggccgtttacatggcgagtctccgtgctggtgtttaagtcattaaaaagatactcaaagagaaaaaaaaaaaaaaaaaaaaaa

SEQ ID NO: 5994 - DNA, 699 bp, Homo sapiens
gtagacatgactggcatcagactggaggtgaagttaccatttcagtatatgctaaaaactcacttccagaacttagccgagtagaagcaaatagcacattgttaaatgtgcatattgtatttgaaggagagaaggaatttgatcaaaatgtgaaattatggggtgtgattgatgtaaagcgaagttatgtaactatgactgcaacaaagattgaaatcactatgagaaaagctgaaccgatgcagtgggcaagccttgaactgcctgcagctaaaaagcaggaaaaacaaaaagatgacacaacagattgagtgggagatggaaggaaggctattacattatttccgaatttttaatactgtgtgaagtggtggcttgctgctgtaatcttttgttttgttgttgtgttactgaatgtggcatttcagggttaacattaggttcttaaaagccaaagtcagtttgtctttttgtgcctctcatctttcttttgtgttatgtaagattgattattcatttctccctactggtaggaaccatagttgtgtcctatacttgaagaggctggaaagtagcccataaccataattgcagtatttctttgtatttctctgttaagcaaagaaatattaaggaacattttttttatgtttttgtattattccataattagtaaagcaagatgaaatgtcaaatttt

SEQ ID NO: 5995 - DNA, 998 bp, Homo sapiens
tccggtagtggccatcttacattctcatgtcctgctggaagtgcctagttgcctgcaaagccagctaaggcttattatttcaaaagaagattatttaaaacatgagtgacaggtagtcagaagagaacaaaaggacgcaagatactctatagccaagtcagcttggaggcaggatgggttgctgagtgaagtcgccgctcacttttggattcttatggactgtgagttagtcttccctctacacggagtcacaggaagggtataaatgcatgttcctgaggtgccctcccccaaagaatgtacctgcactcaaaccaggatctgtttttgctgttttaatcataaatagactagttagtagaagacttttgaagaacaaagtaaaacttttttttttcattaaaagatgtcccagaggaaaggccctgtgcagccagtatattctaatgactgcctgggaccatgtccctaatatggtggttttaagttgttggccaaaatcctttaaagacatacgaaacatctgccaactttttagcgaacttaacaggtttcactgacgttttcctcaatttttgaatttaggtgggatttgctttcatgtcctgtttcaaaaaccaagtgtctcttgacagcccactggttcttcctgtcctcttgctctagtctgtatcaggaaaggcaggaatgactgtacttttgttttacaaacaaccacctggatagggacgggacactccacgagataaggaaagggcacgtgcccttgagcttgaatggaagcagcctctggagggggcagccactgccgttcgagggagagcagctcttcagcagtggccagagtgccacgtgactctgcagatgacccctgggagccgggtgatgggcacctgctggggcttttgttttttctttttcactggctggcttgatcctcagtggcaaaaggacccctgagccccttctccgagccctggagcactcctcgggacacc

SEQ ID NO: 5996 - DNA, 1883 bp, Homo sapiens
gcggccgccacagccccccagacgacttgggctccagcttctacccggagctggggccctacagctcccgggaccccgaagtgctgcgggacagtatgacccagctcaaggaagccgccatcggtgcctggtcctgtcctggtacccacctggcatggctgatgataacggggagccctcagatgacctggtgcccgccattctggacaccgcccatcagtacagcatccaggtggccttccacatccaaccctacaagggccgggatgacatcactgtacatgacaacatcaagtacatcattgacacgtatggctcccatggtgcattttaccgctataagaacagcatgggcaagagcctcccactcttttatatctacgactcatacctgacgtcccctgaggcctgggcccacctcctgacaccaaacgggccccattcgatccgcaacacgccctacgatggggtcttcatagcgctgctggtggaggagggccacacccacgatatcctggccgccggatttgacggcatgtacacctactttgcctccaatggtttctcctttggttcttcccatcagaactggaaagctgtgaagaacttttgtgatgccaacaacctcatgttcatccccagtgtggggcctggctacatagacaccagcattcggccctggaacaaccacaatacgcgcaacagggtcaatggcaagtactattgagacggccctgcaggcgggccctgacagttgaggcccgagatcgtttccattacctccttcaatgagtggcacgacgggcacccagattgagaaggccattcccaagaagacacccacccgcctgtatttggactacctgcctcaccagcccagcctgtacctggagctgacacgccgctggggagcactttcatcaaagagaaggagcagtggctcatgtgaggggcctgtaaatgggcgtgaggtgctgatgtccttgccttgctggaagatgtcaccatgtggggttcagctgaggttgtagccactcactcgttcccaggtcaagaggtcaagcagatgggtgtttctgggtgggccgtcaggcatgggcctgtgcaacacagagcccgttcctcaggcgagtggtgctgaggtgctctgtggtgatgggaaccggcagaggctggcaggtgactgaacttagcccagggcagctccacatcctgggaacactttcatgtaaccccttctagttttgaactctgcagcaggctggtgctgtgtagtggccacccagtcaccacccttggaagggtgtcagggtctgggctcgcatgcaccctgctcccttctgccagcctgcatcctctcctcaggcctccttcccacatcatctgtcttctctaagttagggaacccatatttgagactttcaaaaagggaacttctaggtttaagctcctcccagtagattcctgaacccaattatcaggaaatcatcctgagcactcacaggttcatttaacactcactcatcaagcaccttcctatgtgctaggtgctggggaaaacttgaccaaggaagagttcctgtcctgaagcttccaggacccagctttccttttctggtgtggccttgtagctagtgccctgggcacaggtgtttttctttttgcagttttacctagtgctgggagttcagttctttttcctctagaaaaatacctctgtgctccagagcctaatttttcccagatggatatttagctctagggagaggactaggaggaaatccccctccctttagctgcctgaactgactgaggcccactcactagagccatgttcagtgctactgtgattagtagtaattaaatatgaactggtattctca

SEQ ID NO: 5997 - DNA, 1731 bp, Homo sapiens
gcacgctgaacgacacagctcagtttaaccgaatgacagttgagtatgtctatgaaaggatgacaggcctccgctggaaatgcaaagtgattctagagagtgaagtaattgcagaagcagttggggtgaagaaaactgtcaaatatgaagctgctggggaagctgtgaaaaccctcaaaaagacccagccaactgtcattaacaacttgaagaaaggagctgttgaagatgtgatttcaagaaatgaaattcagggccgctcagcagaggaggcttacaaacagcaaatcaaagaagataatattggaaatcagctgctgagaaagatgggttggactggtggtggtttaggtaaatctggtgagggcatacgggagcctatctcagtgaaagagcagcataagcgggaagggcttggtctggatgtagagagggtgaataaaattgccaagagagatattgaacagatcatcagaaactacgcccgctccgagagccacacagatttgactttctctagagagctgactaatgatgaacggaagcaaatacatcagattgcccagaagtatggtcttaagagtaagtctcatggggtgggccatgataggtacctagtggtaggtagaaaaagacggaaggaagacctactagatcagctcaaacaggaaggccaagtgggccattacgagcttgttatgcctcaagcaaattgagatcttactaatttattttgtaaatgcctaatgaggcagatttttgaattaaagaaatgctacatgttccggttgcagagtatattcataagatgtctcaccttgttcatttcacatagtggtttattagatattggaacctaaagaattctgtccacttgtattagcttaatccagcagatgatattgtgcagttactgtttgtgtctttgatattgctgtgtccctcagattttagtagtttgacaagcaagaacacatatccaaatggaattttaccctgagaaattatcattttaaagggcatagcacagcaatctgcaacaatatgtaaagttgatattgactacaataaaaatccagtcttaattccagatttactgaaaatgtcagatcattttgtattaatctattttcatctttgtgtgaagccagttatagaatgtttgacaataaattgtgctgtacacgtaaatgtccttaccaactaaatgatgtaaaactttcttaaagtaattttagtgttcatttatttataacttctaccatgtgatttccagactattggaagtgatttactgtatcttgtgatatatgggttttaacaaattctagtcttcacgctgagagagcactacttgagagagcagttgaaagtttcaaaaactttggttcaatctgaagagaggaagcttgaactgtttgttcttggtgccttgcagagagactcacagcaactctccattatagctttcacaccggtttggatgtgcagcacatccaaggcaaccacagctgtggtagagcttggtaaaagactgaagatacattggtgctttgatgaaaaggtcagttggctggtccctctctcaaaaagcttattaagcctgaaaagccaactttgtaacatatttaaaactgctattttcgcttatttctggaatgtaaaaaaaaaaaatgtataaaaagaattagtgtatgcttcctgaataaaaaggagccaaagttgatcaga

SEQ ID NO: 5998 - DNA, 389 bp, Homo sapiens
gcagtgctgggttcagggtgggcaccagctatgtatatgtacatcagggacagggggccaaaggcagtcagtttccaaagactgccccataggccatttttcagagaagccctgggttcctcaagggccctgtgtccatgctggcccatcttgcaggacgagcctgtggagtgggagacacctgacctttctcaagctgagattgagcagaagatcaaggagtacaatgcccagatcaacagcaacctcttcatgagcttgaacaaggacggttcttacacaggctttcatcaaggttcagctgaagctggtgcgccctgtctctgtgccctccagcaagaagccaccctccttgcaggatgcccggcggggcccaggaacggggcaca

SEQ ID NO: 5999 - DNA, 763 bp, Homo sapiens
aggccctgagctttgtcctgaaggaaaatgactctggggaggtgaactgggacgccttcagcatgcctgaactacataacttcctacgtatcctgcagcgggaggaggaggagcacctccgccagatcctgcagaagtactcctattgccgccagaagatccaagaggccctgcacgcctgcccccttgggtgacctcttgtacccccaggtggaaggcagacagcaggcagcgccaagtgcgtgccgtgtgagtgtgacagggccagtggggcctgtggaatgagtgtgcatggaggccctcctgtgctgggggaatgagcccagagaacagcgaagtagcttgctccctgtgtccacctgtgggtgtagccaggtatggctctgcacccctctgccctcattactgggccttagtgggccagggctgccctgagaagctgctccaggcctgcagcaggagtggtgcagacagaagtctcctcaatttttgtctcagaagtgaaaatcttggagaccctgcaaacagaacagggtcatgtttgcaggggtgacggccctcatctatgaggaaaggttttggatcttgaatgtggtctcaggatatccttatcagagctaagggtgggtgctccagaataaggcaggcattgaggaagagtcttggtttctctctacagtgccaactcctcacacaccctgaggtcagggagtgctggctcacagtacagcatgtgccttattgcttcatatgaggaggatgt

SEQ ID NO: 6000 - DNA, 583 bp, Homo sapiens
tttttttctggttgggcaggcttgtttttgccatcttccccatcagcaaacattgaaccagggcccactcccgcctgccccagactggagacttttaggttataaggaataattcttccttcatgagccagcagtgggtaccagagtctcttgggctcagcacctgtttcctttcccacagaagggggtgcctgtcagaggcctggagccaaggccacctgtggctggacagcagcagccccctcagagtggggagcccacttctgccttctgcacgcgctcactcctgtgggtgccatcgcagtacgggggcctctgagtggccttgcaggtacagagtgccaccatgcgggtctcttgggccttgaacttgagtggagataggccagtgcgttggaagaagtgggagccgtcacagaagggctgcttcttgctgcggccacacacacaccacctgtaggttttccctgccaccagctccaccttgatgggggtcttcagggccaccacggacctggctggggttctagggaaccactgggccagccaggaggagatgtcccgccgcgggttcaggtcccgg

SEQ ID NO: 6001 - DNA, 1225 bp, Homo sapiens
aaaacttttttttttttttttttttagaagtactctgatttttattgttatacaacatatatatataattgtttccccaaaatatgcacaattacatgtgtcaattttaaaaaatgaatgaagactataatgtaaaacctatagctgtaaaattcctagcacaatacagaagggtgaagcttcattacaactggtcgtggcaataatttgggggacgtagcatcaacggatgagacaacaaaagcaagggaatacacatggtactgaatcagtgtatggaaaaatatccccaaacagaccaaagcagaacatggaatagatatatgcacattgtagtattagtcacaaacatgttacctggaagcaaatgtacccttaaggatgagtagattcagcaaacagggcacgtacaatcactgggatagcattcagccttaaaaataaggaaatcttgaaaagtactacaataaggacaaatcttcaaaacattctgttaagtaaaataagacagtcaaaaaggaaagctgtataattacactcatgtaaaatatttagtcaaactcaaagaaaccaagtgtcatagtctcagcagtgcaccaagatgtaacagtctctcgtagtctgagataacatccagagttctttgttctacctctaaggagattaaggagcgtgaacacaaaggtgaggttggagtgaaagtttaataaggtgaaagaagaaagctctctgccagcagagataggtgtctggaatgggagtatccactgtggggctggggtccagggtttttatggactgggaagggaaggatatgtgcctagttcacaggctgtcttgaaaaacgtgtggctcagcttggcccaggcctttggcccaggaccaatcaggagctgaagggatgattgatagatgctgcttagcttggcccaagacttaccagaagctgaagtgaagtgtggccgaggaccaatcgggctgaggtgatgatacacagcagctggacttacagtcccgttctgagtgcattggatgagaggacttcaacagtaagcttgtatgtgcataggaaattttaaaaaaaccactcgtttatcagaagttcacatttaacgggcttggaaaacggctcagctgctgcctccagttcatcttccgctgtcgaaagcgtttcagaacttaaactctcagattgcctcagtgcgctgctgtagttgtcaattag

SEQ ID NO: 6002 - DNA, 467 bp, Homo sapiens
taggagaggattcagaatttatatttcagtgctcactagccagttcccatcctccgcccccgcccacccccgcagtagagaggaggtcctggctaccatcaagccgtccctgagcgcagtgtctctccagcctgggtgtgtgaagggagcaccttccttcaagggtctggggcgaagacaaagtcgagggcctggcgctcagcccctgccacgttggggtgccagaggtccacgatgaagaccactcgaggcccatcttcgggggagccattgtgagccactgtgtgtagaaaagagtcgtccaccagtagacagtgcccctcagcccagcactggggctcaccgccgaccaccagctcacagccaggagggatctttaggcccagatggcatctgacccgggcattggtgggcccacagcggccctcgagccgggccccaggcaggagaacggaaaagccggcatt

SEQ ID NO: 6003 - DNA, 625 bp, Homo sapiens
  misc_feature (1)...(625): n = a,t,c or g
tttttttttttttttttcctgggctcatacacagttttatttcctgttgattttacagacactccatcctgcaagcccattcccttggaaaacccagaaagagtgggcacagtgctccctagaggaatagaggggacaagatggctgccagggagagggcagttgaggcacttagggatttactccggccctgatggaagatctggtgcccagggtagggggagagggcctgggctgggctggagcctcctaggtatttcccagaagccccttcaggaactgtcacctggactccagtaccacccctcgtcatgttgtcacttcctgtggtggcgggagcgcagggtgtgaagggaaaatttgggtgacagggcagtgctgtggccggcagtgttcaaggccttgccccctagggacctggcatggggctggaaggggggatcaacagcgccttccagcgtcccagtagcctcccctgacgtccttctgggtcctcctctgggtgcagagctcgggcaggtcttctgggcacacaggagatctggggggcctcccaacgaccgttctcttggcancggatcagcggcagattgcgctgggccagtccttcccggcaccggtagcg

SEQ ID NO: 6004 - DNA, 1791 bp, Homo sapiens
ttttttttcatgatatacaaaatgattttattagatgccaaatttttattaacaccattttatttcttttgcagctttaatttttaacattataacatttactggctcctctgggtgactaaatatcttcacatgcccactagctaaaaagaatttctaagtagaactcaactgaaactgcaagctactgctctaagaaatgcatacttatgtttatttgctctcctatataatcctgtttacaaatagcataactgcaaagatttatatgtaatttctaaatccttcaggttgctctaccattcatcttcttatgtctggcaagataaacactcttagtgaacactttgctgcatctcttaaatgagatttgtctccagtttatttcctatagaataagggatgcacttggaactgaaaaattccttcaatttctaaagtttccacattcatacaacttttctcctgtaggagtttgcaggagattcctattgcctatagtctttcccacatttgctacatgtacacagatttttcctagtgtgagtatacttaggtcaattaagggattaatactgacaaaggctttcccacatttattgacttcatatgatttctctacagtataaactctaataaaaaaatctgcatcattgctaaaagtctcccatgttcaccaccttcatacaacttttccccagtatacatttttctgatgttaaataagggaggatctatgaatgaagtttaccgtgataaacactgcttctcttctgtaagatttctcacatgtatagggattcatatgatctaaaggcttttccacacttaccacactattgggtttctctccattatgtactctttgatgggcagtaagattcgagcctttgctaaaagctttcccacactcactacatttatatggcttttctccagtatgaattctctgatgtacagtaaggtttgaactacagctgaaggtcttcccacatttaatacattcgtaaggtttctctccagtatgaatactgtgatgttgaatgagagacgaactatgaatgaaggcctttccacatatacgacactcatagcgtttttcttgcgtatgaattcttagatgctgaatgagaagggacacaggactaaaagactttccacagttcatacattcatacggtttctctcccgtgtgagtgctctgatggttagtaagtgatgagccatggctaaaggccttcccacattcaatgcatttgtaaggtttctctccactatggcttatcagatgtcgtgtaagggatgagccatggctaaaagtcttcccacattcacgacattcatagggcttctctcctgtatgaattctccagtggcgactgaggattgactgttttgccaaaggctttcccacattcactgcatgtatagattttctctctattacaagtctggggaagggtaagagatttgctctggttgaaggctgccccacttttattagaatttaaaagtttctttccaccatttattctctcactttttataactgacttttttgataaattcttctttaatatatcatatttgtgtgaattcccttcagcagaattgttttgtggttcagaaagagtagactttgaatgaaagggtgcttctaaatgtgtcgcattctgtatattccaaattcttattagaatttgaaaattcataactttgttttacaactttttccattgttactgggttggggtgaatcttcatcataaatatccttctttgttctcgcga

SEQ ID NO: 6005 - DNA, 1122 bp, Homo sapiens
  misc_feature (1)...(1122): n = a,t,c or g
attttacaatgggtgggcgggggaaacttttccagaaagtntccaatatgacgttttcataagttgaaaaaactctccttagtgcttattttctaacttaaaattcacctggaactttaaatgggaaaggattcttttaattgtggattataggcataatactgtttgcatctgaattttctgtaagtgaataatagtttaatagaggaactcatgatttgtactattgaatgattaaactaagtatgaagtgataccattcagcatggcatcaggtcattgcagttttagttctgtgtaacacaagcactcactgaaattccagtttctaggattagtgtaggagcctaacgtgcttctactgttttaatgggttaatcctggattacttaacaatttatgtcaattgcactggtttaatttgttgctaaagaaataatgccctgggtttagtaacaaatacagctcaactattcttgaatatattttgaaaaaaaaatgtatgtaacttaccttttgtaaacgttccatttcttttttccctcatttttgactcttaaaggtgcaatttattactgaattgggatttctggcagcacagaactgctttttattttggggtctgtgagtttcttaggtattagcaatcttgcttataaaataagaacaccttttaattaatgagtgggtcattcctggtgcaattgtgatttttctttagccagaatgaatggcaaactctatttagagcaaagtaagtattagaaaaccctaggaactcttaatcaacgtttattacactttcattaaggcaaactacgtgaaagagccttggggaagttggcccatatcttactaagttgatcagatttctcgttgggctggaaatgtttcgctgttgtatattttaaagtaaattgcacctttgtaacatattgtattgacgaatgatcactaagattagctatatctatacagtcattagtttgacaagaaatagaatcctgtcagatgccaaagagtgggatttttatgtttaatgattaaacaccattatttattgacaatttaccctgtggaactgtattatttctaactatgaaataaaggggtgatgtaaac

SEQ ID NO: 6006 - DNA, 1394 bp, Homo sapiens
ttttttttttttttttttaataaacactttagatttattctgccatttctgaagccacctcatttaatttatacataggatataaatggctatacatttttacacacttttatacaagtttaggttgtactactgagtttgttaaaatgtacccattatttactcaaaatatttattgttacaagaaaaccgtaagaagcttgtgtaacatgaacagcaagtattgaaaacgaatatgtaaagtaaatggttttgccctgactaaatcagcctcagtattttatgcttttagtagaaaagcccattaaacaaaatagaatcctgggggatcaaatcatatgaatgattcatgaaataacacttctgaagcaaccccagaatcatataaatgtaagggttaaaggtcatatgtactaagcatgggtcagaggaatagaatggatttgttaattttaccctaaataaaaggcgcttgtgggcaacagctctgccatcaatacacatgggcagatgtttccgaatccagccattcccagatttcactgacatgcccttttccacaggctccctgctgatgagatttccccagcagcagaagtttgacatcactgctcccggatgggagaatcagagctctcctcatttgggtcaggggtggctggctcacgaggtttggtccaaccagcagaaccagctccttggatcctggaataaaccaaacatcaatggtaccatgcgctctgtgcccagggagtgaaaggcaggtccagggtgggaagaagaggggctgctaccttttggagtgaaaaaaatgaggtttacactgtagtataacaaaatgcctttttgtaaaggccagaagaaattggctgtgctgtggctgcctgaagcagaaaaaccttcatgtaccaggtgaatgtaaagcctttctcctcccacacacaatggactcacccagtattaccctccactaccacttttgaccctcataacaggcaccctggcgggggggcagattgatgttatcaccatttaccagatgaggaaactgaggcctgatgggcagtgatttgtgcactgcgacataggactcagtgaagagcctagccagctgacggtcagctgactggtgcactctttccctcaccttctctctcaagggcacagctacactctttctccaccattattaacactcacagggcacaggtagagcgtccccagacctgtgcaatattctacacgaaaacatttggaatgtgagcaatgtctgaacaggggcttgccaggcacatctgatcaccataaatgctcccacccctgcctgtcctcacttgtgctgcactatgcaagcaagcagcaggttctcagaaggccactgtcctgcatgtcac

SEQ ID NO: 6007 - DNA, 408 bp, Homo sapiens
cctttatattattatactgtattctcacgttacattatttcatttgatcctcacaacagccctgtgaggtaggtagggttatgtattactgttatgcctatttcacagatgaagaaatggaggtggctcagtgaggtgagtgacttgcataaagtcacacagcatgttagtggcttcactgcttctgcaacttctctaaagtcaagctgcttggattagggagcaccgaaaagatggacagttttatggaaaaggagaaagggcagtggtgatttgtaagatttcttcctcaaattgttttgttatgaccacagcttctgctacttggtctaaactaggttctccatgaggggctctcccaagtacccttggcctgggacagctgtctttttttgggatggagtctct

SEQ ID NO: 6008 - DNA, 371 bp, Homo sapiens
agagttccatggggagtcctttgacaagaccaacaccacgatcaccagctaactggtccagtcctcttacttctcctaccaatacatcacagaatactttatctccaagtgcatttgattatgacacagaaaatatgaactctgaagatatttatagctctcttagaggtgtcactgaagcaatccagaatttcagcttccgtagccaagaagatatgaatgagccattgaaaagggattctaaaaaagatgatggcgattcaatgtgtggtggtcctggggatgtctgacccaagagcaggaggtgatgctactgactcaagtcaaacagctctttgataataaagcttcattgctccattcaattgcct

SEQ ID NO: 6009 - DNA, 1015 bp, Homo sapiens
gttcatgcggtaattggtgatgaactaaaaccacatctcagtcaacttactggcagtaaaatgaagctactgaatctttacatcaaacgtgcacaaacaggttctggaggagctgatcccactactgatgtttctggacaaagttagtgaagctcatcacagcgaaccaggtctctcaaaagaaaggacagatagaccaccctcatcaatgaaaggaagttctcaaacacatcctttggaacttactattgtttcccagttttagttttttgtttcgtttcgttttgtattttctgtaacagaggactatcctcagtctgcatgtaacttttatgatagttattccaaattcaagaagaagcagtattaacatcaactgatcgacacaaagtaatttttaatttaattcatcatttcacatgtttgtactttgtcttcccattaacctttgccagtgttatgattgtataaatttttttaaatgctggttaaacaggaatgcttaaagctttaaaagtttaacagtctaaaacatttttgcttttattcaactgcagaataatatttttattgctactttgagttttgtttcgtatcatgtcctatgctagaaatatttaaatgatgtgaaacaaagcaggactaatttgaactacagctggactccgtttgtgtgatggtgatacatgtcattagttgcaacttctttggggtgatctatagtttgaaaactaaaacctcaaagacagatgttacagaatcagccagttctgtaaaactgatattgtctattggttattgatcttgccatctttatttaaaaccatgtcccttctatgatcccttaagaaagctgcaccaaatcatctgcctgttttttcttgatacttactgaaatagaaggttttattgcagggtttattttggtttgtttatatctttgttgtgaatgatgcttttttgtatttattaatatcaaattcacttatgaataaacttgataatggaaacggac

SEQ ID NO: 6010 - DNA, 460 bp, Homo sapiens
  misc_feature (1)...(460): n = a,t,c or g
cccacgcgtccgctagaccattagctgttgccgtcacatgcttagacaccagtttacttagcgagttatgaccttcctcacccatactaccaaatttaaatgggtcccgacttcaccctctggaaggaagtaaactcttctctccccatggtttcagagcagtttttacctgcaagcaccatctctgtatgtgctcttactagattatacagttcttgagagggatagcatcttggagtttttgtatttccacctcacccccagcacatagcccagtctcttgcacaaattaagtacttaangattattagcattagcatattttgngcctnggttgtataagctggangnnagntnagttacctttgcaaatatttatgattatcacccccccacatactaaatngnttttaaaagtttngcctttccttcagatactaccccaggcaatnagctgtag

SEQ ID NO: 6011 - DNA, 1403 bp, Homo sapiens
  misc_feature (1)...(1403): n = a,t,c or g
caaaaggtctgtcttgtaactgttgtataaaataaacctaatctatggtttcatttttaatctaaaaaaagttgtgccttaacaatagggcattgtatgttaataagggaaaacaacctttttagtagatgggggaaaataggaactttttgccattaaaacttaagttcttttgatgtttttaatattatagttgggggagattcattaaaattaaattgaaataaaattatttttgcataacctagcatttacaactaaagtatgttttttataagaactggcatcttgatgtatataggtctgaaataatatttcatcttttgatttttaattttaataatattagaccaggatagatcacagttttacaaatcttagttttaaataaattatttcagtgtgctgttagtcctctacagtcattttggtttaaaaagtgactatttatttatggtagcatatcaataatttattaatgttaaaaaatactggtgtatgacattaccaaccagaacagttcctgggggagaggattctaattgattggcagttctgagagggcaagaagaatggaactttatacttcaaaaggaggttttggttttaccaggtactgcttatgtaaatcgtttatttttatttcatcaaagcctgggcaagtatatgcattccaatttaccattggcaaagctttatttatttttaaggttggatgttgaattaattttgtgggaaaatgagatttgtaagtagttttctttctagataagataacataaaccaaactttcagaagttaaggatgatgaataatattgaaatgacttgttatatattgtaagggttcccttaagtatcataattaacaatttgtggaaattgaaaaagcataaactgtgttatttgattagtaatatgttcccttaaaattcattttgaggtgtatgttatacacacagtaaatttttgttcaggaatgacttgctcattctgtgtttttaaaaataggaaataaggcatagtgagtcatcattacatcaattaaccaaaaaatatttcatcccctccgtcactgaaattatctacttcagccacctttcttattctccgtgttaggagggcacgtttatggactttttaatttccatgtgccatattgtccactaccggcagtagccaaacgctagctgtttcagtcccacagaagagacagtgctctgccatgatgacagggcactgctagggctggtttttcttgtttttcccttttgggcagtgtggacttcaggaactagatgtatatgcacaagggattgagtttacactaaaactaaggaaatggagttttcaatcnatggttcttgcctcttcaaacttttatttatttttnggcgtccngct

SEQ ID NO: 6012 - DNA, 1383 bp, Homo sapiens
  misc_feature (1)...(1383): n = a,t,c or g
cgggcgaaccccctcgcactccctctggccggcccagggcgccttcagcccaacctccccagccccacgggcgccacggaacccgctcgatctcgccgccaactggtagacatggagacccctgcctggccccgggtcccgcgccccgagaccgccgtcgctcggacgctcctgctcggctgggtcttcgcccaggtggccggcgcttcaggcactacaaatactgtggcagcatataatttaacttggaaatcaactaatttcaagacaattttggagtgggaacccaaacccgtcaatcaagtctacactgttcaaataagcactaagtcaggagattggaaaagcaaatgcttttacacaacagacacagagtgtgnacctcaccgacgagattgtgaaggatgtgaagcagacgtacttggcacgggtcttctcctacccggcagggaatgtggagagcaccggttctgctggggagcctctgtatgagaactccccagagtttcacaccttacctggagacaaacctcggacagccaacaattcagagttttgaacaggtgggaaccaaaagtgaatgtgaccgtaggaagatgaacggactttagtcagaaggaacaacactttcctaagcctccgggatgtttttggcaaggacttaatttatacactttattattggaaatcttcaagttcaggaaagaaaacagccaaaacaaacactaatgagtttttgattgatgtggataaaggagaaaactactgtttcagtgttcaagcagtgattccctcccgaacagttaaccggaagagtacagacagcccggtagagtgtatgggccaggagaaaggggaattcagagaaatattctacatcattggagctgtggtatttgtggtcatcatccttgtcatcatcctggctatatctctacacaagtgtagaaaggcaggagtgggggcagagcctggaaggagaactccccactgaatgtttcataaaggaagcactgttggagctactgcaaatgcctatattgcactgtgaccgagaacttttaagaggatagaatacatggaaacgcaaatgagtatttcggagcatgaagaccctggagttcaaaaaactcttgatatgacctgttattaccattagcattctggttttgacatcagcattagtcactttgaaatgtaacgaatggtactacaaccaattccaagttttaatttttaacaccatggcacctttttgcacataacatgctttagattatatattccgcactcaaggagtaaccaggtcgtccaagcaaaaacaaatgggaaaatgtcttaaaaaatcctgggtggacttttgaaaagctttttttttttttt

SEQ ID NO: 6013 - DNA, 510 bp, Homo sapiens
cggaaccttccaccatcaagggaccgcagggcccggctctgctttcccagcacgctgcctcaccaagaaagaatccagagaaggactggtggacttggaatgttaagtcatggcccatttgatgatgttcagggatgtggctgtagatttctctcaggaggagtgggagtgcctggacctggaacagagggatttatatagagatgtgatgttggagaactacagcaacatggtctcactgggtttttgcatttatcagccagaagcgttctctttattggagaaagggaaagagccctggaagattttgagggatgagacaagaggaccttgcccagacatgcagtcgaggtgtcagaccaagaagttattaccaaaaaatggcatttttgagagagaaatagcccaattggaaataatgagaatttgtaaaaaccacagccttgactgtttatgttttagaggtgactgggaaggcaacactcagtttcaaacacttcaagataatca

SEQ ID NO: 6014 - DNA, 1072 bp, Homo sapiens
ggcacgagattaaagatttttttttttttttttttttattgctgtataatacttttattaaagttttatggaaaaaacccacaacatttctgtatgtatcatatcatataatttccaggtgtgtcagagtccagtgacaaattacgtttgaagaacagctttaaaatccactcttgtctgccactcctttatgaaatattgaaaagcagctctgtacctcagcattaaaggttacaaaaagcaccattaaaaagaggactcacatatttaatccccttcaaagtagtcttatctctcctttctgacagacacagagctgcactcattcgaaatgctgccgtgtaataccaaccaacatgctccaatgtaccaaaattcaaacaagtctcatttatgagacccgtgtagtgattaggactaaccaacaacagtgagctttggctgtcctaaaaccacaagctgggttaggtaagtgttttgtacaggggaacagaaaagaagtaagatcatcaatacctaatatatgacttaatgtagggtatcccttgaccatttaacctgacacctacaaaatcccatagtgtttagtatttcacaccaatcttactgcaaaagtgctgtgcctacatacaatcaattcaagttaactccaactaatattggaactaataaaaaattaatttgtaacaaagcttattcacttcaaagcacaactgagaaaagcaaatccagacaaagcccaaactagaatcctagagggattccattgctaagaattggactctacaagtaatagacttgagtttttctcttttttcccttctttcttataatttaaatttggctttttactctaaaagtttgggttcattgcagaaatcacagtccttccatatccaattgtgattggcacttaaggagagacaaatgcttagatccaaagagttttgaaagaccctaatggctacccctcccaggtcctgcattccatgggtaactggagtcagcagcccctggtagaagacagcaagaactgggctttaaggggaatcacaataatgcaggaatacac

SEQ ID NO: 6015 - DNA, 709 bp, Homo sapiens
cctttttttaggagcaataggattttaataaacagaacccatcccaaagccatgactacgacagttgtacttgcaccaaaacagcatagaaaaccagagtgtggtgggaggacccgaagccggttgggggaggatgtgagtaggggcctggagggtgcagggtcattaatctgcggggagaacattgtgctttagcccagggaggggaggggtggggcaaatgcaccgaggtccccactttttcctgctgccctcggcagccctggggatgcaggcatctgggcacatctgccccttattgctgcccaccagcgttaaacgcccccgatcccaacactagcaccacaggtggttccggggcagggagaggcaggaatgggaaaattgcttagagaaagattccactagaatccagtgaattgtgctcagttctctttacttcctacaaccgagtacatgggtcacagggtggagggtgcaacaggacatggaacatgcccctccgtgccccccaacacacacctgcacacaggatggtggtgtctgcagcatcacaggtcatgcagggcatggggaaggggaggttcacacacacatagatgcccacagcgggtaccagacggagaacacccctgaatatacatagctgtacatggggaacccccaggtccccaccccaaccctctcccctgtcttgctgtcccccgca

SEQ ID NO: 6016 - DNA, 1265 bp, Homo sapiens
  misc_feature (1)...(1265): n = a,t,c or g
tttacaaataaccaaaaaattttatattttcctaccttgaacacatttcttcaaagggttagcttgaaaaatacatgtctaagattacagaatattcaatagttacttttagggttttaacattattttagattttaccacagagtttaccaaaaaaataacaacaaaaaaacctgctaaacatcaaataccacttgtccactgggaacaattcagctttctatcagttgagttggttagatcacattaagttgttatgtataggtattgaccagaagcctacaatgagatacagattttacactaagattgaaaaaatttatggtaccagctctttttctcttaactttctacactaagagaaaaatacattacttggcctacatcttaaagcattcaaaataggccctctgtaagtttttaacaaattgtatttgtatttaggtctttaagaaacaacctgagatgatggtaagtgtctcattcctcatttgacaaatgaggacaaatcactccttgagaactaaggtcatttcaatccatagcacccctgacctagtgccatgattcaaattcacaactcttgatagctaagactttgactgctccaactagcaaatcacatatagccattccctaactttgtgtttcccaaatctagctgtgaatcagaattaccacaggatgccttagccctacccttgatctactgaagcagaaaattactgccttaattctgtgtgatacaggtcagcctgccttttaatatttggatatctaaagtgagagcataaatgatgaagagaccagtttataggactatttctcacaccgtcatgtaaagttggtatgtgtctttgctccattaaagtatttctgacctcaatcttaaactttgctttgtcaaacaaaatcatgctgatttcaaatccaattagaaaataagtatgtacagtaaaaagtaaacttgggcttcaattaatgaaactttaacagaaacatggctagagaggaatctcctcctataagagaaaaaaatgattcacaacaactgcctactaaatacaactggaagtgcctttccctattttgtaaaatcgaatgaaaaacccacaaaacacatccacagcaatacaggtgaggcaagggtctatattcctttctattacaggtggggtcttttatatgtctcaaacctgaacaaaatacaggtaacaatctaaattcaatcatgacaataaaatactttccatttntccacngag

SEQ ID NO: 6017 - DNA, 868 bp, Homo sapiens
ttttttttttttttgccagaacagagactcaagccaggtttaatgatcattgtctagttttcagagcccagaggctccaagatttgccagcctaggtgtacacaagtgggaggaatggggtcttggacacgggaggcctgcttgctttgtcagcagagctacgaggaagtacagaggtaagaacacacagaaaactggatccatctgctttgctctccccagctggggtgtaccctctcctggcccctttcttgggccccataaatacaaaataataataataataataattacacagattgtagagccctgtcatcctctgtctccagggacacctgcttcctgggagacatgtctggtttatgggtgtggggtagggtaagaggaggtggtgatctctcggccttttcttatacccacacctggcagttttcaacacagggttctagtgcgcttacatatgctgattattcaattctccaattaaaaagctacctttgggttctatcacctgaaaccacgggaagaaacaaatcaaatctcctgggtaaggcagccaggtacatctaccaggtggtctcaaactcaaggccaaactagtggatatagtcaggagacttaagagccacagggccttttctcattccctaaactgggtaggaattatgaagaaaacggccctcccagtcctcaggagctccatcacgatgccccagaaggcctgcttcatttaacgctcactttaaagatcttcagagccctagatggtgccaagcggggagactgcagcatggagatgagattttcccagatttcctgatgagtctgaggagggagtcctagttcctatagctccagtaacaaaatt

SEQ ID NO: 6018 - DNA, 406 bp, Homo sapiens
  misc_feature (1)...(406): n = a,t,c or g
actaattacaaaaaaaattttattattacaaaacatacaatctcacaaaggtacaatttgaaatacggggacacccttctaactaccacccaggtgaagaaacagaactttgtcaggcaccccagaacccctccaagtgcctcatcacaatgacaactccttccctctagaagtagccattattcttgtatagtactgactgtgtttctttatggttttatcttattttttagagacagggtcttgttctgtcacacaagaacaagtggacaggtggagtgcagtgggtgttcatagctcactgcaatcttgagctcctggggctcagggtgatcttncctgtcttaggcctgcccaagggtgctggggattatagggcgtgtgtcattgcacttgacctagtttt

SEQ ID NO: 6019 - DNA, 1569 bp, Homo sapiens
ttttttttttttttccttgattcaactgtttactaatcagaaagggcggtatagtcggtcctttttctactgctggcaagtgatttttgtatattttattacaaataaaacaatattgcttgacagcatcatctgtcatcttacaaatatacaactacacagtcctaaagtaatagtatgtctctagaactgagcttttcttaaaaacaaacaataactatactattattaagtcctgcaccctaaatctatacagcagctttaatcaatgtggaaatgaaattatgatttattaatttacataaaattactttatacattaaagaataatttttcaaattgttaaaaaaacaaagtctgaagctgtcattattgggattcgtgggacgtggtttgctcttctatcacctgcttcacaatttctgccagttttagtcgatctactttatctgtgaatccacgaccattccagctgaagctctgcagagtatctcttaggagtttgcattcccggttatacttccaagcctcctgcattacttcattcagtttctcatcttcattctctccagcctgggggagaatacactgagcaatcacatctcggagtttttccaaggcaacattggaatcctcggctccattctcatggtcgtggatatagacactgtcctttggcttggtgccaagtaacttcctcttccgcagaatggggttgttcactgagtgcaggggtttgaggctgactttcagatcctggattctcatgttggccaactgttccgcgtgagcctgctggattcctgcaaccactgccttgtccatcatcagctgagcagaaggcagcacattatccagggcctcggtggaattgagccaggggtggtccagcactccctcgatggtgagtctcctctccggtttgaccttcaggagcttcctcacaacatctttggccatctctgagatctgactccactcttcctctgggaactcaaaactgcctgtcatgatctttcttcgcatatcctttgggatagtccggctgtggtgtttggagtaaaaaggagggtatccgcacagcatcacatagataatcacccctagggaccacaagtcacagctcttgttgtaagtgtagggcgtcggtgaggtaggtatgatgccagatttctccttctgatgccttctttgcgcctccagtacctggggtgctacataataaggggtgaactggggtgtcatcaagtcaccttggtcaatcttggcaaatccaaagtcacacaacttcactggggcatccaaagagttatccttaaaaagcagattttcaggcttgaggtctctgtgcgcaatgtttaacaagtgacagtgccgcagagccaaagctatctgctttgttacttgggctgggcttgcttctctgtaaagtgccggtgctggctgattctgtgaaatagctctcccccttccatcatctccattacaattaagagtcgggccctagggctggactcatggggaaactggacactgttagcaaacacttcaataatctgaactatgttt

SEQ ID NO: 6020 - DNA, 2271 bp, Homo sapiens
  misc_feature (1)...(2271): n = a,t,c or g
gattcactaatatgcttggtcagcctggatcaactgcacttgatcttttcaagttttatgttgaggatcttaaagcacgttatcatgacgagaagaagataataaaagacattctaaaggataaaggatttgtagttgaagtaaacactacttttgaagattttgtggcgataatcagttcaactaaaagatcaactacattagatgctggaaatatcaaattggctttcaatagtttactagaaaaggcagaagccccgtgaacgtgaaagagaaaaagaagaggctcggaagatgaaacgaaaagaatctgcatttaagagtatgttaaaacaagctgctcctccgatagaattggatgctgtctgggaagatatccgtgagagatttgtaaaagagccagcatttgaggacataactctagaatctgaaagaaaacgaatatttaaagattttatgcatgtgcttgagcatgaatgtcagcatcatcattcaaagaacaagaaacattctaagaaatctaaaaaacatcataggaaacgttcccgctctcgatcggggtcagattcagatgatgatgatagccattcaaagaaaaaaagacagcgatcagagtctcgttctgcttcagaacattcttctagtgcagagtctgagagaagttataaaaagtcaaaaaagcataagaagaaaagtaagaagaggagacataaatctgactctccagaatccgatgctgagcgagagaaggataaaaaagaaaaagatcgggaaagtgaaaaagacagaactagacaaagatcagaatcaaaacacaaatcgcctaagaaaaagactggaaaggattctggtaattgggatacttctggcagcgaactgagtgaaggggaattggaaaagcgcagaagaacccttttggagcaactggatgatgatcaataaattataccaaatatatgtttacagtatgatttaaagtctgattcagaccagggactctattttaagttcaactgaaataacactgggttttaattatatcacaggaaaaaaaaagtgcatttaagtattgttatccgtggactttataaaagcaaaggaaattgaaagtaacttttgattctgtatcaagaatcatattttcatacagtcataactgtctttctgtgaccctttcacagggcactggtaggatggattaaaggtggcaatttactgataactgcagatgtctctactttgttcctaaaatctaagtcatgaggtgatttgatttactttatagaagctggattttgaagatctaatgaaaaattttttgataatatagtagtacaaaaaaagcaccagcaactgattaaaaattgcttttttgtgcgctaccccaactgggttaaagcccaatgtgatcttttatggtgaaactcctaagaaacaggtggttttgctggaaacttggtagacccttaattatagtggtgctaaggggccnctactgtaatataaagccaccattattttttatcaaacatctgaatacattttacaaaggctattgtgagggcattattttgagcatctattttgaggtgatgtttaaaaaaactttaacatcaaatcaaattgtaaattaatttaaatatattgccttaaggacctactaaagaatgtgccaccagactttaagtgatagttgcaatatccttgtctaaaaaaaaaaaaaaagttgacttaaacattttctttaacagttgtcttttttttctaaattcagtctttctcttgcttttttttccctgctattgaggaagtattttgccttccctactcactgagaagtattgacttcgtggtacacattctaaagcatttctgatttgaatatttttgtacatttttatcaattattaaaccttctcttctagtgtgtactagtatttatttctacttaaactgctcagcctctaaagaaattgtatgatcattttaaaggtactaaatccctgaaattttgcttcatcttacccacaccgctagtttactttccttttttaatatttaagaatattataaatcagtgcatttgaggtccctagatttgtttttcacctatgaattttttacagactattttagagaggctgtggtttgaagacagaatactctttacatgctaacttttgaaggttggtaatgtaatttatactattttccttcagtgcaggagattttttaagtaaataagtaaattttagcacctattcaaaaaaa

SEQ ID NO: 6021 - DNA, 629 bp, Homo sapiens
tcctcatttccacctcacaattgtactggtgatgaattttaagggtctgtcctttagcttataggtgatgtttcacatctggccagattcttatacctccattgtatacttgaaaaggttcagaattacaggaacagcagtgagaatttggcccactaccacgactcatttgtttcattcacattcctcacgtgcaacaacataattatattttaagaaaatgtaactttgttacatcaaaatatgttgtctagtaaaaagttgatattcagtaggaacaaggatcatgtaaataaacatctatttcacatgtacccaaaagcatttaaaaagcagaatccagggcccagagcatgagccagggaggaggatgtttttcttcttttctctatttttccctaaattgtgcaaacataggtgagtctcttaacctttctgtgcctcagtttttctacctctaaaggggtgggatggttcttcaaattgtttctaaaacaccggcactttcagcagtgttctggtggcctgagatgagagcaccgtgttcagaagtgcctgggagtggcacagtggaaactccgcttgcacggaccatggagtctgctcaggaccatgctgtaggacacaca

SEQ ID NO: 6022 - DNA, 437 bp, Homo sapiens
ttttttttagagtcagaggtatatccatttattgtgggcaagacaggttatgggagggagagaagaggaggcctggctagcaaaggtgatcttaatatgtaaatgaaaccttacaggcagcagctctcagaaagaataagctctaaaagtttctttcagacctttacagctgtcagactctcagttaatctttcctagatctgggcaaggaaagacttggctgcatcaatgcagattccctacagatgcaaatctcctcaacgaaagacaactttggcaggggctacttctgcagctggctttctgaacagacatctcaaaatatgtcaaagaaatgtattttggggtaaaatatttttaattccttcacatctacagcctgatgcacctgccgtttcaacgcaccattgttggtgggcaattccattctttcctag

SEQ ID NO: 6023 - DNA, 1112 bp, Homo sapiens
  misc_feature (1)...(1112): n = a,t,c or g
tatgctacttgctgtctttgtaacttgaaaaagttactcaactccttttagtatcagtctgtcatgggtaaatgatttgctatgaagaatacagtaaaagttatagaaaatggagagaaaaatcgaatgacctatcagagtatagcaattgtttttggtcccactctattaaaaccagaaaaagagactggtaatatagcagttcatactgtgtaccagaatcagattgtaggaattaattcttctgggaactgagttccatcttcggacgttgattcttactgaaggacaacctgtgggaataggaaggctgggattccatcaggtttccaaatgtttattacacaatgtattttattttttggaccaagcagtgactctttgattttgcactttttttttgagggatcagaagggaaggggagagtcgagatgtgtgttaggccctcatatttgctgctttgttgcaagttgatataactgcgtgtaattatgaattcattttatcctgaatgtttgcatttcatactctgaatttcagtaaaaatcaaaacttaaaattctaaccagtcatatacactggataatttggtaagaaaactgtattttttttccctgaaattggataatgtactttcttctcaagattcatgacttgatagaacaatactttcagttatgttgcaaaggctcttgggcattttaaacaaaatgaagtatatccattttgaaacctgtgtatttctttttcggggtttctgcatgcagtggcagtcttaagtgccaaaattcattataaccccaaaataaccccttgatgaaggcttgctgtcttttactgtgttacacagcatccttactggatatcttagttgcttgtttgggcagcacactaatattacttaaaacactgtgatatactggagttttagttagcggaagtcagttcagggcattttagggctgtcttgctatactggaattgtaggctaacaatcctaattatatctaggtaccatactgaggttattgggtatgaccctgtggaaacacacattattttatggtaaatataggggctaaagncttaatgtccccttaggcctgtggta

SEQ ID NO: 6024 - DNA, 854 bp, Homo sapiens
tttttttttacaagattcatttttaatggatttgatcgtcgggtgcaaatttgagcattatttacaagagctttctgtagagttatttctgttcaaataaaaccagactctcaaaatacaacataagcctgaacctacttgatttttttttctccctctagttaccaaggaatatcgtatctcagatgcatggcctactatcacactggtctttaaagaaaaaaaaaaatgcatggccacagttccaggcagttcctggtagctggatttagtggatttatatatgacagtacagtacatcatcagtttcacccacagggcagaacttgcctccattcaggcatctctttacaactggcagcaatgcagcattaagggtttttagccaggacctgctgtttgcagtcctgccccttgtagtgttactctgggtgttgcacactccatgattactagaagacaaacacctgaggcatgcaatctgcttggagtgcatctatttacatgaagctgctcacgggagctggtgattcttccagatatgggtttcgtaggttggcaaagagttatcacaccatcagagattttaccaatggaaagagagtagctgaagattatattgcaatgttattgtgaaacatttaactttcttaagtttaaagtgtactatctcctgcagctcaatataaacaacgatgtatttctttgtagcagtatgtggagtcagaatgggttttccaatctgatttaatccctgagcagctatgttaaaagttaactttttaaaaaagcccaataaaaaactaaatactgtattaaaactctaccacaatgttacagggataaacttattt

SEQ ID NO: 6025 - DNA, 857 bp, Homo sapiens
ttttttttttttgagtattcaatgaatggaatttaatgtaactatgacataaacacacacagggtggggaggacgggtgaccaagcgcagacgtgggtgacacgtggccccgctctctggaccctcagtgggaaaaagtctgaggctggcgtctctcaccaaaccccacctcccctggtgggtcaatactgatctggctgagtgacagcatctcgtgacccaggctggccctgggaaggcgccacaggcgaggcctgcgagtccagggagcaggcagacgctacagtggcccccgagcgcgccaggtgccagcctcgacgtgtaaatggcccgctgcgggcgctgccgggaaggaagacaagaagggtgagggctcgtcctcaccaagtgcttcctgagtgccgtaggacgtgggtgggacatggggacagtgagggtaacacaaacagcaacgaatgcacaaagacaagttccaggaacacccataaacccataacgttcaacaaaatggcaacaaaacgacgcccctgctggcctggcgaagctggcgcttccttcgtggcagatgccacctgcagctgggctggctggcaagcgttggcccaagctttttggtacctgggagctcaacagcataaaaggctgtaacctctacacggaaaaatttcacatccttcccctgaaactgacttcaggggcaaagaaacgagacttcttgaagaccagcctcttctgggaaaggggcttctgagacgagtgtcgacggcagagcagatggcctggggaaggcaggggtccctgggcagaggctgggagggtggccagagaccagggagggcccctccatctggtgggtt

SEQ ID NO: 6026 - DNA, 372 bp, Homo sapiens
  misc_feature (1)...(372): n = a,t,c or g
ggcttgataaacaaagtgttaatttctggtcataaagagatattttagacaaattggggaggtggataattccttatttttccagagaccatgtctatgcctctcactttgcttttggccattgctgattgatctcaggattaagaaatcagatgtaagatgggctgactagattgttttctggaaaactggaaacccaaagggaggggagaatcactgtacagtgatgggaaggtggttggaaccaccctgttctttttaggaagcagtgccctaggggagaaatctgttgagctccctgcttgcttgaaataccccgtgctgctccantttcccntgcttttctngagctttagtgttttttggctcttc

SEQ ID NO: 6027 - DNA, 547 bp, Homo sapiens
gaccacagatgttgcctgaatctcactttctggaacagtagcatatgaccatatataaagcccccaaccaacactttccctaatggactattccctgctcattcctgacagaggtgtccgcactgtttctggggttcctttcattatacagactctcaaaaccaaacaggttatttggtaaatggaagagatctattacagtgtggagtcattaaaacagtccttcccagtatccagctcccttccgctttgcctgcttgactttctagagagcccacctcctctttcgagtcagtagagagtcactgagttcaatttgctgcaaactaattaattcctaagaactttgacactagaagctaagaccccaaaacagctcctcctcctttcatcctggagagaaaatatttcagatataatacatacattttcaatttccatatttaaaattcgcttcaatccatttttccccatatttataaggtcacatttgttctttatgttaatggcacagatttcagagccaggagactcaaagtacttctca

SEQ ID NO: 6028 - DNA, 277 bp, Homo sapiens
cgatttggaaatgtggaggtcgaggttgacagcgacaccgaggtcgaagccagttgcccctggagagcgagagactgggctgggccgactcccacctctgtcgcgagaggcctacgggtaggggcaggtgggcagggggactgtgctgggtctctggccgcgtctggacggcaggcgacactttctccacaaaaagcgtcaagaaaccacgacacttggtttctggacttttccgcgtgaacagtaaccagaacaatcgccatgaaggttcgtttct

SEQ ID NO: 6029 - DNA, 194 bp, Homo sapiens
ttccaatttaattatggagctcctggatcttccctttaggaaatgtgtaggaggagttggggtggttttaagtctccatccttccctgtgggtttcacttttttcccaacgacccctattttccataaagagggagctgcctgccctaggatggattagaagtcatgcctcatgaatagggaaagggctctcct

SEQ ID NO: 6030 - DNA, 753 bp, Homo sapiens
  misc_feature (1)...(753): n = a,t,c or g
gcctttgaagagaacagatcttgagggggatctgtagatggacacagggagattccaggtgcctcagagggatcaacttgcagttccaagttgtcctcagggaaatcttgccattttttgggataatgaactgaattctcatcacagtggaatacgtatcatcggaagggatttttaaagggcagggtgagaagtggattgagaatttcgcatagcaccaaggttaaacagaagccaactacgaaacaaagccagaagggcactcaagcaaataatcaaaatcaaatccttaccacgctgccagggaccgatatatccagagcatgggaccaggagctggactcacggtgggatctctgatcagtcacagaaggagcttgacgagctcatggggtctctctccctaggtggagaagacagggctccaaagtgacttccagtcccatccacgtcacagaggcaaattgtcagagacaaagacctaagccggtccttttccaggagtaaatgaccatcgtgcgcccatgggaagagtgctgcatccacggaggacatgggccaacagtgctctcaaatgggtttcatgaaagcatctgtgactcatccctgttcaagaatgttttcattacgattcagcagaagcgatgtgccaggtcagcaaatacaactgcaaaaccgggcctgnnnnnnnnnnnnnnnnnnnnnnnnnnnnnnnnnnnnnnnngtaaaattaagaattagctgagtatggtg

SEQ ID NO: 6031 - DNA, 513 bp, Homo sapiens
gcacagttgactggattgttgctgacatcttggccatcaggcagaatgcgctaggacatgtgcgctacgtgctgaaagaagggttaaaatggctgccattgtatgggtgttactttgctcagcatggaggaatctatgtaaagcgcagtgccaaatttaacgagaaagagatgcgaaacaagttgcagagctacgtggacgcaggaactccaatgtatcttgtgatttttccagaaggtacaaggtataatccagagcaaacaaaagtcctttcagctagtcaggcatttgctgcccaacgtggccttgcagtattaaaacatgtgctaacaccacgaataaaggcaactcacgttgcttttgattgcatgaagaattatttagatgcaatttatgatgttacggtggtttatgaagggaaagacgatggagggcagcgaagagagtcaccgaccatgacggaatttctctgcaaagaatgtccaaaaattcatattcacattgatcgtatcg

SEQ ID NO: 6032 - DNA, 214 bp, Homo sapiens
  misc_feature (1)...(214): n = a,t,c or g
ctgggtccacagtaccttactgttgactgtagtcactctgctgtgcaataggataccaaatcttactccttttttctcttttttgagacaggtacttgatctcacccaggctggagtgcagtggcaggcgtgctcaatagctcactggcaaaccttaaatacctgggggttaaagcaagtcctccccaaccttaagcctccccaagtangctaa

SEQ ID NO: 6033 - DNA, 443 bp, Homo sapiens
ttattgttatccttggcaaaattaaatcatgtcgtaaacaatatcccaatcctcttgtcatccatcagactctagaagggtggctcctaatgcttttcgggtctcggaccactgtggaaatttggtgaaagccatgcaactcctcctttggaaaagttatggtagcctgctttagaatataaatgcagaagttcagggtatagtgaactccatcagtggaaccctagaaagtctcaagctttagcaggagtggctgggctggccaagggaaggaacagggaagaaggactggttggatttacaggtctcacgggagagtggtggcattgtcacagaaagattatggactccctgcttctaagcacaattttattttatctccattaaaatattaactcttttggaaacatgaactcttactggcttaaaaaaagcaatctagc

SEQ ID NO: 6034 - DNA, 514 bp, Homo sapiens
  misc_feature (1)...(514): n = a,t,c or g
tgtgacttagaggacagggatggattccaaggttcttcattcattttttaattccagcaaagcacagagtttgtacgtgttcagtctgttgacagtgggtccctcggccaaaaggttaccttgaatctctggatgctgagtctccactcttccaagagtaactgaagatgtccataataaggggtcgtgaactgaggagatgatatagttactttagaaggaacagtagagttctggggaatttggcacgaggcgcccttggacattactctctggatacaacggagagtgtgccaaggcttagttagtgctacattaaaataaaaaatgtatgtgggcaagggctgtaccaaaatagagtccacctcagactatgggaattagggtgggcggatttggagaaacttaaaaaaaataactagatttggttaggaaattaccatccatagaatatattgatttatttctttttactttcttaggtaccacatgttttattnaagaacttcttagg

SEQ ID NO: 6035 - DNA, 389 bp, Homo sapiens
  misc_feature (1)...(389): n = a,t,c or g
acaagttccacaataactgttaccggtgagtgctccctgctgggctgaggctgcccccttcctgcactctctgcagcctgatctcagctccagtgcagccatgggcccacgaggctgcctttcccctcatgatcttgaggttctgggaatactggttctggataaagttgttggagaatgaggagagaggtttaggcaggagagagaagagagatagggacagtgatgtccccaggggtctgtgaggactcaggcagctcaggctccttaaaaatgcccagaacagaccagaaaaggagttgggggccaaggctcantgcttttacgcccgtaatcccagcacttttnnaaaggncnagggggggaagggatantttgacccnggaatt

SEQ ID NO: 6036 - DNA, 285 bp, Homo sapiens
ctggagcgaagatgcagccccaacctctcccgagaggtgctctacgaaatctttcgctccctacacaccctggttggacagcttgacctcagagatgatgtggtgaaaattacaatcgattggaacaaggctccagagcctctctggcattccagcctgcattgctctttagtgcacttgaacaacacattttatatttacagccttttttagcaaaacttcagtctccgattaaagaggagaatacaactgctgttgaagagataggaagaccagaaatggggg

SEQ ID NO: 6037 - DNA, 1418 bp, Homo sapiens
gtgtcacactggagaagggatggcaccaccctttgttttggcccacaggaaattttcatcctcagctgtccatccaggcccagaaggtgctgcccactgaaaggaaggcagtgccgggggaggtcatcctcactttgcattttcttttgtcatggcaatggttctggaaatgtatgatgcaatgtatcacacttatcagtgcccaggcaacacaacttgattatggcaatattttcagaatgtgtacttttcctattgaaataccatgttcattcctctggctcagtttggtgatgaaaatgttttgaaagataatcgatacgtatatttcacacaaggattcaggttgctgttgaacccttgctgggcattgataccaacacaagtgcggctactagctggtcccatcacgggggcccctgttttgcatctttggcgatttcctgtcaggacctctggccctactaggctgtagactcagggagagcacagtctggctgtgcttgccaaacctctcctctgctgcagtttattccaaacaggagccccctggctgtcagtgcacaataatagacacacatttcttcaacgttccattcctaggtgattttcacatttttagttcctcagcatattttattgctgtgtgttgacacaatctggtataaaaaactttctctggattcagaggaagtttgaggaatcaggagaggaccaggccttctccagtgcctgggtgaaggtacagacctcgctgtgtctccgatgaggtcagaagtgtctctatttcataccacaaaggaacccaagtgggagtagggaacagatggatggcgcgaagacctctgtgtctccctagagaaaggaagaaacttaagaaccatcatagcctggtcctccaacatcttacagatcatgttttccaagagaaaagcctgtgttttcagaaactctgaattcagaaaaagaaacggaatgtgcgtaagaatcaggccactgcctggaaagactttctctcaattcgtagcctgaggctcagtgaaggaaacatgcagaaagaatgcctgagacgcccccagggaataagggaactctttataacctgtccagtgctgtcatctgggatttttcctctgaagtacaagaatttcaggtgatttaagctgcttgatcacacttatttgtgcaaaattgattttccatttaatgttaatgttttcctgcttaattttatataacttcagaatgtaaagagcttcaaggtaaattacagggtgtttaacctggggagttaaatgtgtacacttgaattaataggagcaccggttgttgctagtataaagtaatttgtgtggcagtttgtactgtgctgagtttttaaaataaacccaatattttaaagtaaaaaaaaaaaaaaa

SEQ ID NO: 6038 - DNA, 238 bp, Homo sapiens
ttccaaatgtccccatatgctgaataccccaaaaatcctcgctcacaagaatggggccgagaagctattgaaatgcatgagaatggaagtaccaaaaacctcctccagatgacggatgtgtactactcgcctacaagtgtaaggaatccagaacttgaacgaaacggactctacccggcctacactggactgccaggatcacggcattcttgcattttccccggacagtataaccccg

SEQ ID NO: 6039 - DNA, 548 bp, Homo sapiens
aaaagagaatcactgatctacaatgtatgatctaaacctttgaatattacataaaaagcctttcacaattggattctaactacagcttttgggcctcacatctcccacctgtacatatgctggaaccaaacacattatccagtgtactattcttccatctttgcctgcccatgcatccccactcacctggcattgcccctatgtgttacttccagtttggaggaggcattttcctgctctcctcgggcatttcttcccttaaactcctgtgtatcctgtactttccgccatcatagcagtcacctatagcagtgggctcaaaactatttgttgagagtgatggcatagaatcaaaattacccatttaagctttttaaaaaatctaaaaagttattatttaatcacacatgtagttctgataccttcgtccatcagagatcaaattatttaagtcaatgttaaagcaatcgagccaatgtagacattccactcataagaactctcttattacgtattactgagatataataaataaacacaactataaa

SEQ ID NO: 6040 - DNA, 293 bp, Homo sapiens
  misc_feature (1)...(293): n = a,t,c or g
aaaatgtgtggtattagattttttcctaaagataggtggcaaggcaacctttccttggtcaagtttattagaaacctatttcagacattgtagagaatgttgtatgtttatatagcattcctggaaagccatctgaaaatagtaatcaaaattaatatatatggcctttgatctcacagtcccactttctgataatctatcccatagaacttaaaagtactgattagtaaaactgtgtgtgtgtatatatatgtatatataatgatgggtctgtgngngtatggatatatatg

SEQ ID NO: 6041 - DNA, 5447 bp, Homo sapiens
  misc_feature (1)...(5447): n = a,t,c or g
caagtgccgtcgccgcgccccttccccctcccgcctccccggccccctccccggaaccggcggtcgagctacggtcgcggacgagtggaaccgagactgccccgcggagccgccggtatgagcgcccctcgccaccccgtgtcccaggcccggcctttctgacaagagctagacttcgggctccttgaggatattcagttttgtatgtttgaatatcctctcaccatgttcagcataaagtaccattcttaatgattatcctcaacaagacaggtgtgagagggttgctgttgcattgcaatcatggtgcaaaaataccagtccccagtgagagtgtacaaatacccctttgaattaattatggctgcctatgaaagggaggttccctacatgtcctttgattccgatgttcgtgggcagtgacactgtgagtgaattcaagagcgaagatggggctattcatgtcattgaaaggcgctgcaagcctggatgtagatgcacccagactgctgaagaagattgcaggagttgattatgtttattttgtccagaaaaactcactgaattctcgggaacgtactttgcacattgaggcttataatgaaacgttttccaatcgggtcatcattaatgagcattgctgctacaccgttcaccctgaaaatgaagattggacctgttttgaacagtctgcaagtttagatattaaatctttctttggttttgaaagtacagtggaaaaaattgcaatgaaacaatataccagcaacattaaaaaaggaaaggaaatcatcgaatactaccttcgccaattagaagaagaaggcataacctttgtgccccgttggagtccgccttccatcacgccctcttcagagacatcttcatcatcctccaagaaacaagcagcgtccatggccgtcgtcatcccagaagctgccctcaaggaggggctgagtggtgatgccctcagcagccccagtgcacctgagcccgtggtgggcacccctgacgacaaactagatgccgaccacatcaagagatacctgggcgatttgactccgctgcaggagagctgcctcattagacttcgccagtggctccaggagacccacaagggcaaaattccaaaagatgagcatattcttcggttcctccgtgcacgggattttaatattgacaaagccagagagatcatgtgtcagtctttgacgtggagaaagcagcatcaggtagactacattcttgaaacctggacccctcctcaggtccttcaggattactacgcgggaggctggcatcatcacgacaaagatgggcggcccctctacgtgctcaggctggggcagatggacaccaaaggcttggtgagagcgctcggggaggaagccctgctgagatacgttctctccataaatgaagaaggggctaaggcgatgcgaagagaatacaaaagtctttggtcggcctatcagctcatggacctgcctggtggacttggaagggctgaacatgcgccacttgtggagacctggtgttgaaagcgctgctgcggatcatcgaggtggtggaggccaactaccctgagacactgggccgccttctcatcctgcgggcgcccagggtatttcctgtgctctggacgctggttagtccgttcattgatgacaacaccagaaggaagttcctcatttatgcaggaaatgactaccagggtcctggaggcctgctggattacatcgacaaagagattattccagatttcctgagtggggagtgcatgtgcgaagtgccagagggtggactggtccccaaatctctgtaccggactgcagaggagctggagaacgaagacctgaagctctggactgagaccatctaccagtctgcaagcngtcttcaaagggagccccacatgagattctcattcagattgtggatgcctcgtcagtcatcacttgggatttcgacgtgtgcaaaggggacattgtgtttaacatctatcactccaagaggtcgccacaaccacccaaaaaggactccctgggagcccacagcatcacctctccgggtgggaacaatgtgcagctcatagacaaagtctggcagctgggccgcgactacagcatggtggagtcgcctctgatctgcaaagaaggagaaagcgtgcagggttcccatgtgaccaggtggccgggcttctacatcctgcagtggaaattccacagcatgcctgcgtgcgccgccagcagccttccccgggtggacgacgtgcttgcgtccctgcaggtctcttcgcacaagtgtaaagtgatgtactacaccgaggtgatcggctcggaggatttcagaggttccatgacgagcctggagtccagccacagcggcttctcccagctgagtgccgccaccacctcctccagccagtcccactccagctccatgatctccaggtagtgcccgcgctgccctgcacctagtgtgcagaggggacggccgcccctcctcggacagcagctgcacccgccccacccagcggcgacattgtacagactcctctcacctctagatagcaaatagctctcagatggtaaacgtagtcgtttgatcccaaaactaccttggcaggtagttttaactctgatcctaacttaactcaatagccatagattttgtatacgttgtgcacaaaatccaaccagagcgcaagggcctctcttgaaagaaaagtagtttctgtaccaattaaaggattgacgtggtctcagatattgatgcaaaaaatttttccaacgaactccgcattgtccattagtgaatgaattcctgtgacatcctccagagatggcccctcctcacctgggacggaagctgccagctcgcttcccccaagctgcctcatggcccgcacgccgcctcacggcccccatgcttcccgccagtcaagatggtctgtggacttagggccagcccttgaggtccttatcctctgaggattcagaggttgcctgcggagtaccttgtcccagggccagacacacccacaccacccactgtctgcagtggggccgggggctcaggaggggctctcagggactcctggtgactccaggaaaatgctgccatcgttaaacattactttctctttcctccttttcaaatctttttgatactttttagagcaggatttttctgtatgtgaacttgggtgggggggttcttcccgtttccttccgtgcgtcgcccctctcacctgcagtcagctcccagcccagtgtaggccatctcctctgtgccctctggaggctcattgtctcagagcccagacagttccagccactaggaggccgtcttggaaccagcaagtcgcatttgccacttgacactgtccatggggttttattagtagctaagcagcagctctcgcatccacttcagggtggcgtgtggcatgtaggagtcctgcttctttgtacatgggaattgtggactcatgcgtgtgtgtgtgtgcatgtgctgtgtgtgtgcatgtgtgcatgacggtgggggtgctggggggacggggtgagtggaaacttagtttgagtaatgaaggaatcttcacagaagcaaatcagaatatgggatttgtttgccttttacattttgtttaattcctgattttaaagcctgctctatctggtacaggcccttattttttcagctttttatgggaaaagcaggttatttgagaatctgtccagaagttgcataggggatggcctccacgataaggacatgcaacacgtgtttctgtgtgcagcagaggccgtgtttttcatgccaaaccccacgcggctgtcaactgtgtgcgtggtaggcatggagatcctggttgtgccgtctcagctccgctctgaaggcactgtgtgggtgctgcgtgactggagagctgtgtggaggccatgtgtgccccgtgcagggatcaggagggcgggggagggaccgagcagccctcttgcccggtcgggtcagccctagtggctgcctgcacactgtagacgtcccagggcctgtgctgtgatcacctgcctttggaccacatttgtgtttgctcttagagatcgagctcctcagtggtacctgaagcctttgcttccggaaagcgcggtagggttcgtaggtagggctagtaggtagggttagtaggtagggctagtaggtagggctagtaggtagggttagtaggtagggttcgtaggtagggctggtaggtagggttagtaggtagggctagtaggtagggttcgtaggtagggctagtaggtagggttagtaggtagggctagtaggtagggctagtaggtagggttagtaggtagggttcgtaggtagggctggtaggtagggttagtaggtagggctagtaggtagggttcgtaggtagggctagtaggtagggttagtaggtagggctagtaggtagggctagtaggtagggttagtaggtagggttcgtaggtagggctggtaggtagggttagtaggtagggctagtaggtagggctagtaggtagggctagtaggtagggttagtaggtagggctagtaggtagggctagtaggtagggttagtaggtagggttcgtaggtagggctggtaggtagggttagtaggtagggctagtaggtagggctagtaggtagggctagtaggtagggctagtaggtagggctagtaggtagggctagtaggtagggctagtaggtagggttcgtaggtagggttcgtaggtagggttcgtaggtagggttagtagcgcgtctgtgctgcttccacctggtgcttcctgttcccaaatcacaagggcctgaaggtggtccctgctttctctttctctttctctgtgtctcagatggcgattttgctgacagctgccaagaaaatgcttcactcaacagtcctcatgtgcccagagatgtttatagaactgtttgaattgcagccatcccctgccccctcccagggctgaagatctgttctttttaagttgattcgggagtggcattcttttatacccaaagactgtagtgcatcttgaagagctcaaagcacatgaccgcacaaatgccttacagggtttcctcccgagtaatccaatctcactcccccttgtaagggaattctggggcagctatggtttgagtatgcagtttgcatcgtgtttctacctttagtaccttgccactcttttaaaacgctgctgtcatttcccatttcttagtactaatgattctttgattctccctctattatgtcttaattcactttccttcctaaatttgttatttgcatatcaaattctgtaaatgttttgtaaacatattacctcacttggtaatacaatactgatagtctttaaaagatttttttattgttatcaataataaatgtgaactatttaaag

SEQ ID NO: 6042 - DNA, 268 bp, Homo sapiens
agaaagtacatcatttccaaatttattttgaggtgtgggagaaaaatgtttcaaggtctcatccttagggatctgtgctcccgggacccctctgacttcatctcctgcctgtgtcctcctcactccctctgctccagccatacaggcctctttcctttttctgggactgaggttgctcctatctcagggacttctcctggggctgttcctctgcctagggactctctggcccctcaactgcaagtgacaaggcagcctttcttcccta

SEQ ID NO: 6043 - DNA, 435 bp, Homo sapiens
  misc_feature (1)...(435): n = a,t,c or g
tataataggtgtccttttactttcaaaaattgtagcatttttaaactaattttcttaagaatgtgatacagaaagaaaactgaaaaaaacatatttatattttatctgattttataagatttttttttcagtcaactggtgaaattggtaaatcctgccaataagtctttataccaaattacgttttaaaattagtttcataaaaggaacaaaagcatttccatgctagacaagatttcacttatcgtcaatttaactccgaggcatttgaaataaaacaactgtatttttacattgaaaattatttgtttacaggaacttgatagcataatccacaatgtgatgtgaggtacttggtcaaaaatttttaaaggtttatnacacctaagtaaacatttggaganggataccaggtttggatttggtaaatacctc

SEQ ID NO: 6044 - DNA, 345 bp, Homo sapiens
aaatggttaacaggacacaggtccttgcttatcttgctatggtctgtcaagccttatacaatctagccttatctctctcaccgtcttatctttatcacccgtagattcccttgttggccactggtttctttcagtccttaattagccttttgtcactacctgtctacacatgctgtttttcccttctcattccatcttgacattgtctattttgagatctcagctcagttgcagagaagctgccttccccatctggcaacccattatatgtgtcatagtaccatgttgtaccatagagctagacacaggtgccatgttgtgtcttgaaatgtattcaccagcttc

SEQ ID NO: 6045 - DNA, 295 bp, Homo sapiens
acgctcctcgacttagatgccttggcaagacatttggctgactgtattcgaagtagggagatccttgatcatcaggatggtaatgtagaagatgatgggcttacaggactcctaaggcttgcaacaagtgttgttaaacacaaaccaccctttaaattttcaagggaaggacaggtaagtgttaagataatcaaatgtttctatgaaatgtgattgaaattttttgttgttacattgtgtattagtccgtttttacactgctcataaagggcatacccgagactgggcagtttac

SEQ ID NO: 6046 - DNA, 325 bp, Homo sapiens
aaaaggaaagttgcacactttgaaggctcagcttctccagtagaaagtaacctgtggggctatagaaaggcaccaggtatggaatcccaagtcagttccttctcagctatatggatttaggaatacattcagcctcaacatgctcagctgtaaaatgggaataaaaaaactgcactacccttcatattcccgaaggactgttgcaaaaatgatctttatggattcacatgtaaaaagaactgcacaataataaaaaagtatttcctatacagtgattttgtttaccaggcaaataaaacaggttttggacaccaaatggaaaagg

SEQ ID NO: 6047 - DNA, 205 bp, Homo sapiens
ccttttgaggaacatttcgttttagatttttacaagttttctaatctggcacgactttcaaactagcttaatctgttcttacagaaacctgtgtaaggacagactgcccacatacgggctccccaaataaaatggcatttttatttcttgtccctgctcgggtttcaccgaaccttggtagccataatcagaacaaatgaaacac

SEQ ID NO: 6048 - DNA, 421 bp, Homo sapiens
ggtaaattttctaacaagatgaactgccttctgatttgaacattctgatcttggtagcataatctgccatgtgtacatatatatattttatgtgattcattattgtaggaataattactgaaatttcctaagttgttatacacttaggattatacacatatgattaaagaccttgttgagacttaatttttaacatctataaactggaaaaatgtgcagacatcttgtttctattaatatattgagaaaagttttcattaatattaatatttcttaggaaatctagctttataaaacatctacatgtttctttcatattttggttggaatggtttagcacctttgtttgcatagccttagtgagaatttagtctttgtggaatccttaaacacttttgacgctacagaaactttagtggct

SEQ ID NO: 6049 - DNA, 528 bp, Homo sapiens
gccaaaaattagcatgcatataaaatgccaactccccacagttttgtatcctaacaagtcctactgtgtcaaaagtaggaaaccaagagtgtggcagggcatgcaatgagcaggtatgcttcatgtctcacatctacctggcaaggactagcaaacatccttatatatccaaagacctcttactaacgatgaagcagatcagttgcttggagtgagatctttgagaggagaaacaggaataggaatgcagaatgaccattaagataatcaatacagtgttatttgaaaagtgtacaaaaattaaattctgcaatgatttaggatcttcccccttcctcactaaatgcaaatcctcttggaactggtaaaacatgttggaaagggaaatggggaaaaatacttggcaataagggcatggttggaggaacagaactaaagccctgcgctgaaacaccatgttagaacaaccctacaagtggtaaacaaccactcaaagtccagattgttttcctcgatcctcagtcgatc

SEQ ID NO: 6050 - DNA, 491 bp, Homo sapiens
ttaaagatttccaggctatttaatcaagtaatttacaatgtacacattcctgagtatacaccattgtggtgatataatttattttggaattttctccattcagcttaaaaggtgtttcttcccaagaaactgaacttttctgtcaaatgcacttgatcgaataggagaattgggttcataaaatggattcattgaaaattttatatataaatcataaacatcagtaaagaagttctttattccatcttcttgtcttatgtcatgaagcataataaacctcatatgccccgcggtgacaaatgctgacacaaaccactcgttgaacttgtccacagttttcaagtacatgttgttcgatagccacatgttctcatctacgaggtcgagagcagcatgagctatgaactggttcagatgacgatggtcgtctttggattctgccttcccagctggcaaaaactccatttcaaaaactggattatcatggtggc

SEQ ID NO: 6051 - DNA, 1954 bp, Homo sapiens
caaaggttgtacaattatacaaaaaaaaaaaaaaaggcaaactataggataacacagagccctttttgaaaataaattggcattggagtgttttaccctctagctgttttacttagaatgtaacatatgctgcctacccacctcaaaatgtctgtactgcaagagggccctgggcctctgctttccatattcacgtttggccagagttgtagtcccaaagaagagcatgggtggcagatggtagggaattgaactggcctgtgcaatgggcatggagcacaaggggtcacagcatgcctcctgccttaccgtggcagtacggagacagtccagaacatggtcttcttgccacggggtgttgttgtctctggtggtgctgcatgtctgtggctcacctttattcttgaaactgaggtttacctggatctggctactgaggctagagcccacagcagaatggggttggggcctgtggccccccaaactagggggtgtgggttcatcacagtgttgccttttgtctcctaaagatagggatctacttttgaagggaattgttcctcccaaataaatttgctttaccttggtcctttcttttgtgccagtattcaagtggtattagctctgagcagggtcacatttggccaaacctgacactgtcttgctgcattctcctttggcaaacatcagggtcagaattcaggatagcccttcctagggcactggactttctggcatgggggctgtgtttgcacaagttattttcatgttacctggagagtgtccagaggctgctctgaggctgaggtgtgttcccccttgcctggttccagctgtcagagggataccatcctagggtctgggaatccaaggccacgagactccttggtttgtggtccgagatcctgtactaaggagggtctggccagaggaacagaccagcttttgcacaatgaagcgcaagggaacaagtggtttgcctggtgtcctacctgtcctgaacctggtcctgtgggccattgaaaagttagatctgtgatctctggggtttttgtggctttgttcaatgcttccactctagggcaggcagagcagtctatactctcccaagcctgcttgacctccaagtagagctgatacagagatctgtgaatattgtgatagaaattctttggtattcatacatttcagctgcaagtcagcaatttcccaggtaccatgtaagctataaaacagtcattcttaaagacagaggatagctgtgactcatgggatcatgaggtccatggctggttgcaggttccctttttccttcctcaggttttgtctcttcctgtgttgtccccagcaagggagagactgtggggtggattgggagaacagattaggagtatagcaaatgaacccagaatggaacagtggggagctaactgtgaatgaggagagtacctgctgcaggacctggaggtcaggtgtgaatgctgtattggcacagggaataaatatcctggcgtctggagccttcacctctccgtcaagtccttcctgtgatactgccatggcacaggatctgagttgcagctctgcaccctaaatcacaccctgggcattgtctgggctgcagggctgccaggttctgtacttgtgtccagctgtggccctggatgctggagctggagggttttctgtgctcagactgtagcctgtagctcttggcctgtgtagagccccctcctgtgccctcagtggctgtcgtttgttaacatcatcaggaagatgggaaaggtcaggcagaatttttctgccctacaaagggtggaagagaaaggacacagtattttcatgaatttaccatatatctttgtttttcttcaacgaaaaagttaattgaggcaatgtcatctgctcaaagttgagtggtttattcacaataaactgtaagtttctgattata

SEQ ID NO: 6052 - DNA, 884 bp, Homo sapiens
  misc_feature (1)...(884): n = a,t,c or g
aattagaatggcatgtgctgcaaggcagatgtatgggagccaatcatttggctagtaaaggagccccagccaactggccagcagcttcagctcatcacagctttgttgttctcaacttgttgaatatcatgcnnnnnnnnnnnnnnnnnnnnnnnnnnnnnnnnnnnnnnnnnnnngcccagcactgccactgcaatcttataaatggagttttaaatttgcaaatgtattttatttgtaattgttatttttatgtgtggaaaacagaatggattgctagtgttggtgagtaaaaacaaaaaaaaacaaatgacaaatgaatgtgatagctcatattttagaaatggctttataaatcaccttggttccctatcagtagagctagtaaggcagcaccaatctctaaatatagaagaaatttccccaaaatgtaaaatgccagacatgtcccagcccgaactcccccaccccatggcctggaggtttccccgatggaaattgggcccacatttgcctttagtctctcctatcccagcctaaataggccttggggacagctgtggtgcctacagaaagtaccctagacttagaagcagtaatacnggnttnctagntctatttctgacactgcctccctgtgtggtcttgagcaagtcacttcacttttctgtgctttggcttcctctactctaaaaatgggataacagtatctatctgatctactgtgtaatgcttnnnnnnnnnnnnnnnnnnnnnnnnnnnnnnnnnnnnnnnnnnnnnnnnnnnnnnnnnnnnnnnnnnnnnnnnnnnnntgcctaaatatatatgtacagtgcctggcatataagttctcaataaatggtagatattaaaaaaaaaaaaaa

SEQ ID NO: 6053 - DNA, 574 bp, Homo sapiens
tgttattaaaatataacaaggttataagtgaccaagaatccatttgtgttgaatctcctgtcttatcagaaacaaaaattgcagctatttcaggaagacagttctaattttggggtttccggagaaggggatctcaggatctcattacaattttagcagcccccaagtgaaaagaaattcttacatcccattgtgggaattttaaatatgtccacaaattctttgatactctgaccttctcaagaggaggaggttaattcttttctccttgagtgtgggctgaacttagtgacttgctcctgaagagtagaatatggtagaagtgacagtgtgcgacttctcagactaggtcataaaaagcatcgtagtttcctctttgctagctctttcttgaatcacccactctgacaaagccagctgccatgtcatgaggacactcaagcatccatatgcagagagctgtgtggtgaggagctgaggcctctttgaacagccatgtgatgaactaccttggaagcaggtcctctgagctccagtcacatcctcagccacgtgtgcaacctcatgagacacc

SEQ ID NO: 6054 - DNA, 245 bp, Homo sapiens
cagagtgtgatgctggacctggcctacggggaccgcgtctgggtgcggctctttcaagcgccagcgcgagaacgccatctacagcaacgacttcgacacctacatcaccttcagcggccacctcatcaaggccgaagacgactgagggcctctgggccaccctcccggctggagagctcagctgatcctgcccctgcctgaccccgccaagccctaccgtccagcgatgacaaaaataaaatggt

SEQ ID NO: 6055 - DNA, 81 bp, Homo sapiens
cattttatgccttatgagttatatctcaaaaaacccaaaatgcacacctatgtatgtgtggacaagaagcatgaatgaata

SEQ ID NO: 6056 - DNA, 807 bp, Homo sapiens
  misc_feature (1)...(807): n = a,t,c or g
aagtaatgagaggtccagaagaaatgtggcttcatctctgctgcttactgtgcctcccttctcctgccccactcagcccacaaaataggctggacactcaaaaaacgttgcgtttatctaccttttagagagggtgaatagcagagaacctggaggtgggaatggtaaggaactcccagcagggtagtggagggaatgggctgacgcatctaaggctgatgccaggtctgctccctatctgggtggcctcagcaaatgacgtccagcacatccaggggcaggctcaagggagaacagcccccaaagctaagatcctgccaagctaaatacagtagttctaatgaaatgtgagaggctataatcccatttgggaaattcctaaaaagtcatgaggcaggggattggtttatgttattatcatgacctgagagtcatgggttcagagccaaatgttcaggattgaattcaacagcatttaaatgtctttagagcaggatggaaatatgttagcaatgccctgcagagtgccaagtaaacggcaaaagccaatgagatcataaaggaagttgttagctaacctaggtggagtcgccaacttccttctacttctaattaattaaaattaaaaattaatacttggggaggttaactgggaattaaaggttcttaaaatccaaaaccctctggaagggtggaaaactgggggagcctcctgtttccccttagttaacccacnggcanttcggggcantgttntccccggcgttggggttactgtnttttttgacccgnggttccntagggctt

SEQ ID NO: 6057 - DNA, 539 bp, Homo sapiens
  misc_feature (1)...(539): n = a,t,c or g
ttctnntttnanntttgaaaaaccctnnnnnnnnnnnnnnnnnnnnnnnnnnnnnnnnnnnnnnnnnnnnnnnnnnnnnnnnnnnnnnnggcacgaggtcgctttatttgcagtgtgttgagggactggtgtatccactggaatagttggtactcttggatgtgttttctcaccaagatgagcaaagaaaggtttgcacagaggagtgtgaatgtgtgtttgttgctggctgaatggcaatagatgtctaaggtggattcagtgtctggcacactgagacacctccannnnnnnnattgatgcatcangttcantttaacctggaatatctgactacccctgaatncacccanaaagggggcccancacccttgtccattnatgggtatcnntnttananntcagnnntcgntantctttantnnncntccnnnnccanttntnngtntnttnnttnttntctcanaanantaatnnnnttaaacttntattttacanngnnttntnnntattnanntncttcntnttntntnntcttt

SEQ ID NO: 6058 - DNA, 269 bp, Homo sapiens
atcagcccttgtaactacagtatctttagataagattcctctttccagtcagtcctgggaaatgtttctgttgcagagttaggcggtagatgggaagctgtgatggcagagctactatctaataaagtaacaactcgtagttgaggcttcctttctgtgtgtgatgggggatagggagttagctcccctgttgtctcagcactaagaaattgaggtcaggccagcgtcgacgcggccgcgaattccagatctatgaatcgtagatactg

SEQ ID NO: 6059 - DNA, 857 bp, Homo sapiens
acgctgtctcaaagaaattgaggtcaggcttccttcttacagaattatttttttctctgtagtttgcctcattttttcacttttttttcaatgagaatcgaagtgtttcttttgggtttttttttcccccttttaaaatcaacaggaaatgtttcaaaggagggatgaaatgcttcttggcttcctcagcacttgggcaaggtagacctcataggcaaccttgaatatgactttctttagtctctaggctatggcactattaagtgccctcttgggtagaggtagagttaagtattgagtgccagtcttgacgtccgtatgcctcagtttttctcatatataaaaagcagtatacatacctacccttttctacctcatcatttgttgtagggattaaatccgggagagcaattctgaagcctataaatttccttgaagagatctaagaacctattatgctcttggtgtaccaagctctggggtatatattcagaatacctcatgttctggaagctgagcactagctcccctttattgcctgcctggcagagcctgtttgattactgcaggcccttttacccatgcttctagtttaggtattctttctttgatatgaggctcttgaccagaaaagagttctttctctaggtgttctgagagaagtttgtaaatttggatagtacattctatcctgataaaaccaccttgctgtggtcttgatgtacaaaaaaaaattttttttttgagacagagtcttacttctgttcacccagggctgggaatgcagtgggcgcaatcttgggttcactggcaacccccgacctccggggtttcaagcgatcctcctgcctcgacct

SEQ ID NO: 6060 - DNA, 678 bp, Homo sapiens
ggcaagctgctgaagctctctgtgccttaggtttctctcctttatgaaactggcaagtttggaaggttgtggcaacatttacatgagataatgcttgacaaggaccttgagccacactgggacatccagggtaatgacccagtatctccctaggagctgcctgcccagtagtagcagtcagaaagttttcctataatggcaagatttgaagcaggaaaacctgtgaggaagttgttggcttcaatagaaattataaaattattttgctgaaagtttcatttaaaaggtgtcactttatggaaaaaggctaccgattcaaaacaaagtttcacttccaattataatccacatttaatactgaaagaatattgtctaaaggtaattttgcaataggtttgaatgtagcctgtctcccctatttaagtatatctccttccttggataaactaattttttttttcttttcaatgtggtctaggcaggttaatggagaaactaattttattagctctctctggccttgttcttcacagcagtatccattaatgcacataaaagtagttgtaaaattcccaatactgcttttctcttcgggcctgtttgaagcaacactttccccaggacctgaagcaattggttgagaatccctgaaaattctcttgggcctatcccacatca

SEQ ID NO: 6061 - DNA, 263 bp, Homo sapiens
agggtcactggggttacaggcacaagccactgcacctggctgtagttcttgagtcaagtatgacatatgctggtgaatagaaacaggtaaattggttctaaaactcaatctctggccagagcttaaccagtgggcccacagggtagccagggtcctgtggccctgggttggggacagaaagggttaaagcatctttcctgggagttacggggaagggcttcaaacctggcccatgttggtcagattttggcctgcacagctgg

SEQ ID NO: 6062 - DNA, 1421 bp, Homo sapiens
gtggggagattccattataggggctggaaaacccctttaccataccacatccctcatcagaaatgccttagtcataagacctttcctgactgatgtatgtctgtccctcaggcatcacctggagctctctttgttggaagatccatggaagagcatggaatctgctgatcttgttgtggttcttgtggatgtctcagacaagtggacacggaaccagctcagcccccagttgctcaggtgcttgaccaagtactcccagatccctagtgtcctggtcatgaacaaggtagattgtttgaagcagaagtcagttctcctggagctcacggcagccctcactgaaggtgtggtcaatggcaaaaagctcaagatgaggcaggccttccactcacaccctgggcacccattgccccagcccagcagttaaggacccaaacacacaatctgtgggaaatcctcagaggattggctggccccacttcaaggagatcttcatgttgtcagccctaagccaggaggacgtgaaaacactaaagcaataccttctgacacaggcccagccagggccctgggagtaccacagtgcagtcctcactagccagacaccagaagagatctgtgccaacattatccgagaggaagctcctagaacacctgccccagggaggtgccttacaatgtacagcagaagacagcagtgtgggaggaaggaccaggtggggagctggttatccaacagaagcttctggtgcccaaagaatcttatgtgaaactcctgattggtccgaagggccaccgtgatctcccagatagcacaggaggcaggccatgacctcatggacatcttcctctgcgatgttgacatccgcctctctgtgaagctcctcaagtgaccaccctctactgaccctcccagggcattccagctcaagctgctggcaggaactgaccagttctttccttggctggggaccctccaggcactggtgagagacatgaacactgactggccactagctggcctggccctgttgagtctgcacagtccctgcccagctgtgtcttctgttggaagaaggaacctgccttagctcagtttccaggtggttcttctgcctggcaccacagctacaaaggtgtagctaagaagatggcccattggtgggagcaatgtcaccctgcctccagctagctatgggcccagagtttctccctgagtcgctgttgctagcagggagatttctcttcctgccctcacttctttcaccttgaacttggataagaactcgtgtctcctgagtgaggtagcgcctcccatctgctccccaattcttgatctctcccaccccatccctctccccagtcttggatactaataaaatataagcattctggttctcaaaaaaaaaaaaaaaaaagat

SEQ ID NO: 6063 - DNA, 473 bp, Homo sapiens
ttgaactaataattaaagtttctttacattagctatcttaggagatttctcctcttctccctcccccctggtttttttcagaaacattgttctgggagaaaaatcccagttatctgaattcatcaagtcaaaaccataagtcattgaagaaagcattaggtgataatttttatccttatgaaaaagcattttatttaatgaatttcagatatagtgtagtgctaaataagtttttttctctccttttaatgagatatgtgttttatgttcttcattttcagatgaagaaattgaagcccaggaaaaattaagtaacttgtccaaatccaaacagatgagttaaaatcatgatgactgtttagtggcttgaagacattttgtgtaacatttcagcttcaaataagaagacgggagcttggtgcaaggatgttttactgggagcctacagtggagctcagaaagtcatgttccgg

SEQ ID NO: 6064 - DNA, 298 bp, Homo sapiens
catcctgaaaagttccctgagctaccggctgcctcctgcttcccgcctgctccccggcccaccccaactctggcacccaagcgtgcctggccctcagacacagagatcattgtcaaccaggcctgtgggggggacatgcctgccttggaaggggcaccccattaccccgccactgccacggcgggccccgtaagggaagctcggagctggggctttccccgcgtggccccagaggatgaggttcatttgttgaatcagtaacgttgatttcggcctgggcccctcgggcttcgggcgg

SEQ ID NO: 6065 - DNA, 223 bp, Homo sapiens
ccaagttacgggcacttcctgggaggtcaggtccggtatgaaccaggaagctttcccggcaactctatgccccatgggcatgggtgggaggcctgagtccagcccctggcccctctcttaggagcctactgggggtgggcactgtgggaggtctaggacaatggtggcatgggaggtcccaccctggcggtaggcacagttctcccgggccgggccatgttgg

SEQ ID NO: 6066 - DNA, 722 bp, Homo sapiens
  misc_feature (1)...(722): n = a,t,c or g
ctcaatttgctttcttagcttgaatgaaaaagcatgcatctgaaatggtagatccacattagggctacaaactgtggccctgaaccagaaagaagataactgtttacccaaggctcccactggtgtttttagtctcaattaacattgtacctaatcagccaaggtaggtcataccatccaacaagatgaccagcctgatgcattgatgagcatactgaaacaaaaatgtctcctttttctgacaaaccaaacttcagtcatcttttgccatctggcggtatagcaacctgctggtatccctgccacttgaggtttcactctctttccagatccttcctgggcatcagtaaataggggaacgtttttatgtgatgagtgctgcagtgtccatcggagtctagggcgccatatctcccaagtgaggcatctgaaacacacaccgtggcctccaacactgcttcaggtaaaggataagaattctcctgacagttggtaatttacattttagggctcatcatgttaataacttaaanttcntcctgngtacttcttccttaagaacaaactgttctaantggaataaaaatggatgcccttaanggtatttccaaanttaanngggntggatccnnnaaaaacttttttccnactgganaaaaacttggtaanaannccnnnttttggggnaaaangaaannnntnnnnaaannttgggcnggggc

SEQ ID NO: 6067 - DNA, 726 bp, Homo sapiens
  misc_feature (1)...(726): n = a,t,c or g
ttttttttttttttttatcgtacaaaaatagtttattacaaaagaaatccaaccaaaatgcttaataatttacatcgtgatccgtgcccgttacggcccacctctcccctcctcagttatctggtagagagtggaggggagtggctgttccctgggtccaccagctctgggaggggacatggaaatggaagatgtgggtggcattccggacagggactggtgcctgagaatgctggggtcagagtcctgggagggagcgagatgggggaacatctgtgctcagaagagggggtgtatgggtaggtgcatgtgcttctgtgcaaatccctggtcccgaagatgggggggggggggggcgaagtcagatcttcacagtttccagaagggttgaccccacagggcaggggggcccctcctcatgagtccaagatctgcccccccatccccctcagctgcctcctggagctggggaggggggcaccggccggccagggcctcggaggaccccagcaaagggcaggaaggcgggtggagatggggaaggaaggaagaaattgggaggagccatggggaatccaggggggtccctggggggagactgggagggtgaggaggatggtgatgcggagagaagaccattggagctgaggcggctgctgctctcgggggagntgttggcgctccggtcaggggaggggtctggctggnaggtggaagcaggnccgg

SEQ ID NO: 6068 - DNA, 372 bp, Homo sapiens
tgtcagctctaatatcatggctgctgatgtggttttccacatggccaaaaattcttagtcaagttctaaacatcataaagtaccatcttcctttaatttatgcaatagttgaatcttggaaatccaaacaaatgttgtaaatccgtagtaaaactgtctagactcacataattatatatatatttttttaaaatcatgaatgtccaggggaacatgagaaagttcaggacacagattaattctttgttgtgtatgacattcccaggattgcaagtcatctagcatcctgccccccaaccccaccgccaacacacacacacacaatcattttgctaatttttaaaaatgccgctcaagttttcaaatgcctcc

SEQ ID NO: 6069 - DNA, 475 bp, Homo sapiens
tttatctctcccctgaactactagggtgagagtaggaactttttctaattcacttctgtgtctccagctccctaagatcattgcctggcaaatagtaactgtgcaataaatatttgttgcatgagagtgaaagtgaggcaagcacattgcttttgtctggagtagtgtgttactagggtagctttgggggatgatggagattatgaaggggctacatccttcccacccctaaccccttcctggtgcctccatttactggaatatgctacacttgaaccataggataaggccagggtatagctgaggaaggctgccttatttggcaatcttgtagggaatttgtttgcttgggatcccattccggtggagtcacccaaaggtcttgttccatctgaaaaactacacttgagaccaaccttggtcttgggttggcaaggcccttgcatcaactgatggaattctaaacctgaaaccc

SEQ ID NO: 6070 - DNA, 529 bp, Homo sapiens
  misc_feature (1)...(529): n = a,t,c or g
tttctggcttctcgagggtgttcagagtctcccaagtgcacaggggctcgtgcccaaagggtggaggtcggtctacctcgctcaattcaggagtggagaaggaagctagaggaccctctggaggtggcaggtttaatgtcctgcnnnnnnnnnnnnnnnnnnnnnnnnnnnnnnnnnnnnnntgtaatcaactgaaagaaggcagaaggagtcgatgggcctcttaggccggaaaccttacaagcataggaccaaggcagaaaaggtccagagggttcatggtcctccgttccacctgaatccagctagagagcgagccagggggataggtgtgcccctcgtcgcccgtgcgctgaggcactgtcacgcaaagagacattcaccttccacgtcaacgcacctttaagggcgagagcggtccgccgtgcccaagaggaacgggatgacattcaactgggacttgcctcaccttggcttgggggacctcgagagcggtcccgtgggggacggtgttactcgtggtggtaga

SEQ ID NO: 6071 - DNA, 467 bp, Homo sapiens
actaggatgagtcctacctaaagaagcacaaatccatctgaagagcaagaaatggactaggaagcagcttcaaccttggctgcacaggagaccctgctggggagctttcccgtgtccagatgcccaggacactcctcagaccaatgacacagaatttcaggagatggaacccagcatccctattctgttataaatctctcacatgactccagcatgcagacagagaagactggatgccatcccgacgcctggccaccccatcagcccctaggctgatcgctctcctaacaagctgccgccgccacggctgaattcatgcccctgtgttagaaaacacttgtagtcccggtctctcgctcaatacttgaaccagctccataaggagtgttccccttcccattttataggtgaggaaatgcagggactgctggagaggcaggtgcagactgatgatctggcctcagatt

SEQ ID NO: 6072 - DNA, 1109 bp, Homo sapiens
agacataacatctgctccagcctgttcactatccatgtggttttaaactcttaactttacttcttagcttcatccctgtaagtaagtgctctctacctcacaggggtcttatgagggggaaaaaataagatgtttaagggttgttttaagagagagatccttcttttaaagtgattttatcaaagccccttgggttagaaatgaaaaactctatagctatttttttcctattctcgttttgctatttttatttctgaaaagtgatctgtctgaaaagagccttatatctggttttaacttctcctcattgacccttttcacagtgaaatctctactttatccatggctcttaactttttatttatgggagcccaaactaattttcccacaacaaatctcacatacttttactcctatcattaaacaaattaatgtcctccacaaagaaacatctggctcttcctacaagaagtcagaagctaatgaggtctcactctggccctggcaagatctcacagtgtgccttggttctccctgtgtaaactgaggtagtccggctattccccagcgcccaggtgttgtgagtcctaataaatggtgaaaagcattttgcaaatgttctgtactatataaatgcatagtgcctaatatggagagtcttcaagcaaaaatgtgctctagctcaattcagaatactaattcacccattgttttcaaaagaaatgttttactaacctgtttttttttcttttgtaaaattagtttctagtcatttgaactgtttttattttgtgtatagaagtgatcaatagtatatattcttgcttgtcagagaatacccaagttgtattgttaaatgttaaaacaatggggttacataacagtatagttggatagggaggaagattctagctcaaaagttgcaaaatacagaaatacaaagattagctttgaattggagattgtactataaatagtagatgttaatgtggtggtttctagatatatactttatttttaagttacaagaaattgtcttttatttttgcagttttgaactatatgattctttacatgttttaaataaagtttttatcaactaaaaaaaa

SEQ ID NO: 6073 - DNA, 495 bp, Homo sapiens
acgtttgggggccttctttcagcaggggacagcccgattggggacaatggcgtctcttggccacatcttggttttctgtgtgggtctcctcaccatggccaaggcagaaagtccaaaggaacacgacccgttcacttacgactaccagtccctgcagatcggaggcctcgtcatcgccgggatcctcttcatcctgggcatcctcatcgtgctgagcagaagatgccggtgcaagttcaaccagcagcagaggactggggaacccgatgaagaggagggaactttccgcagctccatccgccgtctgttccacccgcaggcggtagaaacacctggagcgatggaatccggccaggactcccctggcacctggacatcttcccacgctccacctgcgcgcccaccgccccctccgccgccccttccccacgccctgcccccgcagactccccctgccgccaagacttccaataaaacgtgcgttcctctcgaaaa

SEQ ID NO: 6074 - DNA, 1475 bp, Homo sapiens
  misc_feature (1)...(1475): n = a,t,c or g
tgaaacacataaccaaaatggtttgattcactgactgactttgaagctgcatctgccagttacaccccaaatggctttaatcccctctcgggtctggttgccttttgcagtttgggttgtggactcagctcctgtgaggggtctggttaggagagagccatttttaaggacagggagttttatagcccttttctactttcctcccctcctcccagtccttatcaatcttttttcctttttcctgaccccctccttctggaggcagttgggagctatccttgtttatgcctcactattgggcagaaaagaccccatttaaaacccagagaacactgggagggggatgctctagttggttctgtgttccattttcctgttgtgccaaagacagacagacagaggctgagagaggctgttcctgaatcaaagcaatagccagctttcgacacatacctggctgtctgaggaggaaggcctcctggaaactgggagctaagggcgaggccttcccttcagaggctcctgggggattagggtgtggtgtttgccaagccaaggggtagggagccgagaaattggtctgtcggctcctggttgcactttgggggaaggagaggaagtttggggctccaggtagctccctgttgtgggactgctctgtcccctgcccctactgcagagatagcactgcccgagttcccttcaggcctggcagacgggcagtgattgaggggcctcagttagctctcaagggtgccttcccctcctcccaacccagacataccctctgccaaactgggaaccagcagtgctagtaactacctcacagagccccagaggcatgcttgagccttcttgctccacaggagaagctggtgcctctaggaaccccttcctcccacctctcatcaaggggtgggggttctcctttctttcccctgaagtgtttatggggagatcctagtggctttgcatttcaaaccactcgacttgtttgcctgtttcttgaaaaccagttagaagggaaacagcacagcctgtcacagtaattgcaggaaagattgaagaaaaatcctcatcaatgccaggggacataaaagccatttcccttccaaatactcgacaatttagatgcagaacatttctctgtattcagacttagagtaacaccagctgaaaactgcagtttctttcctttggatacataaggcttctctatcggggtacgggacagggaggaggcctcatgtctgaagggggatttaggggcgagcacgcnccttgaccctcggtcctgtgcaccgctttggggcacagtctgatggcgcctttgctggcctttaagtatggttgactccggatggacaaaagaaaaaaaattttttttcttgaatgaaatagcaggaagctcctcggganatgtgttttgattaaccgcagtgaattggatgctacgagtataatggattactacc

SEQ ID NO: 6075 - DNA, 719 bp, Homo sapiens
  misc_feature (1)...(719): n = a,t,c or g
tctttttttaataattagaaacaccaaaaaaatccagaaacttgttcttccaaagcagagagcattataatcaccagggccaaaagcttccctccctgctgtcattgcttcttctgaggcctgaatccaaaagaaaaacagccataggcctttcagtggccgggctacccgtgagcccttcggaggaccagggctggggcagcctctgggcccacatccggggccagctccggcgtgtgttcagtgttagcagtgggtcatgatgctctttcccacccagcctgggataggggcagaggaggcgaggaggccgttgccgctgatgtttggccgtgaacaggtgggtgtctgcgtgcgtccacgtgcgtgttttctgactgacatgaaatcgacgcccgagttagcctcacccggtgacctctagccctgcccggatggagcggggcccacccggttcagtgtttctggggagctggacagtggagtgcaaaaggcttgcagaacttgaagcctgctccttcccttgctaccacggcctcctttccgtttgatttgtcactgcttcaatcaataacagccgctccagagtcagtagtcaatgaatatattgaccaaatatcaccaggactgttactcaatgtgtgccgagcccttgcccntgctgggtttcccgtgtatctgggacaatgttaacgtgttgctgttgttttgnttccctt

SEQ ID NO: 6076 - DNA, 440 bp, Homo sapiens
attcggtacgaggagcaaaaccacataccaccctgcaagtgtcaggcaggcaaggacaacctacctgtgactgtgactctgtcccgccaggaacacctccacccattgagtcattcacttttaaagaaaatcagctctgtagaaacacatgccaggagctgcataaacattccgtcgaacagactgaaacagcagagcttcctgcttctgatagcataaacccaggcaacctacaattggtttcagagttaaagaatccttcaggttcctgttccgtagatgtgagtgccatgttttgggaaagagccggttgtaaagagccatgtatcataactgcttgcgaagatgtagtttctctttggaaagctctggatgcttggcagtgggaaaaactttatacctggcacttcgcacaggttccagtattacagatagttcca

SEQ ID NO: 6077 - DNA, 228 bp, Homo sapiens
  misc_feature (1)...(228): n = a,t,c or g
ggttagaattcatctaaagatttctcagtaaaggcaagcccaaatacactatgaaatgtccattataggtagctattgagaaaaagataaattgtatagtgtgtgtactaacatgaagagattacaaagacattgttgagtagaaaaggcaggttgcagaactggacacaggacaagggagtaccttccaaaccnttttttggccngggaccgttgccttttnccctt

SEQ ID NO: 6078 - DNA, 137 bp, Homo sapiens
ataaacccatactcttttaaagtggtttctagggtttcggagtcagacctttgacttaactgactatgtctgttagccaaaatggataagaatggctttttaaaagaacatgttttacaggaccagaagttttgttg

SEQ ID NO: 6079 - DNA, 212 bp, Homo sapiens
tgcaaaaggatctggctgctctctgcttgtagaaagaatggataataaaggaaaatctgctagctgccatgctagcaggggaagagcagcaaacaattccactcttcaattcatggggggaacgcaggggttttttaagaaaggatctgaaatgcagaaaaggccagggggaggttaggaggtaccaggtggtgtgacttgctccagtggtc

SEQ ID NO: 6080 - DNA, 2788 bp, Homo sapiens
ccggatcgggaagtgtcaagcgggcgctcccccatctccgccgctattaccactgaacccggaccccctacccaggtccagggccagccgccatgacgaacgtgtactccttggatgggattctggtgtttggtttgctctttgtttgcacctgtgcctacttcaagaaagtacctcgtctcaaaacctggctgctatcagagaagaagggtgtttggggtgtgttttacaaagccgctgtgattggaaccaggctgcatgctgctgtggcaattgcttgtgttgtaatggccttttacgtcctggttataaaaatgaattccaaagcacccaagtcatcaacttgccaaaccaagggggaccgggggatgaaagaacctggtttggaagacctgaacccagtgtaaggaagagttcagctgaaattcaatccgggtccccaggaatgacaccaacagcaatctggcccctgctatatgtggggaaaactcatggtcacgaacattatttatgcttcaggggactacagaaagccagcttcctttgatctatgtgtaaatcagtccttggcagagtgcatataatgtccggataaattacaaccctcggtgataaggttacatacctccttcataaaaacctgtcatcctgttttgttcttcagctcctcatcaggatcttttcaaactgaggctcattagggaaggaactaggctgtgttcagacttcttttgaagagagagaattttcaagacttcttttcactctttgatttggatctggcaaattggggaggggatgctgggtgggaaaccggttatgaaatgccaagaaattccttggctttagaaatttatctttcatgtacccatccgggaaccttaaaagagagggcatagtgcttcattggcaaaaagaggaacagatgaagtagctgtgtttatgtggctgggtatctttgagagtttttgcccaaggaaaatctgggcctacataaaatttgagaattatctgtgtgatgagaccagaaagcagtggcttagacaagaaaaaatctttctgttcaccagtatcctcaaatggagacttcacttgatcagatggtatatgaaaaatgaatcaactattgctatttcgtaaaacctttttatattttctaaatttacttagtgctaaatactgttactcagttttaaatgccacgactaggggaaaaagaaactattgaagaaataattgtttagtatatttgcagttggggtagaagaaagaaatctagtatattgattcatatactagtaaattcatctagtataagaacttgtgatgttagattgaagttttgtcatcttataaaagacaacaaacttattttctgtttaagtctgagtgttatggcaatttttagttgattacttatttttcttagccaaattttaattttcttcatattgcattgctctttagttgtctctggaaattctatttactttaaggacatgagaaattcaaatgagagaagttgctgatattcatcagtgtgtttggacagttcatagggtccacaaatcaaatgaggttgtttcctgaagtagaagaaaacagaactttgcaattgatactgaagtactttgccatggagttagtaactcctgagcagaccattttagatggctcagcatttggcaggaagacttctccattccctgcttatatctatggaaggatcagctgttggatgtctagaacttctctatttaaaaaaaaagagtaggtctaaaattaaattattataagcaagcatagacatgggtcttccagttgaattgtccattaccgtaaaacttaatggtggacaagttagctgtggttgattcctgtgtggcagtaaattgtcttctgtctgcttactccaaataataaaagctgctaggaagtttagattttgaaataggcagtttaatgctttgagggtttctagaaatacagaaagtcatcaagtaaacactgcatgtctaatcatctcagagttgtggctgttatctcttcaggaattggtccacagggtaaatttcaacaattcatacgttttccattgtcatttctgaggacctttgagatgagagaaaggaaatctagtggaacaggaaagagagttacaccttgtggggtgtgagtttggggacctgttggcagaagggaatgtcactccctgggaaacaggttcagcatgtttgcacttgttattttgtagctttaatgatttttgttttctaatagggcaaatgtctctaagcttggtgtttagagctgcttcatattttaaactagttccattccacagttctagttcaaaccagtttttacagcctcctgggtgggtcgtcttgacccaaactcttgtgttgttacattttgagatgttttcataccagaatgtaccaaaaagtgcacaaggtaaaggtaatttacagcccagaaaccaaatatacatttgtttcatttcttgactttcccttaagcagataagcagaaacttgtttaactcattactttgtttgatgtgtcttacatatttttgactaaaagttatagaatgttattcctctgggggaatcttttacaggtggaggaatggggatagcagtattgcctcagattcaaactggcatcaccataaaccctgtaggccagggtggaatgaagtcagctcctttttatagttgaaatacaattttttattcaccattgtctgcacaaatccttgaaaataaacctttttttccct

SEQ ID NO: 6081 - DNA, 416 bp, Homo sapiens
  misc_feature (1)...(416): n = a,t,c or g
ttcagtggatgggttcatgcgctatctgagtggagaagaaaacggagtcgtttcacctgagaaactggatttgaatgaagacatgtctcagcccctttctcactatttcattaattcctcgcacaacacctacctcacaggtatgaattttctagttctttgttactttagccagtctcaccaaatttcaccaacctctactttctgttgttcggaagctgaagtgtgttttcttccatttcctgcgaagtgcctctgagaactctggggttccaccactaaagcctcccgcctcccataagcagtcatgtccacatgtgtatgaagcaatagcatcatttctccacagcctaagtttttaagtcttctaaaatgcaccggctgacttttcaaancatgggaattttggggaactg

SEQ ID NO: 6082 - DNA, 365 bp, Homo sapiens
  misc_feature (1)...(365): n = a,t,c or g
tgagtgtctacaggggaaagtatagagcacacgaggtctgggatgagactcccagggtttgcatcttgctgtatgaccttgagtagatttttaaacttctgattgcctcagtttactcatttgaaaaatggagataatgctacctagatcatgggttggttgtgagggttgaataagataatacctgggaagcatatgtgctgaataaacatcagctattatcatgatcactttgggccagactccaggagtaagagttctacctcagcccattttttttcaatcctgacaacaccctacaagaatgagtattattttccattcctaaaaggttaagtgacttgtttaaggggcnttagctaata

SEQ ID NO: 6083 - DNA, 86 bp, Homo sapiens
ctgctgataaagtagagatggataacattggaaatgagacaggcaagatattagacaggcctttgtcatacatattggagttttca

SEQ ID NO: 6084 - DNA, 142 bp, Homo sapiens
ggaactgctttcctcattatgatacccctgcatggaacagcacctggagagtaggtgttcaataaatcctcacttagagattgagtacctactatgtacaagcaccatgcttggacttctcagcgtgtcttgctgaactaaa

SEQ ID NO: 6085 - DNA, 707 bp, Homo sapiens
tcctcttcatctttcttttcttcttcttttttttctgttttttctgctttatcctcttctttttcttctactttttcttcttgcgagggtcgagcaatttgctgctggtttctgcctctgcgtttcccataattccttctgacgagggctttataattctcatttttcttggttaaatagtaatacaaaacacaatcaggaacactcttcctctccaagtatgatgcaattagtccaaagttttttggatgctggataaacttgtccttaaagatctccttttcatggtcagtccaaacattcataaactgcctatctttatacactttcatagggtcctccataagcccattcatgttaatgaacttgactcgtctttgttctgcatcaaacatcataggtggaatcacagagagctgccgcatttgtttctcattattctcctgctcagagagcccatcaataatttcagaaatctcatgctcactcctagcaatggtggctgaaagaccagctcccctctgcccaactcgctgaaatctttcttgctgttctctttgttttcgaatttctggaaactgcttttcatagtattcccttgttttgctttctttagctttcctccgaggattattttctattctgtccacttttttctcccatgcctccatgagctgatcataacgctggcagatttttggtccctt

SEQ ID NO: 6086 - DNA, 533 bp, Homo sapiens
ggggctgcttttttccttagaaaaatagttttttataagtattagaattttgtacatttgaaccctgcttgcttatcaataatttcttggtaagccattatgaattaaccttgcaccaaggattaaagtctaaggactatactttatatctgtatttaagagacagagtccattcacttctctttcaatgcctcagaaatacataagtatcatgacctgtttaagattatttctgcctgctattcaaatttcaaagaattgtaatttaagcctctgtgctacattttatttaattactatttagtatgagcttcttttgagttcctgccaaagtaggacatgtatccaaggacatccaattactattgggactggggaaaatgctgtgacttcctctagttattagaatgcatttaaaacaagaaggttgacttctgaagtcacatttctctttcagttcttctctggaaaagaagttcctgtttggtctttacaacaaccctatgaggtcgacactcttatctccattttct

SEQ ID NO: 6087 - DNA, 668 bp, Homo sapiens
attaaactcaggcgctttaaattttacactgaaatacgttgaaagctagcttagttgatctctgtcattaacagaaaccatctctgtttttgttattttcttggcttgatttaacgttcgttgctcgcaagaaacagaaacccactcaaggtagttgaaggaaagggaggttttcattcaagggagttggagaatcggaaggcaagaatgagcctcaggcctctcatgggactggacccggccagtggaaagctgttgtctcacaccctgccccacctcacaatacatgtctcttttctgcctctttccttgcatgcttgtcattctcactcgctatgtatgccagctttccctgcagctccatgcacgctgcgtctgtggccctttcctgccttttgccttccagcgtaaaactagatagcttttgggtcttaattccaaatgcttaggagtgaatcggttagctcagaagtccaaccagttcaaacacctgtgtcaatctagcacattaattctcaaccttggctattatttgatgtcactgggagctttaatagataccaaagcctgtgtcccattacccagaaattctggttttagtggtctgggatgttactaaacctaatttgttgggatatgtttaagttccagaggattctaacatagag

SEQ ID NO: 6088 - DNA, 411 bp, Homo sapiens
ggcggtggacccaaaaagtgtaggcatgagacggtcagagctctttggggtcctgctcagagtcccccaggcagggcagagtctgtatcctgctgccatcttgcaagggaaaaccgcctctccttccaagtattgggtcttggaaaggtgtgtgtttggtgaaagccacttaatggtggtggggtgcagcttttctctaagtgcagttactcactcaggacaaaggaggaaaaggaaggcagaggtcagccagggtagagggtgatgtctgttttccttgggaaacatctgctgatgaactgggtccagggccgtgctaggtctgggaacaatcctctccaggtcttcacacagagtatcaccaatccacaaacagacccgaagtgaactagtttactctgcctacctgtc

SEQ ID NO: 6089 - DNA, 546 bp, Homo sapiens
cccagatttctggttagttttgtcccttgatcaatgtttattactttatttttggtagatttgcttgcatgagttcttccatatacccctttccatcgcccatcactctacctccagcctgggcaagacagagcgagactctgtctcaaaagaacaaaagggaaaagaaaagaaagatgcccaattaaaaggctgttgtattagtccaggccaggaagataacaagccgggactaaagcctggactaactgggcagtgagagggaagatggttcaaaggtaaaactgacgtgatctgtgaccgacctcaggtggaagatgagggagaaaatgcattcaggataactggcaggttctctttgcactgctggtcaggtctgggcatcagtttcaggatggcagtccacaaaagaacaggctttgggttgacacacccctcctctgttttcctcacatttttatcatgaaaaatttcaaccttcagaaaagtggaaagaatcctacaacgaacactattaaagtctgcacctagatctgaaaaaaaaaa

SEQ ID NO: 6090 - DNA, 480 bp, Homo sapiens
gctcgacgggagtaaaaaccagatacgttaaataagtatcccgatgtgagccggagagctgcttgctgagccaaatgcaggacccattcatatagcattcacctgtggagggagacctggacggaaatcaaaaagcaccaagagcgatttgcgtttttttctgcggtgctaaaactaatggcttttcctacctaggaacaaagaaacgccactgtacatgcacggttcccggcctgtggagttgtgggaggaaggcgatgtctggccttttttgcacagctgctgttgcctgcccagagatcgggaactctgccccgtaggactggaagaaacctcagtaatgggaataagactttgtccaatagggggctgatgaatgtgtgggggcgacaatggcaaggagtgggactcccggcccgggttcgccaaccccaggggccccaggtctcctacaattgaccagaattcacccacccggcc

SEQ ID NO: 6091 - DNA, 2909 bp, Homo sapiens
cgcccccggttgactaggagctggcggtccgagctgtggcttgaaagaccgacgcgatgaagcccagacctgcagggttcgtggataataaactcaagcagcgagtcatccagtaccttaccagtaacaaatgtggcaaatatgtggacattggagtcttagcgtctgatttacaaagagtgtacagtatagactatggtcgaagaaaaagaaatgcttttaggattcaggtagaaaaagtatttagcataattagtagtgagaaggaacttaagaatttaacagaattagaagatgaacatttggcaaaaagggcaagacaaggtgaagaggataatgagtatactgaaagctattctgatgatgattcaagtatggaagactacccagatccacagtcagcaaatcacatgaacagttccctgctgtctttatatcggaaaggaaatcctgattctgtttcaaatactcctgagatggagcaaagagaaaccacctcttcaacaccacgaataagttccaaaacaggctccattcccttgaagacccctgccaaagattctgaaggaggatggtttattgacaaaaccccaagtgtaaagaaagacagttttttcttggacctgtcatgtgagaaaagtaatcctaagaagccaataactgagatacaggattcaaaagattcttctcttttggagagtgatatgaaacggaaaggcaagctaaagaataaaggaagcaaaaggaagaaagaagatcttcaggaagtagatggagaaattgaagctgtcctacaaaagaaagctaaagccaggttttttagaattccagatctccaacgtgaagtttgaagatgtgggaggcaatgatatgacattaaaagaggtctgcaagatgctcatacacatgcgtcacccggaggtgtaccaccacctgggcgtcgtgccccctcgtggagttctccttcatggaccaccaggctgtgggaagacattacttgcacatgcaattgctggggaacttgacctgccaattttgaaagtggctgctccagagattgtgtctggagtatccggagagtctgagcagaagctgagagaactatttgagcaagctgtgtcaaatgcaccatgtatcattttcattgatgaaattgatgctattacccccaaaagagaagtggcttcaaaagatatggaacgaagaattgtagcccaactcctaacctgcatggatgatctgaataatgtggctgctacagcccgggtcctagttattggagctactaatcgaccagactcgttagaccctgctttgagacgtgcgggaaggttcgaccgagaaatatgcctaggtatcccagatgaagcatccagggaaagaatacttcaaacattgtgcagaaaactgaggcttcctcaagcttttgatttctgtcacttagcacacctaactccaggctttgttggtgctgatctcatggcactgtgccgagaggcagcaatgtgtgcagtcaatagagtcttaatgaagctacaggaacagcagaagaaaaatcctgaaatggaagatttgccatctaaaggagtccaggaggaaaggctgggaactgagcccacttctgaaacacaggatgaattacaaaggctgctggggttgctaagagaccaagatcccctctcagaggagcagatgcaaggactgtgcattgaactgaatgatttcattgttgctctatcctcagtccaaccctctgccaaaagggaaggctttgtcactgtccctaatgtgacatgggcagatattggtgccctggaagacattagagaggagctcaccatggcaatattggcaccagtacgcaacccagaccagttcaaagctcttggattggtgactccagctggggtcctccttgctggtcctcctggctgtgggaagactctgctggcgaaggctgttgcaaatgagtccggactaaattttatatctgtcaagggccccgaattactaaacatgtatgttggtgagagtgaacgtgctgtgcgacaagtttttcaacgagccaagaactcagcaccctgtgtgatattctttgatgaagtggatgctttatgtcctcgaagatcagaccgagagacaggggcaagtgtccgagtggtgaatcagctacttacagagatggatggtctggaagcacgccagcaggtttttattatggcagccactaacaggccagatataattgaccctgcaatcctgcgcccgggccgcctggacaaaacactgtttgtgggtttaccgccccctgcagatcgccttggccatcttaaaaactatcacaaaaaatggtaccaaaccaccactggatgcagatgtaaatttggaagcaattgctggtgaccttcgctgtgattgctatacgggcgcagatctctctgctttggtacgagaagcttctatctgtgccctgagacaggaaatggcaagacagaagagtggaaatgaaaaaggtgaactcaaggttagtcataagcattttgaagaagctttcaagaaagtaagatcatctatatcaaaaaaggatcaaatcatgtatgaacgtttgcaggagtccctcagccggtgatgtctccagcagccggcttagaggagctagcccatcaagccggcagagaatcccccacacgctctgaaggacccactttcagctggacacaggcgcggcctcatgtaaacattttattttcaaatgaatgaggccaagctgaagctgaagctgaagattcttcccatctggccagccttgtgtgaaaatgccttcttcctctttaagaaaaaggacaatttttaaactgctgaaataaaatgactgttacatttttcaaataaaacttttactttgaact

SEQ ID NO: 6092 - DNA, 482 bp, Homo sapiens
  misc_feature (1)...(482): n = a,t,c or g
aggagacatgttccattttggtctgtgggatctgcatttcttccttatagttatggctcatagagatgactgctctttcaaaggtggttgtggtctattagagcgtttccaatgtccccatacttctttctcgagtgctagtcaaaagcgacttgcagatggtatggaatgtctttgtgagatagaaagaacacagactaggatcagaaaaatctgcctcccaaccctccatggccatcttctggctgtgtgactttaccgccctaactctttaaaatagccccacacctacctgccaggattgtcttcagaattacataaaataacacataccaaagtctctaggaataggagcatgttcacattaataggactcaacaagggtcagcatctcttctttctttttgggatgactaaagtagcctaaataaataagtattcgcaatgcatgacttgataacataaacttttgnaatactcta

SEQ ID NO: 6093 - DNA, 1920 bp, Homo sapiens
tttttttttttttttcggtttgttgttcagtgtttattaagtagattcagtcttatatatgatatacagattcaaaaggaaaaggattccacatacttatgaaatcagtgcatttagcaagtaataccatggagataacagctcgattaacagctcattggtcttttgttaagtgagggagagagggagtcggcctgtgctagtcattccacaaacaaaacagaatttagtcacatcacgtagagaagacacattctaagaattaaaatattaagccacatttactggtaaaactcactatatagaacacaaataatttttatagagagcattgaggaggaagtcctcacctgcttagaagagccacgttaagttgcataggtgcatatctgtaaaaatataatttagaggtgaagccattaatagagtcacctttaaaagttggtgccatccactgtttgccttaagtgcttactatctggagccctgtgcccctccccggaggtgggacctcatgaaggagctgcccccagaggaaccctgaagaaatggcttgtactatctgcactgaaagtcttaaatctcatctcagatatggaactcatgctcttccaaaacatgtctaaattatgccagaggactaaagacctcttgggttgtccctaaatcctggatggcttgatcctgaaggcaacatgagtcattctgaccttcccactcccaggctgcccagggaagaactacattcatcccacagctctgccagcaaagtcctgccttcccttttcctctgtccatgcagttacccaccagcagccaataagaggtctctcttctgactcctgctcctaaatggaccacataattgaggcatatgggccatctaccaggtggaaagtgtttttcagccaatctgagttctacgtggtataggttttttgttgtatttttaggtggaaaccgtaggtaaaaagtgagaggtttttgtttgtggctttgctaagcagatgagcttagtgaggtgcatcttcctcctcaagagcaagtcttgcagaacacacagggactgggggcatctgtacatgtaaacagtacactttcactgagtccaaaattaggagcaaaaatacaaaggttcacattggtcttaggtagatacaggcgaaaaaggattgagctgtttagctcagaaacaacaaaaacaaagtttctaaagcaccactaaattatataaaaatcagaccatggacggattgaaactggtattctggtgaaatactttactattttgtaaaaagttttacaaaaaattacaaattaaaagtatcaaccctctgagttcaaagcagcattttgaaaatgaactggtagttaatcctgtaaccacccttagagttgtaagtggcccttgggaatagggatggatgggttccacctgtttgaaatcctcgaaaaccctcctaactccctgcctgtccccctccccgtcagcactgtccttgggaataaactgtcctttgtaagagtggtgacggtaaaatgaatttcagatgggttacacacactatcacttgtctacctgatgatccaccactaagaccaatgcccacttctctgatgctacccttcttgtgggattagcctcctgcaaagactctggaattggagtatcctactcttgcatttcctttttaacttaggatcccaaatgatcactttgtgccctgaggcccttcagaagatttttaaatggctgtgggacaagggctttgggagctccttttgggagaaggcagtccctctggtgagggtgagacagcagtgagcttagttcatcagaaccagctctttggtgccctccaagtcgggagtagggggaaggggttgaagctgcatcttttaaaacaaaagcaaaccaag

SEQ ID NO: 6094 - DNA, 912 bp, Homo sapiens
  misc_feature (1)...(912): n = a,t,c or g
atattttccatttccgttattatgctaattgttgtatgaaataagtgcaattatacttctcttttgagatatccaagagtatattcttgctctgtatagagaatatcatctgatagtgtcttatttatattaattaatgtctttgaaaagggaaaagtataaactggccttaaaattgtccaattatagttttataaccagtctattaaaggtgtttgtttaaaatggatatagttttagatttgtggtaatgctttggtattttcttggggaagaccttcacctttgcaaacttccctcatgtaaggaaggtactttaaatgtagcagccactgacatttctttttttaaaaaaaatttgagaagtctacttccttttaacttttttggtcttcagctaaaaaataggataagaaattaaggtctattccattctccatatcctgggtaagaatgtaaataagagggagaaggaagagtctaataggtaattatggatataaaaaataagaaattttgtataggaaatgaagggtttccataatgatccattttgttaaaggtctactttaatcagaaatagcaacgagatgaatgtatccaacatttcaatttgcattcggaaatccatgttgtttctaatattgtccagttgaaaactgtatgccaaaattagttgtttaagtgaagttttgtgacagaaaaaaggttgttttaatatctacttggtttttctcaaaatggaaataattttaaaatcaggaaagaataaatcagccaggtgtgatgacttgtaannnnnnnnnnnnnnnnnnnnnnnnnnnnnnnnnnnnnnnnnnnnnnnnnnnnnnnnnnnnnnnnnnnnnnnnnnnnnnnnnnnnnnnnnnnnnnnnnnnnnnnnatttttaaaat

SEQ ID NO: 6095 - DNA, 666 bp, Homo sapiens
atgattaaaccttttcaaagtttttgttactttcagatactcataagtaaggcatataacctctctagacctcactttccacatttgataaaggaacgatttgaattaaatgaaattgaaaatctcttagctctaagtataacaaattatgtgttaaattgtataattcatctcttagatatcatgaagaatgtgttgtttataatatgaaaaagtatgaagataaaaatcaaatatgactttgggtagcaagaagagattttgggggaagttgctaatgtgtacagttttttcccctaagagcggcgagagaatggcagctgatcagactggtggtggaatctgtctctattgcccagcttgggcactatgaagtttgacctgtgtcgatcactcaaaactagctgatgacatctgaaagggagttttaccccggctccctgaagtttcacattacagctctacatttgtgttaacacaatgaatgcttcaaaaaaaaaaagttatagaaatcaaagcttacataggcaaatctttgttagtgacttagttaaaaacatttcatgaataatagttgctcaagctattttaacccttttccctttcccagaagagaaacaagaaaatcccacacattttgctcagtcagggtatggtgctagctct

SEQ ID NO: 6096 - DNA, 381 bp, Homo sapiens
attggctttataaacaggactgaagaaaccagaagcaacaaagtgtgtactcattacatttagagagaacactagaaaaataactgattagttaacatccggttactttaggctgcctttttttgtgctaaggattaaagccgagagaacttcatgatcataccagttgacaatttaatcctgcttatttgagaaattgactctctcttgatttctcaggaagtcagatgacaacttagttttgtcgatggctgttgtaaaacctcggttcttgtctccttagtttaaaagaaattaaacaagagacacacagcaaaggagatgcagcatgggagcgatttgttggcaaaagagggcagggatattctgaaagtggacgtg

SEQ ID NO: 6097 - DNA, 480 bp, Homo sapiens
gcgccagggccggggccgggacgggacggaaaactggcggcttggtttgttcagcgcgtcgcggtcatggctctcgtttcaggcctccacggtgtgcacctggagtcaggagcgcgcttgtgcgtacagttcggttcagttactaaaagatgtaactgaactgcagatccttggtgaaatatctttcaacaaatctctatatgagggactgaatgcagagaaccacagaactaagatcactgtcgtcttcctgaaagatgagaagtaccattctttgcctatcatcattaaaggcagcgttggtggacttctggtgttgatcgtgattctggtcatcctgttcaagtgtggctttttttaaaagaaaatatcaacaacttgaacttggagagcatcaggaaggcccagctgaaatcagagaatctgctcgaagaagagaattaggacctgctatccactgggagaggctattcagccagt

SEQ ID NO: 6098 - DNA, 438 bp, Homo sapiens
ccggaaagcgtgaaaagagaacattggttcttagagaccgaaatctctctggcatggctgaaaggaagacccagccgagcatggtgagtaatccaggcagctgcagcgacccccagcccagccccgagatgaagccgcattcctacctggatgccatcaggagtggccttgatgacgtggaggccagcagctcctacagcaacgagcagcagctgtgcccctacgcagctgctggggagtgccggtttggggatgcctgtttctacctgcacggggaggtgtgtgaaatctgtaggctgcaagttttgcacccattcgacccagagcagaggaaggctcacgaaaagatctgcatgttgacgttcgaacacgagatggaaaaggcctttgccttccaggcaagccaggacaaagtgtgcagtatctgcaatggaaagt

SEQ ID NO: 6099 - DNA, 513 bp, Homo sapiens
agttgctcaaatactgttcaacatcagaaaatttatattggaaaaaacccctggaaaatgtaataaatttgtaaaaacagttttgaaaaactacagcttataaaacatgagggtctataatgcttggttgatagtacaaagtttattcaacatcagggaatttatattggagaaaaaccctacaaatgtaatcagtttggaaaaacatttttaaaaaaaccacagcatagaaaacaccacagggttcatactaaaatatgtttttgcagatgcagtaaaaatgaaaaaaatttaatccgaaattaagtttatgtaaatatctgagaattcacagtagaaatcataaggcataaggcactgatacttcagacattacactaaattaggagtgttgagtatagggagatcccaaaacttaaaattgtttagggtaagttattttatattattaacttttaaaaaggaagttggaaggtttttttgggaggtttttataatttacctttccaaagt

SEQ ID NO: 6100 - DNA, 321 bp, Homo sapiens
agaaagtggaccatctcttggtgtttgttttgatgagacttgacctatataacactggctcaagtatgtttgttaaagtgaatcacctgttgctttctgggccatacgtgaaatgacgtgccatgttacagtgaaccccttttgcaccaccccaagttcaggttgcccttacacaatttgggcgagatagatgaacacgcaccttcctccttcttagaaacaaaacagtgacttgggtagggtagacattaggaaagtgacttagctggtaaatatgtgattaataatggagatttggcctaagcatgagtgcgagcctct

SEQ ID NO: 6101 - DNA, 515 bp, Homo sapiens
aaagcgctgatggaattaccctgctagggaaccagcatacatatgtcattcctttgtacagtatttttacaagtatttgattttgtttaccctaatttatccaactcaggaataaaaaggaatctcagatctatgagaaggacctccaatttctcattctcagcttcaaaacaaattagtcagtttaaacattagtccaagacacaggttgctgtgaaataagaatgatcctaggtcatgattaagatggttctccaaactatcaacaagactgtctaatcacctgttatgaacccaacactgttaaacaggcaatggcatgtacaaaagaagtaggaaataaagttcctgtcgtccacacctaacaatctagggggcagccttcaattaatttgctgatagggtgtattgcataataagttttatatatttgttgtttgaagttcaaacacatttcgccataaaaggcatgctatcgtgtttcagttctcatgctggtagaaaactgtcttagc

SEQ ID NO: 6102 - DNA, 434 bp, Homo sapiens
ctagaatgaagtgactgaaacaatgagaaagaatacagcacaacccttgaacaaaatgtatttagaaatatatttagttttatagcagaagcagctcaattgtttggttggaaagtaggggaaattgaagttgtagtcactgtctgagaatggctatgaagcgtcatttcacattttaccccaactgacctgcatgcccaggacacaagtaaaacatttgtgagatagtggtggtaagtgatgcactcgtgttaagtcaaaggctataagaaacactgtgaaaagttcatattcatccattgtgattctttccccacgtcttgcatgtattactggattcccacagtaatatagactgtgcatggtgtgtatatttcattgcgatttcctgttaagatgagtttgtactcagaattgaccaattcagggaggtg

SEQ ID NO: 6103 - DNA, 243 bp, Homo sapiens
ttctaaaacaaatgaaagcaaaaaacttctcgcccctgaactccatccctggctgttacccttcattctctgttcttactctttcctaagcaagtaagatatgacatttattcatcagaggcattttatgggttaattcactgttcaattttctaaaatacccatttgggcttcttacctacagaggctataggcaccaggaattcactcgggtattatgtggtaagggatgactgcttccat

SEQ ID NO: 6104 - DNA, 282 bp, Homo sapiens
ctcaaatgagtccctaactctcttcacccccacggctgctgcttcatccaggactttgtcacctttcagacacattcatatcatcgccctctagctgatctctgtgcacgtagcccctttaatccattcttcttattggcaacaggagcatctttgtaaagcacagctctgacctgatcatgtagttccaaaaatactacagatcccagggctccaaacaatatttccacaagtgtagccggataagatgctttggaggaacatacaaatgaatacatttca

SEQ ID NO: 6105 - DNA, 703 bp, Homo sapiens
  misc_feature (1)...(703): n = a,t,c or g
tgcacagcccggtagaaagggtttatttatgcgcaacggttcacacaagccttcctgaaattccactttacagtaaataaagctgtgcgtgttccccttcccatgcacaactgcgtatcaatctacaactgtcatttaactgtgaaaaaatagagcgtctccccttttgtcatcgttctggtaacatttggagtagcatctgacagaacggagctgctcactcctggaccggttatttggttaaaacccaaaatgttaggtcgaaagaatcaatcgtcacccaatacaaataaatattgcgttatgaaagagacgggcagagtcccacggtatccctttttaaagcggcatttccagcacagcagcgtggcgctcacagagaccagcagggcgcagctctgggatgccacatgggacacagctgcaagtacccgtaggcaccgtcccgccgcacgcgtccctccaccgagcgtgaggatgtggcgcagggcacgtgcactccgtctgcgacggggaccggttcgtcctgactgcagaatgaccccgtgttcaaaaacagccgctcccatttgcagaccacatgggccctggctgggctctcaggtccgagggccagcacctgctttggtgaccgcagctgntcggacgcccggcaaggagcgtgatgtgcgcagccncccgaggacgggcttttctgtgctgc

SEQ ID NO: 6106 - DNA, 1206 bp, Homo sapiens
gcggccgcaaccgccggcgtccagcgtgtggagggcaagctgcgcgccagcgtcgagaagggcgactactacgaggcgcaccagatgtaccggaccctgttcttcaggtacatgtcccagagcaagcacacggaggcccgggagctcatgtactcgggagccctgctcttcttcagccatggccagcaaaacagtgcagcagacttgtccatgctggtcctggagtccctggagaaggcggaagtggaggtggctgacgagctgctggaaaatctggctaaagtgttcagcctgatgggaccccaactctcctgagcgcgtgacctttgtgtccagagccctgaagtggtccagtgggggctccgggaagctgggccacccccggctgcaccagctgctgggccctcaccctgtggaaagaacaaaactattgtgagtcgaggtatcattttctgcactcagcggacggggagggctgtgcaaacaatgctggtggagtattccacgtcccgcggcttccgcagcgaggtggacatgttcgtggctcaggccgtgctacagtttctctgtttaaaaaacaaaagtagcgcatcggtggtcttcacgacgtacacccagaagcaccgtccatcgaggacgggcctccgtttgtggagccgctgcttaacttcatctggttcctgctgctggctgtggacggtgggaagctgacggtgttcactgtgctgtgtgagcagtaccagccatccctccggcgggaccccatgtacaacgagtacctcgaccgcataggacagctgttccttcggcgtcccgcccaagcagacgtcttcctacgggggcctgctcgggaaccttctgaccagcctcatgggctcctcagagcaggaggatggggaggagagccccagcgacggcagccccatcgagctggactgaactggccaggccacgtggagacaccacggtcgacgacggctggagggacgtttcagaggcgagtcctgggtggctcctcgccttgggggctcctggccctgaggctggcggtggccgcatgccggcgcgtgtctgtttctgtgcggcggctcagggtggcgcggctgctgctcactgtgctgctgggacccaagatgtggcgtcgcccctgctggccgccgcgtcccccgagattgacccacaataaagcacaggccttaccgcgga

SEQ ID NO: 6107 - DNA, 411 bp, Homo sapiens
  misc_feature (1)...(411): n = a,t,c or g
tgatggtatatcacttctgtaattaggttttaaaagaccatgactgttattttgctgatgtgttctctctggctcttcttttgtgcttgctctgttgaagagggccacttgacaaagaactgaggtcagctaacttgccaatacccagcaaggaactgaggcccatagtccaacaatttgtgaaccctgccaacagctattgagtgagctcagcgatagatactgtcttagttgagtcttgagatgactatggcaccagcctacaccctgattacagtcttgtaaaagatcctggcagagcacttatataaacagtatgtagattcccatagaaactgtgagataataaaatttttttaataaanaaaagtagagcagtttaggttgatagcaaaattgagaggaaagaag

SEQ ID NO: 6108 - DNA, 276 bp, Homo sapiens
tcagtggcctttaacataagaaattgggtatatgtatgaataataatttttcttgaatgtaagttctaaacaggatttttttccttcaaccctactccttctgtaaggaaaaagttttaagtatgatacatattatgttgtggatttggtttatgaatgggaaatgccagaagtgcttgcttctgtaatcaaactttaaccacaagatgggcagtataactttcccatgtctttaaaaaatttttaaataattactaaattaaattattttttctc

SEQ ID NO: 6109 - DNA, 440 bp, Homo sapiens
ctttagttaccatcctgtttagttggtaagaaataggaggcaaaaaggtaatagtcacatttaaatgacttagtaattaaaagaactaaattattcatagttgagtcattatctgttcagatctgcagtgttcttataataataggaaacatttatgtaatactatgtgttagataatgttttacctatattaacttatcctcacaatagcactgaggtgtttttatagataggcaactaaagcaaagagaagatagtaaatataccaaaggtcatgtagctactacatggtagtactgagtgtcagagaagacaagatcaaaatcctgtaatcctaacatttattgagaacctactgtgtaccagccccacagctgggtgctttcattatgagttagtcatttgtctttacaactaccttatttaaaatggaagttcag

SEQ ID NO: 6110 - DNA, 1709 bp, Homo sapiens
gcgaccgcgtcggagaggaggtggcagcggcccgggagcgatgccaaggccagcgacccaccatggagacccgctacaacctgaagagtccggctgttaaacgtttaatgaaagaagcggcagaattgaaagatccaacagatcattaccatgcgcagcctttagaggataacctttttgaatggcacttcacggttagagggcccccagactccgattttgatggaggagtttatcacgggcggatagtactgccaccagagtatcccatgaaaccaccaagcattattctcctaacggctaatggtcgatttgaagtgggcaagaaaatctgtttgagcatctcaggccatcatcctgaaacttggcagccttcgtggagtataaggacagcattattagccatcattgggtttatgccaacaaaaggagagggagccataggttctctagattacactcctgaggaaagaagagcacttgccaaaaaatcacaagatttctgttgtgaaggatgtggctctgccatgaaggatgtcctgttgcctttaaaatctggaagcgattcaagccaagctgaccaagaagccaaagaactggctaggcaaataagctttaaggcagaagtcaattcatctggaaagactatctctgagtcagacttaaaccactctttttcactaactgatttacaagatgatatacctacaacattccagggtgctacggccagtacatcgtacggagtccagaattcctcagcagcatcctttcatcaacctacccaacctgtagctaagaatacctccatgagccctcgacagcgccgggcccagcagcagagtcagagaaggttgtctacttcaccagatgtaatccagggccaccagccaagagacaaccacactgatcatggtgggtcagctgtactgattgtcatcctgactttggcattggcagctcttatattccgacgaatatatctggcaaacgaatacatatttgactttgagttataatatggttttgtgacttatgagctgtgactcaactgcttcattaaacattctgcattgggtataatctaagaattgtttacaaaaagattattttgtatttacccttcattcctttttttgatccttgtaagtttagtataaatatatctagacattcagactgtgtctagcagttacgtcctgcttaaagggactagaagtcaaagttccttgtctcactatttgatctgctttgcagggaaataacttgttttttctcatgtttcatcttctttttatgtaaatttgtaatactttcctatattgccctttgaaatttttggataaaagatgatgttttaagttccaatgagtattactagttactcaataccacttattgagtactctgtttctacgtatgtagaatgtatagggatagaagagttgaaaagggaaagcaaaactcctcaagtagcttccttaaaatgtcattcataggagatgtactggaattgctcattctgtgactttatttgtgtcctaaacattcttcagtgaaaataattttatttcagtcaaacatttatgaggaaatgagatcacatctttgtcactggatgctacttgaagagggagtactttgtaaccactttgatatgctgttatcaccaccccctgccctctgcttgccataatcaccacaatttt

SEQ ID NO: 6111 - DNA, 426 bp, Homo sapiens
gctttaaacaacctcccgatgggtcccacgaagatgcctccagacccttggaatgccaagttcaagtttagctatgtctcgcggagaggccggtggaagaagcaacgagaatgaagcaccccagttctctgctgagcacatgggcatctgcaataaagatttaatttcccagcttctcctgaagctcggtatggccacaacactaaattctgcccgaggagattaagcaaaatagtatgggacttccaagaaatgtttttaaagtcagaggcaggcctttcttcatgccttcttcctctttgctggctggaatgcaaagaccatggcaggaggccaagcagccatcctggaaggtgaaagcctcatactaaggacgtcagacagcgaaataagagcctgggtccttgaccctgtagacatctccct

SEQ ID NO: 6112 - DNA, 492 bp, Homo sapiens
cctgtacagaagggacagacagcttatcaacgaaaaggatcagctcacctctttgactctaccacctgcctttcttccttctctcataaacgtactcaaaacacacgaagcataatatgtaaaaaagatgcatctacaaagaaggctaatgtcattcttccagtagaatcaagcaaatccttccaagaattttatagtacatcttgtttgtctccctgtgaaaacaactggaatcttaaaaaaggagtttttaataagtcaagatgtacaatttgtagtaaattagcagaggtctggatttttatacctaagttgttgtttaggctaacagtgataattttaacttttaagtgctattatgtactctttcatctacataatgcacgtgttctggatgtataacatgaagctgaaaggaagaataaggatatgttagaactatcttatgggatattttataaataaaattccatttgcatagcaaaaaaaaaa

SEQ ID NO: 6113 - DNA, 332 bp, Homo sapiens
taggttttaagtgttcttactacaaaaaaaaatgaagtcatacatatgttaatcagctcagtttaggtattccacaacacatacatatttcaaaataatgtgcagaattacatacaatttttatcaattaaaaaacacttaaaaaaattcatacagaccacttgttaaaataacgttttgagttaaccagggaaattttattttaaatagataattagattataccaaagaattattaattttacgtgtaaaatggaattgtgattatggaaaagcttgtttttagaaatgcatactgagctatatgggggtaatggtatataaaatctgga

SEQ ID NO: 6114 - DNA, 59 bp, Homo sapiens
  misc_feature (1)...(59): n = a,t,c or g
gattcaggctcctggaaccatgggcctcangccctgaggatacggggctcccggtggct

SEQ ID NO: 6115 - DNA, 408 bp, Homo sapiens
cagagcccctggaggcccacccaggctgtcgggccatgttgggctggcagacgggcagggggtcgcgtccctgtcatcaaagccctgaaccacagtgctcttctcaccgcagcctggaagcggaatgagcttttggagacttcctgggacttgctgtccttgtccaggtctgccaggtgtaggggaggtgtgactggttccatcatggaccggttcctccgtggaccggttccgccatggaccggttccgccatggaccactcctgccctggaccggttctgccgtggactggttcccgccgtggaccagttcccgctgtatactggttctgccctggactggttcccgctgtggactggttccttggggctctaagtgcggaagggcccagagctggtccctgccca

SEQ ID NO: 6116 - DNA, 600 bp, Homo sapiens
  misc_feature (1)...(600): n = a,t,c or g
nnncnnagnnnnnnnnnnnncnaannnannaacnatcnnnctnancnccaaggnngggnatttcnnnnctcccttgncccctaggaacccattgntatgacnnnnnnnnnnnnnnnnnnnnnnnnnnnnnnnnnnnnnnnnnnnnnnnnnnnnnnnnnnggcacgagaggagatcaagcttttggcaatgagatctaaaccagacaaagacctccttatggaagaagatgacatggccttggcaaatgtagtcatgcaggaagctcaaggacttctttgcagttgacaaacagctggcatcagagcttgagtatgacatgaagaagtaccaggaacagctggtccaggagcaggagctagcaaaacatgcagatgaggccgggacggctggaggtgcatgaggtggcacctgtggcacaggttggccctgtgtttanaaacagngncagntcctgctggccaaaaaaaccctgccatgtcacctgccgagagccanccctgcacacccagggcaagagctgnacatgtaagaatatcatctcctactnatgaaacagggccattnnagaggatgcggcccaaagccaggnccatgncctg

SEQ ID NO: 6117 - DNA, 660 bp, Homo sapiens
  misc_feature (1)...(660): n = a,t,c or g
ggtttttgtaactatcaagcaggtttctgtgcagactcagagagccctttcttatttctgccttttgaggaagtgaagcaggactagaagagccatcaggagccaacggggatgggaagcaaggagcctgcagtcagcattgtcactgggtagccccctctggcattactacctcagggtcggctagacatgcacagcagtttggggcaccagcattcaaataaaaaatcttggatgaaaaaccacaactagtaggcttagcttaagtgtgtttgtgaggtatgcacatgtgtatgtatgcaggtagaagatgggaagctctgaagcatgaaaccagttaggtcaacccatcacactgggttgcttatggccccagtctgagctccttgtatccttggacaaatgccttcctgtgttccctctgccttcatgtaacttgagccgagatgcctattctcacactgtaggaaggaatcacaccaacccaaacctaagtgcttccanggtcgctgagtgagacgtttattcaaaacaaagattattgttttcatggttaggtgggattcaacaaggtttcatttatccctaattctgataagtcagtcttgagattttccccaaggttgctttttccctcgttggtcacttataccctcagct

SEQ ID NO: 6118 - DNA, 649 bp, Homo sapiens
tatttcatattctccacttacaaactcatatttgacctaacaggagttaaaagacgtgggccgaaaccagtcatgtgacattgcactcttgccggagaatagagggaaaaatcgatacaacaatatattgccctgtaagttttgtgtcaaaatttgtaatactgtcttcctctagccatttctgcatttttctccaaaaatgaaatgaggctaaagaaatataatatagctcgatatggacaatctcaagctctgaatgcctttaataagaaatagcttgtatattcctgcacttccctccagagggataatagccagtttaaattctgattatgaaagtcctcttatgctgttgacatttccccatgtgatgctattgcttctctttggaggctaagcagtaaatggggttaacagcaagggctctgacatcaagcagacctgggtttgcttagcaaagtcttcggttagcaatttctacttaaatttccttaccccattaggtaaagcaatagaaggtaggttttctggattgtattcattccagcagtgaaagggagctggccactccatcaggcaaatgtggtaatgtcagaaagggaagcacagatggggcttcatgttgtctcctgtgtctgactggttatag

SEQ ID NO: 6119 - DNA, 948 bp, Homo sapiens
  misc_feature (1)...(948): n = a,t,c or g
gatcacaccaagcctggtggatgcgctgaaggccagcaacccggacttcccagaggtcagcagtggaatttatgtgcaagaggttgtgccgaattcaccttctcagagaggcggcatccaagatggtgacatcatcgtcaaggtcaacgggcgtcctctagtggactcgagtgagctgcaggaggccgtgctgaccgagtctcctctcctactggaggtgcggcgggggaacgacgacctcctcttcagcatcgcacctgaggtggtcatgtgaggggcgcattcctccagcgccaagcgtcagagcctgcagacaacggagggcagcgcccccccgagatcaggacgaaggaccaccgtcggtcctcagcagggcggcagcctcctcctggctgtccggggcagagcggaggctgggcttggccaggggcccgaatttccgcctggggagtgttggatccacatcccggtgccggggagggaagcccaacatccccttgtacagatgatcctgaaagtcacttccaagttctccggatattcacaaaactgccttccatggaggtcccctcctctcctagcttcccgcctctgcccctgtgaacacccatctgcagtatcccctgctcctgcccctcctactgcaggtctgggctgccaagcttcttcccccctgacaaacgcccacctgacctgaggccccagcttccctctgccctagggacttaccaagctgtaggggccagggctgctgcctgccagcctggggtccctggaggacaggtcacatctgatccctttgggtgggggggtggggtccagcccagagcaggcactgagtgaatgccccctgggnttcggctgagccccgccctgccatgaggttttcctccccaggcaggcaggaggcgcggggagcacgtgaaagttggctgctgcctggggaat

SEQ ID NO: 6120 - DNA, 630 bp, Homo sapiens
caaattctgacatgtgctggatcagagtgttctcatttccaataggccagtctgccatccatccaggaagaactgcggcacatggctgatggtgctagagaggtaggaaatatgactggaaccactgagatcaactcagatcaaggcctagaaaaagacaactcagagttggggagtgaaactcggtacccactgctattgcctaagggtgtagtcctgaaactgaagccagttgccgaccgtttccccaagaaggcttggagacagaagcgttcatcagtcctgaaacccctccttatccaacccagcccctctctccagcccagcttcaaccctgggaaaacaccagcccaatcaactcattcagaagcccctccgagcaaaatggtgctccggattcctcacccaatacagccagccactgttttacagacagttccaggtgtccctccactgggggtcagtggaggtgagagttttgagtctcctgcagcactgcctgctatgccccctgaggccaggacaagcttccctctgtctgagtcccagactttgctctcttctgcccctgtgcccaaggtaatgatgccctcccacggctcccaataaaaatgtgaaaaccaaaaaaaa

SEQ ID NO: 6121 - DNA, 793 bp, Homo sapiens
tcctcggtggagtgaccaaaaccttcattcctgaagggtctgggccatttgtcttcctgcgtggattgggctgtggaactttcccactgaccttaatcacagggcatggtaatactaagagatgccctaatggatatcctgtattccacacatattcttcctcacctccactgtggcatagtagactgatttcatcttgacagtctgggtcaatctccccagccaacattgtaagtctcttcttagcctgttgacttaaaggtaggagaagcccagtgtccgggtggcaatcttaacttccagtttaatgggaatcattgttgtgtctcctggtggcagcatttctccctctggaactaagatctgtagaccagcagaatgtaatgtcgggggaacagtatgccaaaaattttgctagtggatcactaggggtgatggtgagtggtgcccacttccaacttcccatgtgttttgaattccctggacctgtgaatcctggctatgggaaaaacagtaccacatattgcatgctgattcagagcatacatggccttctggagaactttgccccagccctgcaaactattgcctagttggcattgtaatcatgacttcaaaaggccattctactgttctatcaatccagctgcttcaggatgatggggaacatggtaagaccagtgaattctatgagcatgagtccactgcggccattgtttagcaataaagtgagtgccttggtcagaggcaatgctgtgtggaatagtatgatggtagataaggcattccatga

SEQ ID NO: 6122 - DNA, 1836 bp, Homo sapiens
cccaagtttgaggaccgggccaagatgccctacatggaggcagtgatccacgagatccaaagatttggagacgtgatccccatgagtttggcccgcagagtcaaaaaggacaccaagtttcgggatttcttcctccctaaggtgctatccgcccccaccccccagactacggggacttccagcccctctctgtgtccccagcatcccacccacattagaagctttctagaccctgtcccactccctcaatcagtcaaaaaagacttccccaaccaccacatccgttccacctttccacttagacactcctgagtcctgcatctctccagactctttgtgtcaggagaatcaaacacatgttcccaaacttcctatcttaagaaacagaagccccctttccattcggccttttgtcatagggacagaaatctcagggtcccccaaactcctgcctagaagggacatgggaccccatgtctcccaaacttcctgtttcagagatgtgaaccttctatcccccaaagctcctccatcagaggaccccaactcctccatgcctgccacttccccttacctggggcacactagttccccctccagcccctgtgtactttcaccaatcccccgaccctcctcatcacacacaacttcctcctccctaccagggcaccgaagtgtaccctatgctgggctctgtgctgagagaccccagtttcttctccaacccccaggacttcaatccccagcacttcctgaatgagaaggggcagtttaagaagagtgatgcttttgtgcccttctccatcagtaagagaccactgtttggtgccaggcttactactcacaccagcaggggcctcccttacccagttcccctctctgccgtgtagcctagtatttccccagcttggcaagttcctgttagcaatctaccgtcgagccaccaggtgatactcccttaactaccaagcacccagtacctgtgcccaggcaaaaggaaaggaaacatcatacccctttcagaggcgggggaaaaccaaaggccagagagaatcagagatttatttccctagggtcacacaggagattcttcagcatccctaaaaaggagatgacggcacagcaggtcatatttgggagttcttatctgggggaagggggatcttaaacctcccattgtggacacctggcatcgatcaaccccatcttttggtcatcttttgggtcactcaaggaaactgaggtcaaggagggtcaagaggctccctcttaaagtctctcagggccatatattccacccttcctccctgggagagccgcagctggaggtcggtactggggcgaggctgcactgagagtgggcttcacctccacccctcccgcctctcctcctcaggaaagcggaactgtttcggagaaggcctggccagaatggagctctttctcttcttcaccaccgtcatgcagaacttccgcctcaagtcctcccagtcacctaaggacattgacgtgtcccccaaacacgtggggctttgcccacgatcccacgaaactacaccatgagcttcctgcccccgctgagcgagggctgtgccggtgcaggtctggtgggcggggcccagggaaaggcggggtcagggcggggttcgcggaagaggcgggtataagaatggggggaagatgcgggaaaggaaggggcgtggtggctagagggaagagaagaaacagaaggggctcagttcaccttgataaggtgcttccgagctgggatgagaggaaggaaacccttacattatgctatgaagagtagtaataatagcagctctccaattcctg

SEQ ID NO: 6123 - DNA, 895 bp, Homo sapiens
aaaaaaaaggtaaagctgttgctacttgccagcttttctttttgccttttgctgatagatggcactttttttgctggcactgttatcaactttattaatagatttaaaagtactgacaatttttcaagccacaaaaggtttaaaaatctttggaacttcttgtcatacttctggttttctgctttcctgaggccgttgtcccatagagtactgtcaatacagtgttgagaagtgaatgggagttaaactagctccctaatatgccatcagtggcttccagtccatttccttgaggggtctaatcttgggctttggggagattacttagagatttatacaggtgagtagtgaaatttgcccagggatttgagttgtactttttagccttacggattttagctaactccagagaaaatgcgatagagaaacgttggttcaagacagacagccctcaacgaagaattatcttcataagcttgctttcatcctgtttctcagagagttccaggccagtgtcaagaccttccgtggctctggacaatattaatagttcatgaatgagctacaaaaattcctgatggatcaattgtatgagctatagtcaggctcttgaactgagcagaggatgctgacccagagtctggccagctgggacatgcagctcttctgaatgaaataataaagttctatagcgcgagctatccttaggagtaattcatgcatcgcgtgtaccagcgtggacttgtggcccgttgagttgatccacctcgcgaatgaggccatctctcaatccgaatgatggcgttcgacgcgttggtcgcagcagacgtgctttctgttgtgcgaataggtgctatcaccaaacggcgtacttggatcgccagtcggcgtccag

SEQ ID NO: 6124 - DNA, 696 bp, Homo sapiens
ggatcctcccagaggtgggcacaatggagcgatctccaggagagggccccagccccagccccatggaccagccctctgctccctccgaccccactgaccagccccccgctgctcacgcaaagccagacccaggttctgggggccaacctgctggccctggcgcggcgggtgaggccctggcggtgctgacttcattcgggaggcggttgctggtgctgatacctgtgtatttggccggggcagtgggactcagcgtgggtttcgtgctcttcggcctcgccctctacctgggctggcgccgggtccgcgacgagaaagaacggagccttcgagcagcgaggcagctactggacgacgaggagcagctcactgcgaaaactctctatatgagtcatcgagagctacctgcctgggtcagcttcccagacgtggaaaaggctaatggctcaataagattgtggcccaggttcgcccttcctgggccagtatatggagaagcttctggctgaaactgtggctccggctgttaggggatctaacccccatctgcaaacatttacatttacacgagtggaactgggtgaaaagccattgcgcatcattggagtcaaggttcacccaggtcagagaaaagagcagatcctgctggacttgaacatcagctatgtaggtgatgtgcagattgatgtggaagtg

SEQ ID NO: 6125 - DNA, 463 bp, Homo sapiens
taagaaggcagtacccaaagacaactaattcttaggtgcaatcgcagaatttgcatttataaaattgtagtattcacatttctttctaaagtatgactgttcatttagatcaaatgactgttctaacataattaagccaatttttcccctaaatgttctcctgaacattaaacacatacataatagcagttaaatattggctcctttagcttggaagaactttacaggcaattagattgtgccagttttcaaataggagatcagttccgttaggtagttctatttttttcattcaactcgtggaacaagggtcaacaaattgggtctgcggggccaaatccaccctgccacctgttttcggccatgggcctgcaaagtaagaatggtttttacgttttcagcggttggaaaaagatcaaaagttgatgctttggtgatatatgaaaagtataccaaaattcat

SEQ ID NO: 6126 - DNA, 467 bp, Homo sapiens
cgcagcctgcgctagtggccagatcccagacatccgagtagatcccgtgaaaagcttctacttggtttcttcgtacattctggatccacccctttcatgcatattccagaccacatttccactggagcagttgaaatgagagagatgggaatgggactcacccgaaccagaggaatttttattacagacccattaacagaggtgtcaaagtcacaggaacaaggatgtgcacctcagaaacacagagctcagtggaaaatcagtttgcttctatttgtttaaaaaatgggggacttatgcataaatctaagaccttcttgaatctaacattctaagacctgtatgccacagaaaggagggtctcagaacgccggaggatagtatttaaatcttaaatatctatattgttctccacagttactgggtcaccacatagcaggcattcaataaaaacgtgtttgtttact

SEQ ID NO: 6127 - DNA, 345 bp, Homo sapiens
  misc_feature (1)...(345): n = a,t,c or g
gatgatcctgaccctggttaggcctagcctaattgtgcgtgtccgtttttaacaaaaaagcttaaaaagtaaaaaaaaaaaatttaaaaatagaaaaaagctatagaataaagataataaaaagcatttttgtacatctatcaaatgcgtttgttttgagctaagtgttattacaaaaggaatcaaaaattaaaaaaataaaagtttattaaaggtaaaagttattaataaggtaaggttaatttattttggnggaaaggactntttgttttaaattaaatttaggtgtagccctangtgtaccggtgttttattaaggtctaccggtggtggcnccatnatccc

SEQ ID NO: 6128 - DNA, 658 bp, Homo sapiens
  misc_feature (1)...(658): n = a,t,c or g
taattgtggccttcacagagaagatgtttcattcatgaactcaggagctgaaggggtcttccctaaattcaggacaacattgagaacaaggccatgggggactgagccttggagtagaacagtgacatctgcacataagggatattgttaaggcccatgtggagaaaataaagctggcttcaagtgtctcaaggtacaagacatattttaatagagaaatgggcagtgcacattttgtaatgtttagtatctcctgtgttccttcctgtccctttattgagaataaggaatttttccattcagttttgcagtttataggctctcactcagggataatatgaaagcatacactcttgccagaaatttttaggtgtggacttggagactctgggtctgaaccaggtgacagcagtttacatcagacttgggacaaagaacacctgggcatttgttctgtcacagatatattacatgcatatatgctgggagttccacactgagggccatctgaaagttttcaaccgatggatgggtnggttccnaactgcttaaatccatggaaaatcttttgacatagggccattctaccctgnatttattccggggnctctttccctattaaaccccattacttccaaggncgtctattccggccgga

SEQ ID NO: 6129 - DNA, 2792 bp, Homo sapiens
ttaaatgtttacacaatttattttccttaaataataatttgctacaatcctgtcacaaatttaaaaaaatttaacacggtattcacaaaggcagaattctttaggacaatcaaaatgatggtgttcttagaataaattaacatcagattgtgtttatattcagatagtctgatcctctcctttgaaatgcaatggagaccattgtgactgggggtgaatgcacacatttgttcttccatacagagactcattctttatatatactcaacggtaatttgaatcgttaggaatcctgagaaacactcacccctgggcacacacatgtacacagccccacggccaaccctccagaagctggggtttcccatgggttcaattactagaagctcttttctcagaaggccaaacattcggaatatttagatgacactgtcccatctccccttgggaaaatcataaggtttcaagtggaggagcttgaagtagcagcaatacatgtaggagattcagtagtcggtgattccagtccgggtgctgagtgtgccgtaggaggcaagcagaggcaagagacacacctgcttctacaactaagccacagatgaccagaacacactgagaggtaccagtctcagagcctccgccgaaaattcacctgaatgcacattactaatccaggttaggcaccaagagggaacctgaagagggacacaattctcagaaacatgaatattggaagtcgctgggagatgggacaaagggagggagggcagagaggtgttgctcagccttcagcctgacccccagtgccctgccatctagtacatacgtcagggtttccttagcatcagggcgggtgaatctgaattgttccagctccacctagaagcacagaaagctcagccccttacagtctgacacacagaaacaaacaaaacatccaaatgacccaagataaccacaccatcttgttgctgggaggacaacagctctgtgggtgtccggtctcaattgctccaggatgccgacaggggtgtgtgtggtgatgttagggaagaaggcattaggacaggccccaaactgagatcctttttgtatctttccatagaaatacaggcctaaatgatgccataattgcatgcttatctacaccagttcctatgtacacgatatcttttctatagaagtttaaagtgcctgggttcaggaggtgcccattcctttcccacagctactggttcctcttgctgcttccagagaggtctgtcctcctctttcaaggaggatgcccttgggaaagaggaatgaactttttcacagttgtcttaactaggatccagcatttggactaaaccttcttcatacacacgaagaatcgcttcacacacaaacttgtactggcttgatgtctgcaccatcatggcgcgctggtctcgcatttttcggacaatatccagtgggtaaatgggcaggttcctctcagttaggcacatggctgtttccatagtgaccaacacaccggttcgacctattccagcactgcagtgaactaggacaggctcgctgtccactctcagagacctcacatagtttacaaattccagaaagtcggaggagtcatcgggtataccgtggtcaggccatgcgacgtactggagatgtgtcactgtgtgttcttccccggtctgggtgtttgtgaccagcatttctcgggacacataggcgatggtgcagtcctctgactgacactggatgtgaaagccgccgtggttcatgacgtcggggggatctggccagtactggtgacatttggtccgccctcgttctgtgagagtcgtcaacatgacaatgagtgacaacttctgatcccagacaacctgccaaaactgtgcacaggtatgcggcaggggcccctgagtggcgatgtacttgttcacaaggttagcagcaggaatttccatgttcacgtaacttgcattaatataatcttcatttccctgcaataatacccgggtggtgtcataaggcagcacatctttatatcggtttttgtccaaattttgaggcagctttgcaaacgtgatggccaaacctggcttttttctgtagagttgctcaaactggatcagcaccgtcccgctttcgaggcccttctttagctgtgccatggatccctccaaagtgtccccaccctccggacacatggggaaaatggcttcggggaaaagctggttcagttcatcttcagacttgaagtcagcaaatgagcggacagctctcctcctgatcaccagggccagctcccgtgagtgggactcccggctggctttgatgaacatcaccacttggtcatgcgtgtgttctgagatgtcccggccattgattaacacgatttgatccccttcgttcagcttaggaatgcaggtgtccgcaggtgactctgggtttatccttgataccacaagaggcatcttttgatccactcctcccttaagattaaatccaaattttccatcttcatctggtgtgatacggatcaagactaagtagctgtcaccattatcattcttgtcacagtagtactggctggcgtcctcggtggagccccctttggtcaccctgtggaagtcatctaagagctgctgatcaacgccgtcaggtgagcaggagcctggagcatttgaagatggagacacagaactggatgacttctgggtcaggtagctttgtgccggattgttctcggataaactcctggagcaatgggggttcccagaccctcaggagggccagcc

SEQ ID NO: 6130 - DNA, 402 bp, Homo sapiens
ataagtgctgtgatgaatgtttaattggttactgtgataagaactaaatggggaattactttagattaagtgatcaggaagggctcctctaaggaagcaatgttaagctgagacctaaatgacaggaaggatgctggcatgcaagacatgggaaaagagtattgagcatcttaggcaaaaggaataacctttcgtatagaggaaaccatcagttctgagaagccatgtacttagcggttaagcacacagactgaggagctgtggagctacacagctgccaggtttacagccaggcatctttgtagctccataccgtagctaactgctttgctacttagtgtctgtgtaacttttaggccaagctgctttaacatctctctgcctgcctttgcttaattctta

SEQ ID NO: 6131 - DNA, 558 bp, Homo sapiens
agtgtgggatatattcttatagtttgtaaaatgtagtcaaccaatactgtcttctaatttggtaatttatttataaaattacttaaacattaggtaattatatttgttaggatttgaaattatttgtagttaaattgtcatgctgtttgaaataattgatacttgtctacgtaatacattttactgtatgttttgaagatggttataatttcactttcaaaatttaaaaaatcaattttaaatgttttaaaaacatatagcttagggatttttttaaaaaaggttttcttagtaaaaacataaatttaaaagcccctgagttctaggagagggcttattgaattgctataagaaagctggagttactttgataagtaataaattataaatagcactgatctataatgctttatttctatcggaaggtactttttcttctttcatcatcagttttagccagttagtaaatgggaatactcagttttagggatttgatttttgtttggtttaattttctttcaaaaattaaaagtatatttctaaaagttttccccagag

SEQ ID NO: 6132 - DNA, 341 bp, Homo sapiens
gacgagtcttcaatagcaccagtctgcacttcctagtgactttgggtcgccaatagaaaatgacagaaatggtcatctagaggacccaggactctcccacccagccaggataattgggttccttagtaaagcccaaggctagaccactccctaacctgatatgcatccctgaggcattatcctgagcagccactagatgtccataatgcctcatagggtgttccaggagtgagctgggtatcgttttgccaccaaataggctttgcggactcttttaagggtaggtccatcagtggcaggaacagaacaggagcaaagacataaaaggaatttgggaaact

SEQ ID NO: 6133 - DNA, 580 bp, Homo sapiens
ctaattctattaatattattctaggtgactctgaagcagaactcttgagatggaaggattgtcatctgaggaaaaaaaaatcaagattaagagaggaggaactagaatgagattcacataccgtctctcctccaagggaaggagagtagtggtgatgcctgcccactccttcctgggctagtaacatttgtagcatggaacattggagaatttgcagtctgctgactttctgatttaggaggttgatggggaggccttataatttgcatttctaacaagttctgaggtgatgcttcaagtatgtccaggcagaagggctgcctcacagagaattctgccataccacatgggaattgaagtcacagacatctctaaccctcaagcctgaaaccaaaagactgaaaaccaacactacagtggacaaagaacatctctgaacttgtgtggggaccagttgacacaaggacctaaggtctctctcttctcatcttggcacttcacgaagtctccccaatcttgacaaagccctggagaaagggccgggcctcccgttgataagaatatcactgcagataaatgg

SEQ ID NO: 6134 - DNA, 704 bp, Homo sapiens
tttttttttttgccattttactggtacatttaataaatgtttattagcacctatcatacaaggcacaaagaagagtaaaagaactcatggatctgaccaatttgtgaaagattcattagaggcaaaatgaatggtcagagcagcagccccccacatcagagccatccaaccagatgtcctaaagtgctggctgagggcaattaacaagtccagaaggccatttaaatacactgggtgagaacaaactattttaggtcctacaacttccagaccactctcccatggcctcttatcaaatgacttcttccaatcactttctagaatgtagaagataactcatcatctcagccagactacattttctaatacccgatgatgtatagtggtaaataaagccctggtccacaatttctgtaaccattaagggctccagggtggcttcagttcagtgacaaatgagcaccaatgttggcatgaataccatgggtcactgtgaaagagtttttttccctacatggcttctctgatgttgaacaaggtatgaagttcgagtgaaaccttttccacatgtgtcacactgatagggtttctcaccagtgtggattttctgatgttcaataagacttctattccgtgtgaaacttctctcacactcattacatttataagacacgggagcctcagtattttcccactgctttccg

SEQ ID NO: 6135 - DNA, 467 bp, Homo sapiens
gacacgtagcaacggggctggttcagggtctgaaacagagtttgggggttgtttgggattagtgaagctactgcctttgccgccagcgcagcctcagagtttgattatttgcaatgtcaggctttgaaaacttaaacacggatttctaccagacaagttacagcatcgatgatcagtcacagcagtcctatgattatggaggaagtggaggaccctatagcaaacagtatgctggctatgactattcgcagcaaggcagatttgtccctccagacatgatgcagccacaacagccatacaccgggcagatttaccagccaactcaggcatatactccagcttcacctcagcctttctatggaaacaactttgaggatgagccacctttattagaagagttaggtatcaattttgaccacatctggcaaaaaacactaacagtattacatccgttaaaagtagcagag

SEQ ID NO: 6136 - DNA, 432 bp, Homo sapiens
ccgctccaacatcagaatggtaacggtgagcgcgtttcccgcctgagcgcaactagcggcgggtcgtgggcacctccaggagagcttgtttcatatccatatcccactgtattcctgctaatctgctaatgcagtaaattggaggaaaactgttaccaggataacctgtaatgggcaaggagccacaaagaagaaaacatttcttttaatttttaaacttggtttgaaagaccagcatgttttggaaatttgatcttcactcatcatcccacatagacacacttctagaaagagaagatgtaacactgaaggagttaatggatgaggaagatgttttacaggaatgtaaagctcagaaccgcaaacttatagagtttctgttaaaagcagaatgtctcgaagatttagtctcattcatttatagaaagaaac

SEQ ID NO: 6137 - DNA, 1007 bp, Homo sapiens
atttcggcaccaggagcagcctgggtacttgttgctgcagcttaataagtagcagaagagctcatcctcctcctctggaagaagccacttaacaggttctcatcctgactcctaaattccttaacagtcctttactcaggaataaaacaagtccaagaaaacttatctgtcccacaaatagtcctggaggcagtggagtaagatagggagagcaaattggtgtctgctcttgagtatcttgagggaatgggtatctagaggcagcaggatgaactggctttgatagcagagactttaaaatgtgtggaccattacgttgtctttggatgtgctccctagaggctgcgcctgacacagggagctgtgtatacatgatttattaaaaggaaatcctcttaggagaaacatattagcaggataaacacaagaaagaatgcagttacaagtggagtctcaatcaatcccagaggaaattctgggacttcagcctcagcttgacctatgggggggctctggaatgtcagatttctcctgatcccaactgtgctctggggcttccattgcagccaagagagagcattccccagaaaactccaggtgaggagtctccagtggcccaagggtgatcctccagaggaggtttacactgccgaactgggacattgggcaccctggatttgaatatctagagaggggcacccaatggtcatactaatgtttgccataacagtctcttctaggtctagacttgaagcatatggaagggtccttgggctagagccaacccaagcccaggctgactcccttttaatacttctaattttccctgaagatctggtcttctccctaccaccactaccctattacataagaggaaaggattggagaatgttcttgaaaagaatgtgatgctttcccatacaaggaatatactcaaggaaaaatttcatggcacaaaatgctgattctgtccaatttatcccgatgaataaattgtgtacacatat

SEQ ID NO: 6138 - DNA, 227 bp, Homo sapiens
accaacgtgctgggcaccagtcccgctacgtcctcaacggcgcgttcctggccttcgagcgccggcacgagttcatggcgctgtgcatgcgggacttcgtggaccactacaacggctggatctggggtcaccagggcccgcagctgctcacgcgggtcttcaagaagtggtgttccatccgcagcctggccgagagccgcgcctgccggccacccaccctgccccct

SEQ ID NO: 6139 - DNA, 324 bp, Homo sapiens
  misc_feature (1)...(324): n = a,t,c or g
gattctggcttggcttttcatcttaaccttagattaattacttagtcgctctctgtctcaatttattcatcttaagataagacaaatggtagtacctaccttgttataaaatgagatattccctgaagagtgcttaatgcatactatgtattcagtagatgttacattattattttgatctacttctttttttacttttttatagaaataattcttgctgtgttgcccagactaatctagaactgggaaggaagtatgatcnnnnnnnnnnnnnnnnnnnnnnnnnnnnnnnnnnnnnnnnnnnnnnnnnnnnnnnnnnctact

SEQ ID NO: 6140 - DNA, 664 bp, Homo sapiens
aagccacatccaagcttaggaggaaagagtgtcatttattagtgatgtctgtcatggtcatcaggaatgaatctataagtgccaggcatttaccacttctgcactagagatgcagagatgtggaggaactcctgtagccctcactgcctccagctaattttagctgactattaattaacaagctctgtgtactaagccattgctatatatccgggaggacgttgtcagtgttgccacagatatgaggccaacctgggatcacactggctatgcgtctcttcagtcaaatcctaagcctaagcaatgatttctatcaccataagtcctcagagtgttcgtgaagtgcacacatgactgtggggcaaccctgatggaatgcccttctgggctcaaaataatatactctaccttctctttgcccaaatgcatattttatattgctacatgcaagcacaacctcttaatggggaaaaaaattctaaatcacttttctctctcagtttacgctgaaatccagtagaaatgcgttaggatataaggtaccatccatatactctcctttatggagttgataagaaattgctataaaccagagcagtgagagctggcttatataatgctatcccctgtctcacttgaaaacagggtgaaacacagaaacaaa

SEQ ID NO: 6141 - DNA, 614 bp, Homo sapiens
  misc_feature (1)...(614): n = a,t,c or g
cactctctgagaggaccggagtggaagatgggtgggttaggggaagggagaagcattaggaggggattaaaatcgatcatcgtggctcccatccctttcccgggaacaggaacacactaccagccagagagaggagaatgacagtttgtcaagacatatttccttttgctttccagagaaatttcattttaatttctaagtaatgatttctgctgttatgaaagcaaagagaaaggatggaggcaaaataaaaaaaaatcacgtttcaagaaatgttaagctcttcttggaacaagccccaccttgctttccttgtgtagggcaaacccgctgtcccccgcgcgcctgggtggtcaggctgagggatttctacctcacactgtgcatttgcacagcagatagaaagacttgtttatattaaacagcttatttatgtatcaatattagttggaaggaccaggcgcagagcctctctctgtgacatgtgactctgtcaattgaagacaggacattaaaagagagcgagagagaggaaacagtttcagattacttgcacntgttgggttaaaaaccaaaaaccaaaaaaagggggttgggttccaaattgccccttt

SEQ ID NO: 6142 - DNA, 442 bp, Homo sapiens
tttcctgtcggcgattattccgtgttggtgcttcattggtatttattgcacatggaccaattcctcacacagtagttagttgcaccagagtataaatacttggtaaaacacacaagaggaagtagaatttacacacaagtgcctaactttcaccagcaaattcacgtgggcacttggacataaaaaaaaataaaaaatccttaagataattatatttataatatggatacagttacagtaccatgataaaggagtataaaaaggtattttcccaatgaatcattagctcaataacatactagacaacagaagtagagtttgaattttatttaagatctgcccagcccctctccctttaaaaaatatttaatttctttttgtgcaagtaacatcttctgtgggattttgtaattcctaacactgtggcaaaaatggcattttg

SEQ ID NO: 6143 - DNA, 402 bp, Homo sapiens
gcctagagaaaagtatcaaaggtctcaccatgtaagagtgatttccgatttctctcctttcagttgtgtgaaaaaacagctggcctgggttccattagcaaattaaatcatcttcaatcttaaattagagaccagaatgatcttcaggataaaaagaacttctgaatctctgcaataggaaatgtttcgatcatgcaagtgctttcccagccaaatgtctgtgctctctgtgtcactgagggccacaggttcctctaacatctgtcactgtcacttcaccaggcaggccttggagttccatgacaaaatcacttttgtcagacaaagaatgtatcctttacttttctcaaatggaataaaattatttcttctgtggaggaaaaaaaaaaaaaaaaaaaaaaa

SEQ ID NO: 6144 - DNA, 245 bp, Homo sapiens
  misc_feature (1)...(245): n = a,t,c or g
gagaaatcttgagagtggacagcaattgtgaatatcgccagagagttctgtgtttcatcaccgccgaaaggttaaaaaataaatnnnnnctgaatctgcctctagcacaagnggcaaaagttnnangggtcnagggttatggcctgaaanaatgaatnggcnccttcccggaaaggccttaaggttccgggaaagagatttgaacccctgaaannttccatngaaagggatnggaanggttaaaa

SEQ ID NO: 6145 - DNA, 405 bp, Homo sapiens
ctcgggcaggggtctctcatgtgtgtccatctgcgtgtatgtcaaggaagtgagatgccaatttggggtcttgaggctgaccagttggggtgcttgggtgatctctgcttcattagtcatgggtggaagaaaaaccacaccccccgcacccctccgttctttctgcatagactcacttgttaaatagcagttctgttgagagtggagttactgcagggaagctaccggacctgcctgggagccagtgaagggcgagtcagggcacgcgtcctgggaggctgccagcgtccttgtagcagagcagtttcttgccgcttgggtcttcagcacgccaagccccccaccaacccttcaccccgagtgaaggcttcgctgaaattgctttggtcctcatagagcctgtgg

SEQ ID NO: 6146 - DNA, 381 bp, Homo sapiens
taaagtacaaccaatctcatttgtcatagtaactgataaggaagaagcttaagttttttgtgcacattctatttgttgggtactgtgatcggaacatagatgttctcattgaagactcaacatttataccagtggttcccaaatcttgctatacattggaatcacttagagacctttaaaaaaactgatgcctagctgcagcttcagatattttgatgtaattggtacaggacgtgacatgggcattggatttttataaactcccaggtgattttgatgtgcagccaagtttgggaaccattagtctaagtggtatttaccacttttttccctgttgctctcttcagtgaggttaaataatttacttgtgataacaccact

SEQ ID NO: 6147 - DNA, 468 bp, Homo sapiens
gaacctaatctgcctgatgctgtaatgatgaatacatgtcattgtaaatttgtctaaacccatagaatgtataacaccaagagtgaaccctaatgcaaactatggactctgggtgataatgatgtgttagtgtaggatcatcagttataacagaggtaccctctggtggtggcagggtgggggaatatgggaaatctgctcagtgttgctgtgaacctaaaactggtctaaaaaataaagaccgttttaaaaaagataaagtaataaaaaatatgctcacagctcagttgtgatactagtaatgcaatttttatggcaaaattatgcttttgaagaaattcaggattctccaattttttggtgattattttaaattttcctcatttttatatggtttcccttaaaatgtttcccttttttccccatttatattaggatgggcatgtatgcttaacactgtatttttat

SEQ ID NO: 6148 - DNA, 315 bp, Homo sapiens
gtcacaaaagtatatgagattcaaatttcagtgtccacagacggcaatcctggctcctacccctaaaacaatcattgcagtggagctctgccctagctacggcccctttcttcttttggttccctgactttggggcctggagggcacaaaggcaaggagcaggctgccatccaccccttctcagagaacctgcagggagctcaccatgctctgcatccagtctaggtggctcctagcggggcttggtgggttctccatcctcagcttctcagatgaccatcttggtcatctgagaagctgagagaaacacaaggt

SEQ ID NO: 6149 - DNA, 666 bp, Homo sapiens
taggcaccgctgatccattcccaccttcagggacaaagaggctctggagggtttgtgagtcccataggttttggacatttgtagttcctcttccccttttgtgaaatgtagaatagtgctgtccttttgccccttctgctcatctgctcctagctgtactgtcaccctgtctttaggggagaagtctcatgtttatagtgcctgtgaaggtcagggaaggcactgtcaatgctgttttgaaactttgtttccccactgtttcagctcacaaaagtattttatccaccctcacgcccctgccctcacccagaagcacaaagtgaaatctgcccccggcagcttcccaagctgtgacccacagcaggttcctagttgttgttttggaccaggctgctggtcatggcccttgtccaactttctgagatctcaaaaagcagcagcccaagccagggcgagtggccatgggagggttttttggtgtttccccttccctcaacttttagttttgaaaaagtgaaatcctgcagtaaagttgctagaataatgcaacaaatacctgtacacctcacctggatcccacagttgttagttcttcagcacatttgcattctccctttctgtgtgggcatcacagatacaacaaagttagtatagcgggtgagtagg

SEQ ID NO: 6150 - DNA, 687 bp, Homo sapiens
tctcagaaaacaaacaacaaaaagcagaaacgctgaaggggtcggtttacgggaaaaccgcctgtcagaacacttggctactcctaccccagatcagtggacctgggaatgagggttggtcccgggaggcttttctccaagctgttgccaccagacccgccatgggaaccctggccacagaagcctcccggggagtgagccagagcctggaccgctgtgctgatgtgtctggggtggagggagggtggggagtgtgcaagggtgtgtgtgtgcccggggggtgttcatgggcaagcatgtgcgtgcctgtgtgtgtgcgtgcccctcccctgcagccgtcggtggtatctccctccagccccttcgccaccttctgagcattgtctgtccacgtgagactgcccagagacagcagagctccacgtggttttaaggggagacctttccctggacctgggggtctcgccgtatctcatgaccaggtgctaaatgacccgacatgcatcacctgcctttcgatgaccaacctccctgtccccgtcccgctgacctgcccccgtggcgtctcacggtgatgcctgctcctgacattggtgttcactgtagcaaactacattctggatgggaattttcatgtacatgtgtggcatgtggaaaatttcaaataaaatggacttgatttagaaa

SEQ ID NO: 6151 - DNA, 478 bp, Homo sapiens
gtcttcacacataggcaagttacagtccttttaaaaagcatctcatttccctataatggaacctaatagccaactttttcatagaaattgctagaagagtttgatcaactataaatgataaagtgtttataagcatagtcagtgtgacacagaaaccaatcttaaaattgaatttaatgttttatcatatcagattaaatattttctccatgtcttatttttactgcaacaagttagaaagtgggaacactttgattaatgtcttaaaatttgtgggccctcatttggataaaggcagcaatcctaaggactttttttttttttaacataatctgagaatttctctgtagagcagagactttcaaaccttttggctgtaacccacagtaaaaaacgcatttatatcaaaccttagaatatgtttaatgaacaatacttaccattctgatgctttttattggtttcagtttttaaaata

SEQ ID NO: 6152 - DNA, 975 bp, Homo sapiens
  misc_feature (1)...(975): n = a,t,c or g
tttttttttttttttttacctagaggttataggaagggatgaacagagatgacagacaagacaaaaaaggttatgagagaattcctcattatacatgggtagaattcaccccagaaaccaaagaacttttcataattacaagggagggacagcacagggcacaagatctttgaggtgttagaagacaggctgacagaccaagcttggtgactggcttaataagtctcctaccacttgaaattctgtgttatttatttaaagagaggcagaggaagagttcagaagccagaagatttttggaagagaagttgagcctcttgcattttcttacatcattaatttccttcaccagaagatatagttggaccaaattgcaatagggttcgccaatggactccattatgtagtcgacctgtgctcctcactaggccctgatttcgctatctgataacaaaggcttctgaactcttattcttttcctcactaacaaacctcaataatctacacttagcattaaggtctccaattcagggttatggaagaaactagtcttccataacccaacgtttctacacatctcaagtccttatcagagttataggttcagttttcacatttccagggagaaaatctgctccttggcagtcttcaaactttacctgacatacattatataccctcagnccagggcctcaatctcttaacatctccatgaacaccccagcaaacaacaaaatatatccatttatcacacttcaatcccacttgaacatcagtagccactatcttgatatacttgtgttccaaaaggtgacggagtgtccaacagcagcaaaggtcctcaggatagacatgttggcaccaataatactgaaatttggtttttaactgcatttcttgtcagtttggctgggaagatctggattgctggaagtgagcttctccatcattttctgtttctttctttgtatcagt

SEQ ID NO: 6153 - DNA, 546 bp, Homo sapiens
ctacacctcagtgttgaaatcattctcatgtggcattcagtccttaactcttttaatccactagggggcctggtttctggtagactgtggcactgatgcagaattacgaagacttcagccgtgagagttagatttttcccccaagttccagtatcttgctctattctttatttcctgcccaaattctaccctggctttcactctgtgcaaagaaaggagagcttcatctctcagaccaatggagaattcatattaagcacagcaaactttcataaattttgtttacttcatttgattttctcttgtagttggggaaaataatgtttcgctataaaatatccttttcacatttctggttaggctgtaagaaactcggatcctataaatggatggattatcagttggattaactaaacaatggttagaacattcaaaaaggaaaaaatgggtaaaaaacctatttgcctacttgaatatctttttatcttaaaatcggactgaaattttttttttccccggcctgacgtgaattcattgggagctttg

SEQ ID NO: 6154 - DNA, 872 bp, Homo sapiens
  misc_feature (1)...(872): n = a,t,c or g
cagtcattgtccaaacctgcttttttccgacaaaattcagagaggaggaacttcaagctgctggacactaggaagctgagtcgggatggaactgggtccccttccaaaatcagccctccctccactcccagcagccctgatgacattttctttaaccttggagacccacagaacggcaggaagaagagaaagatacccaagctggtgttgcgaatcaacgccatttatgaggtccggagaggaaagaaacgggtgaagaggctgtcccagtcaatggagagcaactcaggaaaagtgacagatgagaacagtgagtctgacagtgacacagaggagaagctgaaagctcacagccagcgcctggtcaacgtgaagtcccggctgaagcaggcgcctcggtacccatcacttgcccgggaactcatcgagtaccaggagaggcagctcttcgagtactttgtggttgtgtctttgcacaagaagcaggccggggctgcctacgtgccagaacttcacccaacagttccctcttgaagttgggaaaggtcttttcaagtttcattgaggagaagctgagggaccaactgaaggccatttccccagttctgttttcccgatgccaaggattgggttcctgtccagcagttcaccagtgaaacattctcatttgtcttaacttggagaagatgggagcagaaggttcggttactgccgaagactgctgcctggaagcaaaagggaaagcgccttcctgaagtttactgcattgtgagccgcctggatgcttcagcctcttttcaaggatcttggatgaggtngaaaaangacgagcatttctcctgncctggttcagncatccttgagaatttttt

SEQ ID NO: 6155 - DNA, 815 bp, Homo sapiens
gtcatcttcattgcagacaagctcagcatcctgtccaagtgctgccacgcgatggtggcgctgatctaccccttcgcctggcagcacacctacatcccggtgctgccacccgccatggtcgacatcgtgtgctcgccgacgcccttcctcatcgggctgctctccagctcgctgccactgctcagggagctgccgctggaagaggtccttgtggttgacctcgtcaacagccggttcctcagacagatggacgatgaggactccatcctgccccggaagcttcaggtggccctggaacacattctggaacagaggaacgagctggcttgtgagcaggacgaagggcccctagacggcaggcacggtccagagtccagccccttgaacgaggtggtgtctgaagcctttgtccgcttcttcgtggagattgtgggacactactctttgttcctgacgtcgggcgagcgtgaggagagaaccctgcagcgggaggccttccgcaaagctgtctcctccaagagcctccgccacttcctggaggtcttcatggagactcagatgtttcggggcttcatccaggagcggggactgcgccggcaggatgccaaaaggtctgtttgaggtccgagcccaagagtatctggaaacactccccagtggagagcacagcggtgtcaataagttcctgaagggactaggcaataaaatgaaatttctccacaagaaataactctcagcctcaagggaaaatttcctcctagtgcagccctatgctttaaaaacagttcctggtggcctttcttaaaagctggggt

SEQ ID NO: 6156 - DNA, 509 bp, Homo sapiens
cctatgcagagtgtggtcttgctagtgcctggccagcccaagttgggagagagaaaaccagttaaaggtgggtctgcagaaaggcctccgcaggttgcatcggtgtcttctcccattatggtgtcgtagagaaattagaacacacaaaagtgctcatgggactgaggtgaaatgaattctgtctcacagtgaaacctgaaattcgtaaaagagaccagcaacagatcccattatttttggtgtttaaaatacacacaggatttactgtgttacaccataacccagcaaacacaggtgaagcatcaaacaaaagcaggggtggggtggccaggactcctcaatgactgttttaaaattagacccaacctgataagcctgcttgggatgatctgtcagtgagcctaaggggcaggaggaacctcgggcaccagtatttcacgccaatccagggcttcctatgtaactagtcatggagctgactcagtgatctgctttgtatatggtaggac

SEQ ID NO: 6157 - DNA, 666 bp, Homo sapiens
ttttttttacatattatgaaagccactttaaattattatttagatgacccccagatgtatgagtgccattattgtggtatagctatgaaacagatcatcatcttttacctcattacatttcctcaatataaagttcccagtgactatccgatcacatccaatttctcccatttccaaagaagccgaataagggaacactaggaaaaaactttctaaatgcatcagcctcaacattccccttggctctgtaatactgaaagcccctgccaacgcatgcaaacatgaagccaatggtgttatgctctggaatgttggccgctttgaggcgctgcatcgcagcctcagcagtcttctcatcactgacgtcctcgttgaggagcacagtggcactctggattcggtgtccactaaatgacagtccaaccacacccgaggcatcaatatccagagggttcttttcagaagtcagtgatgacaggttgtccacctgcctccagccaagatgatattcatatcactgaaagtgctgactacttgctgcagataattactggctcccaccttacagcaattataaccaaagacaaggaccacacgaagttcagggttatctaaaagacctacttcagtgagttgatgtctttctaatgttaaattctttggatc

SEQ ID NO: 6158 - DNA, 736 bp, Homo sapiens
cttctggagttggagcgggcttacagtgaaatagaacaactgcaggctcagatccggaacctgaccgtgctgacccccgaaggggaggcaggggctgagctggcccgttgggctccctgctcctttcacaccacactctcgctttgaggtgctgggctgggactacttcacagagcagcacaccttctcctgtgcagatggggctcccaagtgcccactacagggggctaggcaggggcggacgtgggttgatgcgttggagactgccctggagcagctcaatcggcgctatcagccccgcctgcgcttccagaagcagcgactgctcaacggctatcggcgcttcgacccagcacggggcatggagtacaccctggacctgctgttggaatgtgtgacacagcgtgggcaccggcgggccctggctcgcaaggtcagcctgctgcggccactgagccgggtggaaatactacctatgccctatgtcactgaggccacccgagtgcagctggcgctgccactcctggtggctgaagctgctgcagccccggctttcctcgaggcgtttgcagccaatgtcctgcagccacgagaacatgcattgctcaccctgttgctggtctacggtccacgagaaggtggccgtggagctccagacccatttcttggggtgaaggctgcagagcggagttagagcgacggtaccctgggacgaggctggcctggctcgctgtca

SEQ ID NO: 6159 - DNA, 106 bp, Homo sapiens
tatgaaaagatttaaaaataataataataataaaaaaattaagtcatgttagaacacaagggatgatgaatatttcggtgtcttgtgatggaaatattttatctaa

SEQ ID NO: 6160 - DNA, 338 bp, Homo sapiens
cgcaccaggccagtgtgttctttaccatctttaaatgaaaccttccctcaaccttccattcctctacggctaccactaatggtataaacttgccttttatttatcacatcatttgcttttctgttatccttccacatatactgctctgcagaaatcacgctcagtaggaccaccagtgacctcttcattgttaaacacagtggtgccaatcagccctggccatcctctcaactgacttgaatcagctgatagcatttgatactgttgatcatttccttctccttaaaattcccacttttcctgggtctttggcagctttactcccctcccacattttc

SEQ ID NO: 6161 - DNA, 361 bp, Homo sapiens
agagagaaagagatcacaacgtgagaaaacagaagatactaaaaaatgggactatctagtgcctgagagggaactgagtcttacaaagaaacatataccaggctgaacaaaccagaggcctcagagaccacaaacaccgactgctccctcaaagaattcccagtgaaatactttcccctaaaatactaacacgggaaaaggatggaaagcatgaaaatatccagaaaacacacaaaactgaaaccagtaagcacaaggtggcatggacaaaggaacagatgaagggacaccaagaccgaatgatctgagggagagaactcaaagcaaagacacgctcagaagcgctccagccccgttccat

SEQ ID NO: 6162 - DNA, 482 bp, Homo sapiens
  misc_feature (1)...(482): n = a,t,c or g
tttttttttgtattttttaaaagctccctggtcccaggtgttttgcagttttcaaggtcttatctgctaaaggaatgccctttaggtcacagcaggtcctctgcagtttggtggtggcacaagagaaaacataaaagaaaccaagactcagggaaactgccattcccccagtctgtttctgcatgacagtggggcccattcctgtctcgaagcatcttcttgttccaaatatgatgtctgtttagagtgggtctcaatggaccagggctgagctgcccctctgtctctgcctcctcctgctcagccctgaccatctctgagaggatgctaaggtccccctcccaccgaactagactttgagtctaagctgggacaatgagtaaaacgtaaacatagccttttacattgatttttgcttttaaggggggaaaacgggattaaatgacagcaggtatttnggggaaacccaggccagcgaccaa

SEQ ID NO: 6163 - DNA, 487 bp, Homo sapiens
cggaggtagtgtagggagagatacctgggagaccagtgaggggaaccgtactattaacagtaatattttaactacttagcaatggatatctattaaacaaaactgatgtaacacttactacatactgtagatgggaaagaaatggtataactccacaaaagaaccaagaggagagagttcaaggatatggaaaaatgagaaatcttctctgggaccatttttcccccaactccgggaagtagcagctgatggtggccatcattataaagataaatgataacacctgccgaggaactcccaccaagacactcgtagttcttggtaaacaagaacttaattaattttcacaacacccttgtgagggcgggaaagtagcatcttcctgggttttactggacaggggaaggcttcagcacattaaacataagtggattgttggcccctttcacacagttgggagctcttgacaggggtgggggattaagga

SEQ ID NO: 6164 - DNA, 1412 bp, Homo sapiens
  misc_feature (1)...(1412): n = a,t,c or g
ctcctcaggctcggcgtccccggccgtggctgagctctgccagaacaccccggagacctttttggaggcctccaagctgctgctcacctatgctgacaacatcctcagaaaccctaatgatgaaaaatatagatccatccggattggaaacacagccttttctactagactcttgcctgtcagaggagctgttgaatgtttatttgaaatgggctttgaagagggagaaacacatctcatctttcctaaaaaagcttcagtggagcagctgcaaaaaattcgtgacctgattgccatagagagaagtagcagactggatggctcaaataagagccacaaagtaaagtcatctcagcaacctgcagccagtacccagcttcctacaacaccatcttcaaatcccagtgggttanaccagcacacaaggaaccgtcaagggcagtcatcagatccaccatctgcttcaacggttgctgctgactcagccattctagaagttcttcagtccaacattcagcatgtgctggtctatgaaaatcctgctcttcaggagaaagcgttggcttgtattccggtccaagaactaaaaaggaaatcacaagaaaagttatcgagagctagaaaattggataaaggtagttgatgtcacttggcgatattcctgcaaacatgaagaggtgattgccagaagaactaaggttaaagaagcattacttcgagacactattaatgggcttaataagcagaggcaactgtttttgtcagaaaacagaaggaaagaacttctccagaggataattgtggagcttgttgaatttatatctcccaaaacccctaaacctggagaacttgggggaagaatatctgggtcagtggcttggagagtagcccgaggtgaaatgggtctacagagaaaagaaaccttgtttattccctgtgaaaatgagaagatttctaaacagctccacctttgttacaatattgtgaaagatcgttatgttcgagtttcaaataacaatcaaaccatttctggatgggagaatggcgtgtggaaaatggaatctatattcagaaaagttgaaacagactggcacatggtatatttggcccgaaaggaaggatcatcttttgcttatatttcctggaagtttgagtgtgggtcagttggcctaaaagtagatagcatttctattagaacaagtagtcaaacttttcagactggaacagtaggaatggaaattgcgatctgatacagcacaagtaggaacttgacaggcgataacagtcttcactcctatgcttgatttttctggtgccactgaagttattttgggaagcagaatttaagcagaggagatggttgatgtcgctttgcaacacacccagctgtttagacaaagctttaaatgacc

SEQ ID NO: 6165 - DNA, 469 bp, Homo sapiens
  misc_feature (1)...(469): n = a,t,c or g
atggccacttgccctccttgaaccctcattgttcacctgaagctctttccaagggaacgccaccaatgggggcctggcaagagagcagctgaggtttttcagaaaaaggctgaagatcaaggctgtgctggaagactaacccactttaggaagtggaaagaggccagcctcaccccagacaccccagtgtgttggagaaaggggttggtccgtgntgagcctgntacctgggaactcattcctgccctgcctggccctcaggtgggatgctatgaaatatgatgagaagctggccgttttccgcaagccccacctcaaccccttcaacaagcagtctgggccgagacagcatgagcagggccctggggaggaggtcccgaacgtcactcctgaagaggccctgcctgagctgccccctggggagccggaattccgctgccctgaacgcgtgatggatctcggcctgtct

SEQ ID NO: 6166 - DNA, 859 bp, Homo sapiens
  misc_feature (1)...(859): n = a,t,c or g
tcattattacaaaaacacctatgtgatgacataaaatacttgggtgatatcagaacaattatccttaatagtttttataattaaagtttcctaaacttcagtctccaatagtcttttaaggattggaaccacatcactgtcagccccgctgctacaatgcctttgtacaatttttttacataaggcaaataaggcttttgtacaaagcctgaataccttctgttccaatggtgtccaaatggttattatattgtgaaaaacctggccttggtcacaatgcaaacaaaagtacagatgaaagtgctttttggacagtttgcaaattgtgttaaagctacggattttttttaaagtgttcagcatcttaacgtgtattaaagctatggatttttttttaaagtcttcagcatcctaattcaccctttctaacttaagaaaaacatgacttaagacactgcttctaagtttggttgttctttatagtgtggatacccagttatctgtgagcgtatgggggtgggctgagggtcaggtgagnnnnnnnnnnnnnnnnnnnnnnnnnnnnnnnnnnnnnnttngcatgtgtatgatgtgtgtgcgtcggaccgcttctaggctactaagtgtcaatggaaaagaaaatgtattcaaaatacttaaatcaaaactagaagatggggaaaaaaagatttattctatacaaagccttgtctggaccactttagagagacttctatttttttaacccttctataaatatttgatggcacttgaaatattcctgcaataaaatgtgatttgtgtaaagaaaaaaagattttgtaatgtgaaacaaagaaagaaagtaatgtaattttct

SEQ ID NO: 6167 - DNA, 387 bp, Homo sapiens
aatatcctatagaccctgttacacaagaatttaagatcgatgaagaattggtaacaaattctgggaagttcttgattttggatcgaatgctgccagaactaaaaaaaagaggtcacaaggtggtacttttgattggaattttggattgttcaattatttttttatcaatcattagaaatattaagatatgtttaatttcaggtgctgcttttttcacaaatgacaagcatgttggacattttgatggattactgccatctcagagatttcaacttcagcaggcttgatgggtccatgtcttactcagagagagaaaaaaacatgcacagcttcaacacggatccagaggtgtttatcttcttagtgagtacacgagctggtggcctg

SEQ ID NO: 6168 - DNA, 391 bp, Homo sapiens
  misc_feature (1)...(391): n = a,t,c or g
atctccaaagtgttgtctttttgtatgctaatgttcactgatagcttcaggatggaggtggtcaccagaaggacaaaggcatgattatagggttggaacttctgggcccacctccccaacttccagggagaagaccggggctgaaagacagactgatcagcaatggcctgtggtttgaccataatgaagcctccataaaaacccaagttgacagagtttggcaagcttttagatagctgaacacatggaggctcccagaggatggcatgcccagtgagggcatggaagcttcacacccctttcttcataccttaccatacacatctcnnnnnnnnnnnnnnnnnnnnnnnnnnnnnnnnnnnnnnnnnnnnnnnnnnnaactaaaaaaaaa

SEQ ID NO: 6169 - DNA, 413 bp, Homo sapiens
ctgaagtggttctcagtctcaggacttggggctgatgcagggcctctagctgaagggactttgatggaaatgtgcagacacaaatgttgcccaaggaccacgagtacagcaggtgctgcagttacggggcacgcccattcctaatcattgtgctttgtgtctcctcagggagaaacaaaggcagcgctgccctcgggggagcaatggccctggcggaacgcagcagccgcgaaggatccagccagaggatgccacgccagcccagcgctaccaaggctgcccaaggggggcgggcctgggaagagccctacacggggcagcacctaggatggggcagagacttgttgcatctttgtccccagcaaaggctacatgttacctccttcaattgataataaacctttctgagatgc

SEQ ID NO: 6170 - DNA, 621 bp, Homo sapiens
ccgcgtcgacttttttttttttgacctggaccctctgcatctcagaaaggtttattatcaactgaaggaggtaacatgtagcctttgctggggacaaagatgtgacaagtctctgccccatcctaggtgctgccctgcgtagggctcttcccaggcccgccccccttgggcagcctggtagcgctgggctggcgtggcatcctctggctggatccctcgtggttgctgcgttccgccagggccaatactcccccgagggcagcgctgcctttgtttctccctcgggtctcgggcacgctcgacgtgggcagagacacggccgcagggtcctggggctcgctcgctagcctctgcccggcacacatggacttgagcatctggaagacggcgaggggggccacgttcagcttcagcaggtccaccaggatcttgaacacgtcggggtcgataccgccgcccgccgcctgagccagctcgtacagctccatctcctcggtgctcagcaccttcttccgccgcagcgccagcttctgccgggccgcctccagccccgggggcgccgccgaccccggcccaggccctacgccctgcgccgccatccccgcggcccgcggaaaggtg

SEQ ID NO: 6171 - DNA, 511 bp, Homo sapiens
tccaggtcctcaaatgctcatgacagatagttcagttgatggcatagctcccgaggaaccagaggggcactctgaatctactttctgtaaaatatcagttcaaaaccatcagctcagggcttgtatatgcaggctgcttgtctggtattctactaaacacctatcttttctgcaaagttgaccagctttgctttgtgggcaaaaggtattcatttcaaagagctaagacacaaattgatgccatctaaagtgaattccttagagaaatccagtagtgatagcagctcccattccaggcatctagggtgatggtaagtagctcaatccacaggaaacactaagcattattaaaaactggtgatcagagacttccttccagagtattatttcagtctgctgttgttccaaaattgcctgctactaaaatcctcaactgcccttctttgtcatgaccaatatttaacaaatctgtctgacagtaaattgtcagcaccttcttgggaaaggccct

SEQ ID NO: 6172 - DNA, 400 bp, Homo sapiens
  misc_feature (1)...(400): n = a,t,c or g
aacttaagtccaccttccatggtggttcagaaactagactaccttaacgattttacccacgaaatcccaaatatccagactgactcctatgaaagtatggcaaaaaccacaccaactggtgggcttccaagggacccccaagaactcatggttgataaccctttgaatcagctctcgactctagcagggcagttgtccagtctgccacccgaaaaccaaaaccctgcatcccctgatgtagttccctggccctgatgaaaagcctttcatgattcaggcaggccctcttacccaaggcagtagtttctggccgtattcaggcaagtatttcctcagagcttcctnttcccacaaggcccaggaacttggggccattccntaggttcaaaggggactttag

SEQ ID NO: 6173 - DNA, 1953 bp, Homo sapiens
tttgcttgttacgtttcacatgtattgattaaaaaaaaataaaggggagggggagttttcaacgtcattcaggataactattttcctggtataaaaagacattattctcaaacaataactttctaaaaaaaaaatacatcatgcaatcaaagttttaaaaagtttcactgaatgtttcaaacctctgggaacaaatcatgtagtaaccattttgaccagtttttgcctgaataaacgcaaaatcttgcaagtcaacacagatgcaggctttgctgcaaaaagaaccgctgatcagagccaaaaccagtttccaaggagggcacctgccagaaaacaggggcctcagcagagagccagaatgactccgtgtgttggcacaaacttctacgcctttggagtctgtggcagctgcacacccagcagcaccacctctgcccaagcaaaagccagtcctttactggagaaacagggaacatcacggttctttctcctcaattacttttaaagtcccattaaactaaaaagcaacaaaaaaatccagaatcccatgcatctgcagctgtaattaagacttgcaaaatttcacgtcatctaccccttaaagcctgtctgtttcttgcactaataatggaagcacagttttgatacctttgagagttcactctctagctaaaccagccacaaaatatcgcattcccaaacaagaacccaccagagcattacaagaggcgggagaagttaattcagcgcaatatacaattccccacatgttcccaacgttttaacatgctcgcaataagaaaaaaagccggtttctctggattcagatgtggtgaaatcgttttcatcactgtcaaaggcatcaaccagatttgggagtttgttaaaaggttaaaaattcatacaaaacctgctgtaaattaagacaaaggtagattaaaatgcgtcattgtctgtctctttaaataaagtaatgctttccataaaaagcaaaggtgggcttttgccttgatgccgaacaacgctgtctctagaattctgtgcaattctgcacaaaaatacattctctgaaaaaattgttttccacttattgtgaacttcaataggaccaagttcaaaggcaaatcacgataaaaactgccattgtcttaaattctgcaggctaagagtttcagacaagctgcggtgaaaagccacggttgagaaacccagtgaagcacagggacacagcacggacactttgggttttggagttggaggaaattggagtaaaaagttgattttgtgtgcaatacttttagacgctctaggaagacccaaaatcatgatagccgtagcagtctgtgaaaaagtcactgtagcctgctgtcgcagagttgcctccgtacccatagcttccatacccagcaccggcattcatgtagcctccatggttggcgccaccaaatcctcgcccgcgccctcgtccccggatcgtcccgcctcttccccgccctcgaaggttggggggtgggggacttcgttgtgcatggggcctccccatgccgaagccagggttatgtggcttagcagcaaatttcggtccccctctgacgggtacctggggctctcttctttttgttggcatcaagggcgagaggggtgtcagggaaaagcttttctagggcagcaagagcagcgtaggccttcgccacctttttgttggaaccagcaccttggaacttctgtccatccacttcgacctccatgacgaagcgcttgtcgtggctgcccccggtctcggagatgagctcgtacttgagcccacgcctcttctcgttcagctccatgactgggttcttgccgtgctttgtcaggatcggcccctgctgttttacgttctcggcagtggcatctgagggaaaggccgcactaggggtggagacagcttctaccactggggcaggggcacca

SEQ ID NO: 6174 - DNA, 471 bp, Homo sapiens
catcacgcccttccactttacgaagaccagcttatcgggacaatcagtggaacccaaggcagtcagaagttcctaaaccagaagatggagagccgccaagaagacatgagcagtttattcctatagcagcagataaacgacctccaaaatttgagcgaaaatttgacccagctagagaaaggcctcgaaggcagcgtcctactcgaccaccaaggcaagacaagccacctcgatttagacggctaagagagagggaggctgcttcaaaatcaaatgaggtggtagcagtgcccacaaatggcacagttaataatgtggctcaagaaccagttaatactcttggggatatttcggggaataagacaccagatttatctaatcagaactcttcagatcaggcaaatgaagaatgggaaacagcttctgaaagcagtgatttcaatgagaggcgagagagggatgaaaaaaaaa

SEQ ID NO: 6175 - DNA, 67 bp, Homo sapiens
gaggaaggacccagagtgacttgctggagccttagtcaccaaacgctcttgcagcttaatgggaaag

SEQ ID NO: 6176 - DNA, 193 bp, Homo sapiens
gttgctgtttatcgatgctggttttcagaattcctgtgtggccctcctgtctggagtgacatcttcatctgctctgaatactggtgcccagccagcccgtgacagcttccccctaatcaggaggggacagctgggggcgcaagctggtgtgtcatcagcaaagacctcagccgcctcggggatgagaggggac

SEQ ID NO: 6177 - DNA, 428 bp, Homo sapiens
  misc_feature (1)...(428): n = a,t,c or g
ttttagaaccaaggaattttatagctagacaagatcttggaagtcttccaatctagcctctttattttgtacatatnnnnnnnnnnnnnnnnnnnnnnnnnnnnnnnnnnnnnnnnnnnnnnnnnnnnnngaggtaggctgggactagaacccaggtctgtgtgactccaaagtctgtgctcctcccactatactgcttcacagataggagctgatctgcctcaaatcttctgccccttggcctttccacaactctgcattgctgccatcttaacagtgccttccactgggtggccatgcttaaagcttcgttagggagggcaacttttaacattgttctgtaaaagctctacagatgtaggatgctagctatctggtctcccggaaatcttttcaattcaattctgcaaaaacttaaggtttcccaa

SEQ ID NO: 6178 - DNA, 406 bp, Homo sapiens
  misc_feature (1)...(406): n = a,t,c or g
tgtcataatgttttaaatgttaaatatatgataccctcattcatgaagtgaagcagaaagggtctgtaaggaacattctaaacatttttaatgatattgcttttactgatcaagcttgttgtgccatattaaaattaaaagtcaaataaacaaagcagtcctcacagccttgggaaagaaataggataattgtcttcttaaggatgaggtgctttttatctgtgggatgaatgggaaatcacactggaattttaattcttatttattttagtgggataggcagggaatcactctgtagtagttgtgttcattttcttttctttttcttttcttttttttgaggggagtctcgctctgtcaccaggggnggggagtgccagtgggccgtgatcncgggctcactggc

SEQ ID NO: 6179 - DNA, 459 bp, Homo sapiens
  misc_feature (1)...(459): n = a,t,c or g
ttgattgtaggtaagataattcatactggcaaaactcctacaagtgtgaagaatgtgggaaaactttttaatcagtgcatacaccttacttcacaggaaagctagtatccttgagaaaaattgcacaattataaaaaatatggaaaacccattaatgcctactcacatcttacccaacagaaggtggttcacagttaatgaaagcatttaaagtgcaattatgctcaagaaatctttcagaaaatataagcctttaaagtgaagaagagtatttattttgangacaagcattaaaatatcaagagtgtaagcngggcatggtggctcaggcctgtaatttcagcactttggnggccgaggcaggtggtttacttgaggtcagaagtttcaagaccagcctgggccaacatggttgaaattccatctctacccaaaatgccaaggtttggggttgggtgt

SEQ ID NO: 6180 - DNA, 622 bp, Homo sapiens
  misc_feature (1)...(622): n = a,t,c or g
ggccaggctccctggctggccggtttgggcgtctgggccgtgaaggtgggacctcctgttccgggccgcaagtttccctctccagccgcccgccgttcgtagcatgtcccccagaactcggggagcgcaggcaggacaggcttagagaagacgcggtccccagcgctttggccacggacgtcccaccccgtctcctctgtcgctggagaaccgccgggccgagccactgggagaagcaggccagagccttccagggcctccggcccgtggacccgaggaggatgagctggctttttcccctgaccaagagcgcctcctcctccgcggctgggtcccccggtggcctcaccagcctccagcagcagaagcagcgcctgatcgagtccctccggaactcacactccagtatagccgaaatacagaaagatgtggaatacagattgccattcaccataaacaacctgacaattaacattaatatattgcttcctccacagtttcctcaggaaaaaccagtgatcagtgtttatccaccaatacggncatcacttaatggataaacaaaggagtgtatgttacctcttccattagttaaacaatttnacaatggnantcagatctt

SEQ ID NO: 6181 - DNA, 484 bp, Homo sapiens
ctgggagtgggcagggtcagggacgggatcgagacactcagaacctgcaggctcaggaagaagagcgggagttttataatgccaggcgacgggagcatcgccagaggaatgaccgttggtggtggcggcagtgagtctcaggagttggttcctcggcctggtggcaacaacaaagaaaaagaggtgcccgctaaagaaaaaccaagctttgaactttctggggcacttcttgaggacaccaacactttccggggtgtagtcattaaatatagtgagcccccagaagcacgtatccccaaaaaacggtggcgtctctacccatttaaaaatgatgaggtgcttccagtcatgtacatacatcgacagagtgcgtacctactgggtcgacaccgccgcattgcagacattccaattgatcacccgtcttgttcaaagcagcatgcggttctttcaatatcggccttgtggaatatacccgtgctga

SEQ ID NO: 6182 - DNA, 57 bp, Homo sapiens
ggcacgagaagagagagcccaattaaaagaaaggggccaggtgaagtgcctcacaca

SEQ ID NO: 6183 - DNA, 365 bp, Homo sapiens
ctggaagattctataccaagataaatggtatacattacaatcccatccgtgctgtgcccccagcccactgccaaccccacagggaacacagcagctgctaatcctctggaaaggtcctactgcctgcagaaacttaccactcttggtaacggtgcttagatttgtaaacggaatatctacatttccaaaaaatgatcaactccccgtcatgctcccaaggagtgtcagtctgactttgcctttgaggcttcatctctctctgaacacgactgcataaaggtaaggtcatggcttttggtcaacggaaaaagcaacggctgcacagaggctgatggtgtgggccggacccccagcccgcagagcct

SEQ ID NO: 6184 - DNA, 551 bp, Homo sapiens
  misc_feature (1)...(551): n = a,t,c or g
ccatttgaagganttggttgtcctggcctcctcctatgggccaaaaaaccccccaaggggaacacaacaattgggacccggaaacccttcccaaaatgtcctccctcaatccaggttttccaagggggagggaatgcggagacaggagaaaaaaagtgctgagggccaaagctggtgccagggtgacggtgcgtctgggtaaggcaaatgagaggcagtgaggtgatctcagaatggcgttgaggcggtcagattaggccgggctggctcacacgagggtcccgggcttggctttttcctgcccgtaccactggacatcagctagttctggatagagggaggaatccaggaaacagctatcattgtagctcccagtctgccaggttaggatgtggtgggggctgcttgggggggtggctccaatttcacttgacggtgtcgagcttctctggctttgaggtaaggcagctgacgtggccttgcacatctggggcatcctggtgaccctgctgtgcgccacgaaggtgctctgggaggaggtgctgtactgc

SEQ ID NO: 6185 - DNA, 1824 bp, Homo sapiens
  misc_feature (1)...(1824): n = a,t,c or g
gcgtcgacgcagaggcctccacagacaagcctgtggcagccctgccctccagcctcgagctggagttgctccagaggcagccccagcaggcctccctccacatagaggtggctgggccaattgcccaaacacgtgagacacacagggagctttatgtgttcatcttcctgctttagaacttgctcccggtcttggtttttctgaggaaaagcccacagtggttcccctgcccctcccatacctccctatctgccgtctgtctctttgggccctggtctgacagttttcatctgaggcctcctcgggagcaggagacttaagggttcatcccgaccttagttcacagagcctagctgggtgcatcccagccgcagggggtgagaagacacccagagatggggggacaatgctcaggtgggggcctcctccgagactctggttgagaggaaagcacatgattcaagcctaccccacaaaaaaggagcacaaaatgctcagaaatggcccttcctccctgcagtgacgtaggacaagggaaagggccacacccattttcaaaagagtggactgaggtgctctgctcaatttggggtctgctttagtgacccagacactcaagtccagatggagactccaggggggtccttctgcccctctggccagcccccacccagcactccccatcaccccatgtaagtgtgtatgccagggctgaggctgcctccaggctcacccactgccccagtgcatctttgccccaaataggtctttgtccagtggtactttgttcatgagcagcacaggccatcttgttggacactgtcactttgggccttgccaggtctcacagaatcacatcgctgtatttattgtataatattgtgaatattggaagttttgagtgagtgctgtctagaaggttttggagtgtggatgctggtccaagaaagaagatgtgccctggcctgctggaaagattgtgaattctagagatagagccgttagcatccatctcctccctgtaactcttaggaaatgcatcaaggaccattatagaaagggttcccctgacctaaggatgaaatcgacctagggttaatcatgacagctgcatcagttgtattggatgcaagtcaactctggaggtgagtgcccgcaagcagttcccctgctttgaaagaagatggtcagcccgctgcctccccagcggccacagctcctttgagtgtggggggtcacagccaggatgtattcctgacaataaggatccttttattttcatttctgcataatgaaagagcctttcgatttattagaagtggtttttcctccctacatctttaaattcttggttctctttagtcctcatcccttgaatggacttgtcagctacctccccaggaggagttcagaagcttctgttggccatcacttgagtagatgacaagctgtaaggtatctgctgctaacgtggctgcttctccgagagcacattgaggtccagacagatccaaaccttggccctaaaaaatgtgtgctgtaaagttacttgatgtatatttattataattatttatggttgcatttaacaaacttttcattcaatctgatgctatttacaccatgctgtgtaaaggaagctcactaaaggaaaaaagtcacaccaataaataaccttcatctaattttgatttaccttaagagttgtgtgatcatctactcttgctgagcaagttcaaaggctggcatgcttggatggctctgatatttaagtgctgccaagtggctaggaattaaagtgtttctaattattntggaaaaaat

SEQ ID NO: 6186 - DNA, 547 bp, Homo sapiens
  misc_feature (1)...(547): n = a,t,c or g
taaagagtagcttgttaatgccattacataggcccccacgtcctatagtgctgtggtgaaaacaacaaggtcctaataatgggccataccaatgaactaatttctactatttaaaaggacacgggaaactgctttcagtggcctgccttcttagttctggtatattctgctctatactcaagagttattctgtttcctgtgccttcagaggaccacattcccagctttatgcccagagaagtctatgaaactaccccccaccggcatcctacagagttggggatttttttcagcctcacaaagccctctgttgtttcctctttaaacagtcagcttaactggaagtttaggggagaagtgggtgggggagcacttctggccctnttccctnttcctttaggatttttaggagggtttccagcagcttggaccttaccctttgtgtaaaaatatattttaggtcaattcatttacaaggttggcaatcccttttttgggtcctggggttncagatggggggattggaaaaggngtttttaggtgtcag

SEQ ID NO: 6187 - DNA, 1043 bp, Homo sapiens
ttttttttttttttttacgtaccattttagtttttattaataaaatagaaacttagactcggacaactgctttattcttgcatctaatctgaccatatattggagtagcaattctttataaaaggacttcggtgagaactgtcaatatatcagttccatcaaaaactctaggttggaatatcttaaaaacagcaaattaaatatgagaaagcacagaaatctctccctcaaacaagaagggcttcctttaatagactttaatatagctcatttacaatcgtatgaaaatccatcaagatcaatcatgttgcacaatccctaaaggataaaactgagggaagtcatggataattttcacagcttcattgtaaagtccaagatcaaaaggatggctatcttctttaaactggacataagatgtacacaagatggtggccttggcggttactcttccaaccacttccacaattccagagatttcttcatcaaggggttccatcaactcgatggttccattttttccttctccatctgaaagaataaacatttttccggtgggatgaatctaaaaacgaaacatataattaaaatctcactaaacaacaacaaagtttgactaaagatgagtacattgatccttagttgagcacaaatcaactgtttcttgacagtttattcattcagtttattcaacttattggatcaaattataatcttatgttatcaaatctgttcatggaacacacagttaattctgaatttcagataaacaaggattttttttgtagtgttaagtaggttctgtatttgctaaatatggcaaccctattctgataacaaattaaaggatgcccaccctaaaagtgaaatctgctggcactcatgatttagacagtacatatcccacggagggtatgttttaaaaaacaggcatgatgaagtaaaaggagaactggttgctagaatatctgggtcctactcctgggaagcagctgtaaagagcgctgtcagattgcgtttgaatgccagctttgccatttgcc

SEQ ID NO: 6188 - DNA, 627 bp, Homo sapiens
  misc_feature (1)...(627): n = a,t,c or g
caataaataggcagtcacacgagcaggaatataatcccccctctccatccagagcttcaccatgctctgagcagtttgcagtcacatgccagtgactggctatctgctggttgttgaacctattctgtacaagagaaaacagatgtctgctcttactgccaagtccccgttcttgcattttaggaaccattccacacgcacggggaggtttttgttaatttctttcggatgatgactgagtgctttacgctgtgcaggacttccgatcctggcttttctactcacgtgaacgttagtagctgtttatcactctgacggccaatgtgagatctagttttctacttgttatggaagcccttgaacccttccatgcctagggacaaaggaggcctgttgaccctatttttatgtttggtcacctataattgaaagaataagtgtttttttcacacatagcattgtaaataataaaccagttatggttgtcactgattttaaagatactaaactatcctcatttcaagaaccaccaccagttatcacatgcattatatgtcttgttcacagtggaatgtgtgggttataagattgcatnagacaacaacttaaaaaggaaagttaaaattt

SEQ ID NO: 6189 - DNA, 229 bp, Homo sapiens
tagaatgtttttcagtgtcacattctttgtacagcaaaatactggaagtaacccacatatctatgaataaggacttgattgaataagatggtcatctgtgcagtggaataccatccagctaggcatggatagatgtgcaacatacattgtgaaggagaaaaagtcagtggcaaactgtagtatcctagcccccttttttgttgataggtaatgcctggctaggaaatga

SEQ ID NO: 6190 - DNA, 497 bp, Homo sapiens
agtggcggcgatacaggacctgtttcactgcagggggatccaaaacaagccccgtggagcagcagccagagcaacagcagccgcaagacattgtttctctccctctgcccccccttccccacgcaaccccagatccatttacactttacagtcacagaacagaaagtgctggtggacatctcttcttgccccaagatcttcgttggaagtccccgggacttggtgtctttgccgttcaaagtgtttatgaactcgccaggaggcataatgtgtcaccattttattctgggccaccctaaaggatgacacccagcttcagagacctcctcttggacgacatccctgagaatcaatgttttagctgtcccatagtctgacgtctgtttccgaccgcttttgagctggcgcaggcttagtcattaatggccaggacgatgttaaatgttctgcctgattggcttgcagctacacaccttttgtcatttgcagagcagcaa

SEQ ID NO: 6191 - DNA, 629 bp, Homo sapiens
tgttttgttttattcttaaataagcaagcaaaacctgcacattggattcacgtgagatgataatgaaaacttttagtttaagagtgaagggttaagtaacctaacagagctttgatgttatagctgcattaaagaaggtgattgtcaatattacagaaaacaaaaatggattgcccctccaaggaccaaacagattcaaggagcatcatttaagctaagaagagacctaagtgatgaaactagctgtaagaatgtaacaggggttgtgtttgaaatatttatattcccatcggtgtgtttagtcctagaaaattgctagcagcagtcttcttcacagtgccttgggaaaagacatttcaagaggaaacttgataattttaaactcttttccccctttaccgtcatctatcctctatctgtatcaagctcactgcggatcctgctgtaaaactggtgggtagctgggctgtccattaccaccacagctacatcttctgtttctttgaatagaaagcaccacagtgttttgcacttgcctccagtaaagtgccctgggaagggagctgggcagtgtttgtggacgagagactgtaacgatggctaataaaagctgcgggtctaaaaaaaaa

SEQ ID NO: 6192 - DNA, 198 bp, Homo sapiens
gcgttttgtgactaaacagagaaatttgtgtagatcaacttagcagctgtctaaagtaccaaaataatagatttttcactgttgataatttaaaataaaatgtccatttgtatatcttatgatacagaattaatggattgcttcaaatgtttttcagaatatgtttttaaatagtactgatttcattaagatgttttg

SEQ ID NO: 6193 - DNA, 145 bp, Homo sapiens
gcttaaggcttgattgaagattaaataagctaataaatgaaaataactgacacaataccggacaaacaggagcattcaataaaatatgtattttagatggtatacgcaattaatcaaggcagtctgtttacaaagaaagaaatca

SEQ ID NO: 6194 - DNA, 1356 bp, Homo sapiens
gccagagcggcgcggcctggaagaggccagggcccgggggaggcgacggcagcggcggcggctggggcagcccgggcagcccgagccccgcagcctgggcctgtgctcggcgccatgagcggcggcgggccttcgggaggcggccctgggggctcgggcagggcgcggactagctcgttcgcggagcccggcggcggaggcggaggaggcggcggcggccccggaggctcggcctccggcccaggcggcaccggcggcggaaaggcatctgtcggggccatgggtgggggcgtcggggcctcgagctccgggggtggacccggcggcagcggcggaggaggcagcggaggccccggcgcaggcactagcttcccgccgcccggggtgaagctgggccgtgacagcgggaaggtgaccacagtcgtagccactctaggccaaggcccagagcgctcccaagaagtggcttacacggacatcaaagtgattggcaatggctcatttggggtcgtgtaccaggcacggctggcagagaccagggaactagtcgccatcaagaaggttctccaggacaagaggttcaagaaccgagagctgcagatcatgcgtaagctggaccactgcaatattgtgaggctgagatactttttctactccagtggcgagaagaaagacgagctttacctaaatctggtgctggaatatgtgcccgagacagtgtaccgggtggcccgccacttcaccaaggccaagttgaccatccctatcctctatgtcaaggtgtacatgtaccagctcttccgcagcttggcctacatccactcccagggcgtgtgtcaccgcgacatcaagccccagaacctgctggtggaccctgacactgctgtcctcaagctctgcgattttggcagtgcaaagcagttggtccgaggggagcccaatgtctcctacatctgttctcgctactaccgggccccagagctcatctttggagccactgattacacctcatccatcgatgtttggtcagctggctgtgtactggcagagctcctcttgggccagcccatcttccctggggacagtggggtggaccagctggtggagatcatcaaggtgctgggaacaccaacccgggaacaaatccgagagatgaaccccaactacacggagttcaagttccctcagattaaagctcacccctggacaaaggtgttcaaatctcgaacgccgccagagggcattcgcgctctgctctagcctgctggagtacaccccatcctcaaggctctccccactagaggcctgtgcgcacagcttctttgatgaactgcgatgtctgggaacccagctgcc

SEQ ID NO: 6195 - DNA, 464 bp, Homo sapiens
  misc_feature (1)...(464): n = a,t,c or g
tgggattaaaaaagaaaaaccagtgaagactttaactaaaagtagaatttcaaagtattagaaaccaaaccccaaaattaaatgtgaagatcagtgtctgtactgagctggcccatctggtggacacaggatttgcgttatcgactgcaatgttacccaggattcacgatttctagcatctgtcagggttaagaaaattggattgagtaccaaatacagcagagcaaacccggctttgaggcaagggccccatcaagtagtcatgcagtacttttgttagggttctgggtgcaaatcttcctcgtccctcccaccttctcctgggcctccttgtaaacccaaaccgccaggtaccttcaatttttctttcaagaccagggctgtttcttaatgttggtaaattggtcaaggaaatgggtgagccactgcttgctctgcacatcgtcctcagagtgctcngtttt

SEQ ID NO: 6196 - DNA, 372 bp, Homo sapiens
tacggcagctttagggaggtgctctgagacccgaaactagactcgactttaacagacacagacgaccctgaagatggaaatgttttcttccaaattgtgctgcacgtttttggcgagacatgggggctgtgcggcgtcccctccctggcgcccacctgtgccctgcaactggcctgcactgtggtgatctcgcttggcccccacctgattcccgacatacagcagaggaagcttaggctcaggtggaacagcctcaactgattctgtccctgaacttccgtacacagccctggagtcgtcttagagccatgatttatttaactgttctttcattttacagaacataaaatgtattgtttccaacttttttcc

SEQ ID NO: 6197 - DNA, 513 bp, Homo sapiens
ttgttttactttagaaactttattgaggacaaaagtgggcggctcccagtcccatgggcagaccgacaataaataagggctaaaaggaagaagtacggcagggcaggagtggttgtctcatcatggagagccctggggggcagcagaaccaactggaatgaaacacagggcatcctgccattcgagtaatgtagccacagggttggtgcagacccgggtggggcctgagggaggggctcggctggtgtaaaaggcacactcatcgtccagacgagcctcgtggaagcagtggatggcggttaaacacgatttgaggcgctccctcagggctagggttcgaggggccagattgctgaggcctgcctggcctgctgggggtctcaaagactggagtgagcagataggggggctggcacaaagcgggtgttgggaagagaagatcaggctggtggttgctggagcccactgactgcagcagggtggtagactggactctagaattctatgttccag

SEQ ID NO: 6198 - DNA, 363 bp, Homo sapiens
gcgtgttctgcctgctgccgcctacctgcagggagacgcctgagctgggaaggttctgagggttggcagggtgctctgctgtgctctttgggaggatccccttggctgttctgcatgcccagggccgtgctctccgtggaaatctatgttggagacgacaggctccggttccggctacaccagcctgacttccgctggacagtgccattttctgcctctgttaacaccgtggtgaagcgccttacgtaaagcaacagattttttgttttaagatgcactataattactcttttcagaaccaataatattaacccagtgaagtcaaaactgaattgttttataaactgactatggagctggtgt

SEQ ID NO: 6199 - DNA, 908 bp, Homo sapiens
ctcaattatttataaaactttaatgagggagaggccctaactcttcctcagctctaccaactactgaaaggaaaagctggtgctggggagccctccacaccactgactgatgaatttcagcacgtcctggcacactgggctgtgggaggtcttgatggccataaggaatttattccagttgtccttgttagcagccttccctggccgcttaaattcaattttgttcctcagaatggggtatcctgtaataaggcagggcagggctcgagcaccagtgctcgctgccactagggaggcctcgtaggcgccacgctcatcccgaggcagaacctgctccagccgctggtccatggagactgtaagcacccagtctcgaacctcttctctctcagcctccggtacatgctgcttagctgggagtggcacctcaaagggaatgtctgtatcctgaaaatcagagtggtcaaggccatctagagtcccttcctcgattgcatcggtcaggtccaaaaagcgattgaggaagatgaatgccatgttatcccagccaactgccttggcagcaatgcctgcttcatagaaggctttgtctacaggtagtagctgggtgtgacgcaagagtgaaacagaaagcctggcagccacggtttccagctgtttgacactctgggctgcagagcgcgtggcatagtaatgagcgatcagcagcatcgtcttgaactcctcatgggctggagagtttgcctcactggacttcaccaggttttcacacaggttgaagaggacatctcgaagatcagcccagctatgataggcctcggcacagttggttccaggagagctcaccatgtcagtgaagatccttttgtagatattgaagttctgtgggttagcaggggctccgtgct

SEQ ID NO: 6200 - DNA, 407 bp, Homo sapiens
  misc_feature (1)...(407): n = a,t,c or g
cttttctcccctctctctgccgaggcagaagcacctcatctctctgaatggaattttgtccttactaatcttttccgtggattgtaccactccaatttttgtgtgtacaacctgcaacattgccctgtactattaaatgttaaccgtgttgttgttctctgcttccttagtagtagtcatccctgtttagtaagctcatttattttacagatttttactgacttcataggatagtgccaggggactttaccaagtgctggggaaacatgagtaagacagcacttagccttgatgaacttacagttngtggggaggttgtagggaatgacagtatttccagtgcggttttggtaatgatgggnaaaggnggtgttgttaggagacaatgggtnagggagagagccttc

SEQ ID NO: 6201 - DNA, 209 bp, Homo sapiens
caccagcgtctccttcgggtaccagctggacctgcccaaggccaacctcctcttcaaaggctctgtggatagcaactggttcgtgggtgccacgctggagaagaagctcccacccctgcccctgacactggcccttggggccttcctgaatcaccgcaagaacaagtttcagtgtggctttggcctcaccatcggctgagccctcctgg

SEQ ID NO: 6202 - DNA, 286 bp, Homo sapiens
gatatgtaaaataataaataataatagcaatgaatagcttctgtttattggactaccctactatgtttcaatcgcaatataatatcctatttcctattaattcaactacttcatgaaatgtaagtgttgtcccctatttttcaaatgaggaaaccaaggctctaagaagttaagtaatttgtccaagattgcatagctaatagaaaacccaggatttgatccccaatctgcctaacaccaaagtcttccttaacccattcttcagatgattacaaatacagtgttt

SEQ ID NO: 6203 - DNA, 368 bp, Homo sapiens
caaaatgaaacattcattgaaaagttttggtgaagaagaagttaaaatgatgacttagggttgtatgtcagatattttaataatgttggcagttcctagattctacagtctttctcaaaactaagaggtttatccctaaggcaattttcttctctttttttactaccaaaaatgtttattctatcggcaggtttccagtgactagaaaaatttccttctttacaactctgaaatcgtagctcaaatcattttctaacagagtgaaagtaaaaacattattagttgatgtcagcaccagcagaaaatctcttaaaactggacatttctttaaaaaaaaaaaaaaagtcgacgccgcgaatttagtatat

SEQ ID NO: 6204 - DNA, 260 bp, Homo sapiens
cgtcgacgtgcattgcacgagaaagtgcccgtccatctgcagaccctggagcttgctatagggtggtgattctcctggttctgtgaagggcttagcctgaaggataaaaaggtgtggtctggttgggcttggattggaactcgggccctcagtgagcttgtagggcacctagtaacattgcacagtgtcacaggtgtcttttcataaggtgcaccacgtggggcctggcatgtgggcagagctcaataggtggtcgacgc

SEQ ID NO: 6205 - DNA, 557 bp, Homo sapiens
  misc_feature (1)...(557): n = a,t,c or g
tgaaaaagcaaggaaatatgacacttccaaaggaacacaataattctctggcaacagatcacaatcaaaaagaaatttatgaaatcctggaaaaagaattcaaaatgttgatattaaagaagctcaatgagatacaagaaaattctgaaaaccagtacaaagaaatcagaaaaacaattcaggatatgaatgagaaatttaccaaagagagatataaaaaagaaccaaacagaaattctgtaatggaagaattcattgaatgaaatacaaaatacatttgaaagcttcaacaatagactagatcaagcaaaagagaagatctcaaaacttgaagacaggtcctatgaaataacccaagcagtcaaaaagaagaaaaataagaaagaattaacaaagcctttgtgatatatgggacaacataaagtgaccaaatacacatattattggtttcccagatggcaaagagggaagggaaggttagaaaaatctatttgatggaattaatagacnaaaacttcccaagtctaacgagatttagacatccagatactggaggg

SEQ ID NO: 6206 - DNA, 404 bp, Homo sapiens
gaaggattgttacagttggggtaccaggtgggttgggaaggaagggaagtggtgcatgaaactgagatttaaatttattttaaaataaatccatgttgtcccacagcataggattagtgggaagaaatgggctttggaatgagacagttgtgagttccaaccccaacccaacaccagagttctgtgagtctgagctggttattgagtctgagtcacgatttcttcatgtatcaaatggataacattgagataacattctgtagccactgccaagaagtcacaaaattgtaatgttataattcttgaatggaaccttgggaggattattccagtcccaggtttttaacttcttttggctgatgggcctctttgataatcagatgggaagctttagaccactttct

SEQ ID NO: 6207 - DNA, 372 bp, Homo sapiens
tcggtacgaggactgagaagaaagagtaaaaacaaagaaaaaccccaacatcctgaatcaggtgcattagagttaatgaagaatgtaaggaccaataacttagcccagtccccactgaaagttcagagtggatgcattggaagatttctcctttcttacaggtcgtgtcctgcaactgaaaggccctgggagagagagccgtgagggcatggcagtgaggatggcagtgtggtggaaagggggagttttcaatcagacagccatgagctcaaatagctagttactatttactaactagctctgtgcacttgagcacttactctctttgacctttagtttcaccagctaagatgcctctctactttatagggt

SEQ ID NO: 6208 - DNA, 890 bp, Homo sapiens
gaaagccatcttccaggagccctgttttttggagctgaactgcacagattatagctgctattgtacttaaataagggagaggaaaagaaggttctcaggcacagactttctatttttctcaagccaaaccagtttaaaatgtctagcagaatgaactgtatttccatttcttcatgtctacctgccttccccccacaccctaaagttgtacttgtttctagcaaactagaaggaaaagataggaaagcctggcactactaacctcacctctcatacacctctttgaaggccccagctcttttgttcaggcctctcttctcccctagactcactcagcttggtatccatcatcttgagcattcttcagtagattcatctagggttcagattccagactctcagctgaagacagggagccaatttcccccaggtccctgcaggtaatccagggaccccatagggagaacaggctgactggggcattaggaatgtttgtacctctctgcttccctggcagcctggggaagggtgcagggctcagtgcgctaaaccatggtaaacatcttcaatagaactaccctagaatttagtgagtgtgagactgagatattgctcagaataaatttattccatagccatttaggattgcatgttctggaccaaccttgtccagtatgttttctgtttgagctttttcattcttttgttaagccacaagttgagaatttggccctgctgggatccatgtaggtggggcactagcttgctcttttggccaaggccttcaataaaatgaattcgggtctccccattaacctgtcctctagccccaaaacccctggtttagaaccggtggcaaagggaagaacctttgaaggtcaagacccaac

SEQ ID NO: 6209 - DNA, 427 bp, Homo sapiens
cagtgctgggcctgcccagggcctgtggtcactgctgagggactgcatccatcccttccctcacccactggcaatagcacccccttgggttccagcaaggagacccggaagcaggagaaggagcggcagaaacaggagaaggagcggcagaaacaggagaaggagcgggagaaggagcggcagaagcaggagaaagagcgagagaagcaggaaaagggagcgagtgaatgcaggagaaggagcggcagaagcaggagaagaaggctcaaggccggaagctttcgctgcgtcgaaaggcagatgggcccccaggcccccatgatggtggggacaggccctcagccgaggcccggcaggacgcttacttctgacctctgcctggggctggactgcatggccccctctttcctcagccaagacaggctgg

SEQ ID NO: 6210 - DNA, 440 bp, Homo sapiens
  misc_feature (1)...(440): n = a,t,c or g
aaaaatatagaaaacatgagaatgagaacggttgtgtcacatattggtctatttttgaaagggagaagagtaaaagaaggagaaagagaaaaggttatcttaagccagtcaggctgggttagttatagttgagtccagaagaagggagagcatgcattatttccacaggttaggtagatgtctgggattaaaattattttaatctcaagtgttaataaaaaacccaaatttcaaaatacatatgggaataccctacacaaacatcagccccatgggtttcccttggcaaatgacaatatcccaggggcntaggcagccctggttttattaggaactttaaaggtgctggggngggtcaggggtgcngaggacctgcttcaccctctgctgcccttaccaagggggccaggnaccgggctgntggaggtnttcgccggccg

SEQ ID NO: 6211 - DNA, 427 bp, Homo sapiens
gattagagcaaccatcaactaggcgtctccagattaaccatcaactaggagtctccagattagagcagccatcaactaggagctccagtatagagcaaccatcaactaggagtcggattcctgtctctgagggataaggaaaaacatggaaactgtttactacagcgggcactggagcaggaaacgaggcagcagctcttttcctggcaaccaacggtgcccatgtcaaccacagaaacaagtggggagaaaccccgttgcacacagcgtgtcggcatggcctggccaacctcacagcagagtcctgcagcaaggcgccaacccaaacctgcagacggaggaagctctgcctctgccaaaggaggccgcatccctgaccagcttggcggacagcgtccatctgcagacgccactgcacatggcgatc

SEQ ID NO: 6212 - DNA, 1548 bp, Homo sapiens
actccacgcctgatgaacccgacgtccatttctccaagaaattcctgaacgtcttcatgagtggccgctcccgctcctccagtgctgagtccttcgggctgttctcctgcatcatcaacggggaggagcaggagcagacccaccgggccatattcaggtttgtgcctcgacacgaagacgaacttgagctggaagtggatgaccctctgctagtggagctccaggctgaagactactggtacgaggcctacaacatgcgcactgggtgcccggggtgtctttcctgcctattacgccatcgaggtcaccaaggagcccgagcacatgggcagccctggccaaaaacagtgactgggtggaccagttccgggtgaagttcctgggctcagtccagggttccctatcacaagggcaatgacgtcctctgtgctgctatgcaaaagattgccaccacccgccgggttcaccgttgcactttaacccgccctccagctgtgtcctggagatcagcgtgcggggtgtgaagataggcgtcaaggccgatgactcccaggaggccaaggggaataaatgtagccactttttccagttaaaaaacatctctttctgcggatatcatccaaagaacaacaagtactttgggttcatcaccaagcaccccgccgaccaccggtttgccctgccacgtctttgtgtctgaagactccaccaaagccctggcagagtccgtggggagagcattccagcagttctacaagcagtttgtggagtacacctgccccacagaagatatctacctggagtagctgtgcagccccgccctctgcgtcccccagccctcaggccagtgccaggacagctggctgctgacaggatgtggcactgcttgaggaggggcacctgccaccgccagaggacaaggaagtgggggccgctggcccagggtaggggagggtggggcaatggggagaggcaaatgcagtttattgtaatatatgggattagattcatctatggagggcagagtgggctgcctggggattgggagggacagggcttggggagcaggtctctggcagagaaggatgtccgttccaggagcacacggccctgccccatcctgggccttacctcccctgccagggctcgggcgctgtggctcctgccttgatgaagcccgtgtcctgccttgatgaagcctgtgccacctgcaagtgcccgccctgcccctgccccaacccccaccgaagagccctgagctcaggctgagcccagccacctcccaaggactttccagtgaggaaatggcaacacgtggaagtgaagtccctgttctcagctctgtcatctgcggggcttctgggtggctcctgccactgacctcaccggcatgctagcctgtggcaggcctaggacctcagcggggaggaggagctgccgcaaggccctgtcccagcagaagagggaggcttcctgactgacacaggccagccccatcttggtcctgtcaccctggccccaactattaaagtgccatttcctgtctgg

SEQ ID NO: 6213 - DNA, 126 bp, Homo sapiens
acaatacctgtagggtaaattccctgtgaagtgggattgcctacatcagtgggaaaatacatttcaaattttgataaacatcacccaaattcttctctggaaaggtcactgattgtttgttttttc

SEQ ID NO: 6214 - DNA, 384 bp, Homo sapiens
  misc_feature (1)...(384): n = a,t,c or g
gtaacccaaatgttcagaaccccagcactgtgctctttcttgtaggtcagattatgcacatcagagtaccatgtgatgaccatatattgatttctgaatagtcctcatctttctctttttgtcctttgctatgctagagttgaaagatctagggctcggcacggntgggcttatgcctgcaatcccagncactttggggaaggctgtgggtggggcgggatcgctttaaggattcagttagtttggaggacttaggcctggggccaacatgggtggaaatggccgttcttttnacttaaaaatattaaaaactaggccaggggcatagtgggccatatgtcntgttaatcttcaggagganttgggggagggntgtgggtgggg

SEQ ID NO: 6215 - DNA, 431 bp, Homo sapiens
gccggccgcgtcgacgcagagagtgaggatgcaccatgagggaattttctgagtaatggaagcaactgagttacatcttaagcaccaaaatgtggaaaagaagttactcaatttttgaaggaagacttcaaagttacatttaaagtactgagaatgcattttgacctttcatgcttcatgacaattactgtacataattcattggatgttctatgataatcttggggcaatcatgaataattttgtgtcgctattaaatgagtgacttcacacagttcttgctgcatcttgtaaagtttgattctatcactttatttatctaagaaatctttgaggacaaccccgtcctcaaagttccccccgggaactgtgctaagtgctggtgatgcagatgcacaagtcagatctgtgggaggaatgacttggtcgac

SEQ ID NO: 6216 - DNA, 1168 bp, Homo sapiens
gggacgatgtcgcatgacaaccgacgttggagtttggaggtgcttgccttagagcaagggaaacagctctcattcaaaggaactagaagcctctccctcagtggtagggagacagccaggagcggttttctgggaactgtgggatgtgcccttgggggcccgagaaaacagaaggaagatgctccagaccagtaactacagcctggtgctctctctgcagttcctgctgctgtcctatgacctctttgtcaattccttctcagaactgctccaaaagactcctgtcatccagcttgtgctcttcatcatccagggatattgcagtcctctttcaacatcatcatcattttcctcatgttcttcaacaccttcgtcttccaggctggcctgggtcaacctcctattccataagttcaaaggggaccatcatcctgacagctgtgtactttgccctcagcatctcccttcatgtctgggtcatgaacttacgctggaaaaactccaacagcttcatatggacagatggacttcaaatgctgtttgtattccagagactagcagcagtgttgtactgctacttctataaacggacagccgtaagactaggcgatcctcacttctaccaggactctttgtggctgcgcaaggagttcatgcaagttcgaaggtgacctcttgtcacactgatggatacttttccttcctgatagaagccacatttgctgctttgcagggagagttggccctatgcatgggcaaacagctggactttccaaggaaggttcagactagctgtgttcagcattcaagaaggaagatcctccctcttgcacaattagagtgtccccatcggtctccagtgcggcatcccttccttgccttctacctctgttccaccccctttccttcctttcctctctgtaccattcattctccctgaccggcctttcttgccgagggttctgtggctcttacccttgtgaagcttttcctttagcctgggacagaaggacctcccagcccccaaaggatctcccagtgaccaaaggatgcgaagagtgatagttacgtgctcctgactgatcacaccgcagacatttagatttttatacccaaggcactttaaaaaaatgttttataaatagagaataaattgaattcttgttcc

SEQ ID NO: 6217 - DNA, 525 bp, Homo sapiens
atagttaacaacaacgtattgtattcttgaaaaaaaggagtgatataggggtaccagagatgggcaggatgattgaagatcacagtccagccttgcaggaccccgggggacagggcgggcactcagaggtggacctccagcaggtagcgcaggcgacactggctctcctggtagatgaggtactcgctctgggagaatgtggagctgctgaactctgggcagggcacaggctggccctggggcaccaccacttgctggccatccagctccaactcagtgtcctgggtcggatcaggctcggtgtggcctcgggcaatgacactgtcgaagccaggaggtgggctcttcaagctggggttgtccgtgttgatatggtgctctctgcccagggccacctcacccaggaacatgtagccgacatggtgggccccacacttcatgccaataacatatccagctgacttgctgttctctgaggcaaagtagatgcccttgccaacacgcccaccagaatgtggcatgatg

SEQ ID NO: 6218 - DNA, 396 bp, Homo sapiens
  misc_feature (1)...(396): n = a,t,c or g
ggtcagtagcataatgtattttcttcactggcatttagcatacttttaacctgtggtagcccataactctttactgtgtcagggccgggttccgtgcacctcctttatcagcctacaacactacgatgcccccagcctttccagtgccgcctcttcctgcccagcccagttcctggcccagaggccatggcagtttgcatggaannnnnnagaatngnctaatgtttgngantnanagnnccgntntgaatgaattagtgaggtgtttctttttangtantgtnanaaacnngnncttgntntntgnangcatnnnnntnnnntccnnccnanntctttntnnnagangnctctnctntnncnntntntatnnnntctcgncnctnngnctnccat

SEQ ID NO: 6219 - DNA, 238 bp, Homo sapiens
  misc_feature (1)...(238): n = a,t,c or g
cagtcagttgagctctgtgtgccaggcgctcgcgagnggggtagctcttctagtagtgctcggcgtcagacatggcggaggcgatggatttgggcaaagaccccaacgggcccacccattcctcgactctgttcgtgagggacgacggcagctccatgtccttctacgtgcggcccagcccggccaagcgtcggctgtcgacgctcatcctgcacggcggcggcaccgtgtcccagtt

SEQ ID NO: 6220 - DNA, 1347 bp, Homo sapiens
tttttttttactaatttaacatattatgatcagaaaacatagtactgcctatacatgtatatatatatgtgtacatataggcatatatatatataagcagtactatatattatgtatatatataggtagtactacacatatatatatatatttcccttttttggtaaagacttttgtatagttttcctgatgccctaatttgttccatttaatttctataaatattcaaaggacatggaataggatctgttaaatcaacttattaatcccattttaaatatctttcatatgcttatttttctgcttgatcagcaaataatgaactaatcactttcaaactgctagtttctatacattcaattatctgagatttctattggcttttacattgtttgatattatacgttttcaaataaatattcatataaatgtctataggtcttatagttctgttgtaggctacacatgaacagcaaccaaaaagaggaaaaatcttctttgtccccatgctttttccttgaattctgcacttttcatattaacattagcccttgctttgtgatttgcctttgctttattttaccctgtcttaatcttaaccttcccaaatatttccatacagggtgcacctctcctagacaacacacagcggagagtgtgcttcccatgtattcaatcttcgtctcttgaaaggagaggtgccctcattacatttcactgtgacacaggatacccttggttttctgtcacaatgtgtcttgctgctgtctcctctgataagcaccacactttctttcccttctctgcccttagacagcagaaaggtatacatacccatttatagttctgaagctgttcacgtttttaagcttaactttgctattcatttcaagaataaaacttgacatttttacactgagagaaaaattcttgttttattctaaggggagaatctcaatactcaagataaagaaattcacacattttattttctacactcaacagcaacacaatgggaagagtcttggatttcaaatgctattgctcagactgtacatttcctaagaactgacgtgtgcactggctcctaaccacatgcacaacagcgaagtcttgactgtttctaaatgacccgattccattaacagtcctgttacactgcaactgctgttcttggacttattacagggtccataggctctcaatcacaaatgtttggaaaacaaaaaatcccaaacccaattttttttccctaaacttaatgccaaaagtaatttagcaacataactgacctgaactgatgtaaagctatttacagtctcatttgatcccacttagatatatttt

SEQ ID NO: 6221 - DNA, 803 bp, Homo sapiens
ttttttttttttaaaacaaaatacattattttatttcaattccatgattttaaaatgctttttatttttttctttttgccccttttacaggggagacgtaaagctgtcccagttatcaaaaaattcaaatctccttttcttctgtggactggctgtcaatgagctttcatccagggtgtctcccatgttctgggaactacttccagatgttcctgaagcacttcctgggtcaaaggactctgctgcttccaggagctccatatcacttccttctttctcaaaggacttctggaataggtcgtagatcttctgctgctttgggtccttgtagaggtaatcagtggattctgtcatttctgaaaaattggtctcagaaagcccggcttctgccagaactttaatcttctcttgaatcaggggccaaaggtagtcatcagctgtgccctttgccacgaggtagtgaatgcccacggagctggtctgtccaatgcggtgcacacggtcctcagcctggatcagcacccctgggttccaaaacagctcagcaaacaccaccaggtcagccgaggagaaggtgaggcccatattggcagcggtgatggacagcacggccacagcatgcctctccgacagttggaactgctggcacaggtcctcccgctcagctgatgaggtggagccatcgatgcggatgtgctgcacgtgctttctctcaagctcttgcgtaattgcgtccaggaccaccttatggtgtgcaaatactaaaaacttctctcttccactttccagtaggtcctcgtgcc

SEQ ID NO: 6222 - DNA, 486 bp, Homo sapiens
  misc_feature (1)...(486): n = a,t,c or g
gaaaataactcaccaagcttattaattagagaacattggttccaagtcgttcaaataattctgaacatgaccaggagtcctgctgcccatccttacagatgcttatcctgtcaccctagttgctcttcttaccttacttcaacacagggccttccagcctgaggtgaaaggagaattttaatacttagcattttccaacctggatagatctctctctgtttgaggccaacataaaaagggattttttaagaactccatgtaatgtattttttgtatttttgtgcagctaaccttctccctagtctgcccaaagcacgctataccaggactgcaaaaagaaagaatggctttttcagcttttgactagcaaggaccatatcagaattttttagtcaagacgatattgcttttcaaagccaaaataccgtaggancaaaggatattttaacatcctttaatttgcatcagagtatcaaaatcacagag

SEQ ID NO: 6223 - DNA, 460 bp, Homo sapiens
taaaaattccaaatttctctaaatactaaatgttctctactaaaaattatttgaaattatcttttgtgggtttgcagtgaatggcgtacttgtcataaataactgttttctttgagaattcatccttgcaacaaagataactataaaggtactctattaactgaaacaagacttggggtttttcttttaggtatttctgctattgtttcattccaaacaataattactataaaatttgaatttgttttcacctctctggctctgatgaaggtacagttaaactccacacaacaggctaaggtatttaataatttaggaaaagttccatttaataatagaatgaacagcattatttcattaatgaaacacaaagattgtgttgctgttggctattcctttcaatgaaaggaaaggtagtgggaaaagccatatgacagaaaatgctgtattgggtttctag

SEQ ID NO: 6224 - DNA, 342 bp, Homo sapiens
gggaagacgttccgctttgaaatgcagcgggatttggtgagtttcccgctgtctccagcggtgcgggtgaagctggtgtctgcggggttccagactgctgaggaactcctagaggtgaaaccctccgagcttagcaaaggtaacgactcctgatggcaagctgaggcacaccggccgccgtcagcgccgccttcagtcttcgttctctcgcctcggccttcagcccagtctccgttagattctgcttcctcccacgtccatgtttacagcgtgaaagagctcctcgactccacttacaagttgtctgaatggttagggagaactgtgggtcgtgaaaacatt

SEQ ID NO: 6225 - DNA, 393 bp, Homo sapiens
acacttttcacagtagtacgcattacttccttctagaacttctcctctaacaaattggtccaaagaaatttccaaactctgacaagaagtcactcctagattgagagccatgaaagcttcttcacgctcatatctgtgaggacagtctttacagatcttctgatcagagtagatgccctgaaatgtattcttaaaaatttggtctctccccattttcttgaggtattcatccatctgatcaatgagactagtaaagaattcatatgcatcctgctgttctctcacataaagttctttattccacatcttgaaaatcttccaaaaattctcaggtacatagtactgcagcttgctttccattaaatgtccaaagagagactgcacttggtaaaa

SEQ ID NO: 6226 - DNA, 1171 bp, Homo sapiens
gcctgcggaggcggtcctatgacgtgaataaccctataccttccaatttgaaatcagaagcaaaaaaggctgccaaaatattaagagaattcacagaaataacttccagaaatggacctgataagatcattcctgctcacgtaattgcgaaggctaaaggccttgcaattctgtctgtgatcaaagccgggttcctggtgactgccagaggaggcagcgggattgtagtggcgcgccttccagatggaaaatggtctgcaccctcagccattgggatagctggccttggtggaggatttgaaataggaattgaggtatcagacttggtgataattctgaattatgaccgtgctgtagaagcttttgcaaaaggcggaaatctgaccctcggagggaacttgactgtggcggttgggcccttgggaaggaacttggaaggaaacgtggccctgagaagctccgctgccgtcttcacgtactgcaagtcaaggggactctttgcaggcgtgtctttagaagggagctgtttgattgaaaggaaagaaactaatagaaaattttattgtcaagatatccgagcttatgacattttatttggagatacaccgcggcctgctcaagccgaagatctttatgaaattcttgattcctttactgaaaagtatgaaaatgaaggacaacgaatcaatgcaagaaaagcagcaagggagcagaggaagtcttctgctaaagaattacctccaaagccattgtcaagaccacagcagtcatctgcaccagtccagctgaactctggctctcaaagcaatttgaatcaacccatagaagtgacagcgctgtattcatttgaaggacagcagcctggggatttgaattttcaagctggagacagaatcacagttatatcaaaaacagattcacattttgattggtgggaaggaaaacttcgaggtcaaactggcatttttccagccaactacgtaaccatgaattaaagcgtatactattttcttctttgagaattacaaaaaaattatttctacactgacaggatttactagttaagcaatgtttaatataaattttaaaaaacttctgttctacaaaatttccattccgtatgtaaaagattttgtttttctatataaaaagagctgactgacatatcttt

SEQ ID NO: 6227 - DNA, 2103 bp, Homo sapiens
ccaggtggtgaatgaggagcctcagagggacaggctgccgcaggagccaggccgggagcaggtggtggaagacagacctgtaggtggaagaggcttcgggggagccggagaactgggccagaccccacaggtgcaggctgccctgttagtgagccaggaaaatccagagatggagggccctgagcgagaccagcttgtcatccccgacggacaggaggaggagcaggaagctgccggggaagggagaaaccagcagaaactgagaggagaagatgactacaacatggatgaaaatgaagcagaatctgagacagacaagcaagcagccctggcagggaatgacagaaacatagatgtttttaatgttgaagatcagaaaagagacaccataaatttacttgatcagcgtgaaaagcggaatcatacactctgaattgaactggaatcacatatttcacaacagggccgaagagatgactataaaatgttcatgagggactgaatactgaaaactgtgaaatgtactaaataaaatgtacatctgaagatgattattgtgaaattttagtatgcactttgtgtaggaaaaaatggaatggtcttttaaacagcttttggggggtactttggaagtgtctaataaggtgtcacaatttttggtagtaggtatttcgtgagaagttcaacaccaaaactggaacatagttctccttcaagtgttggcgacagcggggcttcctgattctggaatataactttgtgtaaattaacagccacctatagaagagtccatctgctgtgaaggagagacagagaactctgggttccgtcgtcctgtccacgtgctgtaccaagtgctggtgccagcctgttacctgttctcactgaaaagtctggctaatgctcttgtgtagtcacttctgattctgacaatcaatcaatcaatggcctagagcactgactgttaacacaaacgtcactagcaaagtagcaacagctttaagtctaaatacaaagctgttctgtgtgagaattttttaaaaggctacttgtataataacccttgtcatttttaatgtacaaaacgctattaagtggcttagaatttgaacatttgtggtctttatttactttgcttcgtgtgtgggcaaagcaacatcttccctaaatatatattaccaagaaaagcaagaagcagattaggtttttgacaaaacaaacaggccaaaagggggctgacctggagcagagcatggtgagaggcaaggcatgagagggcaagtttgttgtggacagatctgtgcctactttattactggagtaaaagaaaacaaagttcattgatgtcgaaggatatatacagtgttagaaattaggactgtttagaaaaacaggaatacaatggttgtttttatcatagtgtacacatttagcttgtggtaaatgactcacaaaactgattttaaaatcaagttaatgtgaattttgaaaattactacttaatcctaattcacaataacaatggcattaaggtttgacttgagttggttcttagtattatttatggtaaataggctcttaccacttgcaaataactggccacatcattaatgactgacttcccagtaaggctctctaaggggtaagtaggaggatccacaggatttgagatgctaaggccccagagatcgtttgatccaaccctcttattttcagaggggaaaatggggcctagaagttacagagcatctagctggtgcgctggcacccctggcctcacacagactcccgagtagctgggactacaggcacacagtcactgaagcaggccctgtttgcaattcacgttgccacctccaacttaaacattcttcatatgtgatgtccttagtcactaaggttaaactttcccacccagaaaaggcaacttagataaaatcttagagtactttcatactcttctaagtcctcttccagcctcactttgagtcctccttggggttgatgataggaattttctcttgctttctcaataaagtctctattcatctcatgtttaatttgtacgcatagaattgctgagaaataaaatgttctgttcaa

SEQ ID NO: 6228 - DNA, 467 bp, Homo sapiens
gctttataagctggtaaaccaagaatctagggagtggccaaactaaatataatttctttaaaaaagaaagaaaaaggaaaaatccaaaatatctcagtatcatctgtctgaagcattgtgtgttctcattcgggtggtaacaatgtatgtgtaatatttttttcttagtgattttgacagtttaaatgtttaacaacttaaagcattaaaaatgcttattaataactttggtcatttaaaaaatgctacaatgacttcctattaaaggttcaatatttacacattcttattggttgatattaccacatgaaatattgccagaccaagatacctaaactcatgatgtctgtggtgctgtaaaatttatactaaaatgtggactattttgaaattataaccatttttgatgccctgaatcttgaggtgacttattttgcatagaggatatggatagaccaacagtaagg

SEQ ID NO: 6229 - DNA, 391 bp, Homo sapiens
tttgagacagagcaactctgtctcaaaaagaaaaaaaaatatgctattcgtatacttagaaaattatgacatacatgcttcaccctgagtacctcattattattcagatactcattttaatattttacaatttctaaatgtttattttcacagaaggtataaattaaaagattaagaaaaatcctgccaagatcacggcttaggcacacacagagagcagttgagcgtctgccacacctgatggtcttgagccgtgatggccttaactcctgagccccccagtgcccctgctccgtaattgatgctgtccactaaggcttgttaggccctaaaggagggaagtgtaagcctaagtgtggtatctggtaggaaacccactctgggttgggtg

SEQ ID NO: 6230 - DNA, 481 bp, Homo sapiens
ccatgggttggcagctagggctctcggacttcactacactctccaggacaaaaccccacgagaacaaatgtgttcccctggtagctgatctaccacaggacagtaggcagagacaaaagcaagcactgaaatgtcctcggtttacccctttcctgaaggccctgtccaactcttaccaatggaaaggacactgggacactggctccaggctgtacttcctcaagtttctgtgctcctgacactttctggaaatagaaagggtctttaccttcacgtgggtgactcagaactggagaagcccctccatcttgacctgaaatcaaagcccaagacaccaaagccagaagagcagattctaactgacagcttgggggtgccctgggatcactaacagcttgggggtgaagggcacctttaggcccaacaacgttggccagccaaaacaaccaaaacaaccaggaaccacaccattgatttccat

SEQ ID NO: 6231 - DNA, 131 bp, Homo sapiens
ggggcggttgactccatccgtgtgcgggcctgagccgagcctctccgcagcgcaggactgcccccgagcggggagctgcacttctgggtgaaggaggctcgggacctcctgccgctgcgggcaggatccct

SEQ ID NO: 6232 - DNA, 685 bp, Homo sapiens
acctttcaaaatcaatccagtgtgaaatattggttgcctgagaggtcagtcatacagaattgtgtgctttaatatttgaaatgttatttgttttcagcctggtgcagaaatccttttccttcagttatattttagaaccactgtgtgagtacattactttttaggttttgggcctcatggacattcttagcaacttgttttcacagccctttctttgatgttcatttgaaccatagcgttgttgatattcagagtattttgacctacaaacataaacattttatatggttcaaactaacagttaatttgcttcagtttaccaggcatggatgagtacagtttcaatgctaatagcaaatattttacttattttactttcctgagcactttacatgttttcactgttttcctcctcacatcaacaaccccaatggaattttatctctcatttataaataaagaaataggtgtaaagagataaagtaatatgcccaagtaagtgggaaactcaggatttgaacccaactcctcttgctccagagtctacacgctggaacaacaatgctattccgccctctacccttgatctagtccccttcttgggccatctgggtaggttttgttaaatttcaagcataggtccttctatgggcctttgaggccctcctttcccggcacagtagag

SEQ ID NO: 6233 - DNA, 413 bp, Homo sapiens
gaccagcatctccatcctcttttgagcacttgcctgcaacacccgcggaatctccagcccagaggttcgaagctcggatagaagatggcaaactgtactatgacaaaagatggtaccacaagagccaggccatctatctggagtcaaaggacaaccagaaactgagctgcgtgatcagttctgtaggagccaatgagatctgggtgaggaagacaagtgacagcaccaagatgaggatctacctgggccagcttcagcgcgggctcttcgtgatccgccggcgctcagctgcttgactttctacagtgctcttctcttgaccctttttctggagtgggttttatttttgttttgtttcgttttctccttaatagaaaaatgttaacttactgggaatagctactctgccttgg

SEQ ID NO: 6234 - DNA, 397 bp, Homo sapiens
aaagatgggcccccatggcccccttctctgcggatgtaggaaacctgatttctgttggtaagatctgtgagtgctttgaaatccgcagtgcttgtgagaatcagaaatactggttgataaaataaatgtttttgtattctttggtcttcgttttttggaaggaaaaaactctggaaacaaagtattctttaacagtgacctggtttaataaattatggcatatccatgcaatggaatattttttaattccttaaaaaaatctgtatattttgataaggaaagatcttctagtgtaattatccattgattaaaaactgtggttgtgtgtgcactaaaaagtacatatgtgtgaatatgtaatggactatgtaaagagatacataaatgttggtatata

SEQ ID NO: 6235 - DNA, 319 bp, Homo sapiens
  misc_feature (1)...(319): n = a,t,c or g
ggtgaggcacacccacatcatgaagggtagttcccttgactcgaaatctactcattnnnnnnnnnnnnnnnnnnnnnnnnnnnnnnnnnnnnnnnnnnnnnnnnnnnnnnnnnnnnnnnnnnnnnnnnnnnnnnnnngttgacacataaaattaaccatgannnnnnnnnnnnnnnnnnnnnnnnnnnnnnnnnnnnnnnnnnnnnnnnnnnnnnnnnnnnnnnnnnnnnnnnnnnnnnnnnnnnnnnnnnnnnnnnnnnnnnnnntgaccctgtctctacaaagtaaatggatcaatcaataaaacgtggtggtgcta

SEQ ID NO: 6236 - DNA, 287 bp, Homo sapiens
cgaggactacggggagccggcgcctgaggagccgcccccggcgccgcggcccagccgtgagcagaagtgtgtgaagtgcaaggaagcgcagcccgttgtggtgatacgagccggatatgccttctgcagggactgtttcaaggccttttacgttcacaagttcatagccatgctgggcaagaaccggctcatctttccaggcgagaaggtgctcttggcgtggtctggggggccttcgtccagctccatggtctggcaggttcttgagggcctgagccaagattctg

SEQ ID NO: 6237 - DNA, 950 bp, Homo sapiens
ccgcttccttggcaccaatggagaggagctgtctttcaaccagacgacagcagccactgtcagcatcccccaggatggctgccggctccggaaaggacagacgaagacccttttcgaatttcagctcttcttcgagcgggatttctgcccctgttgggatgtggcggccactgactttggccagacgaaccaaaagtttgggtttgaactgggccccgtctgcttcagcagctgagagtgtccggggtgggagggaccgtgagggagccccagaatggggtgcatttggtgctgaggctttgaagccaccgtatttttcgttacctgtgactatggagccaatgggatgtgacttcgctcatcacggtcagtcattccttctcctttccagggtgctgggggctggggttccctggcccaagggtccagcctcctcttcaccccattccaggtggcatactgcagtctggctctttctcccctccctccccacccaagcctcacctccccaccccttgaacccccatgcaatgagcttctaactcagagctgatgaacaaaagcccccccacccccaatgcctgcctcctcactcctccgttcggtggccctttcacaccttttgggtgctacccctccccagagttaagcactggatgtctcctgatcccaggctgggacccctatccccaccccctttgatcctttctacttccacggtgaaaggactgaggtcggactacagagggaagagggacttcccttgactgggttgtgtttcttttcctgcctcagccccagctctgcaaatcctctccccctgctgcccacctccccagggctcaccttgccatgcccaggtggtttggggacccaagatgttgggggggtgaatcaggatcctaatggtgctgccctatttatacctgggtctgtattaaaagggaaag

SEQ ID NO: 6238 - DNA, 492 bp, Homo sapiens
ctaaaccaccaagtctcagggctcttttcagtattttcccactcaaagtagactttattccttccaggtatgatacctatacggtgttgcctttgatgggccagtaccttgactctgctgtacactacttccagtgcaaaattccccagttctctctgctagtgtgggctctggatccagctctgttggcttaaggtattcatgcagtcataatgcctcctagacttggctaggaatgggtgtttgctgaaattttttctctcattgtgattttgtagtactttttgaggatgtaaagggattaaaatataggtagccacttttatcccacagagatgtgggacgccctacactcaattataacaaaactgttttgtggttaatttcagaattccattaaaatagtttttgtttctgacctcagtaaactataatatatgactcataccaaagatatttattaattgaggtttgaaaaaatattttaaatat

SEQ ID NO: 6239 - DNA, 618 bp, Homo sapiens
ttcattcgttctcacttttgaccgccctgcttctctagttttctctttccctcccgcttagactgctaattgtcttcttcccctcaccagtgaccccacagctccgtggttccttcggcccagatgccacaacctgctggcataatcttttccggttggcccacggagtataatcttaaaatttgatttcatttccaggcattaaaaatcaagagatttcacatggttacatttctgggttccctctaaaaatggaaagatctggaagtaaagaacccatggttccctcatagcaatcattatctgatactgagtagcagctgtcccctttcaatggggtctgctctttttgtttcaccacagtcctcatgactcgtctgttgcacactcatgccaaagtaaaggtgccctttcctatgaactttgtaacactgtggccttttcttcacacccagcccacgtccctcgatatatatcacctgcctgccccagtaggtctatgagtttgaaactggtttgtcagtccttaagctttatcagcttcatccatttctcagggagtaaagaagaaaagagggaaagcgcctaagtagtgatcttccctctgtgtgttagctg

SEQ ID NO: 6240 - DNA, 369 bp, Homo sapiens
gtccccatttctccagttcctaccgtcagccattttagtgatagtaaactcttaatctagagcaccattcttaaccccaggtacaggtttgtctgaggaacttttaaaaattattgatgctttaactagagattctgatttatttgttctgaaagtaaggccttagcattagtattttttgggaaaagctcctcaggtgacattactctgtagctaaggttggggaactactgatgtgcagtatgggtaggtacaaagaaaagttgtaaattcttgttggtctctacctctgataaaaggaaaggaattacattttactcttgaacaacacagtggcgagggttgccagcccccaccccactgtgcagt

SEQ ID NO: 6241 - DNA, 264 bp, Homo sapiens
  misc_feature (1)...(264): n = a,t,c or g
aaaactagaatttggtccaaactgtggaaaatactaaaaattgaaaaacattgggcaagactagaatctaacaacaggtgtactatagtttttaaaacatagtttttctctctccagtttctcatttttactaaagacaaatcatggtacgactgatttcctttattatacttggcctgattatttgtatacagtgcagcaagnataattanttttttacacaggcttttaaattgactttgatggaactttattccatagaag

SEQ ID NO: 6242 - DNA, 708 bp, Homo sapiens
aacttgaaaattgcttggacttatttatttaatttatgagtgcttttttatttataagctgatttgggttgacacaacatataacaataagtgtacatacaaataaacacatctagacatgtatacacacacacaaacgaagatccaatagcttttaccttggaactctagccatgagatatcaatacaagctcacaggttttacatggttacactttgtttgctccaataggtaatccagtgaaggctgtgaaccaaacatttttaaagcagttccggtggcagtttgatttttaaaggccaaacctcctcagactccaaagacactggagccaaatagcaccaaaggagagcaccatatgctgaccaggcctgacccttcttaggacagcagcaccaaagcctggatacatgcaacgtcatcccgctttcccattcaacagcaaactccagattccaaacaatactggggccaagtattattgcaaaagaatatcaaatgtttcctccttagattatcagggtcaaattcatttcaatggttgaggatgcagccaagtgggaagtcaggtggaataaatggagtgtttcctgtagtggtctcctggctggctcgccaatatatgttactggtggagggtcttgactatgagtcatccaggttcttggcattttgaacaaggaactgtgcatggtggtgtgtgccag

SEQ ID NO: 6243 - DNA, 822 bp, Homo sapiens
tttagcaaagttatacttaagtcaggtgaacttgaaaattgcttaaacttatttactttatttatgagtgctcttttacttgtaagccaatttggtagacacaatgtataacaataggtgtacatacaaataaacacatctagacatgtagacccacacataaacgaagaaccaacagcttggaaccttagccatgagatagcaatacaagcttgttggcatttactttgtctcaatagataatccaatgaaggctgtgaaccaaaattttggctaaagcagtctccatggcagtttgatttttcaagaccaaacctctccagattccaaagaacactggggccaaacagcacccaaggagcatgtcacatgttaacccaggccccctgcttagaacagcagcacaaaaggctgggatacatgcaatgccatcccactttcccattcaaacaggaaactccagattccaaactatactggggctaaacagtattgcaaaccggagagaaaattctaaggggggcttagtactagacctcaaaacctctgccgagagcaccccctttggagaggttgagattcggaggatcctcagggcggtcccctatggggtccaaaagagtgtcagacgtctctgacctttctctgcatgttttccctccagagcctcctatgagctatgagcttgataaggatagccctgaactgtaatgatacataggaactggatgctgggtgggcttttttgtccttagatagttgaataggacaagcaaaaaacttagcataagaaaaggtttaagtcacctgaaacaagtgtga

SEQ ID NO: 6244 - DNA, 545 bp, Homo sapiens
gaggggacagttccgtagatgtcttccattgtgttgtaaggaatacaataagaaggaatgattggcttctccaatactaggtctgtattagggttctccagagagagaaccaataggatatgtatatagatatatgagaagagatttattaggagaattcacataagagattctggtggctgaggagttccacaacagtccatctgcaagccagagactctggggttgcagtagcaaagctcagtccagttcctaaggcctcaaccaaggaagctggtggtgtaactctcagtgggagattgaaagcttcgaggaccctgaggggctgcttagtgtaagtcctggagtacaaaggcccctgagcctgaagttctcatatccaaggaagcagaagaaaagtcttgtcctaactctcagagaccaatccattttctgtatttgctctcttggcttctggccaattgatggtgccacagtgaggtcagatcttccctacctagtccactcagactcacacactaatgtcctctgaaaacatcctccca

SEQ ID NO: 6245 - DNA, 383 bp, Homo sapiens
  misc_feature (1)...(383): n = a,t,c or g
aataccctgggcttggcttccagtggtggcagtcttattttgtgaagagtgatgtctgaagggtctggttggcaaggtggtgtgcattgtgagagggtagggtgtggcgaaaataaggcctggagggaggaaacttttgtatatctggtggtcttatgcctcacacaggtgagatcatcccataaggtgaacattttaccattctaataactaaccctcctgttatgggcccagagttagatccatttagaattgaactccactccaaacaaacaaagcaaggcttctttcacgctctgtcaagtgacaataaataaaataattnaaacagatatccatgaaaccttcacatnaaggacctttttaatatgttagggcaacca

SEQ ID NO: 6246 - DNA, 1573 bp, Homo sapiens
aaggtgagcgactgcaggcaaacccggcgacagcgcagctcgcgtcgaccctggctcctctgcctgccccctcaggcccccgcctccttcaggatgacgctggacgtggggccggaggatgagctgcccgactgggccgccgccaaagagttttaccagaagtacgaccctaaggacgtcatcggcagaggagtgagctctgtggtccgccgttgtgttcatcgagctactggccacgagtttgcggtgaagattatggaagtgacagctgagcggctgagtcctgagcagctggaggaggtgcgggaagccacacggcgagagacacacatccttcgccaggtcgccggccacccccacatcatcaccctcatcgattcctacgagtcttctagcttcatgttcctggtgtttgacctgatgcggaagggagagctgtttgactatctcacagagaaggtggccctctctgaaaaggaaaccaggtccatcatgcggtctctgctggaagcagtgagctttctccatgccaacaacattgtgcatcgagatctgaagcccgagaatattctcctagatgacaatatgcagatccgactttcagatttcgggttctcctgccacttggaacctggcgagaagcttcgagagttgtgtgggaccccagggtatctagcgccagagatccttaaatgctccatggatgaaacccacccaggctatggcaaggaggtcgacctctgggcctgtggggtgatcttgttcacactcctggctggctcgccacccttctggcaccggcggcagatcctgatgttacgcatgatcatggagggccagtaccagttcagttcccccgagtggggatgaccgttccagcactgtcaaagacctgatctccagggttgttgcaggtggatcctgaggcacgcctgacagctgagcaggccctacagcaccccttctttgagcgttgtgaaggcagccaaccctggaacctcaccccccgccagcggttccgggtggcagtgtggacagtgctggctgctggacgagtggccctaagcacccatcgtgtacggccactgaccaagaatgcactgttgagggacccttatgcgctgcggtcagtgcggcacctcatcgacaactgtgccttccggctctacgggcactgggtaaagaaaggggagcagcagaaccgggcggctctctttcagcaccggccccctgggccttttcccatcatgggccctgaagaggagggagactctgctgctataactgaggatgaggccgtgcttgtgctgggctaggacctcaaccccagggattcccaggaagcagaactctccagaagaagggttttgatcattccagctcctctgggctctggcctcaggcccactaatgatcctgctaccctcttgaagaccagcccggtacctctctccccactggccaggactctgagatcagagctggggtggaagggagccattctgaacgccacgcctggcccggtcagtgctgcatgcactgcatatgaaataaaatctgctacacgccaggg

SEQ ID NO: 6247 - DNA, 211 bp, Homo sapiens
  misc_feature (1)...(211): n = a,t,c or g
aaccttactttaccatctccacggatatgaggatatatgatcttcatggtgtgaacgtctaacttggctgagacaagctatcagtaaaagaaccaagatatagtgaagaatgaggatttcagagccaggagaaatcagtattgttttatttggaaataaatcatctatatttatatgagtaaacattggtattttcatgnaacaatactgg

SEQ ID NO: 6248 - DNA, 400 bp, Homo sapiens
ggcacgagaatgaattagacaacagtcatgacatcactgagctactgaaccaatgttaccagctgcttcagatttttactatgtaataaaaagaattctccatttgcttaaacctttgctaatgagttttactcttatggatgaaaacatcccaatataccttccagacaagacaattctattctgcgcttccacatcatgcctagtagcactctgattccaagcgagataagacttattttgcttcaggcgtcttatcctgctttccatgaacaaatacagtctcttcccggggcatcttaggcaaatgggacacatgtgcttgccaaggtgactctgccatcctgtgtgacgggaggaggagggggtaaagtttgggtttcagaaatataagtctctg

SEQ ID NO: 6249 - DNA, 329 bp, Homo sapiens
tcggcagagctgcatagggctcggcgtagaaagaaaaaaatgtgatggtttaagtaaatgccacacatcttaatacctctatctgaatcttcaactccccatacaaatacataaagctgaacttgcttctataattgagatgggttacacagaaacttactattcccaatgactggataaattatcttggcacaaagaggatctgaagaaagtatcaagtccaagaatatcttactgaagccctttctggtagtaaactggccattgtgggctctgtataatacttaggcatcagaaaacggccacaaccctattacgggtcaagtaat

SEQ ID NO: 6250 - DNA, 248 bp, Homo sapiens
tccggcagctggccctcccagagactacctgccttttccctgtcataatgttcccttaagattagggctgcctgacccaggcagtattttttatatttataacaaaatcaataccaagagccttcaaagattgaattttgctcatcaaataggttcacatgctgaaatcctaatgccttccttctccctttagaaattaaattctgaatgtgcccaaacctggataatgattaaagatagatgagttc

SEQ ID NO: 6251 - DNA, 394 bp, Homo sapiens
ggcacgaggacattccatttcaggacaatgaagtcttcctacatcagatgcggctctaggttgcccacaagcacttgggcaccaggggacactgcactttagggaacaaagtccccaccattagttctttggcagctttgttgctgaacctcatagtaatccttgctaaggcctacccagtggtaattgttgcagatttatatgctcctggtcccaggccaggatcccacaaccatacctacaggagttgtttctaacctgttattaaacagaggtcctgagacaacttacttgtggattttattccagtcctatgaacagggctggtatgtccctgccagtgatgctggaccaagacccatggtggagtgtagagtaccagaagctatgttgg

SEQ ID NO: 6252 - DNA, 526 bp, Homo sapiens
tgtgactctcaaggattatacacaactaaaactgtgtgaaactgcaatgagtacccgggcaatagggaagtaggaatttctcaccaacccacgtgccaggatccagcctcaacacttgtgaggatccagcctcaacgctctgcacatctccagtgtggaacagcaccatgcgcctaatgagttcttctctgactgattgattgattgattactaaaacactcagcgctcctggcaaagcagttctcactctgttgaacaaattatctttatgcactgcagtctcttgagcttagatgaaggcaagctcactgtaatcttcagatcatttaggcaatgtcttgggaatcactggatatgacaaaatattccagggcatgtgggaatagggaagggggaagaaaagcagggacttgggagggactatggttagtgggattttcaactctatattttctaatctgaaccaggggcaggcaaactactgcttgtaggccaatctggccagtggcctgtttaatactgatg

SEQ ID NO: 6253 - DNA, 790 bp, Homo sapiens
  misc_feature (1)...(790): n = a,t,c or g
ctccactcggtttctctctttgcaggagcaccggcagcaccagtgtgtgaggggagcaggcagcggtcctagccagttccttgatcctgccagaccacccagcccccggcacagagctgctccacaggcaccatgaggatcatgctgctattcacagccatcctggccttcagcctagctcagagctttggggctgtctgtaaggagccacaggaggaggtggttcctgggcgggggccgcagcaagagggatccagatctctaccagctgctccagagactcttcaaaagccactcatctctggagggattgctcaaagccctgagccagggttaggcacagatcctaaggaattcaacatcttcccgagaaacgtgacatgcatgacttctttgtggggatttattattgcaaggagggagcgttccagccagactctcctactggatgttgaattcaagagaacgtcccccagctttgggcancctcaagtatcccccgagagcagaataggtactccacttccggactcctggactgcattaggaagacctctttccctgtcccaatcccccaggtgcgcacgctcctgttaccctttctcttccctgttctttgtaacattcttgtgctttgactccttctccatcttttctacctgaccctggtgtggaaactgcatagtgaatatccccaaccccaatgggcattgactggtagaataccctagagttcctgtagtgtcctacattaaaaatataatgtctctctctattcctcaacaataaa

SEQ ID NO: 6254 - DNA, 1403 bp, Homo sapiens
gaaattctgaagacaatgcatgcccactctcagttctgcatgagtggggaccacacgttagaagggacagaacatgccatcaaggaaattgtcaaagaagaagctgatgagtactttgtcatagtcttgagtgatgcaaatctgtcacgatatggaatacatcctgctaagtttgctcaaatcctcacaagagaccctcaagtaaatgcttttgccatttttattggctctttaggtgatcaagcaaccaggcttcagagaactttaccagctggtcggtctttcgttgccatggataccaaggatatccctcagattttacaacagatcttcacctccaccatgttgtcgagtgtctaagaagtgcccttcatcaccctgatgacaccaggatttgaaataagacaggaataaagagtattctgaaaaaaaagaagatatggatgaagtgaacccatgcagtgactggatgattccaggcattcctgggtcttcctacacttgctccgtaatgagaattcagagaagcagccagaaggagacttaaacatggaaagatactccactgatgagtttagaagtgattagggcaagctagttgacctgcactttatcaaaggttggggttaaaggaaggtggttttgagaactatgtgtttggtctatttccaaaaacctgagggggagaaaatactttggcttttgccttaacacatcatctggtcacgttagaaaagtgaccccatcaaactgagcctttgatgtcacattctgacacaagatgcaagtctgtgcaaaacccaccaaaatgctcctatccaacaattatttttattttctccctgctctgtattgaccagaaaacaatgattttataatatttaacccaccaaaaagtccctccaacagcaatatcttatgaaaggctggctgttctcaataatttcattttcttggccaaagccaaaaggaatcaaaaaatccttggagtgcttgcctttccacgtgacttttaaaaggctcttaaagagcaaatgtcctcttctccttgctgctagagtgggaggagaaagatgtcttgccttaaaagtttactgtttcttctgttcttctagcatctctcaaaaaattcacagtactccattttggggtccaaactgtaatgctcaaaataataaatgcttacacgaaaattatttattgagaatattcatataaaaattacctaaagcaaagtaaaaaaagtaaaatcaaggtggtatatttgaagtgaatggtgattggaaatttttagctgtaacaaaaagaaagaaaacaactttttttaaagcctcattctcttttcttttcaaaatgtaccttattcccacacactcttgggctgacctttattttatccaatt

SEQ ID NO: 6255 - DNA, 529 bp, Homo sapiens
gtcatctatcataacttgtgtttgttttcctcctgagatcaaacacttggtgcttattcctgatgtatactctgagaccagctcttaccttctgagtggcagctacccctccctcccaattttagatcctatttttacacatctctatagatatcacctttatttcatgactcacaatattaaatggtacagacttcagtttaaccactggtgtggtaacagcagtagttgctaagtaccaccttcccattgctgtttgagggctaatttgcaaagacatttgaatctcccagtgaagatgtctggggaattttggccagttgtcttccctcttgcccttttgttctttaaaattcagcttggaccatagacacctccaggatcttgtttatgttctgctctcaattgaccaagcactgcgttttgcacaatcagaagtctcacaaaagcaaacagttatgactgcatatctgatgtttatatcctataaaatttcaggaagattcagagtcaatcttctatttgtaca

SEQ ID NO: 6256 - DNA, 955 bp, Homo sapiens
tatcttttaacgttataattttatttcaaagaaaacagaaacagaacaaaaacaacctttgcatttgagggaggagattattttacagttttggaaaagaataagaacaattgtatcaggaaacaaatgattatgacagaaactcgcatccgacagctgcagtgaatccacgaggacacagaccatgctggtggccacagcagggcccaggtgaatccacaaggaaacacagaccatgctggcagccacggcaggggccacagggcacggtctccatgtgttaatgtttaatgtcagcattttcatatggacagaaatcacgaaggaaatccttgccaaaaatggcatcaatatgaacaaacccttgttataaaaagcaaaatattgataggaacaatatcttccagcgtgtgcgtttcacatttaggctttactgtatgaaactaagtcaaaattagaagcactggctatctccaccgacatatattttaactgaatataaacttcaaggcttttcttaaccataggcttaagaggatttcttttatgcagaatgtgaccagagcaacaaatacacctaaactgtttgaagatgggaaatttatacatgaaatgagctagcaggcttcctttggtatggggacactgttattctaaaattagaaaaaaaaaattgaatggaagtggaactgcttccaagatggtaacactttgtagctgccaatttttagccccagtagagaataaaatggaaaggcagctacatgctgaactgcacaagcaggtgcaccccaagccaggaggggtatcttcaccactttccccacggccatgaccttctgataactgaaatgggaaaacacttgggagagaaaaacaccaacaacacttggcttctcttcagcacagcggccaggacgaagcgggaggccactgatcgaagggcccccagtgg

SEQ ID NO: 6257 - DNA, 380 bp, Homo sapiens
  misc_feature (1)...(380): n = a,t,c or g
gcaaggtatgagggaaagggcttagagcttccataccctctccaggaacaacacccttcaggataggtattagctatcctgaaactctccaaagccagtccatttnggcttttatggaagcctcattacataggcgtgattgattaaatcattagcactgatgatcaaactaaccttcagcccctctcccttcccgagaggttggaagtagggttgcgaccctgtcgtcctactttggtctctgctgaccaaccccatcctgaagctactacctatggatgccagtcatagttgaactcattgaggatatgaaaagactatcactttcaaattctaaaaattttaaaagttgtatgccaggaaatacatatttcacagta

SEQ ID NO: 6258 - DNA, 2318 bp, Homo sapiens
  misc_feature (1)...(2318): n = a,t,c or g
tggcacgaggtgataggtgggccttagaggagacgccgccgagcaccgcaagaactggaaaacacacccctctctgtctgcctgggagagccacggaaattggcacttctctgagtgaagctgaggagaaggctgtaaatctgccaaaacagccttgaagtattcttttgtcatgaggaagtgacggctgctggagggaggtgaacaccacaaggagagatggcatctggcctgggccccgcctagcagcagctccacctcctaggccaggccctgtgggatgcgccactagaccaccatggacggatcccacagcgcagccctgaagctgcagcagctgcctcccacaagtagctccagcgccgtaagcgaggcctccttctcctacaaggaaaacctgattggcgccctcttggcgatcttcgggcacctcgtggtcagcattgcacttaacctccagaagtactgccacatccgcctggcaggctccaaggatccccgggcctatttcaagaccaagacatggtggctgggcctgttcctgatgcttctgggcgagctgggtgtgttcgcctcctacgccttcgcgccgctgtcactcatcgtgcccctcagcgcagtttctgtgatagctagtgccatcataggaatcatattcatcaaggaaaagtggaaaccaaaagactttctgaggcgctacgtcttgtcctttgttggctgcggtttggctgtcgtgggtacctacctgctggtgacattcgcacccaacagtcacgagaagatgacaggcgagaatgtcaccaggcacctcgtgagctggcctttccttttgtacatgctggtggagatcattctgttctgcttgctgctctacttctacaaggagaagaacgccaacaacattgtcgtgattcttctcttggtggcgttacttggctccatgacagtggtgacagtcaaggccgtggctgggatgcttgtcttgtccattcaagggaacctgcagcttgactaccccatcttctacgtgatgttcgtgtgcatggtggcaaccgccgtctatcaggctgcgtttttgagtcaagcttcacagatgtacgactcctctttgattgccagtgtgggctacattctgtccacaaccattgctatcacagcaggtgcaatattttacctggacttcatcggggaggacgtgctgcacatctgcatgtttgcactggggtgcctcattgcattcttgggcgtcttcttaatcacgcgtaacaggaagaagcccattccatttgagccctatatttccatggatgccatgccaggtatgcagaacatgcacgataaagggatgactgtccagcctgaacttaaagcttctttttcctatggggctctggaaaacaatgacaacatttctgagatctacgctcctgccaccctgccagtcatgcaagaagagcacggctccagaagtgcctctggggtcccctaccgagtcctagagcacaccaagaaggaatgagactcgcctccctctatttataactgtcccctccaggctgacagtggttcaaccctgaatcctaaaacttgcctttcaagtctcattttgtttctaactgagaactctatggatgatgatctcaaaaagcctttgtctctgggaaaggatgcgttatcttggtcttggaaatttcaaatgatgagggttgggggatggaagcattattccaggtggacgggatagaatccagcctctgcctggattagcccagggggatttggaaagcctttctaccatccttgaggatggtaactgagcttcctctgacagtgaccaaaggatgctgtatccttcagagctaaggcaagacagagagtctgctgttaattctcaaatccagcgaaaggctggacatctctaaatctcgtcttcctccacctcatgtgcatgcctgatctcaccctgacactcctgatgccgcatctgtgatagcactcgtgttgccttcacatggcaggctgggccaaccctgggtggaaggttctgacatttgtgttttcagaaatgtacatctgccttccagtcatctgtgcccttctagggaagatgtgcttgatatgttnaaattggatctactntgaaaacgaaacttggttttggtcctgtgaggactacttgtttgtccacctcctccaccaaaggaattaggaagttaagagaaggggnagaatatggaggataggagagggtgatgatgctttagcccattaaggaagaaaagttccccttactcttacaaaaggtgattgcaccactt

SEQ ID NO: 6259 - DNA, 421 bp, Homo sapiens
ttccctgtttgtttctctgcagacaatgctttagccctactcttgggcccccaagttagcagagtaatcaaagcttcctaccgtttggcctactattccagactagtccctcgaggggttcccttccaaaatatgcagggctcaggctcccaattccgggcctgtctgctttgcttgtgtttctcctgtccctgttctcccggagggcccaggtggaactcacgacagggagggagacgcttcccaaaaacctgcagggctatttcccagaatttggttttcaagtacaaaactttttgtcctgtaagatatatgcagcctcacagaagcagcctctgcctccactttaccagctacgtttttatcttaagcacatggggctcccttagaacttactccactgatttaaaaaaaaaaaaaa

SEQ ID NO: 6260 - DNA, 370 bp, Homo sapiens
atatgaaaaacgaagcctcataatagtacccacctcattgggttattgtgagggttcaatgtaaagcatgtagaatagtgcctggtacatagtaagtgctcataaatatcagctctaatcatcatgagtctggatcccacattggatgtcatacatggttgaatgaatggaatgcattgaattgtattggattgaaatgaattagagtaaattgaagtgaattaaaattgtgccagctcttgtttgtctgtcactgaaggctcctctctgggccagcaccttaaatggtataagggcttccctccctaagtcctacttgtcactgccatggcccccaggatgacttctctttacctccaagttacatagc

SEQ ID NO: 6261 - DNA, 713 bp, Homo sapiens
tttttttttcattaaaaaaccatttatagtcatttcatgttggttggaaatcacagaaattaggcaggaaaaaaaaacccaagggaacaaatacaaacagcacagcgttccccacagttctctgctctgctctcctgcgagccggggaaggagaggggcagcctgagctcgggcgggggctgggcctggctgcccgcggctcagctctcctcgtccagggcctccgagtccccccgtgccctctcgcgctcctgccggtcgctcccaggcctgtccaggtcgggaccctcccgtacgtcgtgcaggtcttcagaggagccacaccttggcccctcctccgagtcccgaccctcctcgtgctccttgtcctctgcgctctcccccttctgtgatgtgggcctcgccattcactggggctgagagatcggtgctgggcttgtcctccgccttctcctggggggcctcctccccggccagctcctccccggccagcttctcctcggccttctccttctccatcccagccttgttcactttctgcaccgcctcgatctttgggccgaggacccgcgacttgagccgggtatagacttctgctgccttctccattacgtccttgttcgctttgtaacggcgaatcttcttcaaggtggccaccacgtctgtgttcttctggaggatctgagaggtcacctgcagggttcccagctcct

SEQ ID NO: 6262 - DNA, 775 bp, Homo sapiens
agcaggaaaagcgaaagaggtccctgaagctcattctggagaagaagctggccattctggagcgggccattgagagcaaccagagcagtgtggatctgaaactggccaagctgaagctctgcacagagttctgggagccctccactctggtcaaagagtggaagaaactgatatttttgcatcccaataatacagccctttggcagaaataccttttattttgccagagccagtttagtaccttttcgatatcaaaaattcacagtctttatggaaaatgcttgagcactttgtctgctgttaaggacggcagcatcttatctcaccctgccgttgccctggcacggaagaggccatgtttgcactctttcttcagcagtgccactttctgcggcaggctggccactctgagaaggccatctcattgttccaggccatggtggacttcaccttcttcaaacccgacagcgtgaaagatctgcctaccaaaggacaggtggaattctttgaacccttttgggacagtggagagccccgggctggggagaagggacccgaggctggaaggcgtggatgcaccagcaggaacgaggtggctgggtggtcatcaacccagatgaggatgacgatgaaccagaagaggatgaccaggaaataaaagataagactctgcccaggtggcagatctggcttgctgctgagcgttcccgtgaccagagcactggcggccctggcgccctgataagaccaagaattatcaataaaaaaataaatt

SEQ ID NO: 6263 - DNA, 415 bp, Homo sapiens
ttcctttgtctttggtatcacatcaaacaaatatgccaaatccaatgtcatattttctcctgcattttcttctaagagtaggtcttacctttagatgtttgatccattttgagttaatttgtatatatgatgtaaggtaagaatccaacttcattcttttgcatatggatatgcagttttcccagcaccatttgttacaaagattgtccttttcccattgaatggtcttggcatccttcttgaaaatcaattgaccatatatgtgagggtttatttctgggctctctattctattccattggtctatatgtcctcacactagtaccatattgttttgactactgtagatttgtagtaagtcttgaaatcagaaagtgtgaacccctccaactttgttctacatcagttgttttgg

SEQ ID NO: 6264 - DNA, 416 bp, Homo sapiens
cctggagcgcccccagttgatcatggccttgccaggttggtgacagtatattgtgagcatggtcataaagctgccaaaatcaaccccctcttcaccggacaagccctgctggagaatgtgcctgaaatccaagccctggtgcagacactgcagggacccttccacacggcaggattattgaacatggggaaggaagaggcctcacttgaggaagtgttagtctatctcaatcaaatctactgtgggcagatttctattgaaacctcccaacttcagagccaggatgagaaagactggtttgcccagcggtttgaggaactgcaaaaggagacgtttaccacagaagagcgaaaacatctgtcgaaactaatgctggaatctcaggagtttgaccactttctggccaccaagttctc

SEQ ID NO: 6265 - DNA, 445 bp, Homo sapiens
ctgtccccgctcctcaccccgctgtttctgcttttctggttccgccctcgtgccctggagattatcgacctttttcatcacttcactgtggatgtggctggggttggggacatctgttcctttgcccttatggatgtgaagcgccacggacaccctcagtggctctcggcgggacagactgaggcctcgctgtctcagcgtgcggaggacggcaagactgagctttctttgatgcggttctccctggcgcatccactctggcgccccccagggcacagctctaagtttcttgggcacctctggggccgagtacaacaagatgcagctgcctggggtgccacctcggctcgcggccctccaccccgggggtgctcagcaactgcacctcgccctgctgaggccttcctggccaacctcttcgtgcaccctctcctgctccgagaga

SEQ ID NO: 6266 - DNA, 189 bp, Homo sapiens
  misc_feature (1)...(189): n = a,t,c or g
ggtcacacaaaatttgaatagatcttttcatgtatatttcttagccacctcattaggaaatgttttaaagctgaattatattttgtatctgggatcccatttatagccctagagatgatgttattcttctgaaatactaaaagaggccagctgtggttgctcacacctgtaatcccagccctttngagg

SEQ ID NO: 6267 - DNA, 189 bp, Homo sapiens
tcccgcggggtaggagctgtggcgactccggatctccacagccccagggcccagtttctgtgaagctgtggaggcctgaggctggaaggttccaaaggtttggtggaatccagagtccagtgatgatcagcggagctctgtgtctctccccttgtctagcgagccttcgactctcttagcctgtgtccc

SEQ ID NO: 6268 - DNA, 122 bp, Homo sapiens
gaccaaaaacactcaacagattaactagacctagccagtgatccaataggaaaaacatggtaaagaatatgaatagacagttactagaaaggattttatgcacatgaaaaaaatgctcggac

SEQ ID NO: 6269 - DNA, 105 bp, Homo sapiens
  misc_feature (1)...(105): n = a,t,c or g
aatacctttaaattatgtgcatgtattctatcttctggtttctgaagactgtaatgccatcctttggtaaagctgaacagtctanttngantatttttancgccg

SEQ ID NO: 6270 - DNA, 428 bp, Homo sapiens
ggtttgggcgttttcaggcggcctcctgagaaatgtttgcaattgtaaggcgtctctctcatccaggtttacccagattcgcaaactatggcgacaaacaaccatagcagaagcatgtccggattatttcacatatatcacaaaatcctgcaaagggtctgtccccattggatcacctcccatcacgccacacacgacgtgaatgacttcgtgcttctccatacctgcattgatctctgggtccattgccagttataaacctccaagggcaatagccatgaggaaggaggaggtgcttcactttcctgataagctaccgtaagcccctttctgcatgaggctcagacctggttcaaactctcctggcagaaacaattcaaccatgagctgtgctcgaggagggcatactcctggttttcaccttctgg

SEQ ID NO: 6271 - DNA, 311 bp, Homo sapiens
  misc_feature (1)...(311): n = a,t,c or g
tcatccacctcctgccaaaatgaccaaagcttggccggcctcctggaggccgaaagcaggtggaagtgccaccaggtgcatgaggcagcagctcagagcagtgtgggattgtcctgggagcatgcgtgctgagttactgctttggacactgataccataatagcgaaactagattttggattacattttaataaaatagtgtgcactgcccagaaggcagatgtgctctgctgtattttccaaaagtaatgatgggaaaaataaagtgctgaaaattccatggggaagctgaattaaagcntantgataga

SEQ ID NO: 6272 - DNA, 400 bp, Homo sapiens
  misc_feature (1)...(400): n = a,t,c or g
caccatgagcttcccctggggacactgaggttgcgttcnnnnnnnnnnnnnnnnnnnnnnnnnnnnnnnnnnnnnnnnnnnnnnnnnnnnnnnnnnnnnnnnnnnnnnnnnnnnnnnnnnnnnnnnnnnnnnnnnnnnnnnnnnnnnnnnnnnnnnnnnnnnnnnnnnnnnnnnnnnnnnnnnnnnnnnctgcgtgnnnnnnnnnnnnnnnnnnnnnnnnnnnnnnnnnnnnnnnnnnnnnnnnnnnnnnnnnnnnnnnnnnnnnnnnnnnnnnnnnnnnnnnnnnnnnnnnnnnnnnnnnnnnnnnnnnnnnnnnnnnnnnnnnnnnnnnnnnnnnnnnnnnnnnnngcattccattgttttataacaaacttttattccattttnctttggtcaaagt

SEQ ID NO: 6273 - DNA, 496 bp, Homo sapiens
  misc_feature (1)...(496): n = a,t,c or g
aaaggaacatctgaatcacctttataaggatctaatttataaaggtgattcagatgttcctcacattaaggaacactgtagtgcttatagcttgtgatgtccagggagggacttgtcagatatatctataagcctccatgctagctttttaaaaataattgtataatagagaaaaaatatatgccaaatcttgtgaaaccaggttaaaaaattagtactatatgcaagacatgcttcccagaatattagggctagaaaggaacagtgtttttcaaagttccaaagcatagaagcttttagaaatgaactcttaatcaaaactccagtttgtaaaaccaataaaagcagaatcctggaacccacattacacatgcctttcctcttgaggggtcccccgggggtgctagtctccacatgggcacagataggatgtgtgaggcttacctgaggggacacgggangggggtgcccggtttggggncttggattgcaggga

SEQ ID NO: 6274 - DNA, 764 bp, Homo sapiens
cgcgtctggtggagacggctggcgcgcgcggaagccgcggaactgcgccggaaagtcccccggctctggggccccggtgacccagagtaagcctccaagaaggaggaggaggagagaaaggcggctcttcccgtgcccctaccagaggcttcggtgggcccaccttgtgacctccgcggccggcccctcagtggaactgcgtcccacgcggggggcgtcccgaccgtgggggccgcggcccgcgctgaccctggacgtcgccgcgcagcccctggttccccaaggcagaggaaataccctggtggagccctccttccatagaaccagagatggcatctgtggatttcaagacctatgtggatcaggcctgcagagctgctgaggagtttgtcaatgtctactacaccaccatggataagcggcggcgtttgctgtcccgcctgtacatgggcacagcaccctggtctggaatggcaatgctgtttcaggacaagaatccttgagtgagttttttgaaatgttgccttccagcgagttccaaatcagcgtggtagactgcccagcctgttcatgatgaagccacaccaagccagaccacggtccttgttgtcatctgtggatcagtgaagtttgaggggaacaaacaacgggacttcaaacagaacttcatcctgaccggccaggccttcacccagcaacacagtgtggaaagatcgccaagttacttgctttccggtttccagggacttggggccaacgttagt

SEQ ID NO: 6275 - DNA, 362 bp, Homo sapiens
ttttatctacctccagtccctactgttgagtaactcacggcataggggcttaaaacagtgcccgtagatagcaggtggtaaaaatgttttttgaatgaaactcaccaccctccaaatcagaatgtttttctttcctttcaggcaagctgaaaaattataaccacagcttcagatactgctcatcattttaactagatgtttcccccttttgtatccacctatccggttctccttagagaaggcagattctctagacattattcactataattggtctctgggcttttattcagggattttcctgtcccttgctggtgtcttgctgagattgcaggatatagatcagttatatttgctttccg

SEQ ID NO: 6276 - DNA, 613 bp, Homo sapiens
tccgcaggtttcaaaaactcactttattccaatgtgaaatgaggacgtgatggtttaaaaacaagaaaaagttcttgctcagcggtggggatgctctgcttgcccgctcacgcccatcccccttgaaacaaggtgtctggacggaccacacccataagcggctctccgcaaacccaggcagacgcccgtctcctccgggtctcagggtggccacatcctcccccaccagggctctgacagcaggcacagagcagcagcacgggcagggtggagcgggagcagcgtgtgggggcccccgccacccccagagctagtctcagaccaggaagggagctgggcaccagagaagcgacatcacgtcggcacctgtaactcccgggatccgtaattgggccccgcttcccccagcctcgcccccggcccactgtgcgttcggcagctcaggttaaaactgaggggagggatacattcagaccgcaggccccaaggctgcgcccagctgggtgcagggagtagggagccgagtcagagccacccactgggctctgagggcccagcaagccaaccccgacccctccgttcgggagcagcagccagaccacgccagtcacaa

SEQ ID NO: 6277 - DNA, 300 bp, Homo sapiens
ctccattaggaattcactgttagaaatctgatcttttctcctctgttgagctttacttgggcattttattgatttgatatcacttagtagaaacccattcaacaaaaggtatctcttcaggccactagtcaatacagcattttttatttgctgagatttttacttctattttgccccacatcagctggtaagttttataagtaagcaaaaagtaggagctatagacaataaggaagcagaatgaacctctgcaattcatatttatgtatgatttcacttggagtgggaggagatgttttt

SEQ ID NO: 6278 - DNA, 389 bp, Homo sapiens
cggagccggtgggcggtaggcggtgctacgggtagctgggtgctgtccaaaggcgacagggcgtcgttaggggagcgagtcgtgaccggttgggccacactcaacgtgggacgaagcttcgcctactgtttgactacgtgcgtgcagcctcccttcgatgtcggccctcgaaaagagcatgcacctcggccgccttccctctcgcccacctctacccggcagcgggggcagtcagagcggagccaagatgcgaatgggccctggaagaaagcgggacttttcccctgttccttggagtcagtattttgagtccatggaagatgtagaagtagagaatgaaactggcaaggatactttttcgagtcttaacaagagtgggttcagagggt

SEQ ID NO: 6279 - DNA, 237 bp, Homo sapiens
atggatctttatagctctcctttgataaagaagggaaatatcgtacttacattagcatgttatagttgctgttgttatacagaagaatattaaacaatattcatatattgtttatgaatgcattgaattcataaacaatggtatggatattgactagccaaagaggtggataaatgtagatacaatgatacggtgatttggtattcagtgtccattctgctctcctagtgtgccttc

SEQ ID NO: 6280 - DNA, 602 bp, Homo sapiens
ttttttctctgggcaacaaagcttgatgttttcactgctttagtttcctgtttgctggtgggaggggatacggtctgtgactctggacttgctctgggggaacagttgtcactgcccccggggagaggggcagcttgggctggagaagcacagccagagacagagcccctcgagagggatccttggctgcttcattgtcttccccccagcaagctctgctctccacaggcacctctggggtcttggtatggtccccgctcacctccttccagagtcctgagtggtgtgggtgtgggtggcacaggatctggggcatgggaggggttcagagcttcccagagccccgtgtcctggcagactcagctggtgggctggggtgttaaccccagtcctgggcgtaggtttacagactctcaaggtacgttggccctggtctcctgggagagaggggtgagggatgtcccctaccaaagcacaaggtgggatcaggctgcctcctgggttgggtgtcgggggagctgtccggcagcctggcagggagatgcaagggctaaagtaaaattttgtcaagtaatggctgattgtgtcattttttttcccca

SEQ ID NO: 6281 - DNA, 499 bp, Homo sapiens
gtgagccaggctacatgtccaggctttatgctactgtgtttatttctctttgttacttgccagcacagtgatactagaacttgcagaaatttaagggtaaccggtattactttaaaataccttttcccaggctcccactgcagaccttcaaaatccatgtcccccaagattctgtatatttaaactggtgtccagagcagtttctatgacctcaaaaggttgggaaacattgccctcatgttcagaaaagtcctttaaacttttcagctttgacttagttgtggagagatgttgaaaaatgccttttgtcatcccattgcctgtacctcagatatgaaggaagaaatgacccaaggaggcttcgatggagccaaaatcatcagagggagagtctcgggagaaagatgaatctccagggcaggggccagggtttgttggtctctctgcttctggcccctgcagttactctttttcagtgtcaacctcagaggagctgagc

SEQ ID NO: 6282 - DNA, 1081 bp, Homo sapiens
caggattcgcgcctccatttttccaggagagagcgggataccaagagaaccggaccagctgctggcagggaaactgtcttccttttctccaagatgtacagaaccaaagtgggcttgaaggaccgccagcagctctacaagctgatcattagccagctgctatatgacggctacatcagcatcgccaatggcctcatcaatgaaatcaagcctcagtctgtgtgtgcaccctcggagcagctcctgcatctcatcaaactcggaatggaaaacgatgacaccgcagttcagtatgcaattggtcgttcagatactgttgcccctggcacaggattgacctggaatttgatgcagatgttcagactatgtccccagaggcttctgagtacgaaacatgctatgtcacatcacataaaggaccatgccgtgtagctacctatagtagagatggacagttaatagctactgggtctgctgatgcttcgataaagatacttgacacagagaggatgttggccaaaagtgccatgccaatagaggtcatgatgaatgagaccgcacaacaaaatatggaaaaccacccagtgattcgaactctttatgaccatgtggatgaagtcacgtgccttgctttccacccaacagaacagatcctggcttctggttcaagggattatactcttaaattatttgattattccaaaccatcagcaaaaagagccttcaaatacattcaggaagctgaaatgttacgttccatctcttttcatccttctggagactttatacttgtcggaactcagcatcctactcttcgcctttatgatatcaacacctttcaatgttttgtctcttgcaatcctcaagatcaacacaccgatgctatatgttccgttaattacaattctagtgccaatatgtacgtaactggaagcaaggacggctgcatcaaattatggggatgggtgtttcaaatcgatggcattcacaacttttgaggaaaggcacatggacgggtgctggaagtttgttctggccattttttccaaaaattctaaatacattcttcttcagtggggaa

SEQ ID NO: 6283 - DNA, 378 bp, Homo sapiens
aaataggagttaacctctgaaagaaagagctgctgttaccctttgtacatgcttagtacgtgcctagaaaacccaacctggggagtccaggttgctacacatgtgagcccaccgcacgcacggggctgggcagagtgcgagtctgatacgctgtgggtgctcggtcagcgcaggccgacgggtgcatgagggactccctggggaacccgtttctcccagctctggtcccggcaggagtagctgcttgccccctgcctgcccagcactcctgtccctgggcctgcaggaccctttgaggatgccctgaagttgcatgagtgctcagtggcggcaggcgtgacagcagcccctcttcccttgggagggaccagtggccca

SEQ ID NO: 6284 - DNA, 616 bp, Homo sapiens
  misc_feature (1)...(616): n = a,t,c or g
ttttttttttttcttgtggccattcccaggtttaattacaaaccgatccgaacatcccatctgggtcgacagctgggagggcaggattggggggaagctgctgggcgcacagcacnaggcaaccacgtccttcccctgctcccaggtggagtaggggcctcacgactgcctcgatatccactgtcttggagcagcctggctaccccgagatcccaggtgacctcaaggctgcctgcacttcagcgccacaatgtgtcctggcctgagaaccccaaagcaccttaagcgtcccccctcaaagacaactgtgcacccagtcctcaggtgggaagaggaagcccagccaggcccggaatccgcctcctccccagggtcctgggagctctgactctccggggcgttagaccgaaccagccaggcgagaggggggacccaagggccagggctccgaggcagcggctgcttctggatatattttctttaaaggcgaaatggttccgtctttggtatgaacaccctcactccaggcaaaggagggggtggcaggggccccggcaggaggagctctgcccagcccggggccagctggaggaaggaccaatccagaggctcatgc

SEQ ID NO: 6285 - DNA, 1301 bp, Homo sapiens
ggctcggactggcctaagtcgccgcagaactgccacgtggggatgagatttgctgggctggtagcggcggctgctgcgggaggtcccgcccacgtgaagccagcctaactgagctctggactttggggacagctgtcagtggcctaggccgcaggacaccatgaagcaactgccagtcttggaacctggagacaagcccaggaaagcaacatggtacaccttgactgtccctggagacagcccctgtgctcgagttggccacagctgttcatatttacccccagttggtaatgccaagagagggaaggtcttcattgttgggggagcaaatccaaacagaagcttctcagacgttgcacaccatggatctgggaaaataccagtgggacttagatacctgcaagggcctcttgccccggtatgaacatgctagcttccattccctcctgcacacctgaccgtatctgggtatttggaaggtgccaaccaatcaggaaatcgaaattgtctacaagtcctgaatcctgaaaccaggacgtggaccacgccagaagtgaccagccccccaccatccccaagaacattccacacatcatcgcgcagccattgcgaaaccagctatatgtctttgggggcggagagagaggtgcccagcccgtgcaggacacgaagctgcatgtgtttgacgcaaacactctgacctggtcacagccagagacacttggaaatcctccatctccccggcatggtcatgtgatggtggcagcagggacaaagctcttcatccacggaggcttggcgggggacagattctatgatgacctccactgcattgatataagtgacatgaaatggcagaagctaaatcccactggggctgctccagcaggctgtgctgcccactcagctgtggccatgggaaaacatgtgtacatctttggtggaatgactcctgcaggagcactggacacaatgtaccagtatcacacagaagagcagcattggaccttgcttaaatttgatactcttctaccccctgggacgattggaccattccatgtgtatcattccatggccagtgacgtgtgcttctgagaaagaagattccaactctctcactctgaaccatgaagctgagaaagaggattcagctgacaaagtaatgagccacagtggtgactcacatgaggaaagccagactgctacactgctctgtttggtgtttggtgggatgaatacagaaggggaaatctatgacgattgtattgtgactgtagtggactaataaaacccacattttt

SEQ ID NO: 6286 - DNA, 187 bp, Homo sapiens
atcttaaacatcccaaatgttatattgtgtaggctctgcatcctgttataatcctctggagactattgggattttttgtttatttttttgtttggtcaggcaatcaatttgcttaggttcagattccaaattttctgttttgccttctgtgggcagtggttctaatctcagttcagttttcaaagct

SEQ ID NO: 6287 - DNA, 117 bp, Homo sapiens
agaaaagatttgctgctgaccattattactgtaagtatatcacatttgtgcttcctggaatgaaaattctgtataaccaggtcctaacagtgatcagacatattacagggaaatagc

SEQ ID NO: 6288 - DNA, 362 bp, Homo sapiens
gttagatggcgatttcagtttcatatgatatagactttaaaaaatcttagtgcattattttaatgttttataacttattaccctaacaagttgtcataatcatttagtgtattcttttttcttggcatagctacttaatgacccttattttgttagattatttttaaatgttttaggagacctgatctctacgctttggaaacaacaaaatcttcataggcactgtgataactgctttcatactgtattatctcttaattcttcagtatctcaacaagatagccattgttcccattttcagatgaagtcactgggtgctcaggacagataaaaggaaatttacacaagggcaaataggagcg

SEQ ID NO: 6289 - DNA, 1204 bp, Homo sapiens
  misc_feature (1)...(1204): n = a,t,c or g
tcctggtgcagccagattgttctaacttttgaacaaatgagcgtggtcagtaatgtacaataactcttgagtctgttactttggcctagctaagcccatctggccctcgggcatccctgcaagatgacagacagaagagcaagggcactatcagaaatggaacaggctgccccctactcctcccagcctctaccagtacacagagacagactggagatagagcattcgcaaccagttggcatcttggttcttttgtcttctgaaaataaaaataagtgcttgtcttgtctttgggggtcaaagagaaccgcactaatttatttcctcgagggggcttttctggaggagaggatcctcagtcctgtgccaaggtttcacgctgtttggccacacgccaggcctttcttctggatctggtctgcacgtccagagatgatggaggaattgcatcagcatcatatgcacagtgaaagggtggctcttgtccagagaggcccattccgggctaggctacatggcctcagggactggcggcagtttgaagagtctggctgcagataggagctttcttatgtgtctctcctctgtgatgcccggcctcctgaaggcaagtgtgagacagagaaggcacttggctcagtgtgctgaagcccgcggtggagagggtgcccggcgtacatgggcagaccgatggaaatgagccaatctgacacagacgaaatgcacccaggagagacgggctttcggcagatttccgtgagtccaccacttggaatcgccatgcggtgctgcttccgaagctgcttcacccggatctggtccatgttggcggcgacgtcccgctcgggctgatccaagtcctctgcgtatctctgcaccagggcttcaggaatcccacagcggccatgccttatcagaatacggctcctccgtgagatcgatgccttcagcgtgcagcttgttttcagtgagcgtttctagatccactccccgggcacaggagaccttccctggtcaaagcngggcccagcttcacaccgtgctcctggaggcttgtgttctcngggagctctgagagccaggggggcggccttgtgcttggtgggctgccaagcgcctgccctgagagaggcctgggagccagtgctgggggacagtcgctagggctggtggggctggcggggctgccccttttcactggcag

SEQ ID NO: 6290 - DNA, 494 bp, Homo sapiens
atttttattttgagctttaaaaagatgaataggtgttctcaggaggtagggatctggctgagagggaataatctgagcaaaggtatgaaacagcctaatgcattagagaaaaaagttcttttagtaaggcatttggggttggggaagctagaaaaagaaatgggagctggtcacacagggccttgtgtgccagactaaggggtttgtagtatatattgtaggcagaagagatccatcaacagattgcaagcaaggaagtatgttcactttaaagtttgagaaagaatagtgtggaagcaccgtctcaaatttagacttacttggttccccctctgaaccgtgaatcagacccttttcagggtagaagtcttccccggtttatctgatctactcggggcctcaggcttctcagctgggaagagaggatgcaagaccagactgaagaacacggttgagtccccagaaccaaaagggggcctttctgcttcttaccc

SEQ ID NO: 6291 - DNA, 190 bp, Homo sapiens
gtaagattgacacgagttgatgggtgtgaaactctttagcgcagcattggccattaggaacacctgttagccattgttgttgtgattatggtggtggtgatggctgtggtaattgctgggagatgtttatgagtgctgttatattattcccagaattgattgaagtcacacttttcaaagaaaacagacc

SEQ ID NO: 6292 - DNA, 452 bp, Homo sapiens
aaaattaaaaaataaaaaatgctttaaatttaaaaaagaaagaaaattagggtgtttctgaccagatgacagggcagcagatgcaaaaatcattgtggtgtggcagcaggagcatcacaatttggaccagatcatctgcgtgtccttgaacaaggtgctgtcacttctctgaggccttggtttccccatgagtcaaagggaaggcaagtaaactccagctggatgaggactgtgtatggcaagaatgtcgcatgtgctcagggcagggtcagtgctcaataaaaccagctctcatctctgcaaaccagagaaccctggccaagggggactatgaacattccaaatgaagaaaaacagtggctcctagactcattgcccagaggaggactatgaacatcttagcaagtctcccccgaggttttcctagaatagatgtctctacgtagttaata

SEQ ID NO: 6293 - DNA, 526 bp, Homo sapiens
  misc_feature (1)...(526): n = a,t,c or g
gggcggaattctgaacagaacaggaagaatccagacggtggccttttgggagcattaggatccttcttcttcttgcctcccttagctggtccataatccttcatttcccgatcatagcgcactttatctgcctttgccatttcatcaaatttagatttctctttcccggacatcgtcttccacctctcagaatatttcttggaaaattctgcaaaattgacagggacctctgggtttttcttcttcttcttcctttttttttttttnnnnnngganttnnnctntgtcccccaggcngnagngcagggncncaatntccgntnacngaaactttttcnnccngggtnnaancnattntccngcctaaggcncccnaggggnnggnacnataggccccngccacnnnncccaaanaattttggaattttnagaaaaaacggggtttnnccatgtngnccagnanggnctaaattnatngncctcannanccnccngcntnggccnccnaangggcnggnatnacagg

SEQ ID NO: 6294 - DNA, 432 bp, Homo sapiens
  misc_feature (1)...(432): n = a,t,c or g
ggcacgagggagctcccgctgctcagacagatagacctggtttcctgtaagattgacaaccagactgccaagctcctcacctccagcttcacgagctgccctgccctggaagtaatcttgctgtcctggaatctcctcggggatgaggcagctgcgangctggcccaggtgctgccgcagatgggcggctgaagagagtggacctggagaagaatcagatcacagcttttgggggcctggctcctggctgaaggactggcccaggggtctagcatccaaagtcatccgccttctggaataaccccattccctgcgacaatggcccagcacctgaagaagccaggaanccaaggttggactttgccttcttttgacaaccagccccaaggcccttgggtaacttgattggncccctcnaagacctttggaatc

SEQ ID NO: 6295 - DNA, 3465 bp, Homo sapiens
gctgagagcagcaaggccagagttgaaaacttacagagtcctgaggcttcagactgaaaaaggcttcttctgtcactgacaatcgccaccatgatccatagtcttttcttgatcaactcctctggagacattttcctggagaaacattggaaaagtgtggtcagccgttctgtttgtgattacttttttgaggcgcaagagagagctactgaggcagaaaatgtgcctccggttatccctacccctcaccactatctcttaagtgtttaccgccacaagatcttttttgtggccgtgatccagacggaggtcccccctctgtttgtcattgagtttcttcaccgagtggtggacacatttcaggattattttggagtctgttcagagccagtgatcaaagacaatgtagttgtggtttatgaggtattggaagagatgcttgacaatggttttccattggctaccgagtcgaacattcttaaagaactcataaagcctcctaccatccttcgaacggttgtcaacaccatcacaggaagcacgaatgtgggtgaccagcttcccactgggcagctgtcagtggtgccttggcgacggactggggtgaaatataccaacaatgaggcctattttgatgtgattgaagagattgatgcaattattgataaatcaggctccacaattactgctgagatccagggggtgattgatgcctgtgtcaagctgactggcatgccagaccttacactttccttcatgaaccctaggttgttggatgatgtcagcttccatccttgtgttcgtttcaaacgctgggaatctgagcgcatcctctccttcatccctcctgatggaaacttccgcctgctgtcttaccatgtcagtgcacagaatctggttgcaatcccagtgtatgtcaaacataacatcagtttccgggacagtagttcccttggacgctttgaaataacggtgggacccaagcagacgatggggaagaccattgagggagtgactgtcaccagccagatgcccaagggggtcctgaacatgagccttactccatcacaggggacacacacattcgacccagtcacaaagatgctgtcttgggatgtaggaaaaataaatccacaaaagctaccaagtttgaaggggaccatgagtcttcaggctggagcttccaaaccagatgaaaaccccacaattaacctgcagtttaagatccagcagctggccatttctggactcaaggtgaatcgtctggatatgtatggagaaaagtacaaaccctttaagggcataaaatacatgaccaaagctgggaagttccaagttcgaacctgaagggagcatttgctgagggaatagtcttgcacattttttcatttcttacttgtctaaaagtaaaaaaaaatatcagcctgtctcctaggtcagtcccctcctggacccacccgctcccttttttccttagccttcagtgccatggaactaatcaagggaggaaaaggtcaccagggagaactggacagaactgaaacacagcaacaccagttctcaaggacaaggtgtgtgatgggggtaggaagcttggtgcttatgtaaccattttaaacgtggtttctataggaaagaccaacatttgtttagcttgcttggctttaattatctaaagccaatgaaagacttctttgttgattttttaagatagaaagattaaaaagaaagaaagatgggaagaaaatgaatgtcagtcaaggaaaggccacttaaggatctgctctatgaaggagaagaaagaggaaaaagaagtaaaggagttaggaggagacacttaaatgaaagattggcaagaaaagcagtcggactctaccttaaggagggatgggaaggaaagagtgtgttggtttctttctgattcctctactcatgtagaaaacacttgtacttctggaaatggactggagactttttaaatttgagtccactattgacatggaaaccccagtggaatcagattttccctcaaagaccatgatggtatcggactagttttcagacactgcctgttgctgtccatcagcacttggtctcttatcttcagtgagaaggtgacccgccttcttcccatggtgggctgcctaaagtgcttcttttctaacccaaaacagttctactcacttccttttacagaattcaccggccattttcctgttacctgatccttctacaggatttttaaaaagtaagagagtttcagagaagccgatcccataatccccagtgcagccagggcccgtgtgtcatcgtactggagtagagggccgactcttcccatgaagggtgaggcacagctgtgagtgagtgagctcatatctccatttgtcagtgctggactggtaccagatcgtaaccttcccgttggtcggaaacttttccatctgtcaccctagaaaaagagaaagcttaccatcgagggtgtggttgatccttgaagctgcttggtaaagttatcatttctcagtcttttcttttgtactcctatcatgtattcattaatatctaccagtcccttttcattctaagacaaaacatttctcctaaatctctgaataaaatcagtgctgtaggaagatggactgtgttgatcatgggtgtaagcaacccagtttaagaaacatggcaactaaagggatacctcaggctttctttcccagtgggtcatttttgtcctagttcagtgtgtctgttactatttaaatatttatacaaaagggtttttgtttatagcttaaggaatgatactgtgctctgcttggtgcatggagaaaaaggaagacccgtactctccacaccctagagctttctctaaatattgtgcaaagtttttgctagttttatcttctgactttggactagtttttgcctgcagttgtgttgctttgtgattttcctctgggatagtgtactgtacacaaccagatgtgttccacactccgtgactccgcagtttgtcctggagtgacatacacatccaccatggaaagggaagcatctctgccgagattctaagtacttgaagcacctctcctgaggaacctacaggattctaaggtttcctaggtcactgaacaactaatcttggtccctgaatatttctaggtttgtaagtgcagcagttttatttcctctagaactcatcctgtttcaagggaagtacctaagaagatatagagtgtttctagggtaagggacctgcaggtgtaagcatagatgaaataactgtcctgtcacatgtgcagcaggccatggagtgtagcgggcatcgctgccgccattcctgcagcatcaccataagcagtgccagggtgtctccatcgagctgtttggttccatgtgtgtttaacatgtgcagaagtagcttctctgtttaagtttaataaagttgagtttcaaccagtc

SEQ ID NO: 6296 - DNA, 392 bp, Homo sapiens
  misc_feature (1)...(392): n = a,t,c or g
ggtcagctcagtgggaaatcagaacctactacttgggggctatttttatagccttctggagttgggttgccttagtacagacatctggcaccattcctagaagtggttagatttgtatttttcccttttaaacagcaaccagtgagtaagatttgagcattctaggcatctggcagtaatccgatataataaaggtgcctctctcccttcccactttggtaatatagcatatgcaccaccagtttatcccttcacatccagcagtaggtcagaggcaaagggagtgtggttaaaacacaaaataaactctgtaaaatcttggaatcaaggggttgtatctatcatcaatacgtttataagctataaaaccagagtaagtcatctntgaataa

SEQ ID NO: 6297 - DNA, 325 bp, Homo sapiens
acaatactacaaagtaatcagtaagatcttttgcaaaaatgttaccccaggcaattatttgtgaaaatcttaatgttaaaacctggcagagacaatcgccaccctagaattcctggtatcagttacttaacgtgtcacttctcctcccagaggcagtacccaagctagacatgaaccgtttgcatttcttggcagacaggagtgagaaagactggggaaggggctccctccccctacccacacaaggattagatctaaagatcagcataagctacagtttgaagtcatgtttttctgagttcaagctgttggaactgaccaccct

SEQ ID NO: 6298 - DNA, 806 bp, Homo sapiens
aaggaaaccgctcccgagcacggcggcggcgtcgtctcccggcagtgcagctgccgcttaccgccgccctctgcccgccggcccgtctgtctacccccagcatgagcggccctgcgcgtctacagcacgtcggtcaccggctcccgcgaaatcaagtcccagcagagcgagggtgacccgaatcctggatgggaagcgcatccaataccagctagtggacatctcccaggacaacgccctgagggatgagatgcgagccttggcaggcaaccccaaggccaccccaccccagattgtcaacggggaccagtactgtggggactatgagctcttcgtggaggctgtggaacaaaacacgctgcaggagttcctgaaagctggcttgagtcaagcctgtccagagttcccctgctggactccatcaccacactccccccagccttcacctggccatgaaggaccttttgaccaactccctgtcattcctaacctaacctgagagtccctcccccaatgcaggccacttctcctccctcctctctaaatgtagtcccctctcctccatctaaaggcaacattccttacccattagtctcagaaattgtcttaagcaacagccccaaatgctggctgcccccagccaagcattggggccgccatcctgcctggcactggctgatgggcacctctgttggttccatcagccagagctctgccaaaggccccgcagtccctctcccaggaggaccctagaggcaattaaatgatgtcctgttccattggcaaaaaaaaaaaaaaaaagtatt

SEQ ID NO: 6299 - DNA, 725 bp, Homo sapiens
  misc_feature (1)...(725): n = a,t,c or g
tttttttttttttcttgatatacacatgataggggtcactacgcttgcccactttgcgggacggggtgtatcccaggatgaggctgcccacagttacagcaaatagaaacatgacaaagagaatgtacatgtaggagttgtcatcacggccaggtaggctggcccgcctctcttcagtctggttgtctggccccagccctggccctggccggcagagcaaattgctgtgaagagtggcatttagagccttcagcacggcatgcaggctctcataccaggtctccgttccattggtagtctccatagcaacagggattgaggtgggggaagactcggtagaagctcagactgctggcaaatccactggctctcagtcagtttcaggagtccctttgtggacacactaaggctcctccacccccgagcctcttcaggatgtctctggacacatctgggatctcagtattgacttcggagctgggaaagcccagagctgcctctcagnaaggctccgggggggccgtttgntcgntggaaggggggcctcttaaccagggtggccaagcgttgggacctgtnatcccnccgnggggggnatcagtgggntacggnngggggggggggggggnnnnnnnncnnnnnnnggnnnnnnnnnnnnnnnnnnnnnnnnnnnnnnnnnnnnnnnnnnnnnnnnnnnnnnnnnnnnnnnnnnnnnnnnnnnnccc

SEQ ID NO: 6300 - DNA, 402 bp, Homo sapiens
cacctggtaaaggtatggaggtgagccagccatgagagggtatcttgtggccatattcctgagtgctgtcttcctctattatgtactgcattgccatattatggggaacgaatgtctattgggtggcacctgtggaaatgaaacggagaaataagatccagccttgtttatcaaagccagcttttgcctctctgctgagtcagagctctgcatatattttaagaaaaggcattgaggaactcaatcaaaccagtattcttttcacacaggtttcatcagtttcacccttttctgtgtgcggctgattttagaaagattgcttccttgtatggtagcgataagtttgatttgcctatgggatgagaacatcagcggaatattttcgacttgctctttcaaaac

SEQ ID NO: 6301 - DNA, 300 bp, Homo sapiens
gaacagttagagtcagcacggagagaagctaagaagtctttcaatgatgatgctatgctgatcgagaagtttgtagacacaccgaggcatgttagaagtccaggtgttttggtgatcaccatggcaatgctgtgtacttgttttgaaagagactgtagtgttgcagaggcgacatcagaagatcatttgagggaggccccagcgcctggtatttaaaatctgaagtaagaaaaaaagctgggagaagctgcagtcagagctgctaaagctgtaaattatgttggagcagggactgtggag

SEQ ID NO: 6302 - DNA, 793 bp, Homo sapiens
  misc_feature (1)...(793): n = a,t,c or g
ttttttttttttaaatgagaaaaaaaaaaaccctcacaacgtgagattcctttacttctgcagcataaaagcaaatgaaggtaagaaaatctcctggtacgaaaaatttgagtaagaattctctctagaataaacaaggtccccacagatagctgaaggaaagaggaagcagttcagtctggcacccggtactctttgggaaaacaaaaagggaggcagattgcattactgctctcttctcatagaaaacggtaagtttttgtggcatggtccattgtccaagagtgtaagaaaagaagtgagttggccattcagatagctaaaatgcagtttcatctgaccaaaaacccaagattatctgcacagtctctgcagtgccaggacaatgcaggtgagagaccaggagagcagggagtggccacgctgggctgcagaagagtccacctctctccggtcgggatccactgcgggggcctctgtggtgacaaactcaaactccgtgggacacacgtcatccatgcacccactgccactccctgagccactggattcatcacttgtgtcctggaaattgacatcattgccattgtaggcgttttttagtttgttggtcatcacacggagagccataatctgctgtctgatgaaagtgtcaggccgagtgatgtccacatccacctcgggattattgatctggttggtgagcccatcattcatgatntcaggcaagtatctggctttgctgtgcccgttccagcattcctcctcgttggacgtgcccgctgtcacgctt

SEQ ID NO: 6303 - DNA, 470 bp, Homo sapiens
cacccgttgactcccatgagcctgtgtcttggggtcctcacctgtgtacctgggccccaggctgggagaaggaatgctggatgatggtctctcaaatctgttctcccctgcccctaactccgtgtcttggagtggatggacagaactgcatggccatgtgactgtcccaggccgagcaaaggtgtccagaggcctgcaggtggtgctggcaccagaggcttctgcatgaccttatgtgcagtggtcactgaggcagacagggcttctgaggggcctcaccctcagggaactcgaggatagtcatgtggctttggaaggccagaagccatttaattgggtgtcatcattaaatactactttcgtcctaccatgtgaagtactttgaataaatgcttttttctgtgagaaaggagggctaaggttacataccttattcctatgaagcattttggttttagcttttaaatcac

SEQ ID NO: 6304 - DNA, 442 bp, Homo sapiens
  misc_feature (1)...(442): n = a,t,c or g
cattaagcaaatgtctgtgtaacaaaaggtgtcatcaataaagttttaacaagttttttaaaaaagcaaaagctgtatctcagaagaaaatacctgcaacaaagcttagggacaaaggattacagacgaagtattcatgttnnnnnnnnnnnnnnnnnnnnnnnnnnnnnnnnnnnnnnnnnnnnnnnnnnnnnnnnnnnnnnnnnnnnnnnnnnnnnnnnnnnnnnnnnnnnnnnnnnnnnnnnnnnnnnnnncacctgagcctcccatgtattaaaactgcaatacttttgcaccagctaatagctggggattacaggtgcatgccaccatgccagtctccttttaaaattttttgtagagacagatctcactgtgttgcccaggttggtttcaaacttctggccatcttcctgccccagccttctgaagtgctgggatt

SEQ ID NO: 6305 - DNA, 1166 bp, Homo sapiens
tctcaggccccacaacttacttcctgcattttaacaagatccccaagggatatgtatgctcataaaaatctgagacactggtttaaatgaaaatggatataaggtatgtataactgggggtggggtgagggtaggaggcatttacaactcagattttatttattttgaaattatcaattgtataaatctaatttattacccaaatgggggtcttttaaaaaatatttttatcgttggaaaccttgacaggtacttcatattcttctaataatttaaacagtccaataatgtggtatacactttgacatccaagaactcaccaagatgtttttcagagatttattctcgatttaactatcatagcatttaatgaatctgatttgtagttcaataaattgtgggttgaactacttatccctgtgtgaacattgaattactttctgtcactgaaactgaggtatttgggtgtggtaagtacttcgaaaattgtaatactgtttgggcattgtctaaattattaaaggttaaaatagaaaataaagtcagaatttttcttttccattccaaaggtgtacttagagatctctattagtattcattcgagatgacatagcagctcatatcatggttgtttattggatttatctgttctaattatataagtgtgtttactgtctgtgttttcacacaaactgctagaatttttaatgttaagacgaaaacatctgaagttctccatggcaaattgaatttttcagtcattttcttttctttttttggtacaattacttcatctggaatgtcttcattgaactcgttattctatttttcttagaattaaaagtggattaatgtgggtttttctgttcattttattgcagtattaaatgcttaagcttattaggaccataattcactttaaatataattgtatagaatatatttgcgtcgatcaaataattgcttcagatgaattcttagactcttgataatatcacacctaatttaacttgattttacaagctgtacaatccagttttagttttctattgtgataataacttttttcaaaccagtttcacatcttaatgaaataacattctctgactgcacttgcttcagtactctcttgcctgcctgtttttgacctctgcatgagttggatt

SEQ ID NO: 6306 - DNA, 1224 bp, Homo sapiens
gcccaagtatcaagagggagagtgagacttgcctgcttctctggcccctggtcctgtcctgttctccagcatggtgtgtctgaagctccctggaggctcctgcatgacagcgctgacagtgacactgatggtgctgagctccccactggctttggctggggacacccgaccacgtttcttgtggcagcttaagtttgaatgtcatttcttcaatgggacggagcgggtgcggttgctggaaagatgcatctataaccaagaggagtccgtgcgcttcgacagcgacgtgggggagtaccgggcggtgacggagctggggcggcctgatgccgagtactggaacagccagaaggacatcctggaagcagaagcggggccgcgggtggaacacctactgcagacacaactacggggttggtgagagcttcacagtgcagcggcgagttgagcctaaggtgactgtgtatccttcaaagacccagcccctgcagcaccacaacctcctggtctgctctgtgagtggtttctatccaggcagcattgaagtcaggtggttccggaacggccaggaagagaaggctgggggtgggtgttccacaggcctgatccagaatggagattggaccttccagaccctgggtgatgctggaaacagttcctcggagtggagaggtttacacctgccaagtggagcacccaagcctgacgagccttctcacagtgaatggagagcacgttcggaatctgcacagagcaagatgctgagtggagtcggggggcttttgtgctgggcctgctcttccttggggccgggctgttcatctacttcaggaatcagaaaggacactctggacttcagccaacaggattcctgagctgaaatgcagatgaccacattcaaggaagaactttctgccccggctttgcaggatgaaaagctttcctgcttggcagttattcttccacaagagagggctttctcaggacctggttgctactggttcggcaactgcagaaaatgtcctcccttgtggcttcctcagctcctgcccttggcctgaagtcccagcattgatggcagcgcctcatcttcaacttttgtgctcccctttgcctaaaccgtatggcctcccgtgcatctgtattcaccctgtatgacaaacacattacattattaaatgtttctcaaagatggagttaaaaaaaaaaaaaaaaaaaagtttt

SEQ ID NO: 6307 - DNA, 390 bp, Homo sapiens
actgggtggctcaatcaatcattttggaataaatgcataagatggtagagatatagcaatattgactgctaaaaagcaataataaagaaaaacaagtccaagaaattgaatgcctactatacatccaacaacataatgagattatataatttaaacttcataactgaacatttagataattcgtgatccctattttacagatgggtaaattgagattcataaatattaagtaatttgcccaatatcacacaactataaagtatcagaatcagttgtagctccaaagcccatgtttttgcatttataatatactgatgccttcaggaataaaggggaatacttgaatcaacccagtggagtaattaagctgagagataatttattttgtgt

SEQ ID NO: 6308 - DNA, 406 bp, Homo sapiens
agacgagctagcaccatgagcttcaataccctgtatgtttgcctgtatgtttaagtcattcttctcaactcacagactttccccccaaaaagtaagcctatatagtatatagttctatattcattttgctgttgttgttaatataggctaaataattccccttatcattattctactacaataggagaagccaatacctgacaaactgctatgggtccttctccttctccatggcaaaatccctcactcaccacagcactcttccctgctgagccaagatggctggcctcagaatccttctcaacacagtgttccaagaagagactatgaatcaatcacaggctgggtgtggccgattaagcttatctacaatccctgttctaagtcatagattaatggccacaca

SEQ ID NO: 6309 - DNA, 661 bp, Homo sapiens
tatttttaagatgttgaaatgttagtagtgtttttcttgatttttaacagtgaaataatcaagaaatatatctttaagttaatctgcaaagtcaggctgtgttctgtaaaaggtatttcacagcattttctgtttaactgtaatctgttatcatggagatctcagtaccagagcagtgaattttttgaaaaatattgactgtctttattcaagtcagccatcttgggtaagagcagttttcatccccccactgcccaaatgtaaatataggatcacctaatttttcttacagaaagatactgttaagaggcatgcacttttcatcggatggtcacttgtttcttgtttcaaagacaaatatttggatagatacccatacttgctatgagtcggtcacagtgctgacactattttaacatcatttaaaatggaaagatctacatagatttttgacattattccagaagtaacatgcaagtaagatatttttattgtcattttcttcatgttaaaggagctacttatgaaacctatttttttatggcctagagtttatgagtgctttttccttgtcttctgaaaatggaataaattggatttttgatacttaagaatttcctaaagatagcttttgtaacagagaaagcatgttaaattacac

SEQ ID NO: 6310 - DNA, 1812 bp, Homo sapiens
  misc_feature (1)...(1812): n = a,t,c or g
ctccatcaccagaaaaagctgaagagggctgagtaaggagggacagatgctggccagggcaacaggttttgaagcataaaactcttgccctgtttgctgactcgttgaagacagggtgccccagaaggggatagacttccctggggcgtggggagagcaggaggctcaagtgagatgctcttggtgctagaaaccgccctccctcatgcctggggtctctccctgccaggaccctgccgccgcgttaggctctgccctgtctcatcccagcccaacagcatggtggtggaacaccccgagttcctcaaggcagggaaggagcctggcctgcagatctggcgtgtggagaagttcgatctggtgcccgtgcccaccaacctttatggagacttcttcacgggcgacgcctacgtcatcctgaagacagtgcagctgaggaacggaaatctgcagtatgacctccactactggctgggcaatgagtgcagccaggatgagagcggggcggccgccatctttaccgtgcagctggatgactacctgaacggccgggccgtgcagcaccgtgaggtccagggcttcgagtcggccaccttcctaggctacttcaagtctggcctgaagtacaagaaaggaggtgtggcatcaggattcaagcacgtgggtacccaacgaggtggtggtgcagagactcttccaggtcaaagggcggcgtgtggtccgtgccaccgaggtacctgtgtcctgggagagcttcaacaatggcgactgcttcatcctggacctgggcaacaacatccaccagtggtgtggttccaacagcaatcggtatgaaagactgaaggccacacaggtgtccaagggcatccgggacaacgagcggagtggccgggcccgagtgcacgtgtctgaggagggcactgagcccgaggcgatgctccaggtgctgggccccaagccggctctgcctgcaggtaccgaggacaccgccaaggaggatgcggccaaccgcaagctggccaagctctacaaggtctccaatggtgcagggaccatgtccgtctccctcgtggctgatgagaacccgcttcgcccagggggccctggaagtcagaggactgcttcatcctggaccacggcaaagatgggaaaatctttgtctggaaaggcaagcaggcaaacacggaggagaggaaggctgccctcaaaacagcctctgacttcatcaccaagatggactaccccaagcagactcaggtctcggtccttcctgagggcggtgagaccccactgttcaagcagttcttcaagaactggcgggacccagaccagacagatgggcntgggcttgtcctacctttccagccatatcgccaacgtggagcgggtgcccttcgacgccgccaccctgcacacctccactgccatggccgcccagcacggcatggatgacgatgggcacaggccagaaacagatctggagaatcgaaggttccaacaaggtgcccgtgggaccctgccacatatggacagttctatggaggcgacagctacatcattctgtacaactaccgccatggtggccgccaggggcagataatctataactggcagggtgcccagtctacccagggatgaggtcgctgcatctgccatcctgactggctcagctggatgaggagctgggaggtacccctgtccagagccgtgtggtccaaggcaagggagcccgcccaccttatgtagcctgtttggtgggaagcccacccatgttcaccggttcaatgcctttgggaactgtttctttncttc

SEQ ID NO: 6311 - DNA, 195 bp, Homo sapiens
gagcacgaaaccaaaaacagttgcactgaaatgggcaagaagagtaatgtcagtttatacatgacaaccccttcccaaagttgttacagctcatgccaagagaggacaccctggcctatgacttttccctcacagggaaggaaagagtagagcattcagccacaccttggcctttggacacactgtgtgaggaac

SEQ ID NO: 6312 - DNA, 171 bp, Homo sapiens
  misc_feature (1)...(171): n = a,t,c or g
gtaaaatactacttataggattcggcagtacaacaatgaaaaaaaaattcaagatactttcagaacatacattctcattgagagtgatactgctctcaaggggtaaaactnggttcttaggagaaaaaaaaaaatctcagatattacaatagtttctggccatagtactta

SEQ ID NO: 6313 - DNA, 918 bp, Homo sapiens
ttttttttctttgtaagtagtgtattttaaatagctttcaagatacacatattttttcctttaaaaaagtctgttggagcagttttgttcttgaattttgctggtcatcctcatggtcccgagcccccctactccgggtcgtggaggcggccgagggggaggctgggggcccacgtggcgatcctggcggcacctgcagcactgggggagccgctgaaccccgtgcttcagcgctgggggagccgctgggccccgtcttccgccacaaaccatgcatggccgccacgtgagctcaaacgtccgtttatttcaaagcagtaataatttaaaattataaaaatctttccaccgctgaacgtttagagggtgaggttagacagaggacggggaggctggggacgccccagaggggaccatgtggcccacgccttcccaagccagggggccggtgggccgggccggtgtcctgccctggaacaggcgggacctgcagcgctgaccagccaagcgtggcgccgccggggcacccagtctgtgggtgccgtgtggcgctggctgagggtgggtgggaaaggccccgtgctttcccgacggccgacgtgggctcacgagttgcttgtggcgttctcgttgctgggcgagctggaggaggacgatgacgacgaggaggagaagctcaccccagtgaggccaggggggtttgtggccgtgttctgtcccgtgaggctttttcggcagacggggcagctgtcgtgctgctccagccagggcacgatgcagccgtcgtggaacaggtggttgcagggcagctgccgcacacgctcacccagcgcgtagtcgtccttgcacacagggcactcgagcccggagcctacgtgctcctcagtgacggggacggtggggagggcctggattttc

SEQ ID NO: 6314 - DNA, 347 bp, Homo sapiens
  misc_feature (1)...(347): n = a,t,c or g
aacaacaaaagcactggaggggctcaatagttagttagtttgtcccagacccttctagaatattgagatcctggacagtgcttctgagaaacctgcagtctctgtccaaggagcccttaaggaagaaaggcaggagtgtggggcaggaagaccggcttcccctttccattccacacggctggctcgcaatattctgtttctcctgcgacanctgggttcctccctgctccccagctcgcctctgccaccattcttccctcagtccagatcaagagttcaaggggacgggggacagatgatcagaaaggcccagttcagggcaagggaaggggggaggaaaaggggaa

SEQ ID NO: 6315 - DNA, 363 bp, Homo sapiens
cacccagctggttctcaggcttaaccctcctctaatctgcatgctgtagccacagggtctacttaaaacataaatgtgatcatgtcactctctggcttacaccctttcagtgatgatctattacattacatcatctgttacacttaactcagcatacaagggtctctgtgaatcaactcttcaattgcctccaccacatatactctaggttagagcccttcagaactaattgcctttctcttttaccgctatttctagctgtttctttccttgctagaaatttcccattctctccaatctaattaactcccaacttccttaaagatttcactctgcccgccccactgccatccctcactcttg

SEQ ID NO: 6316 - DNA, 563 bp, Homo sapiens
  misc_feature (1)...(563): n = a,t,c or g
ttaaggtactccagcctcacctggtctccagatggacctcaactgctcctgcgacactgataaaggatgccgggtttcggggccttgggatctccattttcatgccagaggatagaatgtccctgcggcaggagctggggtcctgcacttatgccagcttctgcaaatgcaaagagtacaaatgcacctcttgcaagaagagtgagtgtgggggccttccctggggaatccagggtgctggggcagagtcagaggagggaacccaagagcctcagcaggcaggagcaggacagtgacaagcttccccacatccccctttcctgactgcctgctcctgcctacccctgtgggctgtgcccaagtgtgcccaaggctgcatttgcaaaggggcatcagataagtgcagctgctgtgcctgatgctgggacagccctgctcacagatgtagaaagagtgncctatataaacttggaatttttttccatgcaaccatgacccatttactgtatttgtctctcttttatgaaatatgtgaatgataataaaagttgttgacttanatt

SEQ ID NO: 6317 - DNA, 973 bp, Homo sapiens
gatccggtaccccagtgtgctctaaagttttttttgtttaaagaaataaaaatcattttattaataaataagccttagaccagaatgtgatgggaaatagaggaaaagagctaagagtttgaaatcagatgcttcagtgttctatacaacccattaaggacatgttttcaagataaacactaatcagtcctcagggaagaggacacatagttgaacagtcacacatagttcatcctgactctacttggtaatggaggtgaccatctgtgtcagctaactagcgtcatcctgagggagggggagaaaccctaacccacaacttttggcaagtgtgagttttacaacatggcgacaggggccctctctggtgaggctcctacaatccgacagaaactgatgtcagcagtaaataataaaatttagaatatatgattaagtacagaatttatttgaaggcaaagcttggaaatagccacgtggaaacatcaactctaaatgaatgggatcagcgttcccaagtagagacgttaagatttcacacacagggaaagacagagaagctttagcagaatcaccacgttttttattctgggccagtgcataggctgcagcaacttgattgattacggatagatacacttcaaggaaggttactttatcactacataagaagggacaatgatccgaggaggtcttatctctggggctacttagtcttcttaattacttacaggaaaactcttagaagttgcacctgcattccactggactcaggttgcctgaccacattcctctcaaggctcagaattatctcaaagtccatagccttaaattgaagttatttgatgtttgaattatttaatttcctactgagataaaggtactgtttcccttgttgtttgcctttcaaagagagctcccaagtccttcaaaaatacacccctgggtcattaagctgaaaaaaggtttaatt

SEQ ID NO: 6318 - DNA, 530 bp, Homo sapiens
cactgtcttaacaatggtactgccctttatttacacagagaagatgctcagtaatgacaacttcatcccatgccaccttcccacctaaacaaactcactcctctctccacccacaactatattttcctacatctctatcatttcaaggtacttttagaaacaaagcttcaaacatttagaattggtgtctgataacttgattaccttcagagtcctgggtaaagagcaaatcaggcttcagattttgagttggcccatcctcctggcactgagcccaaggactgttaggaaacggccctaagtcccaattccagttattggttacatcttgaaaaggagctctagtgttgtgggcaatgacccgctggccttgagaatcttcagtgaaaagttgactccaggagtccttgtcattcttttcattgtcgcaggaaaacacagaaactggactacggctttgtttcactgattctatgttttctccattccaggattccctgtatgtttgaaggaggacaggggcctgcctg

SEQ ID NO: 6319 - DNA, 500 bp, Homo sapiens
ttgatgattataaaaatttttttctattttacaacataggttcagctacactgaaaaaattacactgcttattgaaatacatttcattttagaaacagactaccaaagaagtctatacaaaaactctaaaataatttctcgtagtaaaataaagagtgcgttaggagagctacacaaagaagaaaatttctgtctttctctataatgcttgatatactgtgaaacatggccagctcaactctgtagctggcaccaaaagctgaaaagaattccttaccatacacagtgatacaattaatgctctggattaatctcacagccttcccgatttagtgacaaaggaaaccaggcctatcccctctttgaggagaagtctgggatataaaagcaagcatacctcatcagctgatatgaaattataaaattccacaagtctgagtatttgaaacttataaaagtcatcagaaaatgcaagcaaattgggctttagttcagtggtt

SEQ ID NO: 6320 - DNA, 461 bp, Homo sapiens
gttcacaatatctatggagtgagtaatttgttgagtgggcctgggctcagaaggtaggactacatgcagtatagtacagttgtgcagtgcacatcctgaacagtcatacatgataactctggcatagtaagaaagaatgtgggaaaagaaaatagtagctgggctataaagtgctttgcgagccaggttacttgttcttatggagggatgagggtagaagtaaaagagaaggtatcagaattgctgtcaaattttccacattatgtatgcttctgaccacgatggggatgctgatgtcctccccttacccctactactttcccaggatcttcgccacattggccaattttactgttaagtccatattttcttcaggtgagctgttagctaaaggaatgttctggaggaaaccactaggaccaatgggagagccctcaccaggtttttttaagaagggccgt

SEQ ID NO: 6321 - DNA, 340 bp, Homo sapiens
aaaggtgcaaacagaagtgcacctgggctaaaacgtcaagaactcttaaactatatcatggatacagtgaaagattcatctaatggtgctatttacggagctgattgtagcaacatactactcaaagacattctttctgtgagaaaatactggtgtgaaatatctcagcaacagtggttaggtatgttttgaaggttgttgtttgtgaatttttcctcatgaaatgaaacttcaccaaagaaagcactctgtctgtatctgtctatatcccccaagtgacctgacagtttaacagtactttagtaaaattatatggttatcgaaaaataaaaaaaaaaaa

SEQ ID NO: 6322 - DNA, 233 bp, Homo sapiens
  misc_feature (1)...(233): n = a,t,c or g
cgtcgacagaaaaaagaaaaaactaccagcctgaaaatgcatagtgtttgctaccttattgcttttagcacatctagaaagacactaaacccagtgagcttgcaagtttcaaaatattgtgttgtatatggctttgcttaaacggatatatttgtttctgagtgaaaactttttacgtagaggtttatttgtagaggcttgtaccttaagtnaagtttacaagcctcgtcgac

SEQ ID NO: 6323 - DNA, 370 bp, Homo sapiens
tggaatgtttccatcatcatagaacattctgttggacagtgctgtttgaaggcttcagagcagtggttttcaacaaaggatgattttgcccccaggctacttgtggcaacatttagagactttttggttgtcacaacccagaggatattactggcacctacaggatagaagccagggatgctactaaatctactatgtcacaggacagcacatcatgatgaagaattacccggtccaaagtgtcaagagaactaagattgagaaatcctgctttagaggcacaatctcattgaatatcctcaataatcttatgaggccagtgtgtcgtcacgcctgtaatcctaagcacttaaggaggcagaggcaggag

SEQ ID NO: 6324 - DNA, 507 bp, Homo sapiens
tggggaaccaaaactatactgttttgtttaatgtacttttcagtggattcgcaggtatcttttaaaaaaagaaaagagtaaaagttaattattcaagtgctactaaggttagcaaagaaaccatttggcattaattatggtgtgattagggaaatctctaagcaagatggcctgtcaaaatccattttcctgttgagggaagtgacctgggtttaaacacagcctgagaagaggcccccaaacactgcttttctctctttctgcttagtcataggaggaagcaaaaattcaacaaccaacaacaaaatgaacgtgagccaacgttacccttgggtgtttgctctcccttgatgactctttgggaggagtgagattatgcacagatcaagatttaaaagtcactgctttagagtgctttatgaacaaacaagctctgttcaggacagggttcactgcctagttagactagacagtccagccccatacagctctcaggttggcaaagtg

SEQ ID NO: 6325 - DNA, 165 bp, Homo sapiens
cagaagggttaagaagtttgctcaggttacacagctagtgagtagcaaggctaggattttaaccaccttgttctgcttttggcactcatgatgtggaagcacctaattggagacacaccactggccaactcagggtccttggttgattcattaagatctctaacc

SEQ ID NO: 6326 - DNA, 253 bp, Homo sapiens
  misc_feature (1)...(253): n = a,t,c or g
cttgataataaaaactcccagtgcctgatgccagctgacagacacctgggagttttcccaggtaccctgtgacctagagaaagcttggattcctgcctttggcttgggctggcaagccctgtgcctttactctacattttaatgccagggagacctggaactggagaagggagtnctgtgggaagaaaacagaaggaatgttgttcccttgttttagctttgtgttcatccattatgggttttgggttttttt

SEQ ID NO: 6327 - DNA, 91 bp, Homo sapiens
aaaagtttttaccaaatatatatacttcaatgtaacatggatgttaaatgtttgcaaaatagttcacttgaaaacagtattgttttagtct

SEQ ID NO: 6328 - DNA, 424 bp, Homo sapiens
ccacattttcttgcttctttgcatgtttcttaattttttttattgaatgccaggcattgtatgtaaaggaatagtagacaataaagtaatattaatgaccagaaaaaaatcatttctccttagtcttattaggccactagtgggctggggggtggggagaagggtggtgctgactgaatcatttaagtgattttaatttgtaatatatttgcatgtattagctgcttctactaatcacttatttgtccataagccttgcatctagaaatatggcaatataggaatattactgctttctgaagtttcatatgcttctcaccttttattttatgtttgatgattttaatatttttcctgcatcagagtagtaggaatatctttgcaacattaagaaatacttggtatgggttacttacttacaccg

SEQ ID NO: 6329 - DNA, 780 bp, Homo sapiens
  misc_feature (1)...(780): n = a,t,c or g
gtgtgtgtgtatgagagacgtgcacctatgttagcctgaggagtgtatgtctgtcaggacagcaggggnctcaagactcaggacttttattaggcctccagttatggccttccaggaagcccggcgcggagaagcagcagaatcatagagattaataaagaatgacgtttggaaatggagtgatccaaaagtgatcgccaccattcctcccgcaatgaacccaccgccctgaaccagaggagatcagcccttaaaagttaacttctacagcaaaaccctcttagtaaagggcaacaaagactacatcctgacacctccaaggggcacacggtttttacagcgcgttttattattcataaaaaaataaatttatttacatatgttatttcctgtggtagtgcagcctcggggcaagggcgcgttccctatcgcaggatcacttgctatggtaagccgcccaccctgcgcgctcctccgccggggaagaacctgcgcggcaggacgtggtgttggagttggggcgcccggagcgtggagtggggagacctgatgcagagagtctggagtcggagctgggggtgctgcaggtaggagcaggagcggaggcgaagagggaggcccgaagaagaccccacacaggtttggcgcacggggggctttggggaggcttcagcccagaagtggagagggttgacagacgcctgcctgattagaaaaagccgggagcttgggaaaggagacgggattgaagaagccacccggcaggaaggcccgaaaccc

SEQ ID NO: 6330 - DNA, 70 bp, Homo sapiens
ggcacgagcggcacgagtaagttaaaattatttttaaaaaacaaacaaataaaaagcaacaacaaagccc

SEQ ID NO: 6331 - DNA, 1176 bp, Homo sapiens
  misc_feature (1)...(1176): n = a,t,c or g
ggtcgactccctactgtctttgacaattattctgcggatgttatggtagatggaaaaccggtgaatctgggcttatgggatacagctggacaagaagattatgacagattacgccccctatcctatccgcaaacagttggagaaacgtacggtaaggatataacctcccggggcaaagacaagccgattgccgatgtgttcttaatttgcttttcccttgtgagtcctgcatcatttgaaaatgtccgtgcaaagtggtatcctgaggtgcggcaccactgtcccaacactcccatcatcctagtgggaactaaacttgatcttagggatgataaagacacgatcgagaaactgaaggagaagaagctgactcccatcacctatccgcagggtctagccatggctaaggagattggtgctgtaaaatacctggagtgctcggcgctcacacagcgaggcctcaagacagtgtttgacgaagcgatccgagcagtcctctgcccgcctcccgtgaagaagaggaagagaaaatgcctgctgttgtaaatgtctcagcccctcgttcttggtcctgtcccttggaacctttgtacgctttgnnnnnnnnnnnnnnnnnnnnnnnnnnnnnnnnnnnnnncaacggtggagccttcgcactcaatgccaactttttgttacagattaatttttccataaaaccattttttgaaccaatcagtaattttaaggttttgtttgttctaaatgtaagagttcagactcacattctattaaaatttagccctaaaatgacaagccttcttaaagccttatttttcaaaagcgccccccccattcttgttcagattaagagttgccaaaataccttctgaactacactgcattgttgtgccgagaacaccgagcactgaactttgcaaagaccttcgtctttgaggaagacgggtagctttctgcagttaggaggtgcagacacttgctctcctatgtagttctcagatgcgtaaagcaggaacagcctcccgaatgaaggcgttggccattggaactcaccagtgagttaggcagcacgtgttcccgacataacattgtactgttatggagtgagcgtagaggnttcagctctttgggatcagtctttgtggantttcntaggcgagttttctggcccggctt

SEQ ID NO: 6332 - DNA, 830 bp, Homo sapiens
  misc_feature (1)...(830): n = a,t,c or g
cctcgtgtaattctcagaacaactccagaggtaggttcagtcctctacccctttcacgaatgtggacggtgaccctcagaacggggaagtctgtaaatgagaaagctgtggatcatagtcacgacagcttttccccacagcctgactctacacacaggtttttggtgcatttgcccaaagaggttatgtcgactgctcccccaggacattaaaactggaggagcccttggcagtcgttgctcgtgttcccatcagcttatagatcaggaagccaaaggccagacgaagtgttaccacttgccaaggtcccttggtctaggcaatccctaaattatatagaagatgaaatccaaaccagtggctctggctggttgagaagctgggtcaaggtctgaagaagagaagaggttgcaactagtcattaaaatgaaggttttgaggatcacggaccttcaattaaagtccagagaaacagcccctggggccctcctgaaagcttaacctcttggctccaaggtggagaggtgttcatctcctccactcctttaaatatggagctcattcctggaaggggcttcctcaatccggaaggactgatgctggggatggccatagaggaatttggccgcaccacgaaaccccgtcagtggcgtgagagtcacacacgatgggcttcctcaccaggcctgcaacatctgttgggggaagaaaggaattaaaacagggggaggcctggatttttgaaatctttccagtgtcattcgagcgcattctgtgggaagcccgggagtttggagagntgccgcggcctggatatatttcctgattgg

SEQ ID NO: 6333 - DNA, 323 bp, Homo sapiens
atctgatggtaatgtggtgtgattccattattccatagcctacagcacgttgcagcagaaacaaagctccaatgacacagatccttcctcacaatcaagatatcaactcgaacaaggcttacctataactaggtgaccatataatttaacatccaaatgaagaggtttgaaagtgaaaggggacatgcagaaagaaaccaggtgggatgcagaaaaatgggagcaatttggcagtctccagaaaaccagaacacatggtcccaataactacagctaaaaggtgaatgtcagtatttggaagtttccttatagcagtaaactct

SEQ ID NO: 6334 - DNA, 330 bp, Homo sapiens
gcagttcatcttcctccctgtgtactttccatttgccttcctggaatcctgctgcatcacagaagctggaagttctgatgttccactgaaatcacaatggaaagtcttgacttgactggtcacagtaatgaaaggcagtaatagaaataaggatcattcagcagaaggagaaggggttggaaaacgaccaaaacgaaagtgtcttcagtggcatccattgctagcaaagaaacttcttgatttttcagaagaggaagaagaggaagacgaagaggaggatattgataaggttcaacttcttggggccgatggcctagagcaagatgttgg

SEQ ID NO: 6335 - DNA, 1237 bp, Homo sapiens
  misc_feature (1)...(1237): n = a,t,c or g
gtcaaacatctgccttgtttcagtttgcagagatttcttcaaacacttcgcagttgggtggtgctgagcctgtaaaacgctgtggaaagtctgcactctttcaactggcagagatgtgcctggcatcagaagggatgaaaatggaagaatcaaagctaataaaagcaaaagaatccgatggtggaagaattaaagaattagagaagggaaaggaagaaaaagaaattaaaatggagaaaacagatgaaactaggttacagaaggaagcagaatttgaaaaatcggctaaggaaaatttaagagattctaaggaattgagaaattttgaggcattgcaaatagatgacataatggctataaaaatggaagatcccaaagaaattagaaaggaagagttagaagaagatcacaaatgtagtcattttcctgatttttcttattctgccagtagcaagataataattagtgatgttcccagtagaaaggatcatatgtgccatcctcatggaattatgatcattgaggatcccgcagcattaaacaagccagaaaagctaaaaaagaaaaagaagaaaagcaaaatggatcgacatggaaatgataaatccacacccaagaagacttgcaaaaagaggcagtcttcggaatctgacattgagagcgtcatatataccattgaagccgtcgcaaaaggagactggggcatagagaaacttggagatacccctcgcaagaaggtccgcacatcctcaagtggcaagggaagcattttggatgccaagccaccaaagaaaaaagtgaaatcaagagagaagaaaatgtcaaaggagaaatcctcagacaccaccaaagagtcaagacctccagatttcattagtatttctgctagcaagaacatttctggtgagacaccagagggtataaaagcagaaccattgacccctatggaagatgcactaccacccagcctatcaggacaggccaagccttgaggacagtgactgtcacagaaaaatagaaacttgtggttccaggaaatccgagaggtcttgcaaaggtgctctttataaaaccctggtgtctgagggcatgctcacctctctgcgagctaatgttgacagaggaaaacgaagctcaggaaaaggaaactcctctgatcatgaagggtgttggaatgaagaaagctggacatttagtcagagtgggaccagtgggagcaanaattcaagaagacaag

SEQ ID NO: 6336 - DNA, 467 bp, Homo sapiens
tatttgaagaaagctatagcatttagcgaaatttgactgaagtaatgttctgagtttgcattagtgggattggtgatgttctcagaagaaaattggaaacacttgtgatgaattgtctttcagatcacttagattttctgatgtaagaggacagctatttggttctgatacaggcctgcttacttgggatgtagggttagtaaatggggtttctgctttaaaggactgacttgctatcgcacaaaagaggcagacttgtaaacacaatgggctttggagtttggtctgattgggtttggtttagtattcctatgagcgtaaatggtaaaattcttctgatacccactctttagactgtgccttctgctctggttctttgttttatgtttaactgcctggtttcctaattgccaggtgtatttacaggatacaaataaggagtaaaggaaaatatatttccatttata

SEQ ID NO: 6337 - DNA, 709 bp, Homo sapiens
  misc_feature (1)...(709): n = a,t,c or g
caggaaggcaggaccgtgcagcattcaccaacctggattttggagtcagcgttcaaatctgagctctgctgtcttattgaggcggtgaccttggtttggataagttatgtaacctctctggccctctcaaaataaggataatcacggttggcatcaagattaagtaaaataatgtgtgtaaattgtaaggaataaatcacatgatgaatgttaagtactgggtttnnnnnnnnnnnnnnnnnnnnnnnnnnnnnnnnngaggctattgttagcccatcctgagccaagccttcctccatctctgcaagagcagaggaggcatcggctctgccctgtatctctgattctcctttgtggaagagtcagtggcctgaaatactgggctttatctatctgtcttctacatccctgggtcagggaattgaagacagggtagaaagcatgggaattttgtataaaccttcatttggcttgaataaggtactggaaaccgaggaattgctttactcaccatccctaggccttaggggccccactcctcttcttcctcccagcagctggtcataacttcagtgacttctctctgtgtgtgcttggagagtccctgggagcagcctgcaggggcgggtgagagggggatctcccgcttcatgtttcttgtagtacggctgtaagaattgtggcagggccttctgttcaggctgcctaa

SEQ ID NO: 6338 - DNA, 140 bp, Homo sapiens
tctagagaaagaagagtaacaggggcataggaaaagcaagtacagaggccctgaggcagcaatgttccctgatgtgtttgaaaaaaacagggaggccagggtggcttgagaatggctggactgcaattgtaataaagctt

SEQ ID NO: 6339 - DNA, 323 bp, Homo sapiens
gaatttcaaagcctgctaacatccacgttaagagtccttgtccagttgtgggaaattcaaattctcagaataaaataagtaatccctcacagcagacagctttgtcgatggtaatgcacaattatgagtcttcaggtataaatataacaaagggaacagaacttcagatagctgtagtgtcaccgttagttctgtcagaggtcaaaacattgtctgtcaaaggaataacacctgcagtgttacctgaaacagtgtatcccgttattaaagaaggcagtgtttgtggttttacaaaatcaattggcagaaaatgcaaagggcaa

SEQ ID NO: 6340 - DNA, 368 bp, Homo sapiens
atttcacattccttttttgtttatcatttggaatttactctatttaactgactggtgaacatcctattattcaaccaagctgaataggctacatttaatgctatgaaagctctgtatctatgtgctttatatcccatcttgtttctgttgataagtgtaactttattctttaagtaagaaactgctttaattcctttgtataattatattttggaataagcaagtatgtataattaaagtgaaattccttctgaagtaagttctaaaattgaattttactggaaattatactagatgttaacagtattttagaaagtctcttggcttactaacatatgcttaaaataaattttttctttcaacaatag

SEQ ID NO: 6341 - DNA, 430 bp, Homo sapiens
gaagaaagtgtcagagccgctccctggactgtcggaagcggagttgtttgtaaaggcaaatgcagacgcctcctcctcctgtcacttcgggacaagttaacaatcttcagattcgttattaaagcctcgtgtaccctatgtgatctatcaggttcggctttagagtgtggtgaagggtacttttcatggtgcatggaaggaaagccaatgcgcaggtgtaccaacattcgaccaggagagactggaatggatgtaacaagccgctgcacccttggagaccccaacaaactgccagaaggggttccccaacctgcccgcatgccctatatctcagacaagcaccctcgacaaaccttgggaagtgattaaccttctgaggaaagcaccgggagctatgtgatgtggtgctagttgtgggcgccaagaagat

SEQ ID NO: 6342 - DNA, 549 bp, Homo sapiens
ttttttttgtgggaggaaggataagttcaaaacgaaaacaacaaaaaaccatgataaattaaaaccaaaaataaatattcttctgcacagagttgaaaattattgtgcatcttgcaggtgaagtactttcattggattgtatttccatttgttgaggcaccggcaaataataaaatttgttctaatgttttctcaagctgtacaaagctccaaggtcaaagctccccagaatacagaggaatatatacaagactgtcttctctgtgttcaccaaatatgggattcacaatgtgtcattttaataactcctacgccaccccctagccgacggtaattcatcccgccatataacctccatgtattggcatcaggatcaaaaacttctatggtcttcaagtatgttgtgccatcaaaacctcctactgccatgagctgtccattgaccactgccaggccaactccactacggcgtgatgtcatggccaccactggagaccactggttggttctggggttgtatctctcagcactgctcagctctgcaggtgt

SEQ ID NO: 6343 - DNA, 413 bp, Homo sapiens
  misc_feature (1)...(413): n = a,t,c or g
aaataatgaaagaatagttgtattattctgggagtcggatagatcttcttaatttcggaaataacaggannnnnnnnnnnnnnnnnnnnnnnnnnnnnnnnnnnnnnnnnnnnnnnnnnnnnnnnnnnnnnnnnnnnnnnnnnnnnnnnnnnnnnnnnnnnnnnnnnnnnnnnnnnnnnnnnnnnnnnnnnnnnnnnnnnnnnnnnnnnnnnnnnnnnnnnnnnnnnnnnnnnnnnnnnnnnnnnnnnnnnnnnnnnnnnnnnnnnnnnnnnnnnnnnnnnnnnnnnnnnnnnnnnnnnnnnnnnnnnnnnnnnncagcctggggtaacagaacaagactcttaacatccacacacaaccacacacctacctaccttacaaagtattagatgtgtttactttacataaaattt

SEQ ID NO: 6344 - DNA, 624 bp, Homo sapiens
tttttttttttatatcattctttattttaaaagtgctttaccaacatatactaatcttcacaacattcaagggaggtagataagtattacaccactttcacagatggagaaactgaggcagagattagtaagttgtattgaggggcataatatacggcacaattaggaaaagaatttgttgcagtcatggatcactgaagacctttctcatgatttctgagtcccatcaacacaaaaagcagcagatgcagcatggaagcaggtcatcactagtttggctagtctaaggttaaacattaccttgttgataccagatgttgaatatgctgtcctttgggcaagcatccccctcaaacgcattcttacatgcttccacctctaaacaggagaggggaagctgttgtgagtgcagcaggagggggtggagaaacagcgctgggaaggaagatgacagaagagaaaacatgaactgatataaaagcgagggcaaggacaaacaagaggaccctctgggaaccagtccaacagaaaggaaagccacagcagaaaagaagtatcatttgaaaagctcagacatccagaaatgctactcaaagtgtaattcttagcaatgacattcaaagc

SEQ ID NO: 6345 - DNA, 419 bp, Homo sapiens
ctgagccatttctacacagtgtctgtttcctcagaacaccggtcttcaccaaaggcgtgggaaagggcagagagcacaggacatattctggaattcaggtcaccttttacatctgcctggagttgggtgagcgcctcatgaatgactcggcaagactgactgccactgctaaccagggggatgcaagcaatgaggaggacctgcccaggccgggtgggtgtctgctccctccctctggtccccggcacatctctggaccccctgccctgctgtcggagagagatgacgggcaacggcgtattctcagagacagggcctgcctgcaaatcctttaaagtcaatgggatgaaatgtataccctttttagaaaaaataggacttagcaagttgagtgcaaataactgatgcaagactgggat

SEQ ID NO: 6346 - DNA, 422 bp, Homo sapiens
  misc_feature (1)...(422): n = a,t,c or g
tagcctttggaccaatctagaagtaagcagagaagggggttaagatgcctttcattatgttaacgtttaatcctgagagtttacataaaaagccagatttctgggtctttgagaaaaatgagatctggcaactactagttccataccacgtggcaaccagttggcagctcccctcagactagcatgctgtcatttttgccacagttccttcctcatcagtttttatagcatcacattgatcagtggattcagatacctgtatcatgggtaaacaaacctctatcatgggcccaattttctattgttgtttctttacatttgtcatgcactctcataggatatgtcagctttgacttcatttaaaaagggntaatcctgccantgtgtttggactacttgaggtggaagggcggctttttcaa

SEQ ID NO: 6347 - DNA, 336 bp, Homo sapiens
  misc_feature (1)...(336): n = a,t,c or g
aagaagcagatatgcgattaaaaatgaaaataacataacaacacggattattgtgatagatcctgtacctttttaaagactctgacattccacttaggagtaagatggaaaagtcccttgttctaaaatttgaaaatgataaaaataagtcatattaatggaaattaaagaaagaatatgtccattgttaggttatgtaaagggtacacatcttcacttctttcacatcgttttttgattttaaatttaatgttaactgaaatttttaaaatgacgggttttaatattnctggctaggcagttttattttttatgtggattaaattaacngttaaa

SEQ ID NO: 6348 - DNA, 808 bp, Homo sapiens
taacaggagaaagctagaggtgaactagtagagagagacttgctaggaggccttagcaataatccagtaatctaaaggaaagatgatggtgacttagactcgggtggttagtggtagaggtggtgagaagacatcagatcctgggcacattcttttcttctgcttcccttgcctatttgctgaccacactccggctcctatgtcaccttgatgacttcctatccattctgtcttcctaggaacgtctggtcctaaccagtgagcactggttagtactggtccccttctgggcaacatggccctaccagacactgctgctgccccgtcggcatgtgcggcggctacctgagctgacccctgctgagcgtgatgatctagcctccatcatgaagaagctcttgaccaagtatgacaacctctttgagacgtcctttccctactccatgggctggcatggggctcccacaggatcagaggctggggccaactggaaccattgggcagctgcacgctcattactaccctccgctcctgcgctctgccactgtccggaaattcatggttggctacgaaatgcttgctcaggctcagagggacctcacccctgagcaggctgcagagagactaagggcacttcctgaggttcattaccacctggggcagaaggacagggagacagcaaccatcgcctgaccacgccgaccacagggccttgaatccttttttgttttcaacagtcttgctgaattaagcagaaagggccttgaatcctggcctggaatttgggcagatatagcattaataaaac

SEQ ID NO: 6349 - DNA, 164 bp, Homo sapiens
taggtccttcccttgatttctgaatttaattataatacgtttcatttcaacaaatgtttaaaaattattctaacagtgtgggaaaacgtattctttactctcatacaaggaaaaatgatttactaggatctttactgggtacaaatgctaatagcttggtagta

SEQ ID NO: 6350 - DNA, 942 bp, Homo sapiens
aagcttggcacgaggacgcggaggagcgcagcgccagccgcacgaagcagcgggcccgggagtgggccaagagcatgacttcggtgctggaacctgtgttggacctcacgtacccagtcacctccatgttcactgggtctgcctttaaccgcagcatccatcgggtcttccaggataagcagattgaggacctgtggctgccttacttcaacgtgaccacagatatcaccgcctcagccatgcgagtccacaaagatggctccctgtggcggtacgtgcgcgccagcatgacgctgtcgggctacctgcccccgctgtgcgaccccaaggacgggcacctactcatggatggcggctacatcaacaatctgccagcggacatcgcccgcagcatgggtgccaaaacggtcatcgccattgacgtggggagccaggatgagacggacctcagcacctacggggacagcctgtccggctggtggctgctgtggaagcggctgaatccctgggctgacaaggtaaaggttccagacatggctgaaatccagtcccgcctggcctacgtgtcctgtgtgcggcagctagaggttgtcaagtccagctcctactgcgagtacctgcgcccgcccatcgactgcttcaagaccatggactttgggaagttcgaccagatctatgatgtgggctaccagtacgggaaggcggtgtttggaggctggagccgtggcaacgtcattgagaaaatgctcacagaccggcggtctacagaccttaatgagagccgccgtgcagacgtgcttgccttcccaagctctggcttcactgacttggcagagattgtgtcccggattgagccccccacgagctatgtctctgatggctgtgctgacggagaggagtcagattgtctgacagagtatgaggaggacgccggacccgact

SEQ ID NO: 6351 - DNA, 864 bp, Homo sapiens
accccccactgttttattaaatcagacagtttaaagtgtatgttctggtatttttaattttcttactgggtccattttacttaaaaaaaaatataaaacatttttaatgtatcttagaaaaattagcaaaaaattgagaaagttgagcatattacattgtacaatgttttcatacgaatgttttaaaatcataaatatttggtttcccctcaacatagcacatcacaaaaatacatttcaaaaacttttttcatatataattcctgtaaatgatcatatccctacttattaaggaaaacacctgatgacaagcactcaaacactcttgaaattttctgtacagtaattacaaaagtaaaaccaagagttctgttggccctttaacaggtgaaaccattttaaatagtatcaaaatataattccaaatgggatatacttagttcatttctgtgctatctttgattcacaagtatctatcttagccaaagcacttgtttaaaaggatattgcctcctagacatagtgccactgaaaaccaagatgtaaatcggtaacactatgcattaaacagaaaagcttttgcacaaccacatatgtaaccgccttagtcgtatcaaggtcccacatgtgaccagaaagcaggcagtccttaggtggatggccaggggccaggcagtgtgaggtctccaagaacccagggctagagcagctaagccccaggtcatgttatcagctacagctgtggaataagccaggtttaaagaaggacattctgcaaaagtgcaggacctatttcacaacttctagaagtagaaattcacatattccatcatgatcctccccaccatgcagagactatttgac

SEQ ID NO: 6352 - DNA, 403 bp, Homo sapiens
ttttttaaagtggtaaggacagattttaatcagtgataactatttcaatagggaaaagagtccagtgtgaacaaaattcaacttcgagttgtacagaagtgactgggcattttaaggataaaagaaggaattagggagaggggaaagtaggggctcagttaggaaagtgaaaaattcccaaaagtggtaaagtggagttggtccatgggaaaccatgtgggttttttgactggcgcttatccaagctaggttctcgccttcccacagagactaggagacaggggccttatcttcaggtgatgcctggaaaaaacgcagattcatttggcagtcttgagttttctcaggccagcactttaaggctagtgaagaacacctttgggatgtggggttgagctgttgg

SEQ ID NO: 6353 - DNA, 1302 bp, Homo sapiens
ttttttttttttttaagagaacctgaattaaatttttaatattttaaaaaaggaaagttgctgggaagctggtaaacagaaacagaagattagaggcctaactagaaagagacactggtgttagcagagagatattgaggggctgtaagcctaaggtttgaaatctaaagatagagtggaaaagggagtaggcacccccaccagcccctgcttgacatctgctttagttcattccagcaggaaggaggagaagggcagggaggtagggagcttctcagcaaagccagcttcagctttgataatctcacccacctaccccatttaaggagttccaggtttaagagtttaaaaacaggtggcacccagaccatcatttcaggagacaggaactcattccaggttcctagagaactcctatctcagacctgagggtttccagggcttcagctgagctcctctggctaaccagtagtcacttgatcagtcctgctgccttgaccccatctccaggaggggctatggccagagggagtagagggagtccagcccccaagccttgtgaggcactgttaggcagatagggaaaagaggggtccttagatcactggttcaaggagggatctggtaggggcagcatttcttctgggctggaaacagaatgggggtttcaagatggcagaaccattccattattggagctataagcccctagaattgctccatggcctatctcggtttcccttggatctcatctgctcctgaactgcacctgtcatggcaagtccatctccggcccccatctcccctgagccaatgtgagtcaggtgaacaaaattcattggttccccaatcatggtccggtcaatccgtcttctcttcttcttcggctggggtttctctaccacacagcagcccagtttgtgccaaaattcactcatgttccctgatggttccagcttcactcctctgtctgaggccccaaagggctctttccctggtgtttggacaacccactcctcactctccccagatacaccaccaccctgggttcactcagctggatgggtccagacaaagtggaatccctggaacctttaactgagcagtgaaggtcagtgtctcagagcctgagagatgaacaggaccagagagagaggtgggcaggcaggcacaaggttatgtcttcctcagactcggaaccctgctcttctccaccatccagacgttcagctacagctggtgggggtgagggactctgctccgtggccgccagtgtgggcttcccgggctagctctgcggcg

SEQ ID NO: 6354 - DNA, 447 bp, Homo sapiens
ttcggcacaggttgtataaaacaatatgtatatagttgcatcgtttggcctataacgtataaaatataatatatttgccgataacaggttgaagaagctgagtggaagcaaaactgtcttgtactaaagaactgactccagatggtaagacaaatccacaggaacaaatggagagaacgtgaaataggaaataagtttaatataaaaaaactataaacatatacttactcttctctcagcttcttttaaagatgtaaaattatattaagtaattataataatgtgtgttgggtttgtaatgtataggaataacatatataacaataataccacaaagcgggggatgggtttatataggaatagggtgttacattggaattaagtttagtgtttatctgaagcctattctgtttagttaagatgtgtatggtaagccctagagaaacc

SEQ ID NO: 6355 - DNA, 358 bp, Homo sapiens
ttcggcacagtgattgttcgtattttacaatagtatgataatttaagcttaaggaagataagagctttacaatcacctattagatcatttttgtttagatttcctttaaattgttatctacttagaaaaattattctaaagattatagttatagttcacaacataataaaagatacttttgccttccttataaaatgttattttcagggttaggaaattacctaaaaaaataagctttaatcatgatttatgttctgagactttggaagagggtctatattaatataaatatttagaagaaaaaaatgtatcatcttgaaaggccctgaatattttcatggtggtgtttcttttttac

SEQ ID NO: 6356 - DNA, 562 bp, Homo sapiens
  misc_feature (1)...(562): n = a,t,c or g
tgttcctctagttatttcctccagaattgatcaagacaattcatcatttgattctctatctccagagccaaaatcaagatttgctatgttagacgatgtaaaaattttagccaatggcctccttcagttggggacatggtcttaaagactttgtccataagacgaagggccaaattaatgacatatttcaaaaactcaacatatttgatcagtctttttatggatctatcgctggcaaaccagtgaaatcaaagaggaagaaanggaactgagaagaactacatataaactacaagtcaaaaatgaagaggtaaagaatatgtcacttgaactcaactcaaaacttgaaagcctcctagaagaaaaaattctacttcaacaaaaagtgaaatatttagaagagcaactaactaacttaattcaaaatcaacctgaaactccagaacacccagaagtaacttcacttaaaacttttgtagaaaaacaagataatagcatcaaagaccttctccagaccgtggaagaccaatataaacaattaaaccaacagcatagtcaaata

SEQ ID NO: 6357 - DNA, 352 bp, Homo sapiens
  misc_feature (1)...(352): n = a,t,c or g
ctgactgaagtccatcccggcgatgtttgacctaaggtactgttctaaagttctgtacgtgacagccatgctccattgcccacctgccatccttacagcaccaacttggaggccaccagccaacctgctcaccagcagcctctgggttccgcttcagggtgttgctccacgtcccagcaaaacagcttaaaaagcaaaaccgcagccaggagttgcatagatacctgaacacccgtgttcataggcagncatgagtcacggtgggccagaaggtnggaagcaaccctaattgcccattcagtgggatggaatgggatagtggttttgttatgatggggntatttatttcaga

SEQ ID NO: 6358 - DNA, 578 bp, Homo sapiens
tgactcattagaagtgttaatcgatttttaccacgctgaaatgaaggtataaagtcagtctgtgctgtcgtgaaattccaaggagatttggaagtaagatcattatttactggtcctttagaatagaccaaaaaaaaaaaaaaaaaaaaaaagacttaaaaaacgagggctgtcccctgaagactctggcaggaccctgggctgctctgggggacacaggccaggggcagtttcaccgacttgattcacagtgattctggtttgcctgtttccccatgtggccacgagtcggggacgtgtccagcagtgggcatgcctacaccttgtagttaagctcagcgttcatctgggtgtacatcccgtagatgacatcgatggtcgccgtgaagttgactaggaagaggcggatcttctccaggcactcctcctccgtaacattctgccccttggagagcgctttcaggaagtcagacttatagggtgctgcgtacagtgctgcctggaagatcttctgcacgatccagccatgggtacttcttgaggggcatctcgtagggcttggtggcgttgaaccggat

SEQ ID NO: 6359 - DNA, 393 bp, Homo sapiens
cacgaagggcacaaagagtggcacctttgtcatgtataattgtgcccgtcttgccacactctttgagagttacaagtgtagtatggaacaaggtctgtaccccacttttcctcctgtgagcagtctggacttctcactgctacatgatgagtatcctcccctttccggatctgctgagccggacagcagtgctggactgcacagccccggggctccacattgctgtacgcacagagatgatatgcaagttcctggtacagctcagcatggatttcagctcctactacaaccgggtacacatcctgggggagcctcgaccacacctctttggtcagatgttcgtccgcctgcagcttctgagagctgtgcgtgaggtgctccatactggcctgg

SEQ ID NO: 6360 - DNA, 1451 bp, Homo sapiens
  misc_feature (1)...(1451): n = a,t,c or g
tattccatggagaatgagcctggaattgtctcgccatttaaacgagtattcctaaaaggtgaaaagagtagagataagaaagcccatgagaaggtgacagagaggcgccctctgcacactgtggtgttgtcattgcctgagcgcgtcgagccagacagactgctgagcgactatattgagaaggaggtaaagtatttaggtcagttaacgtccataccaggatacctgaatccctccagtaggactgaaatcctgcatttcatagacaatgcaaagagagcccaccagcttccgggacacttgactcaggagcacgatgctgtgctcagcctgtctgcgtacaacgtcaagctggcctggagggacggggaggatatcatcctcagggtgcccatccatgacatcgccgccgtctcctatgttcgggatgacgctgcacacctggtggtcctgaagacagatgactcttctacaaaagtggacattaaggagacctacgaggtggaagccagcactttctgcttccctgaatctgtggatgtgggtggtgcatcaccccacagcaagaccatcagtgagagcgagctgagcgccagctcacgtgagctgctgcaggactacatgctgacgctgcgcaccaagctgtcatcacaggagatccagcagtttgcagcactgctgcacgagtaccgcaatggggcctctatccacgagttctgcatcaacctgcggcagctcttacggggacagccgcaagttcctgctgcttggtctgaggcccttcatccctgagaaggacagccagcacttcgagaacttcctggagaccattggcgtgaaggatggccgcggcatcatcactgacagctttggcaggcaccggcgggccctgagcaccacatccagttccaccaccaatgggaacagggccacgggcagctctgatgaccggtcggcaccctcagagggggatgagtgggaccgcatgatctcggacatcagcagcgacattgaggcncttgggctgcagcatggaccaggactcagcatgatggacagtggatgggggggcacccacaccttccgcgcagtcgtcataggccttcccagaaggagctgcccagacctgcgtgtcagcccttggtggtggccacgggagagggcccggtgcagactgccccgggcggcccaggtcctctactgtgaaggagcagggagctgccgagggacacgagcctcagtgcggggtggaaggctctttgccttgtccaccagggctcagccaagccctgcagtgtgctcccgctcggggaggcgccggccgagcgggcagggagagccagtcctgtcggctgggcccttggacggctgtcagttttgcacatgatgttcctattgtaactctcagagaccttaaaaagaagtttactgcaatgtgaataatttaaaaa

SEQ ID NO: 6361 - DNA, 424 bp, Homo sapiens
tcctgcctctgtccaatgtcttgaagctgtattataagaataattttgaaaagaaataaggatatgggaaatctacaaccagaacaactatctctgaatgatctaggctgactcttacaaattgtaactgcaggcagatattcaatttggtcaataaaccagcagtgtatattgagcaactaccatgtgatcagctttgtacagactgcggaccaaatgactgagatttttgggctaactgaaccagggaagaacagctttaggggaaaaatgggtgggattttattttaggatgtgggtatgtgttgagatgtattcagcagggcagttgggatattcagagggctggggaaaaactgggagcaagacagggaggtgttaattgaatttataaaggtgaatggaaatgttaccaaggaggagg

SEQ ID NO: 6362 - DNA, 217 bp, Homo sapiens
gcgcccagaaaactgtccagagacgttgaggttactgcttatttgcaacctgccccccgttgttcacttttccgcggcttagttggaaggtgtagcccctgtctgtagcccacgtgacttagaataaggggctgcgttagactccttagattttaagggcggtggaggtcgctgggtcctttccaggcagggtggtggtgggcatctgcgttgcgct

SEQ ID NO: 6363 - DNA, 346 bp, Homo sapiens
  misc_feature (1)...(346): n = a,t,c or g
gatatgagacagatatttgaagctactaaggactgactactctgttcactttcagagtgacttagtagaagaatattttgaagctcacagcagttcaaaagttttaacctctgatagaacactgcagaagctaaagagagctaaactggatcaggtatgttacaaggaatgttacttctaaattttttttactctgtcctgaaaaatatgctacgtaagcaacagatttgaaaagtatacacaagtagaattattgtcctgatcaaatgaaacacaagttaatgtgattattacttcttttattatataaataggaaataagccgggcacacccnggttattactt

SEQ ID NO: 6364 - DNA, 1196 bp, Homo sapiens
ttttagcacaacactcatcttttatttatttattatttttttttactaaggcacatgacgtagaaatattgaggtacaaaatgcaaatttctgcataagatttttaagatattcattttggaaaatgaaggtgaacatcatctcccagaatattcagcttttagcttgttttttcttttggaccagttcaaccagcaacttgtacctagcgatacagtcttccttgctcttggacgggacacatctggctattttgtcccagcggtcagaggatccccttgggtactgctgcaacgccagttccagaagtttctgttgattttgagtccacggctcctctgcagaccgagctctctcttttctcaggctctcctcgtcgctggactcgttttgttctgctatgtcaaagtccttctgccgcttggctctggacttctcctctggctccggctttgctgtagcctccagcagcctgggcttgttccgcctccgaggccgggcatcagtggccccggtctcctgctcaccggagtctccctcctgctcctcctccgctgccaccccctctgcgtcctctcgctgggtgatcatgtcatcgggcaaggtggtggccgttttgatgggcctggaattctgaactgtcgatttgagttcggagagtctaaccattcctggggagcaggtcactgaatccttcagttgcttggctttggttgtcacatctgtcacagatcgacccaattcgtgggcaatcttttcccatcgacctggagtccctcctgggaacttaaccatacttcttgtcagttggctgaggtcctcttctgtccattcaggtgcctgttttttctgtgttcggttcctgttttccaaccaatcatccatttgttcctcaatttcttctatggaagttccatgatcataagactgaatatatgtagtttctaaaggtgtgtatacaggaaattcaggttttggttttttaactttcttctgtttttgaagtgtttcaagttcagttctagtcagtgcatcttccttttccttcaatcttgtttctttatatttagcataaaactgcccagcatcctggatgaggtgaggtaatgcttttagtgtaaggcaaaaccaaatccccagtttgcatggaagcaaatcatgccactgtggtttcatcagcaatctttcattttttt

SEQ ID NO: 6365 - DNA, 208 bp, Homo sapiens
gttaagggttggcaattctgttgattttattttgaagaatcaacttttggtttcagtaatttcctctattctttttccattctccattttatttatatccaccctaatacttattatttccctcattcactgtgcttgggtttagtttgttcttctttcgtatcctgaagtattaaagtaggttgttgacctgaaaaaaaaaaaaaaa

SEQ ID NO: 6366 - DNA, 407 bp, Homo sapiens
aagaaagagcaacatgagcagccgatgcaagtggtccggaacgccagctgctgagcctcaggatacaagcagctgagcagcaagcagagaagcaagcaactgagcatcagagactacaaatagctaacttcagatggtgcggcttcagggaaagatcaccttcttcctgcaccatcccctttccagctccacatgctgcttgaggagccagtctttcaaacagtctgtgtgatctgattcttccttgcacactggaaaaaggaacttggggtgttcaaaaagggcaggtgcaggaggctgtcaccctgacccttcactgagctgttaacacttagccatccaaggactgcaggctgagtgaaacaaaccactccagttcctgccacccacgaagggggtaagggtga

SEQ ID NO: 6367 - DNA, 811 bp, Homo sapiens
  misc_feature (1)...(811): n = a,t,c or g
atatatatgtatgtgtatatataacatgttatatatgcatatatattaatgtatacatgcacacacattgtggaatgtctaaatcaaactatttaagatatgcattacctcacatacttatttttttgtggtgagaatactccaaatcttaacaattttaaagtactcaatatagtggtatgaattcatcattgaatcactatgatgtacaagagatgtcttgaatgtattccttctgtcctaatgaaattttgtgtcctttaaccaacatctccccaattcccagcctctagaaatctttaaagtgattttccaaggaaaagtattggtacgaatattgttggcatagtttgaattgttcatgcattcnnnnnnnnnnnnnnnnnnnnnnnnnnnnnnnnnnnnnnnnnnnnnnnnnnnnnnnnnnnnnnnnnnnnnnnnnnnnnnnnnnttgagaatgggtgctgaaaggagagcatcaaagtagctcatgcatgcggggcttaaaacctaggtgataagttgacaggtgcagcaaatctcnnnnnnnnnnnnnnnnnnnnnnnnnnnnnnnnnnnnnnnnnnnnnnnctgcccatgtatcccggaacttaaagtgaaaaaaaattgctcatgcattcaaaggtaatataattttattaaaaaaataactgagtatgataggttgcacctgtaattgcagctactcaggactcaggaagctaaggagggaggcttgcttgagtccaggagttcgaggatacagtacagtgagctataatcccaacaccctcagcaacagaatgaaacct

SEQ ID NO: 6368 - DNA, 247 bp, Homo sapiens
ttgatccagcatgttgggtcaaaatgatctagggaaaagtagcaggagtttaattcagagaggtcataggtaggagaaggagcaaatcattgtagtgccttattgcctgtgttaatgacttcgcattttatttggagacgggagttcttgggaggattttgagcagaggaatggcacgatccttcatttagtacatgttaagtgagcaggactctgtttatatatgtgatcacaaaaatataaaaga

SEQ ID NO: 6369 - DNA, 538 bp, Homo sapiens
  misc_feature (1)...(538): n = a,t,c or g
acagttatgacnnnnnnnnnnnnnnnnnnnnnnnnnnnnnnnnnnnnnnnnnnnnnnnnnnnnnnnnnnnnnnnnnnnnnnggcacgagcagaatttgttctcagtcccaaactgaaactataccattcaaacaacagcgctccccatttccccctcccccgagcccatgacatctcnnnnnnnnnnnnnnnnnnnnnnnnnnnnnnnnnnnnnnnnnnnnnnnnnnnnnnnnnnnnnnnnnnnnnnnnnnnnnnnnnnnnnnnnnnnnnnnnnnnnnnnnnnnnnnnnnnnnnnnnnnnnnnnnnnnnnnnnnnnnnnnnnnnnnnnnnnnnnnnnnnnnnnnnnnnnnnnnnnnnnnnnnnnnnnnnnnnnnnnnnnnnnnnnnnnnnnnnnnnnnnnnnnnnnnnnnnnnnnnnnnnnnnnnnnnnnnnnnnnnnnnnnnnnnnnnnnnnnnnnnnnnnnnnnnnnnnnnnnnnnnnnnnnnnaattttaaatttactttcaccattaagctggatccttttggcaggaattttt

SEQ ID NO: 6370 - DNA, 1606 bp, Homo sapiens
cgtcacactgctctcggccctcttacaccattttgtttgattgtctagtccctgtttctttttctttctaatccttattcatttaagcaaaaccatacattatcttttccagtcctttcttgtattcttactgtttttttaaaataactttttgccttaatagctcattgtcactaataacttctgtgttctcccaggcagtgttataacagaagggcaatgaaaacattggacatgaccatgagtgcttcctttccttaactctctaggtttgtagtctgttttaaattaggattagttcctgcattctgaaatacattggcctagaacattttatcccaggcatttttgaatagaaaacagttgcgtgcttttattgaagattgttaaaataatcaccatagtaacttgatatgttagtatttttctttttccttttagtatgtttcaagtgcagtaatcgtacttgtctatccagtttctatgtatgatacgagttgcttacacgatgcatggctaacttgttaatttagttttctccttagagactttgagacccttaagagacaagattgagaaagagccatgtggcttggctctagaaacgtcattatcattaggaccatcagattttagattaagctgctattgaattaataaaatcccaatgaagcagagttatagggatagatttatagctggcagagtggtatcaaaggagaaaaacagtgaaaaagccaatttcactggttcgttcaatccagcttgttgctaatattagttacccttgttttaatgacagagagtggctggaatctgtagctaggggaggggcaacactgttagatgtgaggaaaggaagtgccaaaaatgcctggacagatggcttgtcccaaggccaggacacacactttaaaatccaacattcacctaagcaagtaattcttaaagatcttacagaaacgcagagtcaatcaggtttataaaggaaggctgaggggagagaggaggcctgggggcctggacgaagaggcctaggacctgaagagactccagcgagtctcgggaagcccaggggacctgtcaccatctgggcacttcccaggctcaatgctcagccagagtttgctggtggacctcaggattcgaagtgtgcaacagacggagtgcgcttgctgttcagggcggccccgtgcaggagcaccagctcaccctcaggcatctcggactggagggccagcagaaggtcagcaacttactcttaaaacgattgtttcggatcatattgatctctttcctttttccttttgtcctttcactgtatgacttgaatcagttttgattctatttgtaagtgtttcttgtcgtgaggcacctgccatgtctgttgcgttttcctcggcagcgtgtagggcttcagcttcctgggttttcacccttcctgcaggcactgtggggtcctgagggccagtgggtccatttcacctcttgctgcatgatggtcagtagctgatctgttatggcattcacttccagattaattttccgtgtttgaagtatgtgcatatgtgctttacagaataaaacatctgaatttaaaaaaaaa

SEQ ID NO: 6371 - DNA, 1074 bp, Homo sapiens
tgtcaaaccgccctgtctgccgacatttcatgatgaagggcaactgcgcctatgagaacaactgtgccttctaccacccgggtgtcaatgggccccccctgccctagggaccatttgcctgccctgttcacacaacccctgtggactgcagcctcgctctttccaccctgttatggcttctgtgaggcccattttcccttttccccagctgatgaggagccggccccctcagttcccacttgcttgggttcctgggggttttctgatcactggtgcgcattgatgtacatattttcctccagtctggggaggagagagactggaaacgttcctgggactgctgaagaggagacccagttggcttcactttttgagaagattcgccctgtaaccccaaacccctttccagtattacccttaatgcttgagaacctaaagctggttatcctgggcgaacacccctacccttctattgcggggtccccacatgcacacagaactctgacacaggatcagctgcacttaagaaatcatcccagctaagttcattattcctcatggggtggggagatgctgaaaggggtattgtatatcccactgcactgagagggctcaatcagctggatttgagttctggaacacacatcatccccacccctcccccagcgtgggctcaccattcttagtcctttctcaagtgggaccttcaactttctgtgaacacccagtctgcgtcctgggtctgctaggttcgatgatggcgaactcgtatctgcatccggtgcaagttttagctggcagaggtgagaccggtggtgctggtctgcctttgccaactatagccagtctggagacttgataaaatacttcagtgagaccagcttctcatcaacttggggcccggcgtgctgggcctgaaagtcacactacatgcactgcctttgggagtcagctcactccctgctcccacctggaaccttgccagcgtgaaggaggcttccaggtacttcaccctgtcaaccacctctgaatccccaccaggcgccttcctgggtggattcaacaagatgattt

SEQ ID NO: 6372 - DNA, 548 bp, Homo sapiens
  misc_feature (1)...(548): n = a,t,c or g
gagcaaagtggcaatgcactccaattacaagaactgcctgaagttacatttagagactgaaatcactgcaccttaaaaacaaaagattgagctgcactgtattcctcataagcctacagggtacgaagaatgaactctgagaatgtttggagaatgtttcatcattactaacaggatattcctcatgacattgctgtctggttacatacagtgaattagacaaattaagtgtataccttgatgagtatacatgtgacaacacccaacccaaggtgcagaatatttataatacctaagaagaatcctttgtatgtgccccttgaaggtgaaattttccaaagttttaacaaaagatctttgaccatcagtctgtgacctgccccttctctttacatgcagccgctctctgctccctgccccaatgaacatctgcactaggcccaagccttggagtaatttacctgaagagtgacaccattgattttgaaactactgtaatgggatggtgttttacagacttctatgttctggaaaacgctancctggga

SEQ ID NO: 6373 - DNA, 348 bp, Homo sapiens
ctgtcccgaaccaaaaatgagtttccaaaacaactcatgaagaatattttcccaaatgctaatattagttagccttgagtagggaggagtatctgtttcttgaacattctttctttacgcttctctgtatttactaagtcttctataattaatgaacattatttacacaatggatgacaaaaaacgggaggacagagtgggccacgggaggatgacattcaagtcctgctcctgccctcattgcctgtgtgatcattgcccagccgctttgcttcgcttgctttcaggcctccctagttacggtaacaggttacataacaaggcagaggcaaagtgagtatttgctaa

SEQ ID NO: 6374 - DNA, 489 bp, Homo sapiens
ggcacgagcttggattcattgaaaatcaaaaccatttttgcatgttgctcaacaagttgctctaatattggatgtttgcagataatattcaaactggagaaattttcgattgttaaaggcagttgggattggaagagataagaaaacaaattcccaagtgcctcctatgataggaggcactgggtctgatgctttcattactattatcttttttcatcttacaacggggaaggaagattcaaatgcgcagtcttgcttcagagtcagtactcttaaccaatatgttgtaatacattcagctagtctgtgataggcagcatctaagatggtccctagtgatccccacctcctgatattcatacccttgtgtattatcttccccttataggctggacctagtgactcactttgaatgcatagaatatggaaaattaatgagatgcacttctaagatttggtacaaagagactggtggcttttatctggggc

SEQ ID NO: 6375 - DNA, 228 bp, Homo sapiens
  misc_feature (1)...(228): n = a,t,c or g
tttctgtaagagacacacagtggagaagagaaggccacgtgaaggctaaggcagggatgggcgtggtgctgccaccagcaggggaacgccaggaactggaagaggcaaagaaggaccctctgagggcgcagggtcctgctgacacctcaacttcagacttttgcctccagggctgtgagaggagacttttcaagccatccanttgtggcatttgctatgactgcctgg

SEQ ID NO: 6376 - DNA, 1968 bp, Homo sapiens
ggcttcagggatgctttattatccttttataatactcgttaatttgggctttggcaatttctgcagatgtacatttcatttcttccctgtaaatgaagaggcaacccatgaggttgttaaacaaattctattcagtagctggaaaagtgaatttcctgtggaatgacaggaattacatagaagcaagcaattttattttcctcaaatgtagcaataattttaatctgtacatacataaaacaaacagtgcaattataaaaccttgaaggtgacatgcatattttaaggtgcagttgggatgggggaggatgttagcatctccaattttccttactttttttttctagttccttatgcaaaagcactgagtcaggaaacttcatctggaatgctgaagttaaaggtgaacttcctgaagtctgcgcgtctaaatatcacaaacaaaatggaaatgaccttctagagcagtttggtagggactagagtaatatggctggctttcaagctggaaatgaatgaaatcagggatgcattttctgaaaaactaaaggagataatgtttgtaactgagtgtcctatttctgtttcatagttgctaaccacatgagcccttccaccaatctttttattcggcatagtttctgaatagatgctgttcaatggagttatttgtaactaggggtggtgagatgcagaaggaaggacctggggaaatggcttcttccttgaagtctgagtccatgctcctcttccactgttcttatggccttttctctgccatggaggcagaggtagctggtgcagaatgtcaggtgctgtcatcattcacaggcccagggatgcagacaaaggtgagtgatgggggtctacctttgcttcttccacaatacctttctcaagctttcctggccttgccagcggaacttctagaactagaaagtcagttcactgggttcttgactcagaggccaggatgagatgggatgtggcagagtcacaagacacaaagggaaaatatggtaccaattagcctcagagcaggatagagaaatttatatttgcactgatgaaaattcaaattcccaaagtcaatctaaaaaatgaagatttcctttgagtattaattttttctctgtacaagtagcctgtgccacttctgttcagatgatcccagggacactctagggcagtatgctctagatcagctggaacagctctttctggcagtgacattttgatttgaaccccaaagtaaatccatacatgacatcacagttattaaaataatgaaatattactaaccaaatgtaactgcaattcaatcaatgttatatttcacacacaaatttagaaaaatcaagagtataataaaagcataaaattaaacagaaggaaatcaatttctacaagaaatcaaatatatttacaatgagatttaaagggaaaaataagctacttggatcataaatttaattttattttaaataactttagctacctcagctgttaatacaataaaagcagaaaaaacaggctgccttttatttttccagatttaatcagaaaattgtatctacaataattgacacaactcacttcttgtccttcacccatctcatcaaaaattattgcattttcccccaaactgtattttttggattcctctgtgaatatactcatttcgtcctctttcctggaggcatcttggtttaaatccatctttaaaaaaaggagaaggggtacatatgtggaggcaaaatattctcttgaagccaacagatacagagttgctagagaagctgattgtacacacaagctgcctgggattgggatggggagggctgctgatttcgagacacatgacagcctttggtggacgggcacaggcaaagccccacgggcccttcttcctgggcagggttgggactaagcggcggaggcggagcttcatcttcttcttggaacttg

SEQ ID NO: 6377 - DNA, 99 bp, Homo sapiens
cctcatccactgcttcggggtcctggttgaaacggcagtacttggagttttcaagtgaaggcaggcattgctcaatgggtacccaaacatatgtctcag

SEQ ID NO: 6378 - DNA, 668 bp, Homo sapiens
ttttgcaagcagtggaattttattagacagttagaaatcacattagctccagctccagcagacgtaaacgcccaggctttctaacagcatatgagcaagaaaaagaatccttcggcgcatcctagaagaagggggtgtagtcacaccatctcacccccacacctctctctgagctccttggaatttgcatgtgttgtaaactttgtgcaattcccatgaatgtatttttttccattgatggggctgcagcatttgagagatgggagctgaagggatgcttgatggcagaataatggagtggtgaaacttcagctgtgcctcatttcaactctctccctttcacagaatgcagagttagggattttcacttcacccgacgaccctgagagatcgatgatcacatacactcttccttctggctccagatcaatccagtcctcgaagtggcggctcccgttctgcagcagctcctcaaactggaaggtgcagttggtccacgagtcgtcgtagctcatgggggcatcgtgaaagacagcaagctcgattctgcgtccgttgcacacatctgtgacgaactcgtcgtggcatgccgggctgttggtctgctgctggtcgccgtttgccgatgccgaatgtccacattgaggccaattagggtccagaggaaa

SEQ ID NO: 6379 - DNA, 577 bp, Homo sapiens
  misc_feature (1)...(577): n = a,t,c or g
gnnnnnannnngnttntnttntagnaanagtnatactctttnnnnnnnnnnnnnnnnnnnnnnnnnnnnnnnnnnnnnnnnnnnnnnnnnnnnnnnnnnnnnnnggcacgagggtctcttgaagacagcataccattggatcttgcttttttatccaagtcaccannnnnnnnnnnnnnnnnnnnnnnnnnnnnnnnnnnnnnnnnnnactcagtgacctttgaggatgtggctgtgaacttcacccaggaggagtgggctttgctgggtccttcccagaagaatctctacagagatgtgatgtgggaaaccttcaggaacctgatgtctgtagaagtcatatggtagagagagtctgaaggtaaggaagatggtcaatgtgaagagatcttcagccttgttccaaatggtatagtgaagacgacttttactggagtcaaatcatgtgaaagcagtgtgtgtgaagaaggcaatatggatcattcatctcttaattgctgcatcagagctgacactggacacaaatcagatgagtgtcagcaacatagaagccacataagcagtgtgtgaaaacctt

SEQ ID NO: 6380 - DNA, 434 bp, Homo sapiens
gtccccacccgggctcgcgtctccgtttctccgagaggcccaaggtgtcttcgccgcagcctctgtcgcgccgtgacctgtacaggtcgcgggagtcgtagggaggacgccgggacacctggaagccgagaaatggattcagtggcctttgaggatgtggctgtgaacttcacccaggaggagtgggctttgctgagtccttcccagaagaatctctacagagatgtgacgctggaaaccttcaggaacctggcttctgtaggaaaacaatgggaagaccagaacattgaagacccattcaaaattcccaggagaaatataagtcatattccagagagactctgtgaaagtaaagaaggtggtcaaggtgaagaaaccttcagccagattccagatggtattctgaacaagaaaacttcctggggtaaaaccgt

SEQ ID NO: 6381 - DNA, 1266 bp, Homo sapiens
  misc_feature (1)...(1266): n = a,t,c or g
ttttttttttttttcacaagtagctggttcacatctctttaatgagatcaaaggctcctgtgtatgtcctgcgggggtaaagctagcacagtcccccaatactgcccctctccagccctttcaggcagattctaggtaggcagggaggggccaaaggaacgcaaggagttgggactagggctgtttctggtgggcaagtaacccatccaccctctcaaaactacttatgggatgtccccttcactggaagacagccccatgggaaagatctgcggtacagactctgggggtagtgcacacggggagtagtcctccagatctggcagggtggcactaaccctcacctccttgactggctcaccctcaccggaggcaggacaagggcagagctcaataccggagtcgccagttaaacggcgatagcggcaggaggggggtgtggaggcaggggtcacccctgcctcccgggctcaccctcctgatgggggggggcactctggtgggaggaaacaccgttccacatttgttccttcaaagtgggcagggcagctggatgaggaggaacagcaggtttgttcactggaagcagtcaaggggcggcctggggccacagtataaggggggggtggtgtgcctgggcggtgaaccacatcctcgtaggctgggggcttgaaggtgctgaggaagcgaaggtcaagcagtgaaccggtagggaaaggaccagccccatggcatgcccccatgataggccaacaagttgatttcacgctgccgctgctgttgttgcagcctgagtttagctcgtcggtggcggaaggcgcaacagcagctaaagaggatgaggacagtccagagcagccagaaccaccagagctcatagtagtaggtgcagcagccagtctccccgcagcagtgaccactctcacagaggtagggctggttgttcactcctgggcacagctctcgaagctgcgggcaaggaggcacttagaactaagggggattccagcccagggcnctgtccacccccncctcctgcatgcacatacacaatcccaccctgtgaaccaagttcagcttggagagatgggggaagtggaggatgctgagaggagtgttgaaatatctgaagggctgtcaacgtggaagaggatttggaatagcaagaatcagtctagagancaagncaaaagtgtggacatacaaagagggagatttcagctctgcatatatgagacttccttcacactcaagcctcactctccc

SEQ ID NO: 6382 - DNA, 1023 bp, Homo sapiens
gtatggtctctgcggtctttagcaagagagcacacaaaacagcatgacttaacttttggtattatgagtagatgagaaattactatgaagataaaagttgaaactatataagcatgaaaagtaaaatttacatgaggaggaaaaaattccttaagttgtatgcacatggttaacgctgacttcacagtgtcttaacaatttgccaaaattataaacttgatgtaatccaagactgaagacagttaataaactgttttgaagaaacatgtacagaagtcttgtttgaataaaaaatacatattagtcacatataatcaaacaactgaaaatgaactgaggcattacattgagctacgaataacaggaaacacttgaaatttcctgatagaggaaagtgctcattctcacatcaaagtcctgggtgaggccagtcactgcacactacagcagaagaacaagctcccctctggttggttttgacagcagcatggtagctatcaggctgaatcaagaatacagtcactactagtatgaacaaaggtgcttactacacaaattagaccgtatgccaattccgtctacagactaggggagtcagagcatccacagaatattcccaaccaggacagtctgaattaagttgccctagtacagacataataatgtctgaaggaaaaccaaagtgtggatggatattcaatgcagggccttctggagacctgtgtggaagcctatcacctcccgagaaaattaaagtcaagtcgttttgaggatactcttgattggcaacccaaagaagcaggaaaatgggatggaagcaagtgtccatacagcctgtattcacacagctgtctccctgtatggtgcttccaaaccatgactaatgccttcttaacttacttccgaatctcatgtaagataggttactggtgaattgtatcatggaatcacaaatggaatggattctgggaaatctagttcctaacctaccaacactgacataacacaatccagagatccaac

SEQ ID NO: 6383 - DNA, 43 bp, Homo sapiens
gaaataaaacatgcatactaaccatgcatacacacacatctac

SEQ ID NO: 6384 - DNA, 185 bp, Homo sapiens
gtcacatttggtcatcttggctaagccatcaacttgatacaatatgatgataacttcaacctgaaaagtaaagaagagaagctggagacagaaattaaacctattccgagcaacattgataagagcctgtatgagacagaataccaaagcgagcctgtagaagatgaaaaaccttaaacaagcat

SEQ ID NO: 6385 - DNA, 553 bp, Homo sapiens
ataaagagtgactctcctatgaaggtaaaggccacccctcttcagttccagtgactgagatacatttttccaatcctgggggcaaatacagacacagcaagttccttcttccctttggaaatttggcagctgccttcaccagtgagcacaaagccacatttcaaaggaaactgacaaattatccccagctgccagaagaagaaatcctcactggacggcttcctgtttcctgtggttcattatctgattggctgcagggatgaaagtttttaagttcataggactgatgatcctcctcacctctgcgttttcagccggttcaggacaaagtccaatgactgtgctgtgctccatagactggttcatggtcacagttgcacccctttcatggttaaacaacgatgttgttgtgtacacttttcatgaactacacttgggcctggggttgccccccaaaccatgtttcagccacacgcctaccagtttcacctaccgtgttactgaatgtgggcttcaggggccaaagctgttttttcaggacatggttatttaa

SEQ ID NO: 6386 - DNA, 420 bp, Homo sapiens
aatacaggcgcctgcacagcctggcccacctgttcattaatgcactcaatttagtactgaatggtctttctcccagcccattcccagcccttcctatttcctttcctattttttttttctccccacactttcttgggactcccaccttggaaggaggaagggctgacctgggttctctccagcccccaggtgcgccgggtcacccgtgccccttcattatggacctgggccctaccggaacccctgccccagttaccacaactcaggccggctggcccgggccatgggcttgcgcaaatcaccagcccccaacccagggaggaactgggcccctcctagggagcctcttcgacttttttagaaaaatgatctccatttctttccagccatgatgtttagtaaatatttttagtaccgcaa

SEQ ID NO: 6387 - DNA, 348 bp, Homo sapiens
acccctactgaatggatctgctggcacctagacctcagagaagggggaactgaagactgaagtctgaccactgttctttgttgaaaatttctttctcaggggcttggagggatcacatctacaatcctgagctaatattctcttctgctgtccccaaaatttaaacgaagcttctcttaacccattgcaaatgagaaaaatctttgaatctacctatgactataagcccttatttcaagatatcctgcctttttaggccagaaccaaagtgtaacctccatctattgatttacaattttgcctgtaactttggctttcctgaaatttaccccagccttaaaaaaaaaa

SEQ ID NO: 6388 - DNA, 421 bp, Homo sapiens
atagatgtatgcatatacatatatagtattgttttaaaacataaaaggtatattgtaggcttctttttgctgttcctgaaatagctcatgaaaaataaaagaaaatataaaatatcgtagacttcttttggcaacttgcatttttttactcaatgcatttttgaaaatgaggcatgttgacggacatttatttttactttacctttgaataatattccattatatgtatacactgaattttatttaagtactctatgtatggacattgtttccattttatactattataaataatattcaattatccccatacatgtcccttggcatacatctctgaaaatccccctttagtttatgtaactaaagcatatgttcattttcaactttaatagatattgccaatagctctccaaagtggaaa

SEQ ID NO: 6389 - DNA, 493 bp, Homo sapiens
gacatgaatggtgagagagtggtggaaggagatgtctttgagagagggaagcagggagggatggcggaggagctggggcttgggggcaacatggaggatgtgactgagaaggtgaccccaccctctgttctgggagttgaaggggagggatggctttaggggaaagctggccttcaaatgtacaaggatggataaaaaggcagacttgcagggaaaggctaaggaggaaggagactgtttacagagtagctggagggctggcgggcttgggtggaggagctgaaacagtaatggggatacaggaaggagactgccccgagagaccgtttccactaatagaaggcattggagggcagggacgggaaaagggcaagtacccaagttctaggccaaagctctaagtgtttgtgaaactggaacagcaaaagctacttcttaaaaacctttaaggattttgtggggtatcttaggtgaagcgtataataatttaccg
